United States Patent Application Publication US 2007/0214517 A1 - sequence listing, part 66

SEQ ID NO: 86262 - DNA, 935 bp, Arabidopsis thaliana
  misc_feature (1)..(935): Ceres Seq. ID no. 12688437
  misc_feature: MA Experiment ID: 108461 Result: Down-regulated in Transcription
  misc_feature: MA Experiment 108461 PARAMETER Experiment Name: At_Germinating_Seeds_cDNA_P Parameter: Age (day) Value: 1 vs. 0
  misc_feature: MA Experiment 108461 PARAMETER Experiment Name: At_Germinating_Seeds_cDNA_P Parameter: Tissue Value: Germinating Seeds
  misc_feature: MA Experiment ID: 108463 Result: Down-regulated in Transcription
  misc_feature: MA Experiment 108463 PARAMETER Experiment Name: At_Germinating_Seeds_cDNA_P Parameter: Age (day) Value: 3 vs. 0
  misc_feature: MA Experiment 108463 PARAMETER Experiment Name: At_Germinating_Seeds_cDNA_P Parameter: Tissue Value: Germinating Seeds
  misc_feature: MA Experiment ID: 108464 Result: Down-regulated in Transcription
  misc_feature: MA Experiment 108464 PARAMETER Experiment Name: At_Germinating_Seeds_cDNA_P Parameter: Age (day) Value: 4 vs. 0
  misc_feature: MA Experiment 108464 PARAMETER Experiment Name: At_Germinating_Seeds_cDNA_P Parameter: Tissue Value: Germinating Seeds
  misc_feature: MA Experiment ID: 108469 Result: Down-regulated in Transcription
  misc_feature: MA Experiment ID: 108488 Result: Down-regulated in Transcription
  misc_feature: MA Experiment ID: 108501 Result: Up-regulated in Transcription
  misc_feature: MA Experiment 108501 PARAMETER Experiment Name: At_ap2_floral_buds_cDNA_P Parameter: Plant Line Value: ap2 (Ler.)
  misc_feature: MA Experiment 108501 PARAMETER Experiment Name: At_ap2_floral_buds_cDNA_P Parameter: Tissue Value: Closed Flower
  misc_feature: MA Experiment ID: 108561 Result: Up-regulated in Transcription
  misc_feature: MA Experiment 108561 PARAMETER Experiment Name: At_100uM_ABA_cDNA_P Parameter: Timepoint (hr) Value: 6
  misc_feature: MA Experiment 108561 PARAMETER Experiment Name: At_100uM_ABA_cDNA_P Parameter: Tissue Value: Aerial
  misc_feature: MA Experiment 108561 PARAMETER Experiment Name: At_100uM_ABA_cDNA_P Parameter: Treatment Value: 100uM ABA vs. No Treatment
  misc_feature: MA Experiment ID: 108573 Result: Up-regulated in Transcription
  misc_feature: MA Experiment 108573 PARAMETER Experiment Name: At_Drought_cDNA_P Parameter: Timepoint (hr) Value: 6
  misc_feature: MA Experiment 108573 PARAMETER Experiment Name: At_Drought_cDNA_P Parameter: Tissue Value: Aerial
  misc_feature: MA Experiment 108573 PARAMETER Experiment Name: At_Drought_cDNA_P Parameter: Treatment Value: Drought vs. No Drought
  misc_feature: MA Experiment ID: 108595 Result: Up-regulated in Transcription
  misc_feature: MA Experiment 108595 PARAMETER Experiment Name: At_Ler-pi_Ovule_cDNA_P Parameter: Plant Line Value: null
  misc_feature: MA Experiment ID: 108605 Result: Up-regulated in Transcription
  misc_feature: MA Experiment 108605 PARAMETER Experiment Name: At_100uM_ABA_cDNA_P Parameter: Timepoint (hr) Value: 6
  misc_feature: MA Experiment 108605 PARAMETER Experiment Name: At_100uM_ABA_cDNA_P Parameter: Tissue Value: Aerial
  misc_feature: MA Experiment 108605 PARAMETER Experiment Name: At_100uM_ABA_cDNA_P Parameter: Treatment Value: 100uM ABA vs. No Treatment
  misc_feature: MA Experiment ID: 108607 Result: Up-regulated in Transcription
  misc_feature: MA Experiment 108607 PARAMETER Experiment Name: At_100uM_ABA_cDNA_P Parameter: Timepoint (hr) Value: 4
  misc_feature: MA Experiment 108607 PARAMETER Experiment Name: At_100uM_ABA_cDNA_P Parameter: Tissue Value: Aerial
  misc_feature: MA Experiment 108607 PARAMETER Experiment Name: At_100uM_ABA_cDNA_P Parameter: Treatment Value: 100uM ABA vs. No Treatment
  misc_feature: MA Experiment ID: 20000070 Result: Up-regulated in Transcription
  misc_feature: MA Experiment 20000070 PARAMETER Experiment Name: At_100uM_ABA_Mutants_cDNA_P Parameter: Plant Line Value: CS24
  misc_feature: MA Experiment 20000070 PARAMETER Experiment Name: At_100uM_ABA_Mutants_cDNA_P Parameter: Timepoint (hr) Value: 6
  misc_feature: MA Experiment 20000070 PARAMETER Experiment Name: At_100uM_ABA_Mutants_cDNA_P Parameter: Tissue Value: Aerial
  misc_feature: MA Experiment 20000070 PARAMETER Experiment Name: At_100uM_ABA_Mutants_cDNA_P Parameter: Treatment Value: 100uM ABA vs. No Treatment
  misc_feature: MA Experiment ID: 20000071 Result: Up-regulated in Transcription
  misc_feature: MA Experiment 20000071 PARAMETER Experiment Name: At_100uM_ABA_Mutants_cDNA_P Parameter: Plant Line Value: CS8104
  misc_feature: MA Experiment 20000071 PARAMETER Experiment Name: At_100uM_ABA_Mutants_cDNA_P Parameter: Timepoint (hr) Value: 6
  misc_feature: MA Experiment 20000071 PARAMETER Experiment Name: At_100uM_ABA_Mutants_cDNA_P Parameter: Tissue Value: Aerial
  misc_feature: MA Experiment 20000071 PARAMETER Experiment Name: At_100uM_ABA_Mutants_cDNA_P Parameter: Treatment Value: 100uM ABA vs. No Treatment
  misc_feature: MA Experiment ID: 20000072 Result: Up-regulated in Transcription
  misc_feature: MA Experiment 20000072 PARAMETER Experiment Name: At_100uM_ABA_Mutants_cDNA_P Parameter: Plant Line Value: CS8105
  misc_feature: MA Experiment 20000072 PARAMETER Experiment Name: At_100uM_ABA_Mutants_cDNA_P Parameter: Timepoint (hr) Value: 6
  misc_feature: MA Experiment 20000072 PARAMETER Experiment Name: At_100uM_ABA_Mutants_cDNA_P Parameter: Tissue Value: Aerial
  misc_feature: MA Experiment 20000072 PARAMETER Experiment Name: At_100uM_ABA_Mutants_cDNA_P Parameter: Treatment Value: 100uM ABA vs. No Treatment
  misc_feature: MA Experiment ID: 20000086 Result: Up-regulated in Transcription
  misc_feature: MA Experiment 20000086 PARAMETER Experiment Name: At_100uM_ABA_Mutants_cDNA_P Parameter: Plant Line Value: CS22
  misc_feature: MA Experiment 20000086 PARAMETER Experiment Name: At_100uM_ABA_Mutants_cDNA_P Parameter: Timepoint (hr) Value: 6
  misc_feature: MA Experiment 20000086 PARAMETER Experiment Name: At_100uM_ABA_Mutants_cDNA_P Parameter: Tissue Value: Aerial
  misc_feature: MA Experiment 20000086 PARAMETER Experiment Name: At_100uM_ABA_Mutants_cDNA_P Parameter: Treatment Value: 100uM ABA vs. No Treatment
  misc_feature: MA Experiment ID: 20000087 Result: Up-regulated in Transcription
  misc_feature: MA Experiment 20000087 PARAMETER Experiment Name: At_100uM_ABA_Mutants_cDNA_P Parameter: Plant Line Value: WS
  misc_feature: MA Experiment 20000087 PARAMETER Experiment Name: At_100uM_ABA_Mutants_cDNA_P Parameter: Timepoint (hr) Value: 6
  misc_feature: MA Experiment 20000087 PARAMETER Experiment Name: At_100uM_ABA_Mutants_cDNA_P Parameter: Tissue Value: Aerial
  misc_feature: MA Experiment 20000087 PARAMETER Experiment Name: At_100uM_ABA_Mutants_cDNA_P Parameter: Treatment Value: 100uM ABA vs. No Treatment
  misc_feature: MA Experiment ID: 20000117 Result: Up-regulated in Transcription
  misc_feature: MA Experiment 20000117 PARAMETER Experiment Name: At_100uM_ABA_Mutants_cDNA_P Parameter: Plant Line Value: Columbia
  misc_feature: MA Experiment 20000117 PARAMETER Experiment Name: At_100uM_ABA_Mutants_cDNA_P Parameter: Timepoint (hr) Value: 6
  misc_feature: MA Experiment 20000117 PARAMETER Experiment Name: At_100uM_ABA_Mutants_cDNA_P Parameter: Tissue Value: Aerial
  misc_feature: MA Experiment 20000117 PARAMETER Experiment Name: At_100uM_ABA_Mutants_cDNA_P Parameter: Treatment Value: 100uM ABA vs. No Treatment
  misc_feature: MA Experiment ID: 20000182 Result: Down-regulated in Transcription
  misc_feature: MA Experiment 20000182 PARAMETER Experiment Name: At_2mM_SA_P Parameter: Age (day) Value: 14
  misc_feature: MA Experiment 20000182 PARAMETER Experiment Name: At_2mM_SA_P Parameter: Organism Value: A. thaliana
  misc_feature: MA Experiment 20000182 PARAMETER Experiment Name: At_2mM_SA_P Parameter: Plant Line Value: WS
  misc_feature: MA Experiment 20000182 PARAMETER Experiment Name: At_2mM_SA_P Parameter: Timepoint (hr) Value: 6
  misc_feature: MA Experiment 20000182 PARAMETER Experiment Name: At_2mM_SA_P Parameter: Tissue Value: Aerial
  misc_feature: MA Experiment 20000182 PARAMETER Experiment Name: At_2mM_SA_P Parameter: Treatment Value: 2mM SA vs. No Treatment
  misc_feature: MA Experiment ID: 20000184 Result: Down-regulated in Transcription
  misc_feature: MA Experiment 20000184 PARAMETER Experiment Name: At_Shoots__P Parameter: Age (day) Value: 7
  misc_feature: MA Experiment 20000184 PARAMETER Experiment Name: At_Shoots__P Parameter: Tissue Value: Shoots vs. Whole Plant
  misc_feature: MA Experiment ID: 20000234 Result: Up-regulated in Transcription
  misc_feature: MA Experiment 20000234 PARAMETER Experiment Name: At_Siliques_P Parameter: Age (day) Value: 21
  misc_feature: MA Experiment 20000234 PARAMETER Experiment Name: At_Siliques_P Parameter: Organism Value: A. thaliana
  misc_feature: MA Experiment 20000234 PARAMETER Experiment Name: At_Siliques_P Parameter: Plant Line Value: WS
  misc_feature: MA Experiment 20000234 PARAMETER Experiment Name: At_Siliques_P Parameter: Tissue Value: Less Than 5mm Siliques vs. Whole Plant
  misc_feature: MA Experiment ID: 20000235 Result: Up-regulated in Transcription
  misc_feature: MA Experiment 20000235 PARAMETER Experiment Name: At_Siliques_P Parameter: Age (day) Value: 21
  misc_feature: MA Experiment 20000235 PARAMETER Experiment Name: At_Siliques_P Parameter: Organism Value: A. thaliana
  misc_feature: MA Experiment 20000235 PARAMETER Experiment Name: At_Siliques_P Parameter: Plant Line Value: WS
  misc_feature: MA Experiment 20000235 PARAMETER Experiment Name: At_Siliques_P Parameter: Tissue Value: 5-10mm Siliques vs. Whole Plant
  misc_feature: MA Experiment ID: 20000264 Result: Up-regulated in Transcription
  misc_feature: MA Experiment 20000264 PARAMETER Experiment Name: At_Open_Flower_P Parameter: Age (day) Value: 21
  misc_feature: MA Experiment 20000264 PARAMETER Experiment Name: At_Open_Flower_P Parameter: Plant Line Value: WS
  misc_feature: MA Experiment 20000264 PARAMETER Experiment Name: At_Open_Flower_P Parameter: Tissue Value: Open Flower vs. Whole Plant
  misc_feature: MA Experiment ID: 20000267 Result: Up-regulated in Transcription
  misc_feature: MA Experiment 20000267 PARAMETER Experiment Name: At_Drought_P Parameter: Age (day) Value: 7
  misc_feature: MA Experiment 20000267 PARAMETER Experiment Name: At_Drought_P Parameter: Organism Value: A. thaliana
  misc_feature: MA Experiment 20000267 PARAMETER Experiment Name: At_Drought_P Parameter: Plant Line Value: WS
  misc_feature: MA Experiment 20000267 PARAMETER Experiment Name: At_Drought_P Parameter: Timepoint (hr) Value: 6
  misc_feature: MA Experiment 20000267 PARAMETER Experiment Name: At_Drought_P Parameter: Tissue Value: Whole Plant
  misc_feature: MA Experiment 20000267 PARAMETER Experiment Name: At_Drought_P Parameter: Treatment Value: Drought vs. No Drought
  misc_feature: MA Experiment ID: 20000268 Result: Up-regulated in Transcription
  misc_feature: MA Experiment 20000268 PARAMETER Experiment Name: At_100mM_NaCl__P Parameter: Age (day) Value: 14
  misc_feature: MA Experiment 20000268 PARAMETER Experiment Name: At_100mM_NaCl__P Parameter: Organism Value: A. thaliana
  misc_feature: MA Experiment 20000268 PARAMETER Experiment Name: At_100mM_NaCl__P Parameter: Plant Line Value: WS
  misc_feature: MA Experiment 20000268 PARAMETER Experiment Name: At_100mM_NaCl__P Parameter: Timepoint (hr) Value: 6
  misc_feature: MA Experiment 20000268 PARAMETER Experiment Name: At_100mM_NaCl__P Parameter: Tissue Value: Whole Plant
  misc_feature: MA Experiment 20000268 PARAMETER Experiment Name: At_100mM_NaCl__P Parameter: Treatment Value: 100mM NaCl vs. No Treatment
  misc_feature: MA Experiment ID: 20000308 Result: Up-regulated in Transcription
  misc_feature: MA Experiment 20000308 PARAMETER Experiment Name: At_100mM_NaCl__P Parameter: Age (day) Value: 17
  misc_feature: MA Experiment 20000308 PARAMETER Experiment Name: At_100mM_NaCl__P Parameter: Organism Value: A. thaliana
  misc_feature: MA Experiment 20000308 PARAMETER Experiment Name: At_100mM_NaCl__P Parameter: Plant Line Value: WS
  misc_feature: MA Experiment 20000308 PARAMETER Experiment Name: At_100mM_NaCl__P Parameter: Timepoint (hr) Value: 72
  misc_feature: MA Experiment 20000308 PARAMETER Experiment Name: At_100mM_NaCl__P Parameter: Tissue Value: Whole Plant
  misc_feature: MA Experiment 20000308 PARAMETER Experiment Name: At_100mM_NaCl__P Parameter: Treatment Value: 100mM NaCl vs. No Treatment
  misc_feature: MA Experiment ID: 20000436 Result: Up-regulated in Transcription
  misc_feature: MA Experiment 20000436 PARAMETER Experiment Name: At_Drought_P Parameter: Age (day) Value: 7
  misc_feature: MA Experiment 20000436 PARAMETER Experiment Name: At_Drought_P Parameter: Organism Value: A. thaliana
  misc_feature: MA Experiment 20000436 PARAMETER Experiment Name: At_Drought_P Parameter: Plant Line Value: WS
  misc_feature: MA Experiment 20000436 PARAMETER Experiment Name: At_Drought_P Parameter: Timepoint (hr) Value: 12
  misc_feature: MA Experiment 20000436 PARAMETER Experiment Name: At_Drought_P Parameter: Tissue Value: Whole Plant
  misc_feature: MA Experiment 20000436 PARAMETER Experiment Name: At_Drought_P Parameter: Treatment Value: Drought vs. No Drought
  misc_feature: MA Experiment ID: 20000437 Result: Up-regulated in Transcription
  misc_feature: MA Experiment 20000437 PARAMETER Experiment Name: At_Drought_P Parameter: Age (day) Value: 8
  misc_feature: MA Experiment 20000437 PARAMETER Experiment Name: At_Drought_P Parameter: Organism Value: A. thaliana
  misc_feature: MA Experiment 20000437 PARAMETER Experiment Name: At_Drought_P Parameter: Plant Line Value: WS
  misc_feature: MA Experiment 20000437 PARAMETER Experiment Name: At_Drought_P Parameter: Timepoint (hr) Value: 24
  misc_feature: MA Experiment 20000437 PARAMETER Experiment Name: At_Drought_P Parameter: Tissue Value: Whole Plant
  misc_feature: MA Experiment 20000437 PARAMETER Experiment Name: At_Drought_P Parameter: Treatment Value: Drought vs. No Drought
  misc_feature: MA Experiment ID: 20000438 Result: Down-regulated in Transcription
  misc_feature: MA Experiment 20000438 PARAMETER Experiment Name: At_Shoots__P Parameter: Age (day) Value: 14
  misc_feature: MA Experiment 20000438 PARAMETER Experiment Name: At_Shoots__P Parameter: Tissue Value: Shoots vs. Whole Plant
  misc_feature: MA Experiment ID: 20000441 Result: Up-regulated in Transcription
  misc_feature: MA Experiment 20000441 PARAMETER Experiment Name: At_1uM_BR-BRZ__P Parameter: Tissue Value: Shoot Apices
  misc_feature: MA Experiment 20000441 PARAMETER Experiment Name: At_1uM_BR-BRZ__P Parameter: Treatment Value: 1uM BR vs. No Treatment
  misc_feature: MA Experiment ID: 20000443 Result: Up-regulated in Transcription
  misc_feature: MA Experiment 20000443 PARAMETER Experiment Name: At_1uM_BR-BRZ__P Parameter: Tissue Value: Shoot Apices
  misc_feature: MA Experiment 20000443 PARAMETER Experiment Name: At_1uM_BR-BRZ__P Parameter: Treatment Value: 1uM BRZ vs. No Treatment
  misc_feature: MA Experiment ID: 20000453 Result: Up-regulated in Transcription
  misc_feature: MA Experiment 20000453 PARAMETER Experiment Name: At_100uM_ABA_P Parameter: Age (day) Value: 15
  misc_feature: MA Experiment 20000453 PARAMETER Experiment Name: At_100uM_ABA_P Parameter: Organism Value: A. thaliana
  misc_feature: MA Experiment 20000453 PARAMETER Experiment Name: At_100uM_ABA_P Parameter: Plant Line Value: WS
  misc_feature: MA Experiment 20000453 PARAMETER Experiment Name: At_100uM_ABA_P Parameter: Timepoint (hr) Value: 24
  misc_feature: MA Experiment 20000453 PARAMETER Experiment Name: At_100uM_ABA_P Parameter: Tissue Value: Aerial
  misc_feature: MA Experiment 20000453 PARAMETER Experiment Name: At_100uM_ABA_P Parameter: Treatment Value: 100uM ABA vs. No Treatment
  misc_feature: MA Experiment ID: 20000495 Result: Up-regulated in Transcription
  misc_feature: MA Experiment 20000495 PARAMETER Experiment Name: At_Guard_Cells_P Parameter: Harvest Date Value: 8/2/2002
  misc_feature: MA Experiment 20000495 PARAMETER Experiment Name: At_Guard_Cells_P Parameter: Organism Value: A. thaliana
  misc_feature: MA Experiment 20000495 PARAMETER Experiment Name: At_Guard_Cells_P Parameter: Tissue Value: Guard Cells vs. Leaves
  misc_feature: MA Experiment ID: 20000794 Result: Up-regulated in Transcription
  misc_feature: MA Experiment 20000794 PARAMETER Experiment Name: At_Petals_P Parameter: Age (day) Value: 23-25 days
  misc_feature: MA Experiment 20000794 PARAMETER Experiment Name: At_Petals_P Parameter: Plant Line Value: WS
  misc_feature: MA Experiment 20000794 PARAMETER Experiment Name: At_Petals_P Parameter: Tissue Value: Petals vs. Whole plant
  misc_feature: MA Experiment ID: 20001504 Result: Up-regulated in Transcription
  misc_feature: MA Experiment 20001504 PARAMETER Experiment Name: At_Far-red-enriched_P Parameter: Age (day) Value: 10
  misc_feature: MA Experiment 20001504 PARAMETER Experiment Name: At_Far-red-enriched_P Parameter: Light Value: Far-red enriched vs. White
  misc_feature: MA Experiment 20001504 PARAMETER Experiment Name: At_Far-red-enriched_P Parameter: Organism Value: A. thaliana
  misc_feature: MA Experiment 20001504 PARAMETER Experiment Name: At_Far-red-enriched_P Parameter: Plant Line Value: Columbia
  misc_feature: MA Experiment 20001504 PARAMETER Experiment Name: At_Far-red-enriched_P Parameter: Timepoint (day) Value: 6
  misc_feature: MA Experiment 20001504 PARAMETER Experiment Name: At_Far-red-enriched_P Parameter: Tissue Value: Whole Plant
  misc_feature: MA Experiment ID: 20001554 Result: Up-regulated in Transcription
  misc_feature: MA Experiment 20001554 PARAMETER Experiment Name: At_Drought_Soil_Dry_P Parameter: Age (day) Value: 21
  misc_feature: MA Experiment 20001554 PARAMETER Experiment Name: At_Drought_Soil_Dry_P Parameter: Organism Value: A. thaliana
  misc_feature: MA Experiment 20001554 PARAMETER Experiment Name: At_Drought_Soil_Dry_P Parameter: Plant Line Value: WS
  misc_feature: MA Experiment 20001554 PARAMETER Experiment Name: At_Drought_Soil_Dry_P Parameter: Post Timepoint (hr) Value: None
  misc_feature: MA Experiment 20001554 PARAMETER Experiment Name: At_Drought_Soil_Dry_P Parameter: Post-Treatment Value: None
  misc_feature: MA Experiment 20001554 PARAMETER Experiment Name: At_Drought_Soil_Dry_P Parameter: Timepoint (day) Value: 7
  misc_feature: MA Experiment 20001554 PARAMETER Experiment Name: At_Drought_Soil_Dry_P Parameter: Treatment Value: Drought vs. No Drought
  misc_feature: MA Experiment ID: 20001555 Result: Up-regulated in Transcription
  misc_feature: MA Experiment 20001555 PARAMETER Experiment Name: At_Drought_Soil_Dry_P Parameter: Age (day) Value: 24
  misc_feature: MA Experiment 20001555 PARAMETER Experiment Name: At_Drought_Soil_Dry_P Parameter: Organism Value: A. thaliana
  misc_feature: MA Experiment 20001555 PARAMETER Experiment Name: At_Drought_Soil_Dry_P Parameter: Plant Line Value: WS
  misc_feature: MA Experiment 20001555 PARAMETER Experiment Name: At_Drought_Soil_Dry_P Parameter: Post Timepoint (hr) Value: None
  misc_feature: MA Experiment 20001555 PARAMETER Experiment Name: At_Drought_Soil_Dry_P Parameter: Post-Treatment Value: None
  misc_feature: MA Experiment 20001555 PARAMETER Experiment Name: At_Drought_Soil_Dry_P Parameter: Timepoint (day) Value: 10
  misc_feature: MA Experiment 20001555 PARAMETER Experiment Name: At_Drought_Soil_Dry_P Parameter: Treatment Value: Drought vs. No Drought
  misc_feature: MA Experiment ID: 20001556 Result: Up-regulated in Transcription
  misc_feature: MA Experiment 20001556 PARAMETER Experiment Name: At_Drought_Soil_Dry_P Parameter: Age (day) Value: 26
  misc_feature: MA Experiment 20001556 PARAMETER Experiment Name: At_Drought_Soil_Dry_P Parameter: Organism Value: A. thaliana
  misc_feature: MA Experiment 20001556 PARAMETER Experiment Name: At_Drought_Soil_Dry_P Parameter: Plant Line Value: WS
  misc_feature: MA Experiment 20001556 PARAMETER Experiment Name: At_Drought_Soil_Dry_P Parameter: Post Timepoint (hr) Value: None
  misc_feature: MA Experiment 20001556 PARAMETER Experiment Name: At_Drought_Soil_Dry_P Parameter: Post-Treatment Value: None
  misc_feature: MA Experiment 20001556 PARAMETER Experiment Name: At_Drought_Soil_Dry_P Parameter: Timepoint (day) Value: 12
  misc_feature: MA Experiment 20001556 PARAMETER Experiment Name: At_Drought_Soil_Dry_P Parameter: Treatment Value: Drought vs. No Drought
  misc_feature: MA Experiment ID: 20001560 Result: Up-regulated in Transcription
  misc_feature: MA Experiment 20001560 PARAMETER Experiment Name: At_Drought_Soil_Dry_P Parameter: Age (day) Value: 28
  misc_feature: MA Experiment 20001560 PARAMETER Experiment Name: At_Drought_Soil_Dry_P Parameter: Organism Value: A. thaliana
  misc_feature: MA Experiment 20001560 PARAMETER Experiment Name: At_Drought_Soil_Dry_P Parameter: Plant Line Value: WS
  misc_feature: MA Experiment 20001560 PARAMETER Experiment Name: At_Drought_Soil_Dry_P Parameter: Post Timepoint (hr) Value: None
  misc_feature: MA Experiment 20001560 PARAMETER Experiment Name: At_Drought_Soil_Dry_P Parameter: Post-Treatment Value: None
  misc_feature: MA Experiment 20001560 PARAMETER Experiment Name: At_Drought_Soil_Dry_P Parameter: Timepoint (day) Value: 14
  misc_feature: MA Experiment 20001560 PARAMETER Experiment Name: At_Drought_Soil_Dry_P Parameter: Treatment Value: Drought vs. No Drought
  misc_feature: MA Experiment ID: 20001757 Result: Down-regulated in Transcription
  misc_feature: MA Experiment 20001757 PARAMETER Experiment Name: At_50mM_NH4NO3_L-to-H_P Parameter: Timepoint (hr) Value: 6
  misc_feature: MA Experiment 20001757 PARAMETER Experiment Name: At_50mM_NH4NO3_L-to-H_P Parameter: Tissue Value: Leaf
  misc_feature: MA Experiment 20001757 PARAMETER Experiment Name: At_50mM_NH4NO3_L-to-H_P Parameter: Treatment Value: 50mM NH4NO3 vs 100mM Mannitol
  misc_feature: MA Experiment ID: 20001770 Result: Up-regulated in Transcription
  misc_feature: MA Experiment 20001770 PARAMETER Experiment Name: At_Far-red-enriched-adult_P Parameter: Age (day) Value: 28
  misc_feature: MA Experiment 20001770 PARAMETER Experiment Name: At_Far-red-enriched-adult_P Parameter: Light Value: Far-red enriched vs. White
  misc_feature: MA Experiment 20001770 PARAMETER Experiment Name: At_Far-red-enriched-adult_P Parameter: Organism Value: A. thaliana
  misc_feature: MA Experiment 20001770 PARAMETER Experiment Name: At_Far-red-enriched-adult_P Parameter: Plant Line Value: Columbia
  misc_feature: MA Experiment 20001770 PARAMETER Experiment Name: At_Far-red-enriched-adult_P Parameter: Timepoint (hr) Value: 8
  misc_feature: MA Experiment 20001770 PARAMETER Experiment Name: At_Far-red-enriched-adult_P Parameter: Tissue Value: Aerial
  misc_feature: MA Experiment ID: 20001904 Result: Up-regulated in Transcription
  misc_feature: MA Experiment 20001904 PARAMETER Experiment Name: At_Drought_Reproduction_P Parameter: Age (day) Value: 37
  misc_feature: MA Experiment 20001904 PARAMETER Experiment Name: At_Drought_Reproduction_P Parameter: Organism Value: A. thaliana
  misc_feature: MA Experiment 20001904 PARAMETER Experiment Name: At_Drought_Reproduction_P Parameter: Plant Line Value: WS
  misc_feature: MA Experiment 20001904 PARAMETER Experiment Name: At_Drought_Reproduction_P Parameter: Timepoint (day) Value: 7
  misc_feature: MA Experiment 20001904 PARAMETER Experiment Name: At_Drought_Reproduction_P Parameter: Tissue Value: Rosettes
  misc_feature: MA Experiment 20001904 PARAMETER Experiment Name: At_Drought_Reproduction_P Parameter: Treatment Value: Drought vs. No Drought
  misc_feature: MA Experiment ID: 20001906 Result: Up-regulated in Transcription
  misc_feature: MA Experiment 20001906 PARAMETER Experiment Name: At_Drought_Reproduction_P Parameter: Age (day) Value: 35
  misc_feature: MA Experiment 20001906 PARAMETER Experiment Name: At_Drought_Reproduction_P Parameter: Organism Value: A. thaliana
  misc_feature: MA Experiment 20001906 PARAMETER Experiment Name: At_Drought_Reproduction_P Parameter: Plant Line Value: WS
  misc_feature: MA Experiment 20001906 PARAMETER Experiment Name: At_Drought_Reproduction_P Parameter: Timepoint (day) Value: 5
  misc_feature: MA Experiment 20001906 PARAMETER Experiment Name: At_Drought_Reproduction_P Parameter: Tissue Value: Siliques
  misc_feature: MA Experiment 20001906 PARAMETER Experiment Name: At_Drought_Reproduction_P Parameter: Treatment Value: Drought vs. No Drought
  misc_feature: MA Experiment ID: 20001908 Result: Up-regulated in Transcription
  misc_feature: MA Experiment 20001908 PARAMETER Experiment Name: At_Drought_Reproduction_P Parameter: Age (day) Value: 40
  misc_feature: MA Experiment 20001908 PARAMETER Experiment Name: At_Drought_Reproduction_P Parameter: Organism Value: A. thaliana
  misc_feature: MA Experiment 20001908 PARAMETER Experiment Name: At_Drought_Reproduction_P Parameter: Plant Line Value: WS
  misc_feature: MA Experiment 20001908 PARAMETER Experiment Name: At_Drought_Reproduction_P Parameter: Timepoint (day) Value: 10
  misc_feature: MA Experiment 20001908 PARAMETER Experiment Name: At_Drought_Reproduction_P Parameter: Tissue Value: Siliques
  misc_feature: MA Experiment 20001908 PARAMETER Experiment Name: At_Drought_Reproduction_P Parameter: Treatment Value: Drought vs. No Drought
  misc_feature: MA Experiment ID: 20001910 Result: Up-regulated in Transcription
  misc_feature: MA Experiment 20001910 PARAMETER Experiment Name: At_Drought_Reproduction_P Parameter: Age (day) Value: 37
  misc_feature: MA Experiment 20001910 PARAMETER Experiment Name: At_Drought_Reproduction_P Parameter: Organism Value: A. thaliana
  misc_feature: MA Experiment 20001910 PARAMETER Experiment Name: At_Drought_Reproduction_P Parameter: Plant Line Value: WS
  misc_feature: MA Experiment 20001910 PARAMETER Experiment Name: At_Drought_Reproduction_P Parameter: Timepoint (day) Value: 7
  misc_feature: MA Experiment 20001910 PARAMETER Experiment Name: At_Drought_Reproduction_P Parameter: Tissue Value: Flowers
  misc_feature: MA Experiment 20001910 PARAMETER Experiment Name: At_Drought_Reproduction_P Parameter: Treatment Value: Drought vs. No Drought
  misc_feature: MA Experiment ID: 20001911 Result: Up-regulated in Transcription
  misc_feature: MA Experiment 20001911 PARAMETER Experiment Name: At_Drought_Reproduction_P Parameter: Age (day) Value: 40
  misc_feature: MA Experiment 20001911 PARAMETER Experiment Name: At_Drought_Reproduction_P Parameter: Organism Value: A. thaliana
  misc_feature: MA Experiment 20001911 PARAMETER Experiment Name: At_Drought_Reproduction_P Parameter: Plant Line Value: WS
  misc_feature: MA Experiment 20001911 PARAMETER Experiment Name: At_Drought_Reproduction_P Parameter: Timepoint (day) Value: 10
  misc_feature: MA Experiment 20001911 PARAMETER Experiment Name: At_Drought_Reproduction_P Parameter: Tissue Value: Flowers
  misc_feature: MA Experiment 20001911 PARAMETER Experiment Name: At_Drought_Reproduction_P Parameter: Treatment Value: Drought vs. No Drought
ttacttcttcttttttctttcttgacgtgtctttttaaattttttgcaggatgtaattgaggagcttgggatatactttgtgttctacgatagagcaggatatggagaaagtgatccacacccatcacgcactgttaagagtgaagcatacgacattcaagaactcgccgataaactcaagatcggaccaaagttctatgttcttggtatatcactaggtgcttactcggtttatagttgcctcaaatacattccccacagactagctggagcagtcttaatggttccatttgtgaactattggtggactaaagtgcctcaagaaaaattgagtaaagcgttggagctaatgccaaagaaagaccaatggacgtttaaagtggctcattatgttccgtggttgttatattggtggttgacccaaaaactatttccgtcttcgagtatggtcacggggaacaatgcgttatgcagcgacaaagatttggtcgtcataaagaagaaaatggagaatccacgccctggcttggtgaaaaagttagacaacaaggagaccatgaatgtcttcaccgggacatgatagccggattcgcgacatgggaattcgacccgactgaattagaaaatccgtttgcggaaggcgaaggatcggtccacgtttggcaagggatggaagacagaatcattccatacgaaattaatcgatatatatcagagaagcttccatggattaagtaccatgaggtcttaggttatggacatcttctaaacgccgaggaggagaaatgcaaagacattatcaaggcacttcttgtcaactgatgatcatctctacacaagatgccacgaaaaatatagcatatttaatagattttatttatggattataatattatagcatattataagtttgtaagtaagatgaaaaccacttg

SEQ ID NO: 86263 - protein, 117 aa, Arabidopsis thaliana
  peptide (1)..(117): Ceres Seq. ID no. 12688438
  misc_feature (23)..(112): Pfam Name: alpha/beta hydrolase fold Pfam Description: alpha/beta hydrolase fold
  misc_feature (8)..(117): Homolog of NCBI NO: 15242253 NR Description: putative protein; protein id: At5g22460.1, by cDNA: gi_15292740, supported by cDNA: gi_20465594 [Arabidopsis
  misc_feature (19)..(113): Homolog of NCBI NO: 30678800 NR Description: esterase/lipase/thioesterase family [Arabidopsis
  misc_feature (18)..(115): Homolog of NCBI NO: 18410582 NR Description: expressed protein; protein id: At1g74300.1, by cDNA: 31039. [Arabidopsis thaliana] >gi|25406334|pir||E96771
  misc_feature (18)..(115): Homolog of NCBI NO: 21592662 NR Description: unknown [Arabidopsis thaliana]
  misc_feature (19)..(113): Homolog of NCBI NO: 6714434 NR Description: hypothetical protein [Arabidopsis thaliana]
  misc_feature (23)..(117): Homolog of NCBI NO: 18404095 NR Description: expressed protein; protein id: At2g36290.1, by cDNA: 5167. [Arabidopsis thaliana] >gi|25408458|pir||H84778
  misc_feature (23)..(117): Homolog of NCBI NO: 28416665 NR Description: At2g36290 [Arabidopsis thaliana]
  misc_feature (23)..(117): Homolog of NCBI NO: 21537089 NR Description: unknown [Arabidopsis thaliana]
  misc_feature (23)..(117): Homolog of NCBI NO: 18410575 NR Description: expressed protein; protein id: At1g74280.1, by cDNA: 119889. [Arabidopsis thaliana] >gi|25406331|pir||C96771
  misc_feature (19)..(113): Homolog of NCBI NO: 15228496 NR Description: hypothetical protein; protein id: At3g03230.1 thaliana] >gi|6714415|gb|AAF26103.1|AC012328_6 hypothetical
MQRQRFGRHKEENGESTPWLGEKVRQQGDHECLHRDMIAGFATWEFDPTELENPFAEGEGSVHVWQGMEDRIIPYEINRYISEKLPWIKYHEVLGYGHLLNAEEEKCKDIIKALLVN

SEQ ID NO: 86264 - protein, 99 aa, Arabidopsis thaliana
  peptide (1)..(99): Ceres Seq. ID no. 12688439
  misc_feature (1)..(94): Pfam Name: alpha/beta hydrolase fold Pfam Description: alpha/beta hydrolase fold
  misc_feature (1)..(85): Homolog of NCBI NO: 15242253 NR Description: putative protein; protein id: At5g22460.1, by cDNA: gi_15292740, supported by cDNA: gi_20465594 [Arabidopsis
  misc_feature (1)..(51): Homolog of NCBI NO: 30678800 NR Description: esterase/lipase/thioesterase family [Arabidopsis
  misc_feature (1)..(94): Homolog of NCBI NO: 18410582 NR Description: expressed protein; protein id: At1g74300.1, by cDNA: 31039. [Arabidopsis thaliana] >gi|25406334|pir||E96771
  misc_feature (1)..(94): Homolog of NCBI NO: 21592662 NR Description: unknown [Arabidopsis thaliana]
  misc_feature (1)..(51): Homolog of NCBI NO: 6714434 NR Description: hypothetical protein [Arabidopsis thaliana]
  misc_feature (1)..(94): Homolog of NCBI NO: 18404095 NR Description: expressed protein; protein id: At2g36290.1, by cDNA: 5167. [Arabidopsis thaliana] >gi|25408458|pir||H84778
  misc_feature (1)..(94): Homolog of NCBI NO: 28416665 NR Description: At2g36290 [Arabidopsis thaliana]
  misc_feature (1)..(81): Homolog of NCBI NO: 21537089 NR Description: unknown [Arabidopsis thaliana]
  misc_feature (1)..(81): Homolog of NCBI NO: 18410575 NR Description: expressed protein; protein id: At1g74280.1, by cDNA: 119889. [Arabidopsis thaliana] >gi|25406331|pir||C96771
  misc_feature (1)..(54): Homolog of NCBI NO: 15228496 NR Description: hypothetical protein; protein id: At3g03230.1 thaliana] >gi|6714415|gb|AAF26103.1|AC012328_6 hypothetical
MVPFVNYWWTKVPQEKLSKALELMPKKDQWTFKVAHYVPWLLYWWLTQKLFPSSSMVTGNNALCSDKDLVVIKKKMENPRPGLVKKLDNKETMNVFTGT

SEQ ID NO: 86265 - protein, 81 aa, Arabidopsis thaliana; identical to SEQ ID NO: 29393
  peptide (1)..(81): Ceres Seq. ID no. 12688440
  misc_feature (1)..(76): Pfam Name: alpha/beta hydrolase fold Pfam Description: alpha/beta hydrolase fold
  misc_feature (1)..(81): Homolog of NCBI NO: 15242253 NR Description: putative protein; protein id: At5g22460.1, by cDNA: gi_15292740, supported by cDNA: gi_20465594 [Arabidopsis
  misc_feature (1)..(77): Homolog of NCBI NO: 30678800 NR Description: esterase/lipase/thioesterase family [Arabidopsis
  misc_feature (1)..(79): Homolog of NCBI NO: 18410582 NR Description: expressed protein; protein id: At1g74300.1, by cDNA: 31039. [Arabidopsis thaliana] >gi|25406334|pir||E96771
  misc_feature (1)..(79): Homolog of NCBI NO: 21592662 NR Description: unknown [Arabidopsis thaliana]
  misc_feature (1)..(77): Homolog of NCBI NO: 6714434 NR Description: hypothetical protein [Arabidopsis thaliana]
  misc_feature (1)..(81): Homolog of NCBI NO: 18404095 NR Description: expressed protein; protein id: At2g36290.1, by cDNA: 5167. [Arabidopsis thaliana] >gi|25408458|pir||H84778
  misc_feature (1)..(81): Homolog of NCBI NO: 28416665 NR Description: At2g36290 [Arabidopsis thaliana]
  misc_feature (1)..(81): Homolog of NCBI NO: 21537089 NR Description: unknown [Arabidopsis thaliana]
  misc_feature (1)..(81): Homolog of NCBI NO: 18410575 NR Description: expressed protein; protein id: At1g74280.1, by cDNA: 119889. [Arabidopsis thaliana] >gi|25406331|pir||C96771
  misc_feature (1)..(77): Homolog of NCBI NO: 15228496 NR Description: hypothetical protein; protein id: At3g03230.1 thaliana] >gi|6714415|gb|AAF26103.1|AC012328_6 hypothetical

SEQ ID NO: 86266 - DNA, 1175 bp, Arabidopsis thaliana
  misc_feature (1)..(1175): Ceres Seq. ID no. 12688445
  misc_feature: MA Experiment ID: 108435 Result: Up-regulated in Transcription
  misc_feature: MA Experiment 108435 PARAMETER Experiment Name: At_stm_Mutants_cDNA_P Parameter: Plant Line Value: wt Landsburg vs stm
  misc_feature: MA Experiment 108435 PARAMETER Experiment Name: At_stm_Mutants_cDNA_P Parameter: Tissue Value: Shoot Apical Meristem Region
  misc_feature: MA Experiment ID: 108461 Result: Down-regulated in Transcription
  misc_feature: MA Experiment 108461 PARAMETER Experiment Name: At_Germinating_Seeds_cDNA_P Parameter: Age (day) Value: 1 vs. 0
  misc_feature: MA Experiment 108461 PARAMETER Experiment Name: At_Germinating_Seeds_cDNA_P Parameter: Tissue Value: Germinating Seeds
  misc_feature: MA Experiment ID: 108462 Result: Down-regulated in Transcription
  misc_feature: MA Experiment 108462 PARAMETER Experiment Name: At_Germinating_Seeds_cDNA_P Parameter: Age (day) Value: 2 vs. 0
  misc_feature: MA Experiment 108462 PARAMETER Experiment Name: At_Germinating_Seeds_cDNA_P Parameter: Tissue Value: Germinating Seeds
  misc_feature: MA Experiment ID: 108463 Result: Down-regulated in Transcription
  misc_feature: MA Experiment 108463 PARAMETER Experiment Name: At_Germinating_Seeds_cDNA_P Parameter: Age (day) Value: 3 vs. 0
  misc_feature: MA Experiment 108463 PARAMETER Experiment Name: At_Germinating_Seeds_cDNA_P Parameter: Tissue Value: Germinating Seeds
  misc_feature: MA Experiment ID: 108464 Result: Down-regulated in Transcription
  misc_feature: MA Experiment 108464 PARAMETER Experiment Name: At_Germinating_Seeds_cDNA_P Parameter: Age (day) Value: 4 vs. 0
  misc_feature: MA Experiment 108464 PARAMETER Experiment Name: At_Germinating_Seeds_cDNA_P Parameter: Tissue Value: Germinating Seeds
  misc_feature: MA Experiment ID: 20000111 Result: Down-regulated in Transcription
  misc_feature: MA Experiment 20000111 PARAMETER Experiment Name: At_42deg_Heat_cDNA_P Parameter: Temperature (deg C) Value: 42 vs. 22
  misc_feature: MA Experiment 20000111 PARAMETER Experiment Name: At_42deg_Heat_cDNA_P Parameter: Timepoint (hr) Value: 6
  misc_feature: MA Experiment 20000111 PARAMETER Experiment Name: At_42deg_Heat_cDNA_P Parameter: Tissue Value: Aerial
  misc_feature: MA Experiment ID: 20000112 Result: Down-regulated in Transcription
  misc_feature: MA Experiment 20000112 PARAMETER Experiment Name: At_42deg_Heat_cDNA_P Parameter: Temperature (deg C) Value: 42 vs. 22
  misc_feature: MA Experiment 20000112 PARAMETER Experiment Name: At_42deg_Heat_cDNA_P Parameter: Timepoint (hr) Value: 2
  misc_feature: MA Experiment 20000112 PARAMETER Experiment Name: At_42deg_Heat_cDNA_P Parameter: Tissue Value: Aerial
  misc_feature: MA Experiment ID: 20000113 Result: Down-regulated in Transcription
  misc_feature: MA Experiment 20000113 PARAMETER Experiment Name: At_42deg_Heat_cDNA_P Parameter: Temperature (deg C) Value: 42 vs. 22
  misc_feature: MA Experiment 20000113 PARAMETER Experiment Name: At_42deg_Heat_cDNA_P Parameter: Timepoint (hr) Value: 8
  misc_feature: MA Experiment 20000113 PARAMETER Experiment Name: At_42deg_Heat_cDNA_P Parameter: Tissue Value: Aerial
  misc_feature: MA Experiment ID: 20000144 Result: Down-regulated in Transcription
  misc_feature: MA Experiment 20000144 PARAMETER Experiment Name: At_42deg_Heat_cDNA_P Parameter: Temperature (deg C) Value: 42 vs. 22
  misc_feature: MA Experiment 20000144 PARAMETER Experiment Name: At_42deg_Heat_cDNA_P Parameter: Timepoint (hr) Value: 1
  misc_feature: MA Experiment 20000144 PARAMETER Experiment Name: At_42deg_Heat_cDNA_P Parameter: Tissue Value: Aerial
  misc_feature: MA Experiment ID: 20000179 Result: Down-regulated in Transcription
  misc_feature: MA Experiment 20000179 PARAMETER Experiment Name: At_Germinating_Seeds_P Parameter: Age (hr) Value: 6 vs. 0
  misc_feature: MA Experiment 20000179 PARAMETER Experiment Name: At_Germinating_Seeds_P Parameter: Tissue Value: Germinating Seeds
  misc_feature: MA Experiment ID: 20000180 Result: Down-regulated in Transcription
  misc_feature: MA Experiment 20000180 PARAMETER Experiment Name: At_Germinating_Seeds_P Parameter: Age (hr) Value: 24 vs. 0
  misc_feature: MA Experiment 20000180 PARAMETER Experiment Name: At_Germinating_Seeds_P Parameter: Tissue Value: Germinating Seeds
  misc_feature: MA Experiment ID: 20000227 Result: Down-regulated in Transcription
  misc_feature: MA Experiment 20000227 PARAMETER Experiment Name: At_Root-Tips-vs-Tops_P Parameter: Tissue Value: Root Tips vs. Root Tops
  misc_feature: MA Experiment ID: 20000234 Result: Up-regulated in Transcription
  misc_feature: MA Experiment 20000234 PARAMETER Experiment Name: At_Siliques_P Parameter: Age (day) Value: 21
  misc_feature: MA Experiment 20000234 PARAMETER Experiment Name: At_Siliques_P Parameter: Organism Value: A. thaliana
  misc_feature: MA Experiment 20000234 PARAMETER Experiment Name: At_Siliques_P Parameter: Plant Line Value: WS
  misc_feature: MA Experiment 20000234 PARAMETER Experiment Name: At_Siliques_P Parameter: Tissue Value: Less Than 5mm Siliques vs. Whole Plant
  misc_feature: MA Experiment ID: 20000235 Result: Up-regulated in Transcription
  misc_feature: MA Experiment 20000235 PARAMETER Experiment Name: At_Siliques_P Parameter: Age (day) Value: 21
  misc_feature: MA Experiment 20000235 PARAMETER Experiment Name: At_Siliques_P Parameter: Organism Value: A. thaliana
  misc_feature: MA Experiment 20000235 PARAMETER Experiment Name: At_Siliques_P Parameter: Plant Line Value: WS
  misc_feature: MA Experiment 20000235 PARAMETER Experiment Name: At_Siliques_P Parameter: Tissue Value: 5-10mm Siliques vs. Whole Plant
  misc_feature: MA Experiment ID: 20000264 Result: Up-regulated in Transcription
  misc_feature: MA Experiment 20000264 PARAMETER Experiment Name: At_Open_Flower_P Parameter: Age (day) Value: 21
  misc_feature: MA Experiment 20000264 PARAMETER Experiment Name: At_Open_Flower_P Parameter: Plant Line Value: WS
  misc_feature: MA Experiment 20000264 PARAMETER Experiment Name: At_Open_Flower_P Parameter: Tissue Value: Open Flower vs. Whole Plant
  misc_feature: MA Experiment ID: 20000265 Result: Up-regulated in Transcription
  misc_feature: MA Experiment 20000265 PARAMETER Experiment Name: At_Open_Flower_P Parameter: Age (day) Value: 21
  misc_feature: MA Experiment 20000265 PARAMETER Experiment Name: At_Open_Flower_P Parameter: Plant Line Value: WS
  misc_feature: MA Experiment 20000265 PARAMETER Experiment Name: At_Open_Flower_P Parameter: Tissue Value: Closed Flower vs. Whole Plant
  misc_feature: MA Experiment ID: 20000286 Result: Up-regulated in Transcription
  misc_feature: MA Experiment 20000286 PARAMETER Experiment Name: At_Open_Flower_P Parameter: Age (day) Value: 21
  misc_feature: MA Experiment 20000286 PARAMETER Experiment Name: At_Open_Flower_P Parameter: Plant Line Value: WS
  misc_feature: MA Experiment 20000286 PARAMETER Experiment Name: At_Open_Flower_P Parameter: Tissue Value: Half Open vs. Whole Plant
  misc_feature: MA Experiment ID: 20000439 Result: Up-regulated in Transcription
  misc_feature: MA Experiment 20000439 PARAMETER Experiment Name: At_Roots__P Parameter: Age (day) Value: 14 vs. 21
  misc_feature: MA Experiment 20000439 PARAMETER Experiment Name: At_Roots__P Parameter: Organism Value: A. thaliana
  misc_feature: MA Experiment 20000439 PARAMETER Experiment Name: At_Roots__P Parameter: Tissue Value: Roots vs. Whole Plant
  misc_feature: MA Experiment ID: 20000495 Result: Up-regulated in Transcription
  misc_feature: MA Experiment 20000495 PARAMETER Experiment Name: At_Guard_Cells_P Parameter: Harvest Date Value: 8/2/2002
  misc_feature: MA Experiment 20000495 PARAMETER Experiment Name: At_Guard_Cells_P Parameter: Organism Value: A. thaliana
  misc_feature: MA Experiment 20000495 PARAMETER Experiment Name: At_Guard_Cells_P Parameter: Tissue Value: Guard Cells vs. Leaves
  misc_feature: MA Experiment ID: 20001911 Result: Down-regulated in Transcription
  misc_feature: MA Experiment 20001911 PARAMETER Experiment Name: At_Drought_Reproduction_P Parameter: Age (day) Value: 40
  misc_feature: MA Experiment 20001911 PARAMETER Experiment Name: At_Drought_Reproduction_P Parameter: Organism Value: A. thaliana
  misc_feature: MA Experiment 20001911 PARAMETER Experiment Name: At_Drought_Reproduction_P Parameter: Plant Line Value: WS
  misc_feature: MA Experiment 20001911 PARAMETER Experiment Name: At_Drought_Reproduction_P Parameter: Timepoint (day) Value: 10
  misc_feature: MA Experiment 20001911 PARAMETER Experiment Name: At_Drought_Reproduction_P Parameter: Tissue Value: Flowers
  misc_feature: MA Experiment 20001911 PARAMETER Experiment Name: At_Drought_Reproduction_P Parameter: Treatment Value: Drought vs. No Drought
ggaaccgccggaatatggagaatagcggcgataaatgaagctggtgggtggaaagatcggaccaccgtggaagatatggatctcgccgtccgagcaagtcttcgcggctggaaatttctctacctcggtgaccttcaggtgaaaagtgagcttccaagtacttttagagccttccgttttcagcaacatagatggtcttgtggacctgcaaatctctttaggaaaatggttatggagatcgtaagaaacaagaaagtgagattctggaagaaagtgtacgtgatatacagcttcttctttgtgaggaaaatcattgcacattgggtcacattttgtttctactgcgttgttcttcctctcacaattctcgtcccggaggttaaagttccgatttggggttcggtttatatcccatccatcatcactatcctcaattccgtcggtactccaaggtcaattcatctgctgttctattggattctattcgagaatgtgatgtcgctgcaccggacaaaggccactctcattggtctgtttgaggcaggaagggctaacgagtgggtagtgactgctaagcttggaagcggtcagagcgctaaaggaaacactaaagggatcaaaaggttcccaagaatcttcaaattgcctgatcgattgaatacattggagcttggatttgcggctttcttgttcgtgtgcggatgctatgactttgtgcacgggaagaacaattacttcatctacctgtttcttcagacaatgtctttcttcatcagtgggctgggctggatcgggacttatgtcccgagttagtagttgtgttgtttcagagagaaaagagaatgttattaattttcttgagaaataaagacaattttcattgaaatgacaaaggaaaattgataggggagatagagacgtaccggtaacaacaagtaggaagaaaggagaagacttttatcaaagaccaggaaagaggagaagctccaagggttcttttgatttatttttaatttttctgtgttttatttatatagctatgggatttgtgattcagttgttgtgagattttaattttcgttctttgttttttattttggtttttgggtattttttcgttttgaaagtgttagtctttttgttttgtttttaaattaaattccaagtaaaaatta

SEQ ID NO: 86267 - protein, 270 aa, Arabidopsis thaliana
  peptide (1)..(270): Ceres Seq. ID no. 12688446
  misc_feature (1)..(270): Homolog of NCBI NO: 15242959 NR Description: glucosyltransferase-like protein; protein id: supported by cDNA: gi_16648763, supported by cDNA: gi_16648964, by cDNA: gi_20259889 [Arabidopsis thaliana]
  misc_feature (1)..(270): Homolog of NCBI NO: 34148025 NR Description: glycosyltransferase 10 [Ipomoea trifida]
  misc_feature (1)..(270): Homolog of NCBI NO: 34148023 NR Description: glycosyltransferase 5 [Ipomoea trifida]
  misc_feature (1)..(270): Homolog of NCBI NO: 34148021 NR Description: glycosyltransferase 1 [Ipomoea trifida]
  misc_feature (1)..(269): Homolog of NCBI NO: 5441877 NR Description: Similar to glycogenin glucosyltransferase (EC
  misc_feature (1)..(269): Homolog of NCBI NO: 34419204 NR Description: TPA: cellulose synthase-like A1 [Oryza sativa
  misc_feature (1)..(269): Homolog of NCBI NO: 16519223 NR Description: cellulose synthase-like protein OsCslA9 [Oryza
  misc_feature (1)..(270): Homolog of NCBI NO: 15237519 NR Description: putative protein; protein id: At5g03760.1, by cDNA: gi_16974551 [Arabidopsis thaliana]
  misc_feature (1)..(270): Homolog of NCBI NO: 30688411 NR Description: glycosyltransferase family 2 [Arabidopsis >gi|8778578|gb|AAF79586.1|AC007945_6 F28C11.11 [Arabidopsis >gi|20466606|gb|AAM20620.1| unknown protein [Arabidopsis
  misc_feature (1)..(270): Homolog of NCBI NO: 30688416 NR Description: glycosyltransferase family 2 [Arabidopsis
GTAGIWRIAAINEAGGWKDRTTVEDMDLAVRASLRGWKFLYLGDLQVKSELPSTFRAFRFQQHRWSCGPANLFRKMVMEIVRNKKVRFWKKVYVIYSFFFVRKIIAHWVTFCFYCVVLPLTILVPEVKVPIWGSVYIPSIITILNSVGTPRSIHLLFYWILFENVMSLHRTKATLIGLFEAGRANEWVVTAKLGSGQSAKGNTKGIKRFPRIFKLPDRLNTLELGFAAFLFVCGCYDFVHGKNNYFIYLFLQTMSFFISGLGWIGTYVPS

SEQ ID NO: 86268 - protein, 245 aa, Arabidopsis thaliana
  peptide (1)..(245): Ceres Seq. ID no. 12688447
  misc_feature (1)..(245): Homolog of NCBI NO: 15242959 NR Description: glucosyltransferase-like protein; protein id: supported by cDNA: gi_16648763, supported by cDNA: gi_16648964, by cDNA: gi_20259889 [Arabidopsis thaliana]
  misc_feature (1)..(245): Homolog of NCBI NO: 34148025 NR Description: glycosyltransferase 10 [Ipomoea trifida]
  misc_feature (1)..(245): Homolog of NCBI NO: 34148023 NR Description: glycosyltransferase 5 [Ipomoea trifida]
  misc_feature (1)..(245): Homolog of NCBI NO: 34148021 NR Description: glycosyltransferase 1 [Ipomoea trifida]
  misc_feature (1)..(244): Homolog of NCBI NO: 5441877 NR Description: Similar to glycogenin glucosyltransferase (EC
  misc_feature (1)..(244): Homolog of NCBI NO: 34419204 NR Description: TPA: cellulose synthase-like A1 [Oryza sativa
  misc_feature (1)..(244): Homolog of NCBI NO: 16519223 NR Description: cellulose synthase-like protein OsCslA9 [Oryza
  misc_feature (1)..(245): Homolog of NCBI NO: 15237519 NR Description: putative protein; protein id: At5g03760.1, by cDNA: gi_16974551 [Arabidopsis thaliana]
  misc_feature (1)..(245): Homolog of NCBI NO: 30688411 NR Description: glycosyltransferase family 2 [Arabidopsis >gi|8778578|gb|AAF79586.1|AC007945_6 F28C11.11 [Arabidopsis >gi|20466606|gb|AAM20620.1| unknown protein [Arabidopsis
  misc_feature (1)..(245): Homolog of NCBI NO: 30688416 NR Description: glycosyltransferase family 2 [Arabidopsis
MDLAVRASLRGWKFLYLGDLQVKSELPSTFRAFRFQQHRWSCGPANLFRKMVMEIVRNKKVRFWKKVYVIYSFFFVRKIIAHWVTFCFYCVVLPLTILVPEVKVPIWGSVYIPSIITILNSVGTPRSIHLLFYWILFENVMSLHRTKATLIGLFEAGRANEWVVTAKLGSGQSAKGNTKGIKRFPRIFKLPDRLNTLELGFAAFLFVCGCYDFVHGKNNYFIYLFLQTMSFFISGLGWIGTYVPS

SEQ ID NO: 86269 - protein, 195 aa, Arabidopsis thaliana
  peptide (1)..(195): Ceres Seq. ID no. 12688448
  misc_feature (1)..(195): Homolog of NCBI NO: 15242959 NR Description: glucosyltransferase-like protein; protein id: supported by cDNA: gi_16648763, supported by cDNA: gi_16648964, by cDNA: gi_20259889 [Arabidopsis thaliana]
  misc_feature (1)..(195): Homolog of NCBI NO: 34148025 NR Description: glycosyltransferase 10 [Ipomoea trifida]
  misc_feature (1)..(195): Homolog of NCBI NO: 34148023 NR Description: glycosyltransferase 5 [Ipomoea trifida]
  misc_feature (1)..(195): Homolog of NCBI NO: 34148021 NR Description: glycosyltransferase 1 [Ipomoea trifida]
  misc_feature (1)..(194): Homolog of NCBI NO: 5441877 NR Description: Similar to glycogenin glucosyltransferase (EC
  misc_feature (1)..(194): Homolog of NCBI NO: 34419204 NR Description: TPA: cellulose synthase-like A1 [Oryza sativa
  misc_feature (1)..(194): Homolog of NCBI NO: 16519223 NR Description: cellulose synthase-like protein OsCslA9 [Oryza
  misc_feature (1)..(195): Homolog of NCBI NO: 15237519 NR Description: putative protein; protein id: At5g03760.1, by cDNA: gi_16974551 [Arabidopsis thaliana]
  misc_feature (1)..(195): Homolog of NCBI NO: 30688411 NR Description: glycosyltransferase family 2 [Arabidopsis >gi|8778578|gb|AAF79586.1|AC007945_6 F28C11.11 [Arabidopsis >gi|20466606|gb|AAM20620.1| unknown protein [Arabidopsis
  misc_feature (1)..(195): Homolog of NCBI NO: 30688416 NR Description: glycosyltransferase family 2 [Arabidopsis
MVMEIVRNKKVRFWKKVYVIYSFFFVRKIIAHWVTFCFYCVVLPLTILVPEVKVPIWGSVYIPSIITILNSVGTPRSIHLLFYWILFENVMSLHRTKATLIGLFEAGRANEWVVTAKLGSGQSAKGNTKGIKRFPRIFKLPDRLNTLELGFAAFLFVCGCYDFVHGKNNYFIYLFLQTMSFFISGLGWIGTYVPS

SEQ ID NO: 86270 - DNA, 1232 bp, Arabidopsis thaliana
  misc_feature (1)..(1232): Ceres Seq. ID no. 12688449
  misc_feature: MA Experiment ID: 108434 Result: Down-regulated in Transcription
  misc_feature: MA Experiment 108434 PARAMETER Experiment Name: At_Root_Tips_cDNA_P Parameter: Tissue Value: Root Tips
  misc_feature: MA Experiment ID: 108435 Result: Up-regulated in Transcription
  misc_feature: MA Experiment 108435 PARAMETER Experiment Name: At_stm_Mutants_cDNA_P Parameter: Plant Line Value: wt Landsburg vs stm
  misc_feature: MA Experiment 108435 PARAMETER Experiment Name: At_stm_Mutants_cDNA_P Parameter: Tissue Value: Shoot Apical Meristem Region
  misc_feature: MA Experiment ID: 108461 Result: Down-regulated in Transcription
  misc_feature: MA Experiment 108461 PARAMETER Experiment Name: At_Germinating_Seeds_cDNA_P Parameter: Age (day) Value: 1 vs. 0
  misc_feature: MA Experiment 108461 PARAMETER Experiment Name: At_Germinating_Seeds_cDNA_P Parameter: Tissue Value: Germinating Seeds
  misc_feature: MA Experiment ID: 108464 Result: Down-regulated in Transcription
  misc_feature: MA Experiment 108464 PARAMETER Experiment Name: At_Germinating_Seeds_cDNA_P Parameter: Age (day) Value: 4 vs. 0
  misc_feature: MA Experiment 108464 PARAMETER Experiment Name: At_Germinating_Seeds_cDNA_P Parameter: Tissue Value: Germinating Seeds
  misc_feature: MA Experiment ID: 108469 Result: Down-regulated in Transcription
  misc_feature: MA Experiment ID: 108488 Result: Down-regulated in Transcription
  misc_feature: MA Experiment ID: 108501 Result: Up-regulated in Transcription
  misc_feature: MA Experiment 108501 PARAMETER Experiment Name: At_ap2_floral_buds_cDNA_P Parameter: Plant Line Value: ap2 (Ler.)
  misc_feature: MA Experiment 108501 PARAMETER Experiment Name: At_ap2_floral_buds_cDNA_P Parameter: Tissue Value: Closed Flower
  misc_feature: MA Experiment ID: 108561 Result: Up-regulated in Transcription
  misc_feature: MA Experiment 108561 PARAMETER Experiment Name: At_100uM_ABA_cDNA_P Parameter: Timepoint (hr) Value: 6
  misc_feature: MA Experiment 108561 PARAMETER Experiment Name: At_100uM_ABA_cDNA_P Parameter: Tissue Value: Aerial
  misc_feature: MA Experiment 108561 PARAMETER Experiment Name: At_100uM_ABA_cDNA_P Parameter: Treatment Value: 100uM ABA vs. No Treatment
  misc_feature: MA Experiment ID: 108573 Result: Up-regulated in Transcription
  misc_feature: MA Experiment 108573 PARAMETER Experiment Name: At_Drought_cDNA_P Parameter: Timepoint (hr) Value: 6
  misc_feature: MA Experiment 108573 PARAMETER Experiment Name: At_Drought_cDNA_P Parameter: Tissue Value: Aerial
  misc_feature: MA Experiment 108573 PARAMETER Experiment Name: At_Drought_cDNA_P Parameter: Treatment Value: Drought vs. No Drought
  misc_feature: MA Experiment ID: 108595 Result: Up-regulated in Transcription
  misc_feature: MA Experiment 108595 PARAMETER Experiment Name: At_Ler-pi_Ovule_cDNA_P Parameter: Plant Line Value: null
  misc_feature: MA Experiment ID: 108605 Result: Up-regulated in Transcription
  misc_feature: MA Experiment 108605 PARAMETER Experiment Name: At_100uM_ABA_cDNA_P Parameter: Timepoint (hr) Value: 6
  misc_feature: MA Experiment 108605 PARAMETER Experiment Name: At_100uM_ABA_cDNA_P Parameter: Tissue Value: Aerial
  misc_feature: MA Experiment 108605 PARAMETER Experiment Name: At_100uM_ABA_cDNA_P Parameter: Treatment Value: 100uM ABA vs. No Treatment
  misc_feature: MA Experiment ID: 108607 Result: Up-regulated in Transcription
  misc_feature: MA Experiment 108607 PARAMETER Experiment Name: At_100uM_ABA_cDNA_P Parameter: Timepoint (hr) Value: 4
  misc_feature: MA Experiment 108607 PARAMETER Experiment Name: At_100uM_ABA_cDNA_P Parameter: Tissue Value: Aerial
  misc_feature: MA Experiment 108607 PARAMETER Experiment Name: At_100uM_ABA_cDNA_P Parameter: Treatment Value: 100uM ABA vs. No Treatment
  misc_feature: MA Experiment ID: 108609 Result: Up-regulated in Transcription
  misc_feature: MA Experiment 108609 PARAMETER Experiment Name: At_100uM_ABA_cDNA_P Parameter: Timepoint (hr) Value: 24
  misc_feature: MA Experiment 108609 PARAMETER Experiment Name: At_100uM_ABA_cDNA_P Parameter: Tissue Value: Aerial
  misc_feature: MA Experiment 108609 PARAMETER Experiment Name: At_100uM_ABA_cDNA_P Parameter: Treatment Value: 100uM ABA vs. No Treatment
  misc_feature: MA Experiment ID: 108668 Result: Down-regulated in Transcription
  misc_feature: MA Experiment 108668 PARAMETER Experiment Name: At_2mM_SA_cDNA_P Parameter: Plant Line Value: WS
  misc_feature: MA Experiment 108668 PARAMETER Experiment Name: At_2mM_SA_cDNA_P Parameter: Timepoint (hr) Value: 6
  misc_feature: MA Experiment 108668 PARAMETER Experiment Name: At_2mM_SA_cDNA_P Parameter: Treatment Value: 2mM SA vs. No Treatment
  misc_feature: MA Experiment ID: 20000068 Result: Up-regulated in Transcription
  misc_feature: MA Experiment ID: 20000069 Result: Up-regulated in Transcription
  misc_feature: MA Experiment 20000069 PARAMETER Experiment Name: At_100uM_ABA_Mutants_cDNA_P Parameter: Plant Line Value: CS23
  misc_feature: MA Experiment 20000069 PARAMETER Experiment Name: At_100uM_ABA_Mutants_cDNA_P Parameter: Timepoint (hr) Value: 6
  misc_feature: MA Experiment 20000069 PARAMETER Experiment Name: At_100uM_ABA_Mutants_cDNA_P Parameter: Tissue Value: Aerial
  misc_feature: MA Experiment 20000069 PARAMETER Experiment Name: At_100uM_ABA_Mutants_cDNA_P Parameter: Treatment Value: 100uM ABA vs. No Treatment
  misc_feature: MA Experiment ID: 20000070 Result: Up-regulated in Transcription
  misc_feature: MA Experiment 20000070 PARAMETER Experiment Name: At_100uM_ABA_Mutants_cDNA_P Parameter: Plant Line Value: CS24
  misc_feature: MA Experiment 20000070 PARAMETER Experiment Name: At_100uM_ABA_Mutants_cDNA_P Parameter: Timepoint (hr) Value: 6
  misc_feature: MA Experiment 20000070 PARAMETER Experiment Name: At_100uM_ABA_Mutants_cDNA_P Parameter: Tissue Value: Aerial
  misc_feature: MA Experiment 20000070 PARAMETER Experiment Name: At_100uM_ABA_Mutants_cDNA_P Parameter: Treatment Value: 100uM ABA vs. No Treatment
  misc_feature: MA Experiment ID: 20000071 Result: Up-regulated in Transcription
  misc_feature: MA Experiment 20000071 PARAMETER Experiment Name: At_100uM_ABA_Mutants_cDNA_P Parameter: Plant Line Value: CS8104
  misc_feature: MA Experiment 20000071 PARAMETER Experiment Name: At_100uM_ABA_Mutants_cDNA_P Parameter: Timepoint (hr) Value: 6
  misc_feature: MA Experiment 20000071 PARAMETER Experiment Name: At_100uM_ABA_Mutants_cDNA_P Parameter: Tissue Value: Aerial
  misc_feature: MA Experiment 20000071 PARAMETER Experiment Name: At_100uM_ABA_Mutants_cDNA_P Parameter: Treatment Value: 100uM ABA vs. No Treatment
  misc_feature: MA Experiment ID: 20000072 Result: Up-regulated in Transcription
  misc_feature: MA Experiment 20000072 PARAMETER Experiment Name: At_100uM_ABA_Mutants_cDNA_P Parameter: Plant Line Value: CS8105
  misc_feature: MA Experiment 20000072 PARAMETER Experiment Name: At_100uM_ABA_Mutants_cDNA_P Parameter: Timepoint (hr) Value: 6
  misc_feature: MA Experiment 20000072 PARAMETER Experiment Name: At_100uM_ABA_Mutants_cDNA_P Parameter: Tissue Value: Aerial
  misc_feature: MA Experiment 20000072 PARAMETER Experiment Name: At_100uM_ABA_Mutants_cDNA_P Parameter: Treatment Value: 100uM ABA vs. No Treatment
  misc_feature: MA Experiment ID: 20000086 Result: Up-regulated in Transcription
  misc_feature: MA Experiment 20000086 PARAMETER Experiment Name: At_100uM_ABA_Mutants_cDNA_P Parameter: Plant Line Value: CS22
  misc_feature: MA Experiment 20000086 PARAMETER Experiment Name: At_100uM_ABA_Mutants_cDNA_P Parameter: Timepoint (hr) Value: 6
  misc_feature: MA Experiment 20000086 PARAMETER Experiment Name: At_100uM_ABA_Mutants_cDNA_P Parameter: Tissue Value: Aerial
  misc_feature: MA Experiment 20000086 PARAMETER Experiment Name: At_100uM_ABA_Mutants_cDNA_P Parameter: Treatment Value: 100uM ABA vs. No Treatment
  misc_feature: MA Experiment ID: 20000087 Result: Up-regulated in Transcription
  misc_feature: MA Experiment 20000087 PARAMETER Experiment Name: At_100uM_ABA_Mutants_cDNA_P Parameter: Plant Line Value: WS
  misc_feature: MA Experiment 20000087 PARAMETER Experiment Name: At_100uM_ABA_Mutants_cDNA_P Parameter: Timepoint (hr) Value: 6
  misc_feature: MA Experiment 20000087 PARAMETER Experiment Name: At_100uM_ABA_Mutants_cDNA_P Parameter: Tissue Value: Aerial
  misc_feature: MA Experiment 20000087 PARAMETER Experiment Name: At_100uM_ABA_Mutants_cDNA_P Parameter: Treatment Value: 100uM ABA vs. No Treatment
  misc_feature: MA Experiment ID: 20000090 Result: Down-regulated in Transcription
  misc_feature: MA Experiment ID: 20000117 Result: Up-regulated in Transcription
  misc_feature: MA Experiment 20000117 PARAMETER Experiment Name: At_100uM_ABA_Mutants_cDNA_P Parameter: Plant Line Value: Columbia
  misc_feature: MA Experiment 20000117 PARAMETER Experiment Name: At_100uM_ABA_Mutants_cDNA_P Parameter: Timepoint (hr) Value: 6
  misc_feature: MA Experiment 20000117 PARAMETER Experiment Name: At_100uM_ABA_Mutants_cDNA_P Parameter: Tissue Value: Aerial
  misc_feature: MA Experiment 20000117 PARAMETER Experiment Name: At_100uM_ABA_Mutants_cDNA_P Parameter: Treatment Value: 100uM ABA vs. No Treatment
  misc_feature: MA Experiment ID: 20000182 Result: Down-regulated in Transcription
  misc_feature: MA Experiment 20000182 PARAMETER Experiment Name: At_2mM_SA_P Parameter: Age (day) Value: 14
  misc_feature: MA Experiment 20000182 PARAMETER Experiment Name: At_2mM_SA_P Parameter: Organism Value: A. thaliana
  misc_feature: MA Experiment 20000182 PARAMETER Experiment Name: At_2mM_SA_P Parameter: Plant Line Value: WS
  misc_feature: MA Experiment 20000182 PARAMETER Experiment Name: At_2mM_SA_P Parameter: Timepoint (hr) Value: 6
  misc_feature: MA Experiment 20000182 PARAMETER Experiment Name: At_2mM_SA_P Parameter: Tissue Value: Aerial
  misc_feature: MA Experiment 20000182 PARAMETER Experiment Name: At_2mM_SA_P Parameter: Treatment Value: 2mM SA vs. No Treatment
  misc_feature: MA Experiment ID: 20000184 Result: Down-regulated in Transcription
  misc_feature: MA Experiment 20000184 PARAMETER Experiment Name: At_Shoots__P Parameter: Age (day) Value: 7
  misc_feature: MA Experiment 20000184 PARAMETER Experiment Name: At_Shoots__P Parameter: Tissue Value: Shoots vs. Whole Plant
  misc_feature: MA Experiment ID: 20000224 Result: Up-regulated in Transcription
  misc_feature: MA Experiment ID: 20000234 Result: Up-regulated in Transcription
  misc_feature: MA Experiment 20000234 PARAMETER Experiment Name: At_Siliques_P Parameter: Age (day) Value: 21
  misc_feature: MA Experiment 20000234 PARAMETER Experiment Name: At_Siliques_P Parameter: Organism Value: A. thaliana
  misc_feature: MA Experiment 20000234 PARAMETER Experiment Name: At_Siliques_P Parameter: Plant Line Value: WS
  misc_feature: MA Experiment 20000234 PARAMETER Experiment Name: At_Siliques_P Parameter: Tissue Value: Less Than 5mm Siliques vs. Whole Plant
  misc_feature: MA Experiment ID: 20000235 Result: Up-regulated in Transcription
  misc_feature: MA Experiment 20000235 PARAMETER Experiment Name: At_Siliques_P Parameter: Age (day) Value: 21
  misc_feature: MA Experiment 20000235 PARAMETER Experiment Name: At_Siliques_P Parameter: Organism Value: A. thaliana
  misc_feature: MA Experiment 20000235 PARAMETER Experiment Name: At_Siliques_P Parameter: Plant Line Value: WS
  misc_feature: MA Experiment 20000235 PARAMETER Experiment Name: At_Siliques_P Parameter: Tissue Value: 5-10mm Siliques vs. Whole Plant
  misc_feature: MA Experiment ID: 20000264 Result: Up-regulated in Transcription
  misc_feature: MA Experiment 20000264 PARAMETER Experiment Name: At_Open_Flower_P Parameter: Age (day) Value: 21
  misc_feature: MA Experiment 20000264 PARAMETER Experiment Name: At_Open_Flower_P Parameter: Plant Line Value: WS
  misc_feature: MA Experiment 20000264 PARAMETER Experiment Name: At_Open_Flower_P Parameter: Tissue Value: Open Flower vs. Whole Plant
  misc_feature: MA Experiment ID: 20000267 Result: Up-regulated in Transcription
  misc_feature: MA Experiment 20000267 PARAMETER Experiment Name: At_Drought_P Parameter: Age (day) Value: 7
  misc_feature: MA Experiment 20000267 PARAMETER Experiment Name: At_Drought_P Parameter: Organism Value: A. thaliana
  misc_feature: MA Experiment 20000267 PARAMETER Experiment Name: At_Drought_P Parameter: Plant Line Value: WS
  misc_feature: MA Experiment 20000267 PARAMETER Experiment Name: At_Drought_P Parameter: Timepoint (hr) Value: 6
  misc_feature: MA Experiment 20000267 PARAMETER Experiment Name: At_Drought_P Parameter: Tissue Value: Whole Plant
  misc_feature: MA Experiment 20000267 PARAMETER Experiment Name: At_Drought_P Parameter: Treatment Value: Drought vs. No Drought
  misc_feature: MA Experiment ID: 20000268 Result: Up-regulated in Transcription
  misc_feature: MA Experiment 20000268 PARAMETER Experiment Name: At_100mM_NaCl__P Parameter: Age (day) Value: 14
  misc_feature: MA Experiment 20000268 PARAMETER Experiment Name: At_100mM_NaCl__P Parameter: Organism Value: A. thaliana
  misc_feature: MA Experiment 20000268 PARAMETER Experiment Name: At_100mM_NaCl__P Parameter: Plant Line Value: WS
  misc_feature: MA Experiment 20000268 PARAMETER Experiment Name: At_100mM_NaCl__P Parameter: Timepoint (hr) Value: 6
  misc_feature: MA Experiment 20000268 PARAMETER Experiment Name: At_100mM_NaCl__P Parameter: Tissue Value: Whole Plant
  misc_feature: MA Experiment 20000268 PARAMETER Experiment Name: At_100mM_NaCl__P Parameter: Treatment Value: 100mM NaCl vs. No Treatment
  misc_feature: MA Experiment ID: 20000308 Result: Up-regulated in Transcription
  misc_feature: MA Experiment 20000308 PARAMETER Experiment Name: At_100mM_NaCl__P Parameter: Age (day) Value: 17
  misc_feature: MA Experiment 20000308 PARAMETER Experiment Name: At_100mM_NaCl__P Parameter: Organism Value: A. thaliana
  misc_feature: MA Experiment 20000308 PARAMETER Experiment Name: At_100mM_NaCl__P Parameter: Plant Line Value: WS
  misc_feature: MA Experiment 20000308 PARAMETER Experiment Name: At_100mM_NaCl__P Parameter: Timepoint (hr) Value: 72
  misc_feature: MA Experiment 20000308 PARAMETER Experiment Name: At_100mM_NaCl__P Parameter: Tissue Value: Whole Plant
  misc_feature: MA Experiment 20000308 PARAMETER Experiment Name: At_100mM_NaCl__P Parameter: Treatment Value: 100mM NaCl vs. No Treatment
  misc_feature: MA Experiment ID: 20000436 Result: Up-regulated in Transcription
  misc_feature: MA Experiment 20000436 PARAMETER Experiment Name: At_Drought_P Parameter: Age (day) Value: 7
  misc_feature: MA Experiment 20000436 PARAMETER Experiment Name: At_Drought_P Parameter: Organism Value: A. thaliana
  misc_feature: MA Experiment 20000436 PARAMETER Experiment Name: At_Drought_P Parameter: Plant Line Value: WS
  misc_feature: MA Experiment 20000436 PARAMETER Experiment Name: At_Drought_P Parameter: Timepoint (hr) Value: 12
  misc_feature: MA Experiment 20000436 PARAMETER Experiment Name: At_Drought_P Parameter: Tissue Value: Whole Plant
  misc_feature: MA Experiment 20000436 PARAMETER Experiment Name: At_Drought_P Parameter: Treatment Value: Drought vs. No Drought
  misc_feature: MA Experiment ID: 20000437 Result: Up-regulated in Transcription
  misc_feature: MA Experiment 20000437 PARAMETER Experiment Name: At_Drought_P Parameter: Age (day) Value: 8
  misc_feature: MA Experiment 20000437 PARAMETER Experiment Name: At_Drought_P Parameter: Organism Value: A. thaliana
  misc_feature: MA Experiment 20000437 PARAMETER Experiment Name: At_Drought_P Parameter: Plant Line Value: WS
  misc_feature: MA Experiment 20000437 PARAMETER Experiment Name: At_Drought_P Parameter: Timepoint (hr) Value: 24
  misc_feature: MA Experiment 20000437 PARAMETER Experiment Name: At_Drought_P Parameter: Tissue Value: Whole Plant
  misc_feature: MA Experiment 20000437 PARAMETER Experiment Name: At_Drought_P Parameter: Treatment Value: Drought vs. No Drought
  misc_feature: MA Experiment ID: 20000438 Result: Down-regulated in Transcription
  misc_feature: MA Experiment 20000438 PARAMETER Experiment Name: At_Shoots__P Parameter: Age (day) Value: 14
  misc_feature: MA Experiment 20000438 PARAMETER Experiment Name: At_Shoots__P Parameter: Tissue Value: Shoots vs. Whole Plant
  misc_feature: MA Experiment ID: 20000441 Result: Up-regulated in Transcription
  misc_feature: MA Experiment 20000441 PARAMETER Experiment Name: At_1uM_BR-BRZ__P Parameter: Tissue Value: Shoot Apices
  misc_feature: MA Experiment 20000441 PARAMETER Experiment Name: At_1uM_BR-BRZ__P Parameter: Treatment Value: 1uM BR vs. No Treatment
  misc_feature: MA Experiment ID: 20000443 Result: Up-regulated in Transcription
  misc_feature: MA Experiment 20000443 PARAMETER Experiment Name: At_1uM_BR-BRZ__P Parameter: Tissue Value: Shoot Apices
  misc_feature: MA Experiment 20000443 PARAMETER Experiment Name: At_1uM_BR-BRZ__P Parameter: Treatment Value: 1uM BRZ vs. No Treatment
  misc_feature: MA Experiment ID: 20000453 Result: Up-regulated in Transcription
  misc_feature: MA Experiment 20000453 PARAMETER Experiment Name: At_100uM_ABA_P Parameter: Age (day) Value: 15
  misc_feature: MA Experiment 20000453 PARAMETER Experiment Name: At_100uM_ABA_P Parameter: Organism Value: A. thaliana
  misc_feature: MA Experiment 20000453 PARAMETER Experiment Name: At_100uM_ABA_P Parameter: Plant Line Value: WS
  misc_feature: MA Experiment 20000453 PARAMETER Experiment Name: At_100uM_ABA_P Parameter: Timepoint (hr) Value: 24
  misc_feature: MA Experiment 20000453 PARAMETER Experiment Name: At_100uM_ABA_P Parameter: Tissue Value: Aerial
  misc_feature: MA Experiment 20000453 PARAMETER Experiment Name: At_100uM_ABA_P Parameter: Treatment Value: 100uM ABA vs. No Treatment
  misc_feature: MA Experiment ID: 20000495 Result: Up-regulated in Transcription
  misc_feature: MA Experiment 20000495 PARAMETER Experiment Name: At_Guard_Cells_P Parameter: Harvest Date Value: 8/2/2002
  misc_feature: MA Experiment 20000495 PARAMETER Experiment Name: At_Guard_Cells_P Parameter: Organism Value: A. thaliana
  misc_feature: MA Experiment 20000495 PARAMETER Experiment Name: At_Guard_Cells_P Parameter: Tissue Value: Guard Cells vs. Leaves
  misc_feature: MA Experiment ID: 20000794 Result: Up-regulated in Transcription
  misc_feature: MA Experiment 20000794 PARAMETER Experiment Name: At_Petals_P Parameter: Age (day) Value: 23-25 days
  misc_feature: MA Experiment 20000794 PARAMETER Experiment Name: At_Petals_P Parameter: Plant Line Value: WS
  misc_feature: MA Experiment 20000794 PARAMETER Experiment Name: At_Petals_P Parameter: Tissue Value: Petals vs. Whole plant
  misc_feature: MA Experiment ID: 20001504 Result: Up-regulated in Transcription
  misc_feature: MA Experiment 20001504 PARAMETER Experiment Name: At_Far-red-enriched_P Parameter: Age (day) Value: 10
  misc_feature: MA Experiment 20001504 PARAMETER Experiment Name: At_Far-red-enriched_P Parameter: Light Value: Far-red enriched vs. White
  misc_feature: MA Experiment 20001504 PARAMETER Experiment Name: At_Far-red-enriched_P Parameter: Organism Value: A. thaliana
  misc_feature: MA Experiment 20001504 PARAMETER Experiment Name: At_Far-red-enriched_P Parameter: Plant Line Value: Columbia
  misc_feature: MA Experiment 20001504 PARAMETER Experiment Name: At_Far-red-enriched_P Parameter: Timepoint (day) Value: 6
  misc_feature: MA Experiment 20001504 PARAMETER Experiment Name: At_Far-red-enriched_P Parameter: Tissue Value: Whole Plant
  misc_feature: MA Experiment ID: 20001554 Result: Up-regulated in Transcription
  misc_feature: MA Experiment 20001554 PARAMETER Experiment Name: At_Drought_Soil_Dry_P Parameter: Age (day) Value: 21
  misc_feature: MA Experiment 20001554 PARAMETER Experiment Name: At_Drought_Soil_Dry_P Parameter: Organism Value: A. thaliana
  misc_feature: MA Experiment 20001554 PARAMETER Experiment Name: At_Drought_Soil_Dry_P Parameter: Plant Line Value: WS
  misc_feature: MA Experiment 20001554 PARAMETER Experiment Name: At_Drought_Soil_Dry_P Parameter: Post Timepoint (hr) Value: None
  misc_feature: MA Experiment 20001554 PARAMETER Experiment Name: At_Drought_Soil_Dry_P Parameter: Post-Treatment Value: None
  misc_feature: MA Experiment 20001554 PARAMETER Experiment Name: At_Drought_Soil_Dry_P Parameter: Timepoint (day) Value: 7
  misc_feature: MA Experiment 20001554 PARAMETER Experiment Name: At_Drought_Soil_Dry_P Parameter: Treatment Value: Drought vs. No Drought
  misc_feature: MA Experiment ID: 20001555 Result: Up-regulated in Transcription
  misc_feature: MA Experiment 20001555 PARAMETER Experiment Name: At_Drought_Soil_Dry_P Parameter: Age (day) Value: 24
  misc_feature: MA Experiment 20001555 PARAMETER Experiment Name: At_Drought_Soil_Dry_P Parameter: Organism Value: A. thaliana
  misc_feature: MA Experiment 20001555 PARAMETER Experiment Name: At_Drought_Soil_Dry_P Parameter: Plant Line Value: WS
  misc_feature: MA Experiment 20001555 PARAMETER Experiment Name: At_Drought_Soil_Dry_P Parameter: Post Timepoint (hr) Value: None
  misc_feature: MA Experiment 20001555 PARAMETER Experiment Name: At_Drought_Soil_Dry_P Parameter: Post-Treatment Value: None
  misc_feature: MA Experiment 20001555 PARAMETER Experiment Name: At_Drought_Soil_Dry_P Parameter: Timepoint (day) Value: 10
  misc_feature: MA Experiment 20001555 PARAMETER Experiment Name: At_Drought_Soil_Dry_P Parameter: Treatment Value: Drought vs. No Drought
  misc_feature: MA Experiment ID: 20001556 Result: Up-regulated in Transcription
  misc_feature: MA Experiment 20001556 PARAMETER Experiment Name: At_Drought_Soil_Dry_P Parameter: Age (day) Value: 26
  misc_feature: MA Experiment 20001556 PARAMETER Experiment Name: At_Drought_Soil_Dry_P Parameter: Organism Value: A. thaliana
  misc_feature: MA Experiment 20001556 PARAMETER Experiment Name: At_Drought_Soil_Dry_P Parameter: Plant Line Value: WS
  misc_feature: MA Experiment 20001556 PARAMETER Experiment Name: At_Drought_Soil_Dry_P Parameter: Post Timepoint (hr) Value: None
  misc_feature: MA Experiment 20001556 PARAMETER Experiment Name: At_Drought_Soil_Dry_P Parameter: Post-Treatment Value: None
  misc_feature: MA Experiment 20001556 PARAMETER Experiment Name: At_Drought_Soil_Dry_P Parameter: Timepoint (day) Value: 12
  misc_feature: MA Experiment 20001556 PARAMETER Experiment Name: At_Drought_Soil_Dry_P Parameter: Treatment Value: Drought vs. No Drought
  misc_feature: MA Experiment ID: 20001560 Result: Up-regulated in Transcription
  misc_feature: MA Experiment 20001560 PARAMETER Experiment Name: At_Drought_Soil_Dry_P Parameter: Age (day) Value: 28
  misc_feature: MA Experiment 20001560 PARAMETER Experiment Name: At_Drought_Soil_Dry_P Parameter: Organism Value: A. thaliana
  misc_feature: MA Experiment 20001560 PARAMETER Experiment Name: At_Drought_Soil_Dry_P Parameter: Plant Line Value: WS
  misc_feature: MA Experiment 20001560 PARAMETER Experiment Name: At_Drought_Soil_Dry_P Parameter: Post Timepoint (hr) Value: None
  misc_feature: MA Experiment 20001560 PARAMETER Experiment Name: At_Drought_Soil_Dry_P Parameter: Post-Treatment Value: None
  misc_feature: MA Experiment 20001560 PARAMETER Experiment Name: At_Drought_Soil_Dry_P Parameter: Timepoint (day) Value: 14
  misc_feature: MA Experiment 20001560 PARAMETER Experiment Name: At_Drought_Soil_Dry_P Parameter: Treatment Value: Drought vs. No Drought
  misc_feature: MA Experiment ID: 20001757 Result: Down-regulated in Transcription
  misc_feature: MA Experiment 20001757 PARAMETER Experiment Name: At_50mM_NH4NO3_L-to-H_P Parameter: Timepoint (hr) Value: 6
  misc_feature: MA Experiment 20001757 PARAMETER Experiment Name: At_50mM_NH4NO3_L-to-H_P Parameter: Tissue Value: Leaf
  misc_feature: MA Experiment 20001757 PARAMETER Experiment Name: At_50mM_NH4NO3_L-to-H_P Parameter: Treatment Value: 50mM NH4NO3 vs 100mM Mannitol
  misc_feature: MA Experiment ID: 20001770 Result: Up-regulated in Transcription
  misc_feature: MA Experiment 20001770 PARAMETER Experiment Name: At_Far-red-enriched-adult_P Parameter: Age (day) Value: 28
  misc_feature: MA Experiment 20001770 PARAMETER Experiment Name: At_Far-red-enriched-adult_P Parameter: Light Value: Far-red enriched vs. White
  misc_feature: MA Experiment 20001770 PARAMETER Experiment Name: At_Far-red-enriched-adult_P Parameter: Organism Value: A. thaliana
  misc_feature: MA Experiment 20001770 PARAMETER Experiment Name: At_Far-red-enriched-adult_P Parameter: Plant Line Value: Columbia
  misc_feature: MA Experiment 20001770 PARAMETER Experiment Name: At_Far-red-enriched-adult_P Parameter: Timepoint (hr) Value: 8
  misc_feature: MA Experiment 20001770 PARAMETER Experiment Name: At_Far-red-enriched-adult_P Parameter: Tissue Value: Aerial
  misc_feature: MA Experiment ID: 20001904 Result: Up-regulated in Transcription
  misc_feature: MA Experiment 20001904 PARAMETER Experiment Name: At_Drought_Reproduction_P Parameter: Age (day) Value: 37
  misc_feature: MA Experiment 20001904 PARAMETER Experiment Name: At_Drought_Reproduction_P Parameter: Organism Value: A. thaliana
  misc_feature: MA Experiment 20001904 PARAMETER Experiment Name: At_Drought_Reproduction_P Parameter: Plant Line Value: WS
  misc_feature: MA Experiment 20001904 PARAMETER Experiment Name: At_Drought_Reproduction_P Parameter: Timepoint (day) Value: 7
  misc_feature: MA Experiment 20001904 PARAMETER Experiment Name: At_Drought_Reproduction_P Parameter: Tissue Value: Rosettes
  misc_feature: MA Experiment 20001904 PARAMETER Experiment Name: At_Drought_Reproduction_P Parameter: Treatment Value: Drought vs. No Drought
  misc_feature: MA Experiment ID: 20001906 Result: Up-regulated in Transcription
  misc_feature: MA Experiment 20001906 PARAMETER Experiment Name: At_Drought_Reproduction_P Parameter: Age (day) Value: 35
  misc_feature: MA Experiment 20001906 PARAMETER Experiment Name: At_Drought_Reproduction_P Parameter: Organism Value: A. thaliana
  misc_feature: MA Experiment 20001906 PARAMETER Experiment Name: At_Drought_Reproduction_P Parameter: Plant Line Value: WS
  misc_feature: MA Experiment 20001906 PARAMETER Experiment Name: At_Drought_Reproduction_P Parameter: Timepoint (day) Value: 5
  misc_feature: MA Experiment 20001906 PARAMETER Experiment Name: At_Drought_Reproduction_P Parameter: Tissue Value: Siliques
  misc_feature: MA Experiment 20001906 PARAMETER Experiment Name: At_Drought_Reproduction_P Parameter: Treatment Value: Drought vs. No Drought
  misc_feature: MA Experiment ID: 20001908 Result: Up-regulated in Transcription
  misc_feature: MA Experiment 20001908 PARAMETER Experiment Name: At_Drought_Reproduction_P Parameter: Age (day) Value: 40
  misc_feature: MA Experiment 20001908 PARAMETER Experiment Name: At_Drought_Reproduction_P Parameter: Organism Value: A. thaliana
  misc_feature: MA Experiment 20001908 PARAMETER Experiment Name: At_Drought_Reproduction_P Parameter: Plant Line Value: WS
  misc_feature: MA Experiment 20001908 PARAMETER Experiment Name: At_Drought_Reproduction_P Parameter: Timepoint (day) Value: 10
  misc_feature: MA Experiment 20001908 PARAMETER Experiment Name: At_Drought_Reproduction_P Parameter: Tissue Value: Siliques
  misc_feature: MA Experiment 20001908 PARAMETER Experiment Name: At_Drought_Reproduction_P Parameter: Treatment Value: Drought vs. No Drought
  misc_feature: MA Experiment ID: 20001910 Result: Up-regulated in Transcription
  misc_feature: MA Experiment 20001910 PARAMETER Experiment Name: At_Drought_Reproduction_P Parameter: Age (day) Value: 37
  misc_feature: MA Experiment 20001910 PARAMETER Experiment Name: At_Drought_Reproduction_P Parameter: Organism Value: A. thaliana
  misc_feature: MA Experiment 20001910 PARAMETER Experiment Name: At_Drought_Reproduction_P Parameter: Plant Line Value: WS
  misc_feature: MA Experiment 20001910 PARAMETER Experiment Name: At_Drought_Reproduction_P Parameter: Timepoint (day) Value: 7
  misc_feature: MA Experiment 20001910 PARAMETER Experiment Name: At_Drought_Reproduction_P Parameter: Tissue Value: Flowers
  misc_feature: MA Experiment 20001910 PARAMETER Experiment Name: At_Drought_Reproduction_P Parameter: Treatment Value: Drought vs. No Drought
  misc_feature: MA Experiment ID: 20001911 Result: Up-regulated in Transcription
  misc_feature: MA Experiment 20001911 PARAMETER Experiment Name: At_Drought_Reproduction_P Parameter: Age (day) Value: 40
  misc_feature: MA Experiment 20001911 PARAMETER Experiment Name: At_Drought_Reproduction_P Parameter: Organism Value: A. thaliana
  misc_feature: MA Experiment 20001911 PARAMETER Experiment Name: At_Drought_Reproduction_P Parameter: Plant Line Value: WS
  misc_feature: MA Experiment 20001911 PARAMETER Experiment Name: At_Drought_Reproduction_P Parameter: Timepoint (day) Value: 10
  misc_feature: MA Experiment 20001911 PARAMETER Experiment Name: At_Drought_Reproduction_P Parameter: Tissue Value: Flowers
  misc_feature: MA Experiment 20001911 PARAMETER Experiment Name: At_Drought_Reproduction_P Parameter: Treatment Value: Drought vs. No Drought
aagcatctctccatctcaaatcatattcacctaaaaatcaggttaatataaaagaataatgatgttttcggtgacggttgcgatccttgtttgtcttattggctacatttaccgatcatttaagcctccaccaccgcgaatctgcggccatcctaacggtcctccggttacttctccgagaatcaagctcagtgatggaagatatcttgcttatagagaatctggggttgatagagacaatgctaactacaagatcattgtcgttcatggcttcaacagctccaaagacactgaatttcccatccctaaggatgtaattgaggagcttgggatatactttgtgttctacgatagagcaggatatggagaaagtgatccacacccatcacgcactgttaagagtgaagcatacgacattcaagaactcgccgataaactcaagatcggaccaaagttctatgttcttggtatatcactaggtgcttactcggtttatagttgcctcaaatacattccccacagactagctggagcagtcttaatggttccatttgtgaactattggtggactaaagtgcctcaagaaaaattgagtaaagcgttggagctaatgccaaagaaagaccaatggacgtttaaagtggctcattatgttccgtggttgttatattggtggttgacccaaaaactatttccgtcttcgagtatggtcacggggaacaatgcgttatgcagcgacaaagatttggtcgtcataaagaagaaaatggagaatccacgccctggcttggaaaaagttagacaacaaggagaccatgaatgtcttcaccgggacatgatagccggattcgcgacatgggaattcgacccgactgaattagaaaatccgtttgcggaaggcgaaggatcggtccacgtttggcaagggatggaagacagaatcattccatacgaaattaatcgatatatatcagagaagcttccatggattaagtaccatgaggtcttaggttatggacatcttctaaacgccgaggaggagaaatgcaaagacattatcaaggcacttcttgtcaactgatgatcatctctacacaagatgccacgaaaaatatagcatatttaatagattttatttatggattataatattatagcatattataagtttgtaagtaagatgaaaaccacttgaaagtcattaatttactataaaatacttgttatcttcc

SEQ ID NO: 86271 - protein, 340 aa, Arabidopsis thaliana; identical to SEQ ID NO: 41700
  peptide (1)..(340): Ceres Seq. ID no. 12688450
  misc_feature (92)..(335): Pfam Name: alpha/beta hydrolase fold Pfam Description: alpha/beta hydrolase fold
  misc_feature (1)..(340): Homolog of NCBI NO: 15242253 NR Description: putative protein; protein id: At5g22460.1, by cDNA: gi_15292740, supported by cDNA: gi_20465594 [Arabidopsis
  misc_feature (1)..(340): Homolog of NCBI NO: 21537089 NR Description: unknown [Arabidopsis thaliana]
  misc_feature (1)..(340): Homolog of NCBI NO: 18410575 NR Description: expressed protein; protein id: At1g74280.1, by cDNA: 119889. [Arabidopsis thaliana] >gi|25406331|pir||C96771
  misc_feature (4)..(338): Homolog of NCBI NO: 21592662 NR Description: unknown [Arabidopsis thaliana]
  misc_feature (4)..(338): Homolog of NCBI NO: 18410582 NR Description: expressed protein; protein id: At1g74300.1, by cDNA: 31039. [Arabidopsis thaliana] >gi|25406334|pir||E96771
  misc_feature (11)..(340): Homolog of NCBI NO: 18404095 NR Description: expressed protein; protein id: At2g36290.1, by cDNA: 5167. [Arabidopsis thaliana] >gi|25408458|pir||H84778
  misc_feature (11)..(340): Homolog of NCBI NO: 28416665 NR Description: At2g36290 [Arabidopsis thaliana]
  misc_feature (1)..(336): Homolog of NCBI NO: 30678800 NR Description: esterase/lipase/thioesterase family [Arabidopsis
  misc_feature (1)..(339): Homolog of NCBI NO: 38346334 NR Description: OSJNBa0073L04.5 [Oryza sativa (japonica
  misc_feature (1)..(338): Homolog of NCBI NO: 15221193 NR Description: unknown protein; protein id: At1g74290.1

SEQ ID NO: 86272 - protein, 339 aa, Arabidopsis thaliana; identical to SEQ ID NO: 41701
  peptide (1)..(339): Ceres Seq. ID no. 12688451
  misc_feature (91)..(334): Pfam Name: alpha/beta hydrolase fold Pfam Description: alpha/beta hydrolase fold
  misc_feature (1)..(339): Homolog of NCBI NO: 15242253 NR Description: putative protein; protein id: At5g22460.1, by cDNA: gi_15292740, supported by cDNA: gi_20465594 [Arabidopsis
  misc_feature (1)..(339): Homolog of NCBI NO: 21537089 NR Description: unknown [Arabidopsis thaliana]
  misc_feature (1)..(339): Homolog of NCBI NO: 18410575 NR Description: expressed protein; protein id: At1g74280.1, by cDNA: 119889. [Arabidopsis thaliana] >gi|25406331|pir||C96771
  misc_feature (3)..(337): Homolog of NCBI NO: 21592662 NR Description: unknown [Arabidopsis thaliana]
  misc_feature (3)..(337): Homolog of NCBI NO: 18410582 NR Description: expressed protein; protein id: At1g74300.1, by cDNA: 31039. [Arabidopsis thaliana] >gi|25406334|pir||E96771
  misc_feature (10)..(339): Homolog of NCBI NO: 18404095 NR Description: expressed protein; protein id: At2g36290.1, by cDNA: 5167. [Arabidopsis thaliana] >gi|25408458|pir||H84778
  misc_feature (10)..(339): Homolog of NCBI NO: 28416665 NR Description: At2g36290 [Arabidopsis thaliana]
  misc_feature (1)..(335): Homolog of NCBI NO: 30678800 NR Description: esterase/lipase/thioesterase family [Arabidopsis
  misc_feature (1)..(338): Homolog of NCBI NO: 38346334 NR Description: OSJNBa0073L04.5 [Oryza sativa (japonica
  misc_feature (1)..(337): Homolog of NCBI NO: 15221193 NR Description: unknown protein; protein id: At1g74290.1

SEQ ID NO: 86273 - protein, 179 aa, Arabidopsis thaliana; identical to SEQ ID NO: 41702
  peptide (1)..(179): Ceres Seq. ID no. 12688452
  misc_feature (1)..(174): Pfam Name: alpha/beta hydrolase fold Pfam Description: alpha/beta hydrolase fold
  misc_feature (1)..(179): Homolog of NCBI NO: 15242253 NR Description: putative protein; protein id: At5g22460.1, by cDNA: gi_15292740, supported by cDNA: gi_20465594 [Arabidopsis
  misc_feature (1)..(179): Homolog of NCBI NO: 21537089 NR Description: unknown [Arabidopsis thaliana]
  misc_feature (1)..(179): Homolog of NCBI NO: 18410575 NR Description: expressed protein; protein id: At1g74280.1, by cDNA: 119889. [Arabidopsis thaliana] >gi|25406331|pir||C96771
  misc_feature (1)..(177): Homolog of NCBI NO: 21592662 NR Description: unknown [Arabidopsis thaliana]
  misc_feature (1)..(177): Homolog of NCBI NO: 18410582 NR Description: expressed protein; protein id: At1g74300.1, by cDNA: 31039. [Arabidopsis thaliana] >gi|25406334|pir||E96771
  misc_feature (1)..(179): Homolog of NCBI NO: 18404095 NR Description: expressed protein; protein id: At2g36290.1, by cDNA: 5167. [Arabidopsis thaliana] >gi|25408458|pir||H84778
  misc_feature (1)..(179): Homolog of NCBI NO: 28416665 NR Description: At2g36290 [Arabidopsis thaliana]
  misc_feature (1)..(175): Homolog of NCBI NO: 30678800 NR Description: esterase/lipase/thioesterase family [Arabidopsis
  misc_feature (1)..(178): Homolog of NCBI NO: 38346334 NR Description: OSJNBa0073L04.5 [Oryza sativa (japonica
  misc_feature (1)..(177): Homolog of NCBI NO: 15221193 NR Description: unknown protein; protein id: At1g74290.1

SEQ ID NO: 86274 - DNA, 1273 bp, Arabidopsis thaliana
  misc_feature (1)..(1273): Ceres Seq. ID no. 12688453
  misc_feature: MA Experiment ID: 20000182 Result: Down-regulated in Transcription
  misc_feature: MA Experiment 20000182 PARAMETER Experiment Name: At_2mM_SA_P Parameter: Age (day) Value: 14
  misc_feature: MA Experiment 20000182 PARAMETER Experiment Name: At_2mM_SA_P Parameter: Organism Value: A. thaliana
  misc_feature: MA Experiment 20000182 PARAMETER Experiment Name: At_2mM_SA_P Parameter: Plant Line Value: WS
  misc_feature: MA Experiment 20000182 PARAMETER Experiment Name: At_2mM_SA_P Parameter: Timepoint (hr) Value: 6
  misc_feature: MA Experiment 20000182 PARAMETER Experiment Name: At_2mM_SA_P Parameter: Tissue Value: Aerial
  misc_feature: MA Experiment 20000182 PARAMETER Experiment Name: At_2mM_SA_P Parameter: Treatment Value: 2mM SA vs. No Treatment
  misc_feature: MA Experiment ID: 20000184 Result: Down-regulated in Transcription
  misc_feature: MA Experiment 20000184 PARAMETER Experiment Name: At_Shoots__P Parameter: Age (day) Value: 7
  misc_feature: MA Experiment 20000184 PARAMETER Experiment Name: At_Shoots__P Parameter: Tissue Value: Shoots vs. Whole Plant
  misc_feature: MA Experiment ID: 20000234 Result: Up-regulated in Transcription
  misc_feature: MA Experiment 20000234 PARAMETER Experiment Name: At_Siliques_P Parameter: Age (day) Value: 21
  misc_feature: MA Experiment 20000234 PARAMETER Experiment Name: At_Siliques_P Parameter: Organism Value: A. thaliana
  misc_feature: MA Experiment 20000234 PARAMETER Experiment Name: At_Siliques_P Parameter: Plant Line Value: WS
  misc_feature: MA Experiment 20000234 PARAMETER Experiment Name: At_Siliques_P Parameter: Tissue Value: Less Than 5mm Siliques vs. Whole Plant
  misc_feature: MA Experiment ID: 20000235 Result: Up-regulated in Transcription
  misc_feature: MA Experiment 20000235 PARAMETER Experiment Name: At_Siliques_P Parameter: Age (day) Value: 21
  misc_feature: MA Experiment 20000235 PARAMETER Experiment Name: At_Siliques_P Parameter: Organism Value: A. thaliana
  misc_feature: MA Experiment 20000235 PARAMETER Experiment Name: At_Siliques_P Parameter: Plant Line Value: WS
  misc_feature: MA Experiment 20000235 PARAMETER Experiment Name: At_Siliques_P Parameter: Tissue Value: 5-10mm Siliques vs. Whole Plant
  misc_feature: MA Experiment ID: 20000264 Result: Up-regulated in Transcription
  misc_feature: MA Experiment 20000264 PARAMETER Experiment Name: At_Open_Flower_P Parameter: Age (day) Value: 21
  misc_feature: MA Experiment 20000264 PARAMETER Experiment Name: At_Open_Flower_P Parameter: Plant Line Value: WS
  misc_feature: MA Experiment 20000264 PARAMETER Experiment Name: At_Open_Flower_P Parameter: Tissue Value: Open Flower vs. Whole Plant
  misc_feature: MA Experiment ID: 20000267 Result: Up-regulated in Transcription
  misc_feature: MA Experiment 20000267 PARAMETER Experiment Name: At_Drought_P Parameter: Age (day) Value: 7
  misc_feature: MA Experiment 20000267 PARAMETER Experiment Name: At_Drought_P Parameter: Organism Value: A. thaliana
  misc_feature: MA Experiment 20000267 PARAMETER Experiment Name: At_Drought_P Parameter: Plant Line Value: WS
  misc_feature: MA Experiment 20000267 PARAMETER Experiment Name: At_Drought_P Parameter: Timepoint (hr) Value: 6
  misc_feature: MA Experiment 20000267 PARAMETER Experiment Name: At_Drought_P Parameter: Tissue Value: Whole Plant
  misc_feature: MA Experiment 20000267 PARAMETER Experiment Name: At_Drought_P Parameter: Treatment Value: Drought vs. No Drought
  misc_feature: MA Experiment ID: 20000268 Result: Up-regulated in Transcription
  misc_feature: MA Experiment 20000268 PARAMETER Experiment Name: At_100mM_NaCl__P Parameter: Age (day) Value: 14
  misc_feature: MA Experiment 20000268 PARAMETER Experiment Name: At_100mM_NaCl__P Parameter: Organism Value: A. thaliana
  misc_feature: MA Experiment 20000268 PARAMETER Experiment Name: At_100mM_NaCl__P Parameter: Plant Line Value: WS
  misc_feature: MA Experiment 20000268 PARAMETER Experiment Name: At_100mM_NaCl__P Parameter: Timepoint (hr) Value: 6
  misc_feature: MA Experiment 20000268 PARAMETER Experiment Name: At_100mM_NaCl__P Parameter: Tissue Value: Whole Plant
  misc_feature: MA Experiment 20000268 PARAMETER Experiment Name: At_100mM_NaCl__P Parameter: Treatment Value: 100mM NaCl vs. No Treatment
  misc_feature: MA Experiment ID: 20000308 Result: Up-regulated in Transcription
  misc_feature: MA Experiment 20000308 PARAMETER Experiment Name: At_100mM_NaCl__P Parameter: Age (day) Value: 17
  misc_feature: MA Experiment 20000308 PARAMETER Experiment Name: At_100mM_NaCl__P Parameter: Organism Value: A. thaliana
  misc_feature: MA Experiment 20000308 PARAMETER Experiment Name: At_100mM_NaCl__P Parameter: Plant Line Value: WS
  misc_feature: MA Experiment 20000308 PARAMETER Experiment Name: At_100mM_NaCl__P Parameter: Timepoint (hr) Value: 72
  misc_feature: MA Experiment 20000308 PARAMETER Experiment Name: At_100mM_NaCl__P Parameter: Tissue Value: Whole Plant
  misc_feature: MA Experiment 20000308 PARAMETER Experiment Name: At_100mM_NaCl__P Parameter: Treatment Value: 100mM NaCl vs. No Treatment
  misc_feature: MA Experiment ID: 20000436 Result: Up-regulated in Transcription
  misc_feature: MA Experiment 20000436 PARAMETER Experiment Name: At_Drought_P Parameter: Age (day) Value: 7
  misc_feature: MA Experiment 20000436 PARAMETER Experiment Name: At_Drought_P Parameter: Organism Value: A. thaliana
  misc_feature: MA Experiment 20000436 PARAMETER Experiment Name: At_Drought_P Parameter: Plant Line Value: WS
  misc_feature: MA Experiment 20000436 PARAMETER Experiment Name: At_Drought_P Parameter: Timepoint (hr) Value: 12
  misc_feature: MA Experiment 20000436 PARAMETER Experiment Name: At_Drought_P Parameter: Tissue Value: Whole Plant
  misc_feature: MA Experiment 20000436 PARAMETER Experiment Name: At_Drought_P Parameter: Treatment Value: Drought vs. No Drought
  misc_feature: MA Experiment ID: 20000437 Result: Up-regulated in Transcription
  misc_feature: MA Experiment 20000437 PARAMETER Experiment Name: At_Drought_P Parameter: Age (day) Value: 8
  misc_feature: MA Experiment 20000437 PARAMETER Experiment Name: At_Drought_P Parameter: Organism Value: A. thaliana
  misc_feature: MA Experiment 20000437 PARAMETER Experiment Name: At_Drought_P Parameter: Plant Line Value: WS
  misc_feature: MA Experiment 20000437 PARAMETER Experiment Name: At_Drought_P Parameter: Timepoint (hr) Value: 24
  misc_feature: MA Experiment 20000437 PARAMETER Experiment Name: At_Drought_P Parameter: Tissue Value: Whole Plant
  misc_feature: MA Experiment 20000437 PARAMETER Experiment Name: At_Drought_P Parameter: Treatment Value: Drought vs. No Drought
  misc_feature: MA Experiment ID: 20000438 Result: Down-regulated in Transcription
  misc_feature: MA Experiment 20000438 PARAMETER Experiment Name: At_Shoots__P Parameter: Age (day) Value: 14
  misc_feature: MA Experiment 20000438 PARAMETER Experiment Name: At_Shoots__P Parameter: Tissue Value: Shoots vs. Whole Plant
  misc_feature: MA Experiment ID: 20000441 Result: Up-regulated in Transcription
  misc_feature: MA Experiment 20000441 PARAMETER Experiment Name: At_1uM_BR-BRZ__P Parameter: Tissue Value: Shoot Apices
  misc_feature: MA Experiment 20000441 PARAMETER Experiment Name: At_1uM_BR-BRZ__P Parameter: Treatment Value: 1uM BR vs. No Treatment
  misc_feature: MA Experiment ID: 20000443 Result: Up-regulated in Transcription
  misc_feature: MA Experiment 20000443 PARAMETER Experiment Name: At_1uM_BR-BRZ__P Parameter: Tissue Value: Shoot Apices
  misc_feature: MA Experiment 20000443 PARAMETER Experiment Name: At_1uM_BR-BRZ__P Parameter: Treatment Value: 1uM BRZ vs. No Treatment
  misc_feature: MA Experiment ID: 20000453 Result: Up-regulated in Transcription
  misc_feature: MA Experiment 20000453 PARAMETER Experiment Name: At_100uM_ABA_P Parameter: Age (day) Value: 15
  misc_feature: MA Experiment 20000453 PARAMETER Experiment Name: At_100uM_ABA_P Parameter: Organism Value: A. thaliana
  misc_feature: MA Experiment 20000453 PARAMETER Experiment Name: At_100uM_ABA_P Parameter: Plant Line Value: WS
  misc_feature: MA Experiment 20000453 PARAMETER Experiment Name: At_100uM_ABA_P Parameter: Timepoint (hr) Value: 24
  misc_feature: MA Experiment 20000453 PARAMETER Experiment Name: At_100uM_ABA_P Parameter: Tissue Value: Aerial
  misc_feature: MA Experiment 20000453 PARAMETER Experiment Name: At_100uM_ABA_P Parameter: Treatment Value: 100uM ABA vs. No Treatment
  misc_feature: MA Experiment ID: 20000495 Result: Up-regulated in Transcription
  misc_feature: MA Experiment 20000495 PARAMETER Experiment Name: At_Guard_Cells_P Parameter: Harvest Date Value: 8/2/2002
  misc_feature: MA Experiment 20000495 PARAMETER Experiment Name: At_Guard_Cells_P Parameter: Organism Value: A. thaliana
  misc_feature: MA Experiment 20000495 PARAMETER Experiment Name: At_Guard_Cells_P Parameter: Tissue Value: Guard Cells vs. Leaves
  misc_feature: MA Experiment ID: 20000794 Result: Up-regulated in Transcription
  misc_feature: MA Experiment 20000794 PARAMETER Experiment Name: At_Petals_P Parameter: Age (day) Value: 23-25 days
  misc_feature: MA Experiment 20000794 PARAMETER Experiment Name: At_Petals_P Parameter: Plant Line Value: WS
  misc_feature: MA Experiment 20000794 PARAMETER Experiment Name: At_Petals_P Parameter: Tissue Value: Petals vs. Whole plant
  misc_feature: MA Experiment ID: 20001504 Result: Up-regulated in Transcription
  misc_feature: MA Experiment 20001504 PARAMETER Experiment Name: At_Far-red-enriched_P Parameter: Age (day) Value: 10
  misc_feature: MA Experiment 20001504 PARAMETER Experiment Name: At_Far-red-enriched_P Parameter: Light Value: Far-red enriched vs. White
  misc_feature: MA Experiment 20001504 PARAMETER Experiment Name: At_Far-red-enriched_P Parameter: Organism Value: A. thaliana
  misc_feature: MA Experiment 20001504 PARAMETER Experiment Name: At_Far-red-enriched_P Parameter: Plant Line Value: Columbia
  misc_feature: MA Experiment 20001504 PARAMETER Experiment Name: At_Far-red-enriched_P Parameter: Timepoint (day) Value: 6
  misc_feature: MA Experiment 20001504 PARAMETER Experiment Name: At_Far-red-enriched_P Parameter: Tissue Value: Whole Plant
  misc_feature: MA Experiment ID: 20001554 Result: Up-regulated in Transcription
  misc_feature: MA Experiment 20001554 PARAMETER Experiment Name: At_Drought_Soil_Dry_P Parameter: Age (day) Value: 21
  misc_feature: MA Experiment 20001554 PARAMETER Experiment Name: At_Drought_Soil_Dry_P Parameter: Organism Value: A. thaliana
  misc_feature: MA Experiment 20001554 PARAMETER Experiment Name: At_Drought_Soil_Dry_P Parameter: Plant Line Value: WS
  misc_feature: MA Experiment 20001554 PARAMETER Experiment Name: At_Drought_Soil_Dry_P Parameter: Post Timepoint (hr) Value: None
  misc_feature: MA Experiment 20001554 PARAMETER Experiment Name: At_Drought_Soil_Dry_P Parameter: Post-Treatment Value: None
  misc_feature: MA Experiment 20001554 PARAMETER Experiment Name: At_Drought_Soil_Dry_P Parameter: Timepoint (day) Value: 7
  misc_feature: MA Experiment 20001554 PARAMETER Experiment Name: At_Drought_Soil_Dry_P Parameter: Treatment Value: Drought vs. No Drought
  misc_feature: MA Experiment ID: 20001555 Result: Up-regulated in Transcription
  misc_feature: MA Experiment 20001555 PARAMETER Experiment Name: At_Drought_Soil_Dry_P Parameter: Age (day) Value: 24
  misc_feature: MA Experiment 20001555 PARAMETER Experiment Name: At_Drought_Soil_Dry_P Parameter: Organism Value: A. thaliana
  misc_feature: MA Experiment 20001555 PARAMETER Experiment Name: At_Drought_Soil_Dry_P Parameter: Plant Line Value: WS
  misc_feature: MA Experiment 20001555 PARAMETER Experiment Name: At_Drought_Soil_Dry_P Parameter: Post Timepoint (hr) Value: None
  misc_feature: MA Experiment 20001555 PARAMETER Experiment Name: At_Drought_Soil_Dry_P Parameter: Post-Treatment Value: None
  misc_feature: MA Experiment 20001555 PARAMETER Experiment Name: At_Drought_Soil_Dry_P Parameter: Timepoint (day) Value: 10
  misc_feature: MA Experiment 20001555 PARAMETER Experiment Name: At_Drought_Soil_Dry_P Parameter: Treatment Value: Drought vs. No Drought
  misc_feature: MA Experiment ID: 20001556 Result: Up-regulated in Transcription
  misc_feature: MA Experiment 20001556 PARAMETER Experiment Name: At_Drought_Soil_Dry_P Parameter: Age (day) Value: 26
  misc_feature: MA Experiment 20001556 PARAMETER Experiment Name: At_Drought_Soil_Dry_P Parameter: Organism Value: A. thaliana
  misc_feature: MA Experiment 20001556 PARAMETER Experiment Name: At_Drought_Soil_Dry_P Parameter: Plant Line Value: WS
  misc_feature: MA Experiment 20001556 PARAMETER Experiment Name: At_Drought_Soil_Dry_P Parameter: Post Timepoint (hr) Value: None
  misc_feature: MA Experiment 20001556 PARAMETER Experiment Name: At_Drought_Soil_Dry_P Parameter: Post-Treatment Value: None
  misc_feature: MA Experiment 20001556 PARAMETER Experiment Name: At_Drought_Soil_Dry_P Parameter: Timepoint (day) Value: 12
  misc_feature: MA Experiment 20001556 PARAMETER Experiment Name: At_Drought_Soil_Dry_P Parameter: Treatment Value: Drought vs. No Drought
  misc_feature: MA Experiment ID: 20001560 Result: Up-regulated in Transcription
  misc_feature: MA Experiment 20001560 PARAMETER Experiment Name: At_Drought_Soil_Dry_P Parameter: Age (day) Value: 28
  misc_feature: MA Experiment 20001560 PARAMETER Experiment Name: At_Drought_Soil_Dry_P Parameter: Organism Value: A. thaliana
  misc_feature: MA Experiment 20001560 PARAMETER Experiment Name: At_Drought_Soil_Dry_P Parameter: Plant Line Value: WS
  misc_feature: MA Experiment 20001560 PARAMETER Experiment Name: At_Drought_Soil_Dry_P Parameter: Post Timepoint (hr) Value: None
  misc_feature: MA Experiment 20001560 PARAMETER Experiment Name: At_Drought_Soil_Dry_P Parameter: Post-Treatment Value: None
  misc_feature: MA Experiment 20001560 PARAMETER Experiment Name: At_Drought_Soil_Dry_P Parameter: Timepoint (day) Value: 14
  misc_feature: MA Experiment 20001560 PARAMETER Experiment Name: At_Drought_Soil_Dry_P Parameter: Treatment Value: Drought vs. No Drought
  misc_feature: MA Experiment ID: 20001757 Result: Down-regulated in Transcription
  misc_feature: MA Experiment 20001757 PARAMETER Experiment Name: At_50mM_NH4NO3_L-to-H_P Parameter: Timepoint (hr) Value: 6
  misc_feature: MA Experiment 20001757 PARAMETER Experiment Name: At_50mM_NH4NO3_L-to-H_P Parameter: Tissue Value: Leaf
  misc_feature: MA Experiment 20001757 PARAMETER Experiment Name: At_50mM_NH4NO3_L-to-H_P Parameter: Treatment Value: 50mM NH4NO3 vs 100mM Mannitol
  misc_feature: MA Experiment ID: 20001770 Result: Up-regulated in Transcription
  misc_feature: MA Experiment 20001770 PARAMETER Experiment Name: At_Far-red-enriched-adult_P Parameter: Age (day) Value: 28
  misc_feature: MA Experiment 20001770 PARAMETER Experiment Name: At_Far-red-enriched-adult_P Parameter: Light Value: Far-red enriched vs. White
  misc_feature: MA Experiment 20001770 PARAMETER Experiment Name: At_Far-red-enriched-adult_P Parameter: Organism Value: A. thaliana
  misc_feature: MA Experiment 20001770 PARAMETER Experiment Name: At_Far-red-enriched-adult_P Parameter: Plant Line Value: Columbia
  misc_feature: MA Experiment 20001770 PARAMETER Experiment Name: At_Far-red-enriched-adult_P Parameter: Timepoint (hr) Value: 8
  misc_feature: MA Experiment 20001770 PARAMETER Experiment Name: At_Far-red-enriched-adult_P Parameter: Tissue Value: Aerial
  misc_feature: MA Experiment ID: 20001904 Result: Up-regulated in Transcription
  misc_feature: MA Experiment 20001904 PARAMETER Experiment Name: At_Drought_Reproduction_P Parameter: Age (day) Value: 37
  misc_feature: MA Experiment 20001904 PARAMETER Experiment Name: At_Drought_Reproduction_P Parameter: Organism Value: A. thaliana
  misc_feature: MA Experiment 20001904 PARAMETER Experiment Name: At_Drought_Reproduction_P Parameter: Plant Line Value: WS
  misc_feature: MA Experiment 20001904 PARAMETER Experiment Name: At_Drought_Reproduction_P Parameter: Timepoint (day) Value: 7
  misc_feature: MA Experiment 20001904 PARAMETER Experiment Name: At_Drought_Reproduction_P Parameter: Tissue Value: Rosettes
  misc_feature: MA Experiment 20001904 PARAMETER Experiment Name: At_Drought_Reproduction_P Parameter: Treatment Value: Drought vs. No Drought
  misc_feature: MA Experiment ID: 20001906 Result: Up-regulated in Transcription
  misc_feature: MA Experiment 20001906 PARAMETER Experiment Name: At_Drought_Reproduction_P Parameter: Age (day) Value: 35
  misc_feature: MA Experiment 20001906 PARAMETER Experiment Name: At_Drought_Reproduction_P Parameter: Organism Value: A. thaliana
  misc_feature: MA Experiment 20001906 PARAMETER Experiment Name: At_Drought_Reproduction_P Parameter: Plant Line Value: WS
  misc_feature: MA Experiment 20001906 PARAMETER Experiment Name: At_Drought_Reproduction_P Parameter: Timepoint (day) Value: 5
  misc_feature: MA Experiment 20001906 PARAMETER Experiment Name: At_Drought_Reproduction_P Parameter: Tissue Value: Siliques
  misc_feature: MA Experiment 20001906 PARAMETER Experiment Name: At_Drought_Reproduction_P Parameter: Treatment Value: Drought vs. No Drought
  misc_feature: MA Experiment ID: 20001908 Result: Up-regulated in Transcription
  misc_feature: MA Experiment 20001908 PARAMETER Experiment Name: At_Drought_Reproduction_P Parameter: Age (day) Value: 40
  misc_feature: MA Experiment 20001908 PARAMETER Experiment Name: At_Drought_Reproduction_P Parameter: Organism Value: A. thaliana
  misc_feature: MA Experiment 20001908 PARAMETER Experiment Name: At_Drought_Reproduction_P Parameter: Plant Line Value: WS
  misc_feature: MA Experiment 20001908 PARAMETER Experiment Name: At_Drought_Reproduction_P Parameter: Timepoint (day) Value: 10
  misc_feature: MA Experiment 20001908 PARAMETER Experiment Name: At_Drought_Reproduction_P Parameter: Tissue Value: Siliques
  misc_feature: MA Experiment 20001908 PARAMETER Experiment Name: At_Drought_Reproduction_P Parameter: Treatment Value: Drought vs. No Drought
  misc_feature: MA Experiment ID: 20001910 Result: Up-regulated in Transcription
  misc_feature: MA Experiment 20001910 PARAMETER Experiment Name: At_Drought_Reproduction_P Parameter: Age (day) Value: 37
  misc_feature: MA Experiment 20001910 PARAMETER Experiment Name: At_Drought_Reproduction_P Parameter: Organism Value: A. thaliana
  misc_feature: MA Experiment 20001910 PARAMETER Experiment Name: At_Drought_Reproduction_P Parameter: Plant Line Value: WS
  misc_feature: MA Experiment 20001910 PARAMETER Experiment Name: At_Drought_Reproduction_P Parameter: Timepoint (day) Value: 7
  misc_feature: MA Experiment 20001910 PARAMETER Experiment Name: At_Drought_Reproduction_P Parameter: Tissue Value: Flowers
  misc_feature: MA Experiment 20001910 PARAMETER Experiment Name: At_Drought_Reproduction_P Parameter: Treatment Value: Drought vs. No Drought
  misc_feature: MA Experiment ID: 20001911 Result: Up-regulated in Transcription
  misc_feature: MA Experiment 20001911 PARAMETER Experiment Name: At_Drought_Reproduction_P Parameter: Age (day) Value: 40
  misc_feature: MA Experiment 20001911 PARAMETER Experiment Name: At_Drought_Reproduction_P Parameter: Organism Value: A. thaliana
  misc_feature: MA Experiment 20001911 PARAMETER Experiment Name: At_Drought_Reproduction_P Parameter: Plant Line Value: WS
  misc_feature: MA Experiment 20001911 PARAMETER Experiment Name: At_Drought_Reproduction_P Parameter: Timepoint (day) Value: 10
  misc_feature: MA Experiment 20001911 PARAMETER Experiment Name: At_Drought_Reproduction_P Parameter: Tissue Value: Flowers
  misc_feature: MA Experiment 20001911 PARAMETER Experiment Name: At_Drought_Reproduction_P Parameter: Treatment Value: Drought vs. No Drought
tcatattcacctaaaaatcaggtcccctctctttatatctctaacattcttatatcagatcatattttttggatttcttgttaagtaacaccaatcttttaaaagtgttttcaggttaatataaaagaataatgatgttttcggtgacggttgcgatccttgtttgtcttattggctacatttaccgatcatttaagcctccaccaccgcgaatctgcggccatcctaacggtcctccggttacttctccgagaatcaagctcagtgatggaagatatcttgcttatagagaatctggggttgatagagacaatgctaactacaagatcattgtcgttcatggcttcaacagctccaaagacactgaatttcccatccctaaggatgtaattgaggagcttgggatatactttgtgttctacgatagagcaggatatggagaaagtgatccacacccatcacgcactgttaagagtgaagcatacgacattcaagaactcgccgataaactcaagatcggaccaaagttctatgttcttggtatatcactaggtgcttactcggtttatagttgcctcaaatacattccccacagactagctggagcagtcttaatggttccatttgtgaactattggtggactaaagtgcctcaagaaaaattgagtaaagcgttggagctaatgccaaagaaagaccaatggacgtttaaagtggctcattatgttccgtggttgttatattggtggttgacccaaaaactatttccgtcttcgagtatggtcacggggaacaatgcgttatgcagcgacaaagatttggtcgtcataaagaagaaaatggagaatccacgccctggcttggaaaaagttagacaacaaggagaccatgaatgtcttcaccgggacatgatagccggattcgcgacatgggaattcgacccgactgaattagaaaatccgtttgcggaaggcgaaggatcggtccacgtttggcaagggatggaagacagaatcattccatacgaaattaatcgatatatatcagagaagcttccatggattaagtaccatgaggtcttaggttatggacatcttctaaacgccgaggaggagaaatgcaaagacattatcaaggcacttcttgtcaactgatgatcatctctacacaagatgccacgaaaaatatagcatatttaatagattttatttatggattataatattatagcatattataagtttgtaagtaagatgaaaaccacttgaaagtc

SEQ ID NO: 86275 - protein, 340 aa, Arabidopsis thaliana; identical to SEQ ID NO: 41700
  peptide (1)..(340): Ceres Seq. ID no. 12688454
  misc_feature (92)..(335): Pfam Name: alpha/beta hydrolase fold Pfam Description: alpha/beta hydrolase fold
  misc_feature (1)..(340): Homolog of NCBI NO: 15242253 NR Description: putative protein; protein id: At5g22460.1, by cDNA: gi_15292740, supported by cDNA: gi_20465594 [Arabidopsis
  misc_feature (1)..(340): Homolog of NCBI NO: 21537089 NR Description: unknown [Arabidopsis thaliana]
  misc_feature (1)..(340): Homolog of NCBI NO: 18410575 NR Description: expressed protein; protein id: At1g74280.1, by cDNA: 119889. [Arabidopsis thaliana] >gi|25406331|pir||C96771
  misc_feature (4)..(338): Homolog of NCBI NO: 21592662 NR Description: unknown [Arabidopsis thaliana]
  misc_feature (4)..(338): Homolog of NCBI NO: 18410582 NR Description: expressed protein; protein id: At1g74300.1, by cDNA: 31039. [Arabidopsis thaliana] >gi|25406334|pir||E96771
  misc_feature (11)..(340): Homolog of NCBI NO: 18404095 NR Description: expressed protein; protein id: At2g36290.1, by cDNA: 5167. [Arabidopsis thaliana] >gi|25408458|pir||H84778
  misc_feature (11)..(340): Homolog of NCBI NO: 28416665 NR Description: At2g36290 [Arabidopsis thaliana]
  misc_feature (1)..(336): Homolog of NCBI NO: 30678800 NR Description: esterase/lipase/thioesterase family [Arabidopsis
  misc_feature (1)..(339): Homolog of NCBI NO: 38346334 NR Description: OSJNBa0073L04.5 [Oryza sativa (japonica
  misc_feature (1)..(338): Homolog of NCBI NO: 15221193 NR Description: unknown protein; protein id: At1g74290.1

SEQ ID NO: 86276 - protein, 339 aa, Arabidopsis thaliana; identical to SEQ ID NO: 41701
  peptide (1)..(339): Ceres Seq. ID no. 12688455
  misc_feature (91)..(334): Pfam Name: alpha/beta hydrolase fold Pfam Description: alpha/beta hydrolase fold
  misc_feature (1)..(339): Homolog of NCBI NO: 15242253 NR Description: putative protein; protein id: At5g22460.1, by cDNA: gi_15292740, supported by cDNA: gi_20465594 [Arabidopsis
  misc_feature (1)..(339): Homolog of NCBI NO: 21537089 NR Description: unknown [Arabidopsis thaliana]
  misc_feature (1)..(339): Homolog of NCBI NO: 18410575 NR Description: expressed protein; protein id: At1g74280.1, by cDNA: 119889. [Arabidopsis thaliana] >gi|25406331|pir||C96771
  misc_feature (3)..(337): Homolog of NCBI NO: 21592662 NR Description: unknown [Arabidopsis thaliana]
  misc_feature (3)..(337): Homolog of NCBI NO: 18410582 NR Description: expressed protein; protein id: At1g74300.1, by cDNA: 31039. [Arabidopsis thaliana] >gi|25406334|pir||E96771
  misc_feature (10)..(339): Homolog of NCBI NO: 18404095 NR Description: expressed protein; protein id: At2g36290.1, by cDNA: 5167. [Arabidopsis thaliana] >gi|25408458|pir||H84778
  misc_feature (10)..(339): Homolog of NCBI NO: 28416665 NR Description: At2g36290 [Arabidopsis thaliana]
  misc_feature (1)..(335): Homolog of NCBI NO: 30678800 NR Description: esterase/lipase/thioesterase family [Arabidopsis
  misc_feature (1)..(338): Homolog of NCBI NO: 38346334 NR Description: OSJNBa0073L04.5 [Oryza sativa (japonica
  misc_feature (1)..(337): Homolog of NCBI NO: 15221193 NR Description: unknown protein; protein id: At1g74290.1

SEQ ID NO: 86277 - protein, 179 aa, Arabidopsis thaliana; identical to SEQ ID NO: 41702
  peptide (1)..(179): Ceres Seq. ID no. 12688456
  misc_feature (1)..(174): Pfam Name: alpha/beta hydrolase fold Pfam Description: alpha/beta hydrolase fold
  misc_feature (1)..(179): Homolog of NCBI NO: 15242253 NR Description: putative protein; protein id: At5g22460.1, by cDNA: gi_15292740, supported by cDNA: gi_20465594 [Arabidopsis
  misc_feature (1)..(179): Homolog of NCBI NO: 21537089 NR Description: unknown [Arabidopsis thaliana]
  misc_feature (1)..(179): Homolog of NCBI NO: 18410575 NR Description: expressed protein; protein id: At1g74280.1, by cDNA: 119889. [Arabidopsis thaliana] >gi|25406331|pir||C96771
  misc_feature (1)..(177): Homolog of NCBI NO: 21592662 NR Description: unknown [Arabidopsis thaliana]
  misc_feature (1)..(177): Homolog of NCBI NO: 18410582 NR Description: expressed protein; protein id: At1g74300.1, by cDNA: 31039. [Arabidopsis thaliana] >gi|25406334|pir||E96771
  misc_feature (1)..(179): Homolog of NCBI NO: 18404095 NR Description: expressed protein; protein id: At2g36290.1, by cDNA: 5167. [Arabidopsis thaliana] >gi|25408458|pir||H84778
  misc_feature (1)..(179): Homolog of NCBI NO: 28416665 NR Description: At2g36290 [Arabidopsis thaliana]
  misc_feature (1)..(175): Homolog of NCBI NO: 30678800 NR Description: esterase/lipase/thioesterase family [Arabidopsis
  misc_feature (1)..(178): Homolog of NCBI NO: 38346334 NR Description: OSJNBa0073L04.5 [Oryza sativa (japonica
  misc_feature (1)..(177): Homolog of NCBI NO: 15221193 NR Description: unknown protein; protein id: At1g74290.1

SEQ ID NO: 86278 - DNA, 2061 bp, Arabidopsis thaliana
  misc_feature (1)..(2061): Ceres Seq. ID no. 12688506
  misc_feature: MA Experiment ID: 20000306 Result: Down-regulated in Transcription
  misc_feature: MA Experiment 20000306 PARAMETER Experiment Name: At_Germinating_Seeds_Sub_P Parameter: Age (hr) Value: 6 vs. 0
  misc_feature: MA Experiment 20000306 PARAMETER Experiment Name: At_Germinating_Seeds_Sub_P Parameter: Organism Value: A. thaliana
  misc_feature: MA Experiment 20000306 PARAMETER Experiment Name: At_Germinating_Seeds_Sub_P Parameter: Plant Line Value: WS
  misc_feature: MA Experiment 20000306 PARAMETER Experiment Name: At_Germinating_Seeds_Sub_P Parameter: Tissue Value: Germinating Seeds
  misc_feature: MA Experiment ID: 20000307 Result: Down-regulated in Transcription
  misc_feature: MA Experiment 20000307 PARAMETER Experiment Name: At_Germinating_Seeds_Sub_P Parameter: Age (hr) Value: 24 vs. 0
  misc_feature: MA Experiment 20000307 PARAMETER Experiment Name: At_Germinating_Seeds_Sub_P Parameter: Organism Value: A. thaliana
  misc_feature: MA Experiment 20000307 PARAMETER Experiment Name: At_Germinating_Seeds_Sub_P Parameter: Plant Line Value: WS
  misc_feature: MA Experiment 20000307 PARAMETER Experiment Name: At_Germinating_Seeds_Sub_P Parameter: Tissue Value: Germinating Seeds
  misc_feature: MA Experiment ID: 20000315 Result: Down-regulated in Transcription
  misc_feature: MA Experiment 20000315 PARAMETER Experiment Name: At_14day_Shoots-Roots_Sub_P Parameter: Age (day) Value: 14
  misc_feature: MA Experiment 20000315 PARAMETER Experiment Name: At_14day_Shoots-Roots_Sub_P Parameter: Organism Value: A. thaliana
  misc_feature: MA Experiment 20000315 PARAMETER Experiment Name: At_14day_Shoots-Roots_Sub_P Parameter: Plant Line Value: WS
  misc_feature: MA Experiment 20000315 PARAMETER Experiment Name: At_14day_Shoots-Roots_Sub_P Parameter: Tissue Value: Shoots vs. Whole Plant
  misc_feature: MA Experiment ID: 20000327 Result: Down-regulated in Transcription
  misc_feature: MA Experiment 20000327 PARAMETER Experiment Name: At_42deg_Heat_Sub_P Parameter: Age (day) Value: 14
  misc_feature: MA Experiment 20000327 PARAMETER Experiment Name: At_42deg_Heat_Sub_P Parameter: Organism Value: A. thaliana
  misc_feature: MA Experiment 20000327 PARAMETER Experiment Name: At_42deg_Heat_Sub_P Parameter: Plant Line Value: WS
  misc_feature: MA Experiment 20000327 PARAMETER Experiment Name: At_42deg_Heat_Sub_P Parameter: Temperature (deg C) Value: 42 vs. 22
  misc_feature: MA Experiment 20000327 PARAMETER Experiment Name: At_42deg_Heat_Sub_P Parameter: Timepoint (hr) Value: 1
  misc_feature: MA Experiment 20000327 PARAMETER Experiment Name: At_42deg_Heat_Sub_P Parameter: Tissue Value: Aerial
  misc_feature: MA Experiment ID: 20000328 Result: Down-regulated in Transcription
  misc_feature: MA Experiment 20000328 PARAMETER Experiment Name: At_42deg_Heat_Sub_P Parameter: Age (day) Value: 14
  misc_feature: MA Experiment 20000328 PARAMETER Experiment Name: At_42deg_Heat_Sub_P Parameter: Organism Value: A. thaliana
  misc_feature: MA Experiment 20000328 PARAMETER Experiment Name: At_42deg_Heat_Sub_P Parameter: Plant Line Value: WS
  misc_feature: MA Experiment 20000328 PARAMETER Experiment Name: At_42deg_Heat_Sub_P Parameter: Temperature (deg C) Value: 42 vs. 22
  misc_feature: MA Experiment 20000328 PARAMETER Experiment Name: At_42deg_Heat_Sub_P Parameter: Timepoint (hr) Value: 6
  misc_feature: MA Experiment 20000328 PARAMETER Experiment Name: At_42deg_Heat_Sub_P Parameter: Tissue Value: Aerial
aaaaaatataaattaaataaagaatcccataaatatctctctatcgaactctctctgcttttacaaatctcagaatctccttcagcgaattcacatctcagctgcttttgaatccgccgtaactaaaaacaatcctccttttctcgattcgttaaactatggccccgccggcaggacaaacggcggcggtggctgaagcggctggcgccgatggtgctccaccgcagcagcagcgtggatttggttccacgatttccggcatcgttagaatcgccgtcttttggtattttgcttctaagttcttttctcctaagcagaaacctatggatcccactgctccgtctcagctcatgactaatctcttccacaagggcgaatcattggatatgtggttttatctatcagagcaggagaagttcaatgactttggcaatgatcgtgcgctatattggcatgagacgaatataccttatgctgtatggacaccagagagtattaggaccaagtcacttacgtattatccatctgagacactacagaataatggaagtctgtatgctcatatcttttttgctcgatctggatttcccattgaccccactgatcctgaatatcaacctcttaatagttttagtaggacgcatgctgtggcgacttactttccaaagcagaaaaaaaataagaagaagagtctcttgggcagtcccaaagactctgatgaatccgaacctgaagttgagaaagttggagataagaaatcagatcccaaggaagaggtccctgtggaatggatatccctctggaaacctaatgtcacgattaacctggttgatgattttactcactattcacagaatggtgtaccaccaaacattgctcctcacttactggtagaaccgaccacaggaaattactatcctacaatttacttcaatgagttttggctgctaagggacaagttcattccagtcaatgagacagtctcagaactaccactaaatctggaaataagtcccataagcatgatgaagtggcaactgtttcagcaagttgatcaatctttccagatgcagcgtagctatggaagcatgcttgacggtgaatctgacgaactaaagaaggtgtttttggaaggaaatccctatcttttggggatcacgatgtttgtttcgatgcttcattcagtgttcgacttcctggcattcaaaaatgatatccaattctggaacaaaaataaatctatggaagggctgtctgcaaagtctgttgtactgaactttatctgtcagtttgtcatcttcctctacttgcttgacaacgacacttcatggatgatactggctagttccggagtcggtgtctgcattgagttctggaaaatagggaaagccatgcgcatagaggttgatcgaagtggaatgattccaaggttgaggttccatgatcgtgaatcgtatgcaagcaataaaaccaaggagtatgatgacattgccatcaaattcttatcctatgtgctcctcctccttgtcattggcttgtccatatattctctcgcttatgaacgccacaagagctggtattcttggatactatcttcactaacaagctgtgtctacatgttcggtttcatcatgatgtgtcctcagctattcatcaactacaagcttaaatcagtggcacatttaccatggagacagatgacttacaagttcctcaacaccattatcgacgatctctttgcctttgtcatcaaaatgccgattttacatcgactttctgtattcagagatgatgtgatattcttgatatacttataccaaaggtgggtttacccagtggataagacacgtgtgaacgagttcggttttggaggtgaggatgaaactgcagagaagaagttgatcactgagaaagaagaagaagacaagaaaacaaactaatctcttctcttcttcaaattttattacagttcagttatagtgtcttaatttatttttgttctcacttttggaaattgttttgttcaagtttaatgtcaaccctcaagacacattattaagc

SEQ ID NO: 86279 - protein, 593 aa, Arabidopsis thaliana; identical to SEQ ID NO: 50365
  peptide (1)..(593): Ceres Seq. ID no. 12688507
  misc_feature (29)..(576): Pfam Name: Cleft lip and palate transmembrane protein 1 (CLPTM1) Pfam Description: Cleft lip and palate transmembrane protein 1
  misc_feature (1)..(593): Homolog of NCBI NO: 8809702 NR Description: gb|AAC97420.1~gene_id:MQM1.16~strong similarity
  misc_feature (1)..(593): Homolog of NCBI NO: 15241650 NR Description: cleft lip and palate associated transmembrane protein id: At5g08500.1, supported by cDNA: gi_20466779 thaliana] >gi|9759344|dbj|BAB09999.1| cleft lip and
  misc_feature (1)..(575): Homolog of NCBI NO: 38346578 NR Description: OSJNBa0064D20.9 [Oryza sativa (japonica
  misc_feature (1)..(575): Homolog of NCBI NO: 32479676 NR Description: P0076O17.9 [Oryza sativa (japonica
  misc_feature (21)..(577): Homolog of NCBI NO: 4502897 NR Description: cleft lip and palate associated transmembrane protein 1 [Homo sapiens] >gi|4063033|gb|AAC98151.1| associated
  misc_feature (21)..(577): Homolog of NCBI NO: 13436080 NR Description: cleft lip and palate associated transmembrane
  misc_feature (21)..(577): Homolog of NCBI NO: 32880151 NR Description: cleft lip and palate associated transmembrane
  misc_feature (21)..(577): Homolog of NCBI NO: 27676422 NR Description: similar to cleft lip and palate associated
  misc_feature (21)..(577): Homolog of NCBI NO: 18381157 NR Description: Similar to cleft lip and palate associated
  misc_feature (1)..(575): Homolog of NCBI NO: 17550864 NR Description: Putative endoplasmic reticulum membrane protein member, with at least 5 transmembrane domains, of eukaryotic [Caenorhabditis elegans] >gi|14573912|gb|AAK68233.1|AC006615_7

SEQ ID NO: 86280 - protein, 538 aa, Arabidopsis thaliana; identical to SEQ ID NO: 50366
  peptide (1)..(538): Ceres Seq. ID no. 12688508
  misc_feature (1)..(521): Pfam Name: Cleft lip and palate transmembrane protein 1 (CLPTM1) Pfam Description: Cleft lip and palate transmembrane protein 1
  misc_feature (1)..(538): Homolog of NCBI NO: 8809702 NR Description: gb|AAC97420.1~gene_id:MQM1.16~strong similarity
  misc_feature (1)..(538): Homolog of NCBI NO: 15241650 NR Description: cleft lip and palate associated transmembrane protein id: At5g08500.1, supported by cDNA: gi_20466779 thaliana] >gi|9759344|dbj|BAB09999.1| cleft lip and
  misc_feature (1)..(520): Homolog of NCBI NO: 38346578 NR Description: OSJNBa0064D20.9 [Oryza sativa (japonica
  misc_feature (1)..(520): Homolog of NCBI NO: 32479676 NR Description: P0076O17.9 [Oryza sativa (japonica
  misc_feature (1)..(522): Homolog of NCBI NO: 4502897 NR Description: cleft lip and palate associated transmembrane protein 1 [Homo sapiens] >gi|4063033|gb|AAC98151.1| associated
  misc_feature (1)..(522): Homolog of NCBI NO: 13436080 NR Description: cleft lip and palate associated transmembrane
  misc_feature (1)..(522): Homolog of NCBI NO: 32880151 NR Description: cleft lip and palate associated transmembrane
  misc_feature (1)..(522): Homolog of NCBI NO: 27676422 NR Description: similar to cleft lip and palate associated
  misc_feature (1)..(522): Homolog of NCBI NO: 18381157 NR Description: Similar to cleft lip and palate associated
  misc_feature (1)..(520): Homolog of NCBI NO: 17550864 NR Description: Putative endoplasmic reticulum membrane protein member, with at least 5 transmembrane domains, of eukaryotic [Caenorhabditis elegans] >gi|14573912|gb|AAK68233.1|AC006615_7

SEQ ID NO: 86281 - protein, 529 aa, Arabidopsis thaliana; identical to SEQ ID NO: 50367
  peptide (1)..(529): Ceres Seq. ID no. 12688509
  misc_feature (1)..(512): Pfam Name: Cleft lip and palate transmembrane protein 1 (CLPTM1) Pfam Description: Cleft lip and palate transmembrane protein 1
  misc_feature (1)..(529): Homolog of NCBI NO: 8809702 NR Description: gb|AAC97420.1~gene_id:MQM1.16~strong similarity
  misc_feature (1)..(529): Homolog of NCBI NO: 15241650 NR Description: cleft lip and palate associated transmembrane protein id: At5g08500.1, supported by cDNA: gi_20466779 thaliana] >gi|9759344|dbj|BAB09999.1| cleft lip and
  misc_feature (1)..(511): Homolog of NCBI NO: 38346578 NR Description: OSJNBa0064D20.9 [Oryza sativa (japonica
  misc_feature (1)..(511): Homolog of NCBI NO: 32479676 NR Description: P0076O17.9 [Oryza sativa (japonica
  misc_feature (1)..(513): Homolog of NCBI NO: 4502897 NR Description: cleft lip and palate associated transmembrane protein 1 [Homo sapiens] >gi|4063033|gb|AAC98151.1| associated
  misc_feature (1)..(513): Homolog of NCBI NO: 13436080 NR Description: cleft lip and palate associated transmembrane
  misc_feature (1)..(513): Homolog of NCBI NO: 32880151 NR Description: cleft lip and palate associated transmembrane
  misc_feature (1)..(513): Homolog of NCBI NO: 27676422 NR Description: similar to cleft lip and palate associated
  misc_feature (1)..(513): Homolog of NCBI NO: 18381157 NR Description: Similar to cleft lip and palate associated
  misc_feature (1)..(511): Homolog of NCBI NO: 17550864 NR Description: Putative endoplasmic reticulum membrane protein member, with at least 5 transmembrane domains, of eukaryotic [Caenorhabditis elegans] >gi|14573912|gb|AAK68233.1|AC006615_7

SEQ ID NO: 86282 - DNA, 3162 bp, Arabidopsis thaliana
  misc_feature (1)..(3162): Ceres Seq. ID no. 12688518
  misc_feature: MA Experiment ID: 20000184 Result: Up-regulated in Transcription
  misc_feature: MA Experiment 20000184 PARAMETER Experiment Name: At_Shoots__P Parameter: Age (day) Value: 7
  misc_feature: MA Experiment 20000184 PARAMETER Experiment Name: At_Shoots__P Parameter: Tissue Value: Shoots vs. Whole Plant
  misc_feature: MA Experiment ID: 20000268 Result: Up-regulated in Transcription
  misc_feature: MA Experiment 20000268 PARAMETER Experiment Name: At_100mM_NaCl__P Parameter: Age (day) Value: 14
  misc_feature: MA Experiment 20000268 PARAMETER Experiment Name: At_100mM_NaCl__P Parameter: Organism Value: A. thaliana
  misc_feature: MA Experiment 20000268 PARAMETER Experiment Name: At_100mM_NaCl__P Parameter: Plant Line Value: WS
  misc_feature: MA Experiment 20000268 PARAMETER Experiment Name: At_100mM_NaCl__P Parameter: Timepoint (hr) Value: 6
  misc_feature: MA Experiment 20000268 PARAMETER Experiment Name: At_100mM_NaCl__P Parameter: Tissue Value: Whole Plant
  misc_feature: MA Experiment 20000268 PARAMETER Experiment Name: At_100mM_NaCl__P Parameter: Treatment Value: 100mM NaCl vs. No Treatment
  misc_feature: MA Experiment ID: 20000438 Result: Up-regulated in Transcription
  misc_feature: MA Experiment 20000438 PARAMETER Experiment Name: At_Shoots__P Parameter: Age (day) Value: 14
  misc_feature: MA Experiment 20000438 PARAMETER Experiment Name: At_Shoots__P Parameter: Tissue Value: Shoots vs. Whole Plant
  misc_feature: MA Experiment ID: 20000441 Result: Up-regulated in Transcription
  misc_feature: MA Experiment 20000441 PARAMETER Experiment Name: At_1uM_BR-BRZ__P Parameter: Tissue Value: Shoot Apices
  misc_feature: MA Experiment 20000441 PARAMETER Experiment Name: At_1uM_BR-BRZ__P Parameter: Treatment Value: 1uM BR vs. No Treatment
  misc_feature: MA Experiment ID: 20000455 Result: Up-regulated in Transcription
  misc_feature: MA Experiment 20000455 PARAMETER Experiment Name: At_100uM_ABA_P Parameter: Age (day) Value: 16
  misc_feature: MA Experiment 20000455 PARAMETER Experiment Name: At_100uM_ABA_P Parameter: Organism Value: A. thaliana
  misc_feature: MA Experiment 20000455 PARAMETER Experiment Name: At_100uM_ABA_P Parameter: Plant Line Value: WS
  misc_feature: MA Experiment 20000455 PARAMETER Experiment Name: At_100uM_ABA_P Parameter: Timepoint (hr) Value: 48
  misc_feature: MA Experiment 20000455 PARAMETER Experiment Name: At_100uM_ABA_P Parameter: Tissue Value: Aerial
  misc_feature: MA Experiment 20000455 PARAMETER Experiment Name: At_100uM_ABA_P Parameter: Treatment Value: 100uM ABA vs. No Treatment
  misc_feature: MA Experiment ID: 20000496 Result: Down-regulated in Transcription
  misc_feature: MA Experiment 20000496 PARAMETER Experiment Name: At_Guard_Cells_P Parameter: Harvest Date Value: 7/19/2002
  misc_feature: MA Experiment 20000496 PARAMETER Experiment Name: At_Guard_Cells_P Parameter: Organism Value: Canola
  misc_feature: MA Experiment 20000496 PARAMETER Experiment Name: At_Guard_Cells_P Parameter: Tissue Value: Guard Cells vs. Leaves
  misc_feature: MA Experiment ID: 20001247 Result: Up-regulated in Transcription
  misc_feature: MA Experiment 20001247 PARAMETER Experiment Name: At_Far-red-induction_P Parameter: Age (day) Value: 7
  misc_feature: MA Experiment 20001247 PARAMETER Experiment Name: At_Far-red-induction_P Parameter: Light Value: Far-red vs. White
  misc_feature: MA Experiment 20001247 PARAMETER Experiment Name: At_Far-red-induction_P Parameter: Organism Value: A. thaliana
  misc_feature: MA Experiment 20001247 PARAMETER Experiment Name: At_Far-red-induction_P Parameter: Plant Line Value: Columbia
  misc_feature: MA Experiment 20001247 PARAMETER Experiment Name: At_Far-red-induction_P Parameter: Timepoint (hr) Value: 1
  misc_feature: MA Experiment 20001247 PARAMETER Experiment Name: At_Far-red-induction_P Parameter: Tissue Value: Whole Plant
  misc_feature: MA Experiment ID: 20001248 Result: Down-regulated in Transcription
  misc_feature: MA Experiment 20001248 PARAMETER Experiment Name: At_Far-red-induction_P Parameter: Age (day) Value: 7
  misc_feature: MA Experiment 20001248 PARAMETER Experiment Name: At_Far-red-induction_P Parameter: Light Value: Far-red vs. White
  misc_feature: MA Experiment 20001248 PARAMETER Experiment Name: At_Far-red-induction_P Parameter: Organism Value: A. thaliana
  misc_feature: MA Experiment 20001248 PARAMETER Experiment Name: At_Far-red-induction_P Parameter: Plant Line Value: Columbia
  misc_feature: MA Experiment 20001248 PARAMETER Experiment Name: At_Far-red-induction_P Parameter: Timepoint (hr) Value: 4
  misc_feature: MA Experiment 20001248 PARAMETER Experiment Name: At_Far-red-induction_P Parameter: Tissue Value: Whole Plant
  misc_feature: MA Experiment ID: 20001555 Result: Down-regulated in Transcription
  misc_feature: MA Experiment 20001555 PARAMETER Experiment Name: At_Drought_Soil_Dry_P Parameter: Age (day) Value: 24
  misc_feature: MA Experiment 20001555 PARAMETER Experiment Name: At_Drought_Soil_Dry_P Parameter: Organism Value: A. thaliana
  misc_feature: MA Experiment 20001555 PARAMETER Experiment Name: At_Drought_Soil_Dry_P Parameter: Plant Line Value: WS
  misc_feature: MA Experiment 20001555 PARAMETER Experiment Name: At_Drought_Soil_Dry_P Parameter: Post Timepoint (hr) Value: None
  misc_feature: MA Experiment 20001555 PARAMETER Experiment Name: At_Drought_Soil_Dry_P Parameter: Post-Treatment Value: None
  misc_feature: MA Experiment 20001555 PARAMETER Experiment Name: At_Drought_Soil_Dry_P Parameter: Timepoint (day) Value: 10
  misc_feature: MA Experiment 20001555 PARAMETER Experiment Name: At_Drought_Soil_Dry_P Parameter: Treatment Value: Drought vs. No Drought
  misc_feature: MA Experiment ID: 20001556 Result: Down-regulated in Transcription
  misc_feature: MA Experiment 20001556 PARAMETER Experiment Name: At_Drought_Soil_Dry_P Parameter: Age (day) Value: 26
  misc_feature: MA Experiment 20001556 PARAMETER Experiment Name: At_Drought_Soil_Dry_P Parameter: Organism Value: A. thaliana
  misc_feature: MA Experiment 20001556 PARAMETER Experiment Name: At_Drought_Soil_Dry_P Parameter: Plant Line Value: WS
  misc_feature: MA Experiment 20001556 PARAMETER Experiment Name: At_Drought_Soil_Dry_P Parameter: Post Timepoint (hr) Value: None
  misc_feature: MA Experiment 20001556 PARAMETER Experiment Name: At_Drought_Soil_Dry_P Parameter: Post-Treatment Value: None
  misc_feature: MA Experiment 20001556 PARAMETER Experiment Name: At_Drought_Soil_Dry_P Parameter: Timepoint (day) Value: 12
  misc_feature: MA Experiment 20001556 PARAMETER Experiment Name: At_Drought_Soil_Dry_P Parameter: Treatment Value: Drought vs. No Drought
  misc_feature: MA Experiment ID: 20001557 Result: Down-regulated in Transcription
  misc_feature: MA Experiment 20001557 PARAMETER Experiment Name: At_Drought_Soil_Dry_P Parameter: Age (day) Value: 27
  misc_feature: MA Experiment 20001557 PARAMETER Experiment Name: At_Drought_Soil_Dry_P Parameter: Organism Value: A. thaliana
  misc_feature: MA Experiment 20001557 PARAMETER Experiment Name: At_Drought_Soil_Dry_P Parameter: Plant Line Value: WS
  misc_feature: MA Experiment 20001557 PARAMETER Experiment Name: At_Drought_Soil_Dry_P Parameter: Post Timepoint (hr) Value: 3
  misc_feature: MA Experiment 20001557 PARAMETER Experiment Name: At_Drought_Soil_Dry_P Parameter: Post-Treatment Value: Re-Water vs. No Drought
  misc_feature: MA Experiment 20001557 PARAMETER Experiment Name: At_Drought_Soil_Dry_P Parameter: Timepoint (day) Value: 13
  misc_feature: MA Experiment 20001557 PARAMETER Experiment Name: At_Drought_Soil_Dry_P Parameter: Treatment Value: Drought vs. No Drought
  misc_feature: MA Experiment ID: 20001558 Result: Down-regulated in Transcription
  misc_feature: MA Experiment 20001558 PARAMETER Experiment Name: At_Drought_Soil_Dry_P Parameter: Age (day) Value: 27
  misc_feature: MA Experiment 20001558 PARAMETER Experiment Name: At_Drought_Soil_Dry_P Parameter: Organism Value: A. thaliana
  misc_feature: MA Experiment 20001558 PARAMETER Experiment Name: At_Drought_Soil_Dry_P Parameter: Plant Line Value: WS
  misc_feature: MA Experiment 20001558 PARAMETER Experiment Name: At_Drought_Soil_Dry_P Parameter: Post Timepoint (hr) Value: 6
  misc_feature: MA Experiment 20001558 PARAMETER Experiment Name: At_Drought_Soil_Dry_P Parameter: Post-Treatment Value: Re-Water vs. No Drought
  misc_feature: MA Experiment 20001558 PARAMETER Experiment Name: At_Drought_Soil_Dry_P Parameter: Timepoint (day) Value: 13
  misc_feature: MA Experiment 20001558 PARAMETER Experiment Name: At_Drought_Soil_Dry_P Parameter: Treatment Value: Drought vs. No Drought
  misc_feature: MA Experiment ID: 20001559 Result: Down-regulated in Transcription
  misc_feature: MA Experiment 20001559 PARAMETER Experiment Name: At_Drought_Soil_Dry_P Parameter: Age (day) Value: 28
  misc_feature: MA Experiment 20001559 PARAMETER Experiment Name: At_Drought_Soil_Dry_P Parameter: Organism Value: A. thaliana
  misc_feature: MA Experiment 20001559 PARAMETER Experiment Name: At_Drought_Soil_Dry_P Parameter: Plant Line Value: WS
  misc_feature: MA Experiment 20001559 PARAMETER Experiment Name: At_Drought_Soil_Dry_P Parameter: Post Timepoint (hr) Value: 29
  misc_feature: MA Experiment 20001559 PARAMETER Experiment Name: At_Drought_Soil_Dry_P Parameter: Post-Treatment Value: Re-Water vs. No Drought
  misc_feature: MA Experiment 20001559 PARAMETER Experiment Name: At_Drought_Soil_Dry_P Parameter: Timepoint (day) Value: 14
  misc_feature: MA Experiment 20001559 PARAMETER Experiment Name: At_Drought_Soil_Dry_P Parameter: Treatment Value: Drought vs. No Drought
  misc_feature: MA Experiment ID: 20001560 Result: Down-regulated in Transcription
  misc_feature: MA Experiment 20001560 PARAMETER Experiment Name: At_Drought_Soil_Dry_P Parameter: Age (day) Value: 28
  misc_feature: MA Experiment 20001560 PARAMETER Experiment Name: At_Drought_Soil_Dry_P Parameter: Organism Value: A. thaliana
  misc_feature: MA Experiment 20001560 PARAMETER Experiment Name: At_Drought_Soil_Dry_P Parameter: Plant Line Value: WS
  misc_feature: MA Experiment 20001560 PARAMETER Experiment Name: At_Drought_Soil_Dry_P Parameter: Post Timepoint (hr) Value: None
  misc_feature: MA Experiment 20001560 PARAMETER Experiment Name: At_Drought_Soil_Dry_P Parameter: Post-Treatment Value: None
  misc_feature: MA Experiment 20001560 PARAMETER Experiment Name: At_Drought_Soil_Dry_P Parameter: Timepoint (day) Value: 14
  misc_feature: MA Experiment 20001560 PARAMETER Experiment Name: At_Drought_Soil_Dry_P Parameter: Treatment Value: Drought vs. No Drought
gtatattttccttttgattcccagaaaatgtcactagattccactttctagcttgcgttttctcgggaatctgaagtttccttttgtgttgaatcgctgggaaaaatctgatggaagcagcttcaagttttttgtgtagaagtattcggattccgtcgactactacggcgacggcggcgttcacgttcactcgaccgccgttaaactacgtttgtgttgtcggagttcgtgttttcccgacgcggaaggtcttttgcagcggcgttaatggcggctccagtgttactaagaagaagccacgaaggaaaagtaacgtttccgataaacttaggtttaagaaaattgagaagaggaacgataatactgaatctgagagtttaagtgttgttgaggaaccgaagaacgataaagaattgagtcttcgagctttgaatcaaaatggtgatccattagggcggagagatttagggaggaacgtagtgaagtggattagtcaggcgatgaaagcgatggcttcggattttgcaactgcggaggttcagggggagttttcggagttgaggcagaacgtcggatctggtttgacgtttgtgattcaagctcaaccgtatctcaatgctattcccatgccattaggttctgaagtcatttgtttgaaggcttgtactcattatcctaccttgttcgatcatttccagagagagttgcgtgatgttcttcaagacctggagcggaagaatataatggagagttggaaggagtctgagtcttggaagctgctcaaggagattgcaaattcagctcagcatcgggaggttgctcgcaaagctgctcaagctaagcctgttcaaggagttttggggatggactcagagaaggtgaaggctatacaggaaaggattgatgagttcaccagccagatgtcgcagttacttcaagtggaacgagatacagaactggaagttacacaggaagaactagatgttgttcctactccagatgagagctctgattcctcaaaaccgattgagttcttggttaggcatggtgatgctccacaggaactttgtgatacaatttgcaatttgtatgcagttagtacctccacagggctcggaggtatgcacttggtgttgtttaaggttgggggaaaccaccgtcttcctcctactacactttcccctggtgacatggtttgcataagagtttgtgacagtaggggtgctggggcaactgcctgtacgcagggctttgttcacaaccttggagaagatgggtgtagcattggtgtggctctagaatctcgtcatggagatcctactttttccaagctctttggaaagagtgtgagaattgatcgtattcatgggttggccgatgcccttacttacgagcgtaactgcgaagccctaatgcttctgcagaagaatggtctgcagaagaaaaatccatcaatatctgttgtggcgactttatttggggatggtgaagatataacatggctggagcaaaatgattatgtagactggagtgaagcggagttgagtgatgagccagtgagtaagttatttgattcttcccaaaggagagccatagctcttggagtaaacaaaaaaagacctgttatgatagtccaaggacctcctggcacgggaaagactggaatgcttaaggaggtcattaccctggctgttcaacagggggaaagagtacttgtaacagcgcctactaatgcagctgttgataacatggtcgagaagctcttgcatcttggactaaacattgtccgagtaggaaatcccgctagaatatcatctgctgttgcttcaaagtctttgggggaaattgtgaactctaagcttgcaagcttccgagcagaattggaaaggaagaagtcagatttaagaaaagatcttcggcaatgcctgagggatgatgttcttgcagctggcattcggcagctcttgaaacagcttggaaagacgttgaagaagaaggaaaaagagactgtgaaggaaatactatcaaatgcacaggttgtttttgccactaacattggagcagctgatcctttgattaggaggttagaaacatttgatttggttgttatagatgaagctggtcagtctatcgagccttcatgctggatcccaatattgcaagggaaacgttgtattctttccggtgatccatgccaattagcaccagttgttctatcacgtaaagctttagaaggtggacttggtgtatccttactggaaagagctgcatctttacatgatggagttcttgcgacaaaattaacaactcagtatcgtatgaacgatgtaatcgctggttgggcatcaaaggagatgtatggtggatggttgaaatctgctccaagtgtggcctctcatctgcttatcgattctccttttgtgaaggctacttggataacgcaatgcccactggttctgcttgacacaagaatgccatatgggagtttatccgtgggctgcgaggagcgtttggatccagctggcacaggctcattatacaatgaaggagaagcagatattgtggttaatcacgtcatttctttgatatacgcaggtgttagtccaatggctattgctgttcaatccccatatgttgctcaggttcaacttctcagagaaaggctggatgattttccagtggctgatggagttgaggtcgcaaccattgacagctttcaagggcgggaggctgatgcagtgatcatctcaatggtacggtcaaacaacctaggtgcagtgggattcctaggggatagcagacggatgaatgtagccattacaagagcccggaagcacgtggcagtggtatgtgacagctccacaatctgccacaacacgttcctagcaagactgttgcgccacatacgctatttcgggagagttaagcatgcagaccctggtagcttgggagggtcaggactaggcttggacccaatgttgccctaccttggttaaaaccgttgtaagtactacaaaaaccagaaccttctgcttactctctccctctctctctatctctcccgctgaaagaaacagtttccatagcaaattgtcgttgtacagaacaattgttaccacagaaaatagtctctgtatatgatgacaatatataattcatgta

SEQ ID NO: 86283 - protein, 961 aa, Arabidopsis thaliana
  peptide (1)..(961): Ceres Seq. ID no. 12688519
  misc_feature (488)..(540): Pfam Name: DEAD/DEAH box helicase Pfam Description: DEAD/DEAH box helicase
  misc_feature (417)..(941): Homolog of NCBI NO: 1082534 NR Description: Ig mu chain switch region binding protein 2 -
  misc_feature (417)..(941): Homolog of NCBI NO: 4504623 NR Description: immunoglobulin mu binding protein 2 [Homo sapiens]
  misc_feature (417)..(941): Homolog of NCBI NO: 2498040 NR Description: DNA-BINDING PROTEIN SMUBP-2 (IMMUNOGLOBULIN MU
  misc_feature (417)..(941): Homolog of NCBI NO: 908917 NR Description: DNA helicase [Homo sapiens]
  misc_feature (417)..(941): Homolog of NCBI NO: 13928794 NR Description: immunoglobulin mu binding protein 2; S mu binding protein 2 [Rattus norvegicus]
  misc_feature (417)..(941): Homolog of NCBI NO: 6678029 NR Description: immunoglobulin mu binding protein 2;
  misc_feature (348)..(941): Homolog of NCBI NO: 28828207 NR Description: similar to Rattus norvegicus (Rat).
  misc_feature (482)..(936): Homolog of NCBI NO: 7446669 NR Description: probable helicase At2g03270 [imported] -
  misc_feature (482)..(936): Homolog of NCBI NO: 11191231 NR Description: putative helicase [Arabidopsis thaliana]
  misc_feature (482)..(936): Homolog of NCBI NO: 18395518 NR Description: putative helicase; protein id: At2g03270.1, by cDNA: gi_20259168 [Arabidopsis thaliana] putative helicase [Arabidopsis thaliana]
MEAASSFLCRSIRIPSTTTATAAFTFTRPPLNYVCVVGVRVFPTRKVFCSGVNGGSSVTKKKPRRKSNVSDKLRFKKIEKRNDNTESESLSVVEEPKNDKELSLRALNQNGDPLGRRDLGRNVVKWISQAMKAMASDFATAEVQGEFSELRQNVGSGLTFVIQAQPYLNAIPMPLGSEVICLKACTHYPTLFDHFQRELRDVLQDLERKNIMESWKESESWKLLKEIANSAQHREVARKAAQAKPVQGVLGMDSEKVKAIQERIDEFTSQMSQLLQVERDTELEVTQEELDVVPTPDESSDSSKPIEFLVRHGDAPQELCDTICNLYAVSTSTGLGGMHLVLFKVGGNHRLPPTTLSPGDMVCIRVCDSRGAGATACTQGFVHNLGEDGCSIGVALESRHGDPTFSKLFGKSVRIDRIHGLADALTYERNCEALMLLQKNGLQKKNPSISVVATLFGDGEDITWLEQNDYVDWSEAELSDEPVSKLFDSSQRRAIALGVNKKRPVMIVQGPPGTGKTGMLKEVITLAVQQGERVLVTAPTNAAVDNMVEKLLHLGLNIVRVGNPARISSAVASKSLGEIVNSKLASFRAELERKKSDLRKDLRQCLRDDVLAAGIRQLLKQLGKTLKKKEKETVKEILSNAQVVFATNIGAADPLIRRLETFDLVVIDEAGQSIEPSCWIPILQGKRCILSGDPCQLAPVVLSRKALEGGLGVSLLERAASLHDGVLATKLTTQYRMNDVIAGWASKEMYGGWLKSAPSVASHLLIDSPFVKATWITQCPLVLLDTRMPYGSLSVGCEERLDPAGTGSLYNEGEADIVVNHVISLIYAGVSPMAIAVQSPYVAQVQLLRERLDDFPVADGVEVATIDSFQGREADAVIISMVRSNNLGAVGFLGDSRRMNVAITRARKHVAVVCDSSTICHNTFLARLLRHIRYFGRVKHADPGSLGGSGLGLDPMLPYLG

SEQ ID NO: 86284 - protein, 831 aa, Arabidopsis thaliana
  peptide (1)..(831): Ceres Seq. ID no. 12688520
  misc_feature (358)..(410): Pfam Name: DEAD/DEAH box helicase Pfam Description: DEAD/DEAH box helicase
  misc_feature (287)..(811): Homolog of NCBI NO: 1082534 NR Description: Ig mu chain switch region binding protein 2 -
  misc_feature (287)..(811): Homolog of NCBI NO: 4504623 NR Description: immunoglobulin mu binding protein 2 [Homo sapiens]
  misc_feature (287)..(811): Homolog of NCBI NO: 2498040 NR Description: DNA-BINDING PROTEIN SMUBP-2 (IMMUNOGLOBULIN MU
  misc_feature (287)..(811): Homolog of NCBI NO: 908917 NR Description: DNA helicase [Homo sapiens]
  misc_feature (287)..(811): Homolog of NCBI NO: 13928794 NR Description: immunoglobulin mu binding protein 2; S mu binding protein 2 [Rattus norvegicus]
  misc_feature (287)..(811): Homolog of NCBI NO: 6678029 NR Description: immunoglobulin mu binding protein 2;
  misc_feature (218)..(811): Homolog of NCBI NO: 28828207 NR Description: similar to Rattus norvegicus (Rat).
  misc_feature (352)..(806): Homolog of NCBI NO: 7446669 NR Description: probable helicase At2g03270 [imported] -
  misc_feature (352)..(806): Homolog of NCBI NO: 18395518 NR Description: putative helicase; protein id: At2g03270.1, by cDNA: gi_20259168 [Arabidopsis thaliana] putative helicase [Arabidopsis thaliana]
  misc_feature (352)..(806): Homolog of NCBI NO: 11191231 NR Description: putative helicase [Arabidopsis thaliana]
MKAMASDFATAEVQGEFSELRQNVGSGLTFVIQAQPYLNAIPMPLGSEVICLKACTHYPTLFDHFQRELRDVLQDLERKNIMESWKESESWKLLKEIANSAQHREVARKAAQAKPVQGVLGMDSEKVKAIQERIDEFTSQMSQLLQVERDTELEVTQEELDVVPTPDESSDSSKPIEFLVRHGDAPQELCDTICNLYAVSTSTGLGGMHLVLFKVGGNHRLPPTTLSPGDMVCIRVCDSRGAGATACTQGFVHNLGEDGCSIGVALESRHGDPTFSKLFGKSVRIDRIHGLADALTYERNCEALMLLQKNGLQKKNPSISVVATLFGDGEDITWLEQNDYVDWSEAELSDEPVSKLFDSSQRRAIALGVNKKRPVMIVQGPPGTGKTGMLKEVITLAVQQGERVLVTAPTNAAVDNMVEKLLHLGLNIVRVGNPARISSAVASKSLGEIVNSKLASFRAELERKKSDLRKDLRQCLRDDVLAAGIRQLLKQLGKTLKKKEKETVKEILSNAQVVFATNIGAADPLIRRLETFDLVVIDEAGQSIEPSCWIPILQGKRCILSGDPCQLAPVVLSRKALEGGLGVSLLERAASLHDGVLATKLTTQYRMNDVIAGWASKEMYGGWLKSAPSVASHLLIDSPFVKATWITQCPLVLLDTRMPYGSLSVGCEERLDPAGTGSLYNEGEADIVVNHVISLIYAGVSPMAIAVQSPYVAQVQLLRERLDDFPVADGVEVATIDSFQGREADAVIISMVRSNNLGAVGFLGDSRRMNVAITRARKHVAVVCDSSTICHNTFLARLLRHIRYFGRVKHADPGSLGGSGLGLDPMLPYLG

SEQ ID NO: 86285 - protein, 828 aa, Arabidopsis thaliana
  peptide (1)..(828): Ceres Seq. ID no. 12688521
  misc_feature (355)..(407): Pfam Name: DEAD/DEAH box helicase Pfam Description: DEAD/DEAH box helicase
  misc_feature (284)..(808): Homolog of NCBI NO: 1082534 NR Description: Ig mu chain switch region binding protein 2 -
  misc_feature (284)..(808): Homolog of NCBI NO: 4504623 NR Description: immunoglobulin mu binding protein 2 [Homo sapiens]
  misc_feature (284)..(808): Homolog of NCBI NO: 2498040 NR Description: DNA-BINDING PROTEIN SMUBP-2 (IMMUNOGLOBULIN MU
  misc_feature (284)..(808): Homolog of NCBI NO: 908917 NR Description: DNA helicase [Homo sapiens]
  misc_feature (284)..(808): Homolog of NCBI NO: 13928794 NR Description: immunoglobulin mu binding protein 2; S mu binding protein 2 [Rattus norvegicus]
  misc_feature (284)..(808): Homolog of NCBI NO: 6678029 NR Description: immunoglobulin mu binding protein 2;
  misc_feature (215)..(808): Homolog of NCBI NO: 28828207 NR Description: similar to Rattus norvegicus (Rat).
  misc_feature (349)..(803): Homolog of NCBI NO: 7446669 NR Description: probable helicase At2g03270 [imported] -
  misc_feature (349)..(803): Homolog of NCBI NO: 11191231 NR Description: putative helicase [Arabidopsis thaliana]
  misc_feature (349)..(803): Homolog of NCBI NO: 18395518 NR Description: putative helicase; protein id: At2g03270.1, by cDNA: gi_20259168 [Arabidopsis thaliana] putative helicase [Arabidopsis thaliana]
MASDFATAEVQGEFSELRQNVGSGLTFVIQAQPYLNAIPMPLGSEVICLKACTHYPTLFDHFQRELRDVLQDLERKNIMESWKESESWKLLKEIANSAQHREVARKAAQAKPVQGVLGMDSEKVKAIQERIDEFTSQMSQLLQVERDTELEVTQEELDVVPTPDESSDSSKPIEFLVRHGDAPQELCDTICNLYAVSTSTGLGGMHLVLFKVGGNHRLPPTTLSPGDMVCIRVCDSRGAGATACTQGFVHNLGEDGCSIGVALESRHGDPTFSKLFGKSVRIDRIHGLADALTYERNCEALMLLQKNGLQKKNPSISVVATLFGDGEDITWLEQNDYVDWSEAELSDEPVSKLFDSSQRRAIALGVNKKRPVMIVQGPPGTGKTGMLKEVITLAVQQGERVLVTAPTNAAVDNMVEKLLHLGLNIVRVGNPARISSAVASKSLGEIVNSKLASFRAELERKKSDLRKDLRQCLRDDVLAAGIRQLLKQLGKTLKKKEKETVKEILSNAQVVFATNIGAADPLIRRLETFDLVVIDEAGQSIEPSCWIPILQGKRCILSGDPCQLAPVVLSRKALEGGLGVSLLERAASLHDGVLATKLTTQYRMNDVIAGWASKEMYGGWLKSAPSVASHLLIDSPFVKATWITQCPLVLLDTRMPYGSLSVGCEERLDPAGTGSLYNEGEADIVVNHVISLIYAGVSPMAIAVQSPYVAQVQLLRERLDDFPVADGVEVATIDSFQGREADAVIISMVRSNNLGAVGFLGDSRRMNVAITRARKHVAVVCDSSTICHNTFLARLLRHIRYFGRVKHADPGSLGGSGLGLDPMLPYLG

SEQ ID NO: 86286 - DNA, 1117 bp, Arabidopsis thaliana
  misc_feature (1)..(1117): Ceres Seq. ID no. 12688556
  misc_feature: MA Experiment ID: 108434 Result: Up-regulated in Transcription
  misc_feature: MA Experiment 108434 PARAMETER Experiment Name: At_Root_Tips_cDNA_P Parameter: Tissue Value: Root Tips
  misc_feature: MA Experiment ID: 108462 Result: Down-regulated in Transcription
  misc_feature: MA Experiment 108462 PARAMETER Experiment Name: At_Germinating_Seeds_cDNA_P Parameter: Age (day) Value: 2 vs. 0
  misc_feature: MA Experiment 108462 PARAMETER Experiment Name: At_Germinating_Seeds_cDNA_P Parameter: Tissue Value: Germinating Seeds
  misc_feature: MA Experiment ID: 108463 Result: Down-regulated in Transcription
  misc_feature: MA Experiment 108463 PARAMETER Experiment Name: At_Germinating_Seeds_cDNA_P Parameter: Age (day) Value: 3 vs. 0
  misc_feature: MA Experiment 108463 PARAMETER Experiment Name: At_Germinating_Seeds_cDNA_P Parameter: Tissue Value: Germinating Seeds
  misc_feature: MA Experiment ID: 108464 Result: Down-regulated in Transcription
  misc_feature: MA Experiment 108464 PARAMETER Experiment Name: At_Germinating_Seeds_cDNA_P Parameter: Age (day) Value: 4 vs. 0
  misc_feature: MA Experiment 108464 PARAMETER Experiment Name: At_Germinating_Seeds_cDNA_P Parameter: Tissue Value: Germinating Seeds
  misc_feature: MA Experiment ID: 108488 Result: Up-regulated in Transcription
  misc_feature: MA Experiment ID: 108595 Result: Down-regulated in Transcription
  misc_feature: MA Experiment 108595 PARAMETER Experiment Name: At_Ler-pi_Ovule_cDNA_P Parameter: Plant Line Value: null
  misc_feature: MA Experiment ID: 20000235 Result: Down-regulated in Transcription
  misc_feature: MA Experiment 20000235 PARAMETER Experiment Name: At_Siliques_P Parameter: Age (day) Value: 21
  misc_feature: MA Experiment 20000235 PARAMETER Experiment Name: At_Siliques_P Parameter: Organism Value: A. thaliana
  misc_feature: MA Experiment 20000235 PARAMETER Experiment Name: At_Siliques_P Parameter: Plant Line Value: WS
  misc_feature: MA Experiment 20000235 PARAMETER Experiment Name: At_Siliques_P Parameter: Tissue Value: 5-10mm Siliques vs. Whole Plant
  misc_feature: MA Experiment ID: 20001557 Result: Up-regulated in Transcription
  misc_feature: MA Experiment 20001557 PARAMETER Experiment Name: At_Drought_Soil_Dry_P Parameter: Age (day) Value: 27
  misc_feature: MA Experiment 20001557 PARAMETER Experiment Name: At_Drought_Soil_Dry_P Parameter: Organism Value: A. thaliana
  misc_feature: MA Experiment 20001557 PARAMETER Experiment Name: At_Drought_Soil_Dry_P Parameter: Plant Line Value: WS
  misc_feature: MA Experiment 20001557 PARAMETER Experiment Name: At_Drought_Soil_Dry_P Parameter: Post Timepoint (hr) Value: 3
  misc_feature: MA Experiment 20001557 PARAMETER Experiment Name: At_Drought_Soil_Dry_P Parameter: Post-Treatment Value: Re-Water vs. No Drought
  misc_feature: MA Experiment 20001557 PARAMETER Experiment Name: At_Drought_Soil_Dry_P Parameter: Timepoint (day) Value: 13
  misc_feature: MA Experiment 20001557 PARAMETER Experiment Name: At_Drought_Soil_Dry_P Parameter: Treatment Value: Drought vs. No Drought
atcttcgttgtcgtttcgtctgcttcacatcggaaagctacatctttttcgttttttgtggtggcgatttctattctccggctgaaacctaccttcaggattcagcctttctcaggttttcagttggattcagatagcagcttgtacttcttctagataatcggcgacacatatggatgattgggaggccgaggactttcaaccacttccctcaaaagttgaactgaaaagtaactgggatgatgaggatgtggatgagaatgatatcaaggactcgtgggaggaggaagatgtatctgctccgccacctatagtaaagcctgcttctgagaaggctccaaagaaaccagcagtaaaagctgttgaaaagaaggttaaaactgttgaagctccgaaaggaacatcaagggaagaacctctagatcctattgctgagaaacttcgcatgcagaggcttgtagaggaagctgattaccaatcaactgctgaactctttggagtaaagactgaagagaaaagcgtcgatatgttaattccgaagtctgaaagcgatttcttggattatgctgagttgatatctcagagacttgtaccatttgagaaaagctttcactatatcgggctactcaaagcagtgatgagactttctgtggctaatatgaaagcagcagatgttaaagacgttgcttcgtccattacagctatagcaaatgaaaaattgaaggcggagaaagaagctgctgctggcaaaaagaagtcaggtaagaagaaacaacttcatgttgataagcctgatgatgatcttgtttcgggtccttatgatgccatggacgatgatgatttcatgtgagaaaatggcaattttggagattgcattttacctcctataggattgtaactgagaagaggtttaaatcgtcggcggttttttgttttgtatactgaattgcaaaagtgtttttcttctgttttctttgctcggtttgatttaaaaatttgtgtaataagatttgttgtgggcacactatttcctattatatgaattgaacgagtactaagagcacggcctatgattcacttagaatttgaagccacattagtaagataagttttcgat

SEQ ID NO: 86287 - protein, 225 aa, Arabidopsis thaliana; identical to SEQ ID NO: 39745
  peptide (1)..(225): Ceres Seq. ID no. 12688557
  misc_feature (1)..(225): Homolog of NCBI NO: 30693092 NR Description: expressed protein [Arabidopsis thaliana] Unknown protein [Arabidopsis thaliana] Unknown protein [Arabidopsis thaliana]
  misc_feature (1)..(225): Homolog of NCBI NO: 18408426 NR Description: expressed protein; protein id: At1g66070.1, by cDNA: 20812., supported by cDNA: gi_17380827, supported by gi_20259026 [Arabidopsis thaliana] >gi|25404579|pir||C96685
  misc_feature (2)..(225): Homolog of NCBI NO: 32766433 NR Description: Unknown (protein for MGC:63801) [Danio rerio]
  misc_feature (2)..(225): Homolog of NCBI NO: 10435304 NR Description: unnamed protein product [Homo sapiens]
  misc_feature (2)..(225): Homolog of NCBI NO: 23503065 NR Description: Eukaryotic translation initiation factor 3 eukaryotic translation initiation factor 3, subunit 1 (alpha,
  misc_feature (2)..(225): Homolog of NCBI NO: 27374242 NR Description: CG12131-PA [Drosophila erecta]
  misc_feature (2)..(225): Homolog of NCBI NO: 34856798 NR Description: similar to Eukaryotic translation initiation
  misc_feature (2)..(225): Homolog of NCBI NO: 26349519 NR Description: unnamed protein product [Mus musculus]
  misc_feature (2)..(225): Homolog of NCBI NO: 27374365 NR Description: Adam-PA [Drosophila willistoni]
  misc_feature (2)..(225): Homolog of NCBI NO: 4503511 NR Description: eukaryotic translation initiation factor 3,

SEQ ID NO: 86288 - protein, 134 aa, Arabidopsis thaliana; identical to SEQ ID NO: 39746
  peptide (1)..(134): Ceres Seq. ID no. 12688558
  misc_feature (1)..(134): Homolog of NCBI NO: 30693092 NR Description: expressed protein [Arabidopsis thaliana] Unknown protein [Arabidopsis thaliana] Unknown protein [Arabidopsis thaliana]
  misc_feature (1)..(134): Homolog of NCBI NO: 18408426 NR Description: expressed protein; protein id: At1g66070.1, by cDNA: 20812., supported by cDNA: gi_17380827, supported by gi_20259026 [Arabidopsis thaliana] >gi|25404579|pir||C96685
  misc_feature (1)..(134): Homolog of NCBI NO: 32766433 NR Description: Unknown (protein for MGC:63801) [Danio rerio]
  misc_feature (1)..(134): Homolog of NCBI NO: 10435304 NR Description: unnamed protein product [Homo sapiens]
  misc_feature (1)..(134): Homolog of NCBI NO: 23503065 NR Description: Eukaryotic translation initiation factor 3 eukaryotic translation initiation factor 3, subunit 1 (alpha,
  misc_feature (1)..(134): Homolog of NCBI NO: 27374242 NR Description: CG12131-PA [Drosophila erecta]
  misc_feature (1)..(134): Homolog of NCBI NO: 34856798 NR Description: similar to Eukaryotic translation initiation
  misc_feature (1)..(134): Homolog of NCBI NO: 26349519 NR Description: unnamed protein product [Mus musculus]
  misc_feature (1)..(134): Homolog of NCBI NO: 27374365 NR Description: Adam-PA [Drosophila willistoni]
  misc_feature (1)..(134): Homolog of NCBI NO: 4503511 NR Description: eukaryotic translation initiation factor 3,

SEQ ID NO: 86289 - DNA, 757 bp, Arabidopsis thaliana
  misc_feature (1)..(757): Ceres Seq. ID no. 12688589
  misc_feature: MA Experiment ID: 20000306 Result: Up-regulated in Transcription
  misc_feature: MA Experiment 20000306 PARAMETER Experiment Name: At_Germinating_Seeds_Sub_P Parameter: Age (hr) Value: 6 vs. 0
  misc_feature: MA Experiment 20000306 PARAMETER Experiment Name: At_Germinating_Seeds_Sub_P Parameter: Organism Value: A. thaliana
  misc_feature: MA Experiment 20000306 PARAMETER Experiment Name: At_Germinating_Seeds_Sub_P Parameter: Plant Line Value: WS
  misc_feature: MA Experiment 20000306 PARAMETER Experiment Name: At_Germinating_Seeds_Sub_P Parameter: Tissue Value: Germinating Seeds
  misc_feature: MA Experiment ID: 20000307 Result: Up-regulated in Transcription
  misc_feature: MA Experiment 20000307 PARAMETER Experiment Name: At_Germinating_Seeds_Sub_P Parameter: Age (hr) Value: 24 vs. 0
  misc_feature: MA Experiment 20000307 PARAMETER Experiment Name: At_Germinating_Seeds_Sub_P Parameter: Organism Value: A. thaliana
  misc_feature: MA Experiment 20000307 PARAMETER Experiment Name: At_Germinating_Seeds_Sub_P Parameter: Plant Line Value: WS
  misc_feature: MA Experiment 20000307 PARAMETER Experiment Name: At_Germinating_Seeds_Sub_P Parameter: Tissue Value: Germinating Seeds
  misc_feature: MA Experiment ID: 20000314 Result: Down-regulated in Transcription
  misc_feature: MA Experiment 20000314 PARAMETER Experiment Name: At_14day_Shoots-Roots_Sub_P Parameter: Age (day) Value: 14
  misc_feature: MA Experiment 20000314 PARAMETER Experiment Name: At_14day_Shoots-Roots_Sub_P Parameter: Organism Value: A. thaliana
  misc_feature: MA Experiment 20000314 PARAMETER Experiment Name: At_14day_Shoots-Roots_Sub_P Parameter: Plant Line Value: WS
  misc_feature: MA Experiment 20000314 PARAMETER Experiment Name: At_14day_Shoots-Roots_Sub_P Parameter: Tissue Value: Roots vs. Whole Plant
  misc_feature: MA Experiment ID: 20000315 Result: Up-regulated in Transcription
  misc_feature: MA Experiment 20000315 PARAMETER Experiment Name: At_14day_Shoots-Roots_Sub_P Parameter: Age (day) Value: 14
  misc_feature: MA Experiment 20000315 PARAMETER Experiment Name: At_14day_Shoots-Roots_Sub_P Parameter: Organism Value: A. thaliana
  misc_feature: MA Experiment 20000315 PARAMETER Experiment Name: At_14day_Shoots-Roots_Sub_P Parameter: Plant Line Value: WS
  misc_feature: MA Experiment 20000315 PARAMETER Experiment Name: At_14day_Shoots-Roots_Sub_P Parameter: Tissue Value: Shoots vs. Whole Plant
  misc_feature: MA Experiment ID: 20000328 Result: Up-regulated in Transcription
  misc_feature: MA Experiment 20000328 PARAMETER Experiment Name: At_42deg_Heat_Sub_P Parameter: Age (day) Value: 14
  misc_feature: MA Experiment 20000328 PARAMETER Experiment Name: At_42deg_Heat_Sub_P Parameter: Organism Value: A. thaliana
  misc_feature: MA Experiment 20000328 PARAMETER Experiment Name: At_42deg_Heat_Sub_P Parameter: Plant Line Value: WS
  misc_feature: MA Experiment 20000328 PARAMETER Experiment Name: At_42deg_Heat_Sub_P Parameter: Temperature (deg C) Value: 42 vs. 22
  misc_feature: MA Experiment 20000328 PARAMETER Experiment Name: At_42deg_Heat_Sub_P Parameter: Timepoint (hr) Value: 6
  misc_feature: MA Experiment 20000328 PARAMETER Experiment Name: At_42deg_Heat_Sub_P Parameter: Tissue Value: Aerial
  misc_feature: MA Experiment ID: 20001807 Result: Up-regulated in Transcription
  misc_feature: MA Experiment 20001807 PARAMETER Experiment Name: At_50mM_NH4NO3_L-to-H_Sub_P Parameter: Timepoint (hr) Value: 6
  misc_feature: MA Experiment 20001807 PARAMETER Experiment Name: At_50mM_NH4NO3_L-to-H_Sub_P Parameter: Tissue Value: Leaf
  misc_feature: MA Experiment 20001807 PARAMETER Experiment Name: At_50mM_NH4NO3_L-to-H_Sub_P Parameter: Treatment Value: 50mM NH4NO3 vs 100mM Mannitol
aagtaagagaaaaaccaaaagaagaagagaaacaacaagaagaagtaatggcttcctctatgttctcctccaccgctgtggttacctccccggctcaagccaccatggtcgctccattcaccggcttgaagtcatccgcttctttcccggtcacccgcaaggccaacaacgacattacttccatcacaagcaacggaggaagagttagctgcatgaaggtgtggccaccaatcggaaagaagaagtttgagactctatcttacctccctgaccttagtgacgttgaattggctaaggaagttgactaccttctccgcaacaagtggattccttgtgttgaattcgagttggagcacggatttgtgtaccgtgagcacggaaacactcccggatactatgatggacgatactggacaatgtggaagcttccattgttcggatgcaccgactccgctcaagtgttgaaggaagttgaagaatgcaagaaggagtaccctggcgccttcattaggatcatcggattcgacaacacccgtcaagtccaatgcatcagtttcattgcctacaagcccccaagcttcaccgaagcttaatcccctttctggaatattcagcgttgattattctggaacccatttctatgtggtcaatgcaaatttaagaaattatttgccgacttaacagttgaggaactattgtttgaaagtgaaaatgttattcctatcagtttctctataattatagttatcatttcatt

SEQ ID NO: 86290 - protein, 196 aa, Arabidopsis thaliana
  peptide (1)..(196): Ceres Seq. ID no. 12688590
  misc_feature (16)..(196): Homolog of NCBI NO: 15240903 NR Description: ribulose bisphosphate carboxylase small chain 2b (RuBisCO small subunit 2b) (sp|P10797); protein id: At5g38420.1, by cDNA: gi_16649138, supported by cDNA: gi_17064721, supported
  misc_feature (16)..(196): Homolog of NCBI NO: 68061 NR Description: ribulose-bisphosphate carboxylase (EC 4.1.1.39)
  misc_feature (16)..(196): Homolog of NCBI NO: 15240912 NR Description: ribulose bisphosphate carboxylase small chain 1b (RuBisCO small subunit 1b) (sp|P10796); protein id: At5g38430.1, by cDNA: gi_15294183 [Arabidopsis thaliana]
  misc_feature (16)..(196): Homolog of NCBI NO: 68060 NR Description: ribulose-bisphosphate carboxylase (EC 4.1.1.39)
  misc_feature (16)..(196): Homolog of NCBI NO: 15240901 NR Description: ribulose bisphosphate carboxylase small chain 3b (RuBisCO small subunit 3b) (sp|P10798); protein id: At5g38410.1, by cDNA: gi_13430423, supported by cDNA: gi_15293182, supported
  misc_feature (16)..(196): Homolog of NCBI NO: 132091 NR Description: Ribulose bisphosphate carboxylase small chain F1,
  misc_feature (16)..(196): Homolog of NCBI NO: 266891 NR Description: Ribulose bisphosphate carboxylase small chain,
  misc_feature (16)..(196): Homolog of NCBI NO: 132154 NR Description: Ribulose bisphosphate carboxylase small chain,
  misc_feature (16)..(194): Homolog of NCBI NO: 15219826 NR Description: ribulose-bisphosphate carboxylase small unit, protein id: At1g67090.1, supported by cDNA: gi_11762169, by cDNA: gi_13358196, supported by cDNA: gi_15294199, supported
  misc_feature (16)..(194): Homolog of NCBI NO: 68063 NR Description: ribulose-bisphosphate carboxylase (EC 4.1.1.39)
VREKPKEEEKQQEEVMASSMFSSTAVVTSPAQATMVAPFTGLKSSASFPVTRKANNDITSITSNGGRVSCMKVWPPIGKKKFETLSYLPDLSDVELAKEVDYLLRNKWIPCVEFELEHGFVYREHGNTPGYYDGRYWTMWKLPLFGCTDSAQVLKEVEECKKEYPGAFIRIIGFDNTRQVQCISFIAYKPPSFTEA

SEQ ID NO: 86291 - protein, 181 aa, Arabidopsis thaliana
  peptide (1)..(181): Ceres Seq. ID no. 12688591
  misc_feature (1)..(181): Homolog of NCBI NO: 15240903 NR Description: ribulose bisphosphate carboxylase small chain 2b (RuBisCO small subunit 2b) (sp|P10797); protein id: At5g38420.1, by cDNA: gi_16649138, supported by cDNA: gi_17064721, supported
  misc_feature (1)..(181): Homolog of NCBI NO: 68061 NR Description: ribulose-bisphosphate carboxylase (EC 4.1.1.39)
  misc_feature (1)..(181): Homolog of NCBI NO: 15240912 NR Description: ribulose bisphosphate carboxylase small chain 1b (RuBisCO small subunit 1b) (sp|P10796); protein id: At5g38430.1, by cDNA: gi_15294183 [Arabidopsis thaliana]
  misc_feature (1)..(181): Homolog of NCBI NO: 68060 NR Description: ribulose-bisphosphate carboxylase (EC 4.1.1.39)
  misc_feature (1)..(181): Homolog of NCBI NO: 15240901 NR Description: ribulose bisphosphate carboxylase small chain 3b (RuBisCO small subunit 3b) (sp|P10798); protein id: At5g38410.1, by cDNA: gi_13430423, supported by cDNA: gi_15293182, supported
  misc_feature (1)..(181): Homolog of NCBI NO: 132091 NR Description: Ribulose bisphosphate carboxylase small chain F1,
  misc_feature (1)..(181): Homolog of NCBI NO: 266891 NR Description: Ribulose bisphosphate carboxylase small chain,
  misc_feature (1)..(181): Homolog of NCBI NO: 132154 NR Description: Ribulose bisphosphate carboxylase small chain,
  misc_feature (1)..(179): Homolog of NCBI NO: 15219826 NR Description: ribulose-bisphosphate carboxylase small unit, protein id: At1g67090.1, supported by cDNA: gi_11762169, by cDNA: gi_13358196, supported by cDNA: gi_15294199, supported
  misc_feature (1)..(179): Homolog of NCBI NO: 68063 NR Description: ribulose-bisphosphate carboxylase (EC 4.1.1.39)
MASSMFSSTAVVTSPAQATMVAPFTGLKSSASFPVTRKANNDITSITSNGGRVSCMKVWPPIGKKKFETLSYLPDLSDVELAKEVDYLLRNKWIPCVEFELEHGFVYREHGNTPGYYDGRYWTMWKLPLFGCTDSAQVLKEVEECKKEYPGAFIRIIGFDNTRQVQCISFIAYKPPSFTEA

SEQ ID NO: 86292 - protein, 177 aa, Arabidopsis thaliana
  peptide (1)..(177): Ceres Seq. ID no. 12688592
  misc_feature (1)..(177): Homolog of NCBI NO: 15240903 NR Description: ribulose bisphosphate carboxylase small chain 2b (RuBisCO small subunit 2b) (sp|P10797); protein id: At5g38420.1, by cDNA: gi_16649138, supported by cDNA: gi_17064721, supported
  misc_feature (1)..(177): Homolog of NCBI NO: 68061 NR Description: ribulose-bisphosphate carboxylase (EC 4.1.1.39)
  misc_feature (1)..(177): Homolog of NCBI NO: 15240912 NR Description: ribulose bisphosphate carboxylase small chain 1b (RuBisCO small subunit 1b) (sp|P10796); protein id: At5g38430.1, by cDNA: gi_15294183 [Arabidopsis thaliana]
  misc_feature (1)..(177): Homolog of NCBI NO: 68060 NR Description: ribulose-bisphosphate carboxylase (EC 4.1.1.39)
  misc_feature (1)..(177): Homolog of NCBI NO: 15240901 NR Description: ribulose bisphosphate carboxylase small chain 3b (RuBisCO small subunit 3b) (sp|P10798); protein id: At5g38410.1, by cDNA: gi_13430423, supported by cDNA: gi_15293182, supported
  misc_feature (1)..(177): Homolog of NCBI NO: 132091 NR Description: Ribulose bisphosphate carboxylase small chain F1,
  misc_feature (1)..(177): Homolog of NCBI NO: 266891 NR Description: Ribulose bisphosphate carboxylase small chain,
  misc_feature (1)..(177): Homolog of NCBI NO: 132154 NR Description: Ribulose bisphosphate carboxylase small chain,
  misc_feature (1)..(175): Homolog of NCBI NO: 15219826 NR Description: ribulose-bisphosphate carboxylase small unit, protein id: At1g67090.1, supported by cDNA: gi_11762169, by cDNA: gi_13358196, supported by cDNA: gi_15294199, supported
  misc_feature (1)..(175): Homolog of NCBI NO: 68063 NR Description: ribulose-bisphosphate carboxylase (EC 4.1.1.39)
MFSSTAVVTSPAQATMVAPFTGLKSSASFPVTRKANNDITSITSNGGRVSCMKVWPPIGKKKFETLSYLPDLSDVELAKEVDYLLRNKWIPCVEFELEHGFVYREHGNTPGYYDGRYWTMWKLPLFGCTDSAQVLKEVEECKKEYPGAFIRIIGFDNTRQVQCISFIAYKPPSFTEA

SEQ ID NO: 86293 - DNA, 1163 bp, Arabidopsis thaliana
  misc_feature (1)..(1163): Ceres Seq. ID no. 12688601
  misc_feature: MA Experiment ID: 108569 Result: Up-regulated in Transcription
  misc_feature: MA Experiment 108569 PARAMETER Experiment Name: At_0.001%_MeJA__cDNA_P Parameter: Timepoint (hr) Value: 6
  misc_feature: MA Experiment 108569 PARAMETER Experiment Name: At_0.001%_MeJA__cDNA_P Parameter: Tissue Value: Aerial
  misc_feature: MA Experiment 108569 PARAMETER Experiment Name: At_0.001%_MeJA__cDNA_P Parameter: Treatment Value: 0.001% MeJA vs. No Treatment
  misc_feature: MA Experiment ID: 108577 Result: Up-regulated in Transcription
  misc_feature: MA Experiment 108577 PARAMETER Experiment Name: At_42deg_Heat_cDNA_P Parameter: Temperature (deg C) Value: 42 vs. 22
  misc_feature: MA Experiment 108577 PARAMETER Experiment Name: At_42deg_Heat_cDNA_P Parameter: Timepoint (hr) Value: 6
  misc_feature: MA Experiment 108577 PARAMETER Experiment Name: At_42deg_Heat_cDNA_P Parameter: Tissue Value: Aerial
  misc_feature: MA Experiment ID: 108595 Result: Down-regulated in Transcription
  misc_feature: MA Experiment 108595 PARAMETER Experiment Name: At_Ler-pi_Ovule_cDNA_P Parameter: Plant Line Value: null
  misc_feature: MA Experiment ID: 20000180 Result: Up-regulated in Transcription
  misc_feature: MA Experiment 20000180 PARAMETER Experiment Name: At_Germinating_Seeds_P Parameter: Age (hr) Value: 24 vs. 0
  misc_feature: MA Experiment 20000180 PARAMETER Experiment Name: At_Germinating_Seeds_P Parameter: Tissue Value: Germinating Seeds
  misc_feature: MA Experiment ID: 20000185 Result: Up-regulated in Transcription
  misc_feature: MA Experiment 20000185 PARAMETER Experiment Name: At_Roots__P Parameter: Age (day) Value: 7 vs. 21
  misc_feature: MA Experiment 20000185 PARAMETER Experiment Name: At_Roots__P Parameter: Organism Value: A. thaliana
  misc_feature: MA Experiment 20000185 PARAMETER Experiment Name: At_Roots__P Parameter: Tissue Value: Roots vs. Whole Plant
  misc_feature: MA Experiment ID: 20000227 Result: Up-regulated in Transcription
  misc_feature: MA Experiment 20000227 PARAMETER Experiment Name: At_Root-Tips-vs-Tops_P Parameter: Tissue Value: Root Tips vs. Root Tops
  misc_feature: MA Experiment ID: 20000234 Result: Up-regulated in Transcription
  misc_feature: MA Experiment 20000234 PARAMETER Experiment Name: At_Siliques_P Parameter: Age (day) Value: 21
  misc_feature: MA Experiment 20000234 PARAMETER Experiment Name: At_Siliques_P Parameter: Organism Value: A. thaliana
  misc_feature: MA Experiment 20000234 PARAMETER Experiment Name: At_Siliques_P Parameter: Plant Line Value: WS
  misc_feature: MA Experiment 20000234 PARAMETER Experiment Name: At_Siliques_P Parameter: Tissue Value: Less Than 5mm Siliques vs. Whole Plant
  misc_feature: MA Experiment ID: 20000235 Result: Up-regulated in Transcription
  misc_feature: MA Experiment 20000235 PARAMETER Experiment Name: At_Siliques_P Parameter: Age (day) Value: 21
  misc_feature: MA Experiment 20000235 PARAMETER Experiment Name: At_Siliques_P Parameter: Organism Value: A. thaliana
  misc_feature: MA Experiment 20000235 PARAMETER Experiment Name: At_Siliques_P Parameter: Plant Line Value: WS
  misc_feature: MA Experiment 20000235 PARAMETER Experiment Name: At_Siliques_P Parameter: Tissue Value: 5-10mm Siliques vs. Whole Plant
  misc_feature: MA Experiment ID: 20000439 Result: Up-regulated in Transcription
  misc_feature: MA Experiment 20000439 PARAMETER Experiment Name: At_Roots__P Parameter: Age (day) Value: 14 vs. 21
  misc_feature: MA Experiment 20000439 PARAMETER Experiment Name: At_Roots__P Parameter: Organism Value: A. thaliana
  misc_feature: MA Experiment 20000439 PARAMETER Experiment Name: At_Roots__P Parameter: Tissue Value: Roots vs. Whole Plant
  misc_feature: MA Experiment ID: 20000794 Result: Down-regulated in Transcription
  misc_feature: MA Experiment 20000794 PARAMETER Experiment Name: At_Petals_P Parameter: Age (day) Value: 23-25 days
  misc_feature: MA Experiment 20000794 PARAMETER Experiment Name: At_Petals_P Parameter: Plant Line Value: WS
  misc_feature: MA Experiment 20000794 PARAMETER Experiment Name: At_Petals_P Parameter: Tissue Value: Petals vs. Whole plant
  misc_feature: MA Experiment ID: 20001451 Result: Down-regulated in Transcription
  misc_feature: MA Experiment 20001451 PARAMETER Experiment Name: At_Far-red-induction_P Parameter: Age (day) Value: 7
  misc_feature: MA Experiment 20001451 PARAMETER Experiment Name: At_Far-red-induction_P Parameter: Light Value: Far-red vs. White
  misc_feature: MA Experiment 20001451 PARAMETER Experiment Name: At_Far-red-induction_P Parameter: Organism Value: A. thaliana
  misc_feature: MA Experiment 20001451 PARAMETER Experiment Name: At_Far-red-induction_P Parameter: Plant Line Value: Columbia
  misc_feature: MA Experiment 20001451 PARAMETER Experiment Name: At_Far-red-induction_P Parameter: Timepoint (hr) Value: 24
  misc_feature: MA Experiment 20001451 PARAMETER Experiment Name: At_Far-red-induction_P Parameter: Tissue Value: Whole Plant
  misc_feature: MA Experiment ID: 20001555 Result: Down-regulated in Transcription
  misc_feature: MA Experiment 20001555 PARAMETER Experiment Name: At_Drought_Soil_Dry_P Parameter: Age (day) Value: 24
  misc_feature: MA Experiment 20001555 PARAMETER Experiment Name: At_Drought_Soil_Dry_P Parameter: Organism Value: A. thaliana
  misc_feature: MA Experiment 20001555 PARAMETER Experiment Name: At_Drought_Soil_Dry_P Parameter: Plant Line Value: WS
  misc_feature: MA Experiment 20001555 PARAMETER Experiment Name: At_Drought_Soil_Dry_P Parameter: Post Timepoint (hr) Value: None
  misc_feature: MA Experiment 20001555 PARAMETER Experiment Name: At_Drought_Soil_Dry_P Parameter: Post-Treatment Value: None
  misc_feature: MA Experiment 20001555 PARAMETER Experiment Name: At_Drought_Soil_Dry_P Parameter: Timepoint (day) Value: 10
  misc_feature: MA Experiment 20001555 PARAMETER Experiment Name: At_Drought_Soil_Dry_P Parameter: Treatment Value: Drought vs. No Drought
  misc_feature: MA Experiment ID: 20001556 Result: Down-regulated in Transcription
  misc_feature: MA Experiment 20001556 PARAMETER Experiment Name: At_Drought_Soil_Dry_P Parameter: Age (day) Value: 26
  misc_feature: MA Experiment 20001556 PARAMETER Experiment Name: At_Drought_Soil_Dry_P Parameter: Organism Value: A. thaliana
  misc_feature: MA Experiment 20001556 PARAMETER Experiment Name: At_Drought_Soil_Dry_P Parameter: Plant Line Value: WS
  misc_feature: MA Experiment 20001556 PARAMETER Experiment Name: At_Drought_Soil_Dry_P Parameter: Post Timepoint (hr) Value: None
  misc_feature: MA Experiment 20001556 PARAMETER Experiment Name: At_Drought_Soil_Dry_P Parameter: Post-Treatment Value: None
  misc_feature: MA Experiment 20001556 PARAMETER Experiment Name: At_Drought_Soil_Dry_P Parameter: Timepoint (day) Value: 12
  misc_feature: MA Experiment 20001556 PARAMETER Experiment Name: At_Drought_Soil_Dry_P Parameter: Treatment Value: Drought vs. No Drought
  misc_feature: MA Experiment ID: 20001560 Result: Up-regulated in Transcription
  misc_feature: MA Experiment 20001560 PARAMETER Experiment Name: At_Drought_Soil_Dry_P Parameter: Age (day) Value: 28
  misc_feature: MA Experiment 20001560 PARAMETER Experiment Name: At_Drought_Soil_Dry_P Parameter: Organism Value: A. thaliana
  misc_feature: MA Experiment 20001560 PARAMETER Experiment Name: At_Drought_Soil_Dry_P Parameter: Plant Line Value: WS
  misc_feature: MA Experiment 20001560 PARAMETER Experiment Name: At_Drought_Soil_Dry_P Parameter: Post Timepoint (hr) Value: None
  misc_feature: MA Experiment 20001560 PARAMETER Experiment Name: At_Drought_Soil_Dry_P Parameter: Post-Treatment Value: None
  misc_feature: MA Experiment 20001560 PARAMETER Experiment Name: At_Drought_Soil_Dry_P Parameter: Timepoint (day) Value: 14
  misc_feature: MA Experiment 20001560 PARAMETER Experiment Name: At_Drought_Soil_Dry_P Parameter: Treatment Value: Drought vs. No Drought
  misc_feature: MA Experiment ID: 20001911 Result: Down-regulated in Transcription
  misc_feature: MA Experiment 20001911 PARAMETER Experiment Name: At_Drought_Reproduction_P Parameter: Age (day) Value: 40
  misc_feature: MA Experiment 20001911 PARAMETER Experiment Name: At_Drought_Reproduction_P Parameter: Organism Value: A. thaliana
  misc_feature: MA Experiment 20001911 PARAMETER Experiment Name: At_Drought_Reproduction_P Parameter: Plant Line Value: WS
  misc_feature: MA Experiment 20001911 PARAMETER Experiment Name: At_Drought_Reproduction_P Parameter: Timepoint (day) Value: 10
  misc_feature: MA Experiment 20001911 PARAMETER Experiment Name: At_Drought_Reproduction_P Parameter: Tissue Value: Flowers
  misc_feature: MA Experiment 20001911 PARAMETER Experiment Name: At_Drought_Reproduction_P Parameter: Treatment Value: Drought vs. No Drought
cagattctttcgaatccggagtttcttgctgaaggaactgctatcgctgatctttttaaccctgaccgtgttttgatcggagggcgagaaacacctgaaggattcaaagctgttcagacacttaaagaggtttatgctaattgggttcctgaaggtcagatcatcacaactaatctctggtctgctgagctttctaagttagctgcaaatgctttcttggctcagaggatttcatcagtcaatgccatgtctgcactttgtgaatccactggtgctgatgttactcaagtgtcttacgctgttggtactgattcaagaatcggttccaaattcttgaacgctagtgttggattcggaggttcttgtttccagaaggacattctgaatctcgtctacatctgtcaatgcaacggacttccagaagtggcggaatactggaaacaagtgatcaagatcaacgattaccaaaagaaccggttcgtgaacagaatcgtgtcctctatgttcaacactgtctccaacaagaaggttgcgattcttggattcgcattcaagaaagacactggtgacacaagggaaacacctgccattgatgtgtgtaaaggtctattaggagacaaagcacagatcagtatctatgatcctcaagtcacagaggaacagattcagagagatctctcgatgaaaaagttcgactgggaccatcctcttcacttgcagccaatgagtccaaccacagtgaaacaagtgagtgtgacttgggacgcatatgaagctacaaaagacgcacacgcggtttgcgttttgactgagtgggacgagtttaagtcgttagattaccagaagatcttcgacaacatgcagaaaccggcttttatcttcgacggaagaaacattatgaatgttaacaagttaagagagattggtttcattgtttactccattggtaagccacttgacccatggctcaaggacatgcctgcctttgtctaatcacaaggcaaaacctggttgattcttgtttcttactttcattgtttgtgcttttttgctttcgctttcatataaattttagtctcaagattcgatttgtgaagtcttgaagagttgtttcttacattttacaatgtgtttcttatgctaagctcttataattttgtgtt

SEQ ID NO: 86294 - protein, 330 aa, Arabidopsis thaliana
  peptide (1)..(330): Ceres Seq. ID no. 12688602
  misc_feature (178)..(302): Pfam Name: UDP-glucose/GDP-mannose dehydrogenase family, Pfam Description: UDP-glucose/GDP-mannose dehydrogenase family,
  misc_feature (1)..(330): Homolog of NCBI NO: 15241704 NR Description: UDP-glucose dehydrogenase-like protein; protein
  misc_feature (1)..(330): Homolog of NCBI NO: 30102540 NR Description: At5g39320 [Arabidopsis thaliana]
  misc_feature (1)..(328): Homolog of NCBI NO: 21618158 NR Description: UDP-glucose dehydrogenase, putative [Arabidopsis
  misc_feature (1)..(328): Homolog of NCBI NO: 15228687 NR Description: UDP-glucose dehydrogenase, putative; protein id:
  misc_feature (1)..(328): Homolog of NCBI NO: 15983404 NR Description: AT3g29360/MUO10_6 [Arabidopsis thaliana]
QILSNPEFLAEGTAIADLFNPDRVLIGGRETPEGFKAVQTLKEVYANWVPEGQIITTNLWSAELSKLAANAFLAQRISSVNAMSALCESTGADVTQVSYAVGTDSRIGSKFLNASVGFGGSCFQKDILNLVYICQCNGLPEVAEYWKQVIKINDYQKNRFVNRIVSSMFNTVSNKKVAILGFAFKKDTGDTRETPAIDVCKGLLGDKAQISIYDPQVTEEQIQRDLSMKKFDWDHPLHLQPMSPTTVKQVSVTWDAYEATKDAHAVCVLTEWDEFKSLDYQKIFDNMQKPAFIFDGRNIMNVNKLREIGFIVYSIGKPLDPWLKDMPAFV

SEQ ID NO: 86295 - protein, 248 aa, Arabidopsis thaliana
  peptide (1)..(248): Ceres Seq. ID no. 12688603
  misc_feature (96)..(220): Pfam Name: UDP-glucose/GDP-mannose dehydrogenase family, Pfam Description: UDP-glucose/GDP-mannose dehydrogenase family,
  misc_feature (1)..(248): Homolog of NCBI NO: 15241704 NR Description: UDP-glucose dehydrogenase-like protein; protein
  misc_feature (1)..(248): Homolog of NCBI NO: 30102540 NR Description: At5g39320 [Arabidopsis thaliana]
  misc_feature (1)..(246): Homolog of NCBI NO: 21618158 NR Description: UDP-glucose dehydrogenase, putative [Arabidopsis
  misc_feature (1)..(246): Homolog of NCBI NO: 15228687 NR Description: UDP-glucose dehydrogenase, putative; protein id:
  misc_feature (1)..(246): Homolog of NCBI NO: 15983404 NR Description: AT3g29360/MUO10_6 [Arabidopsis thaliana]
MSALCESTGADVTQVSYAVGTDSRIGSKFLNASVGFGGSCFQKDILNLVYICQCNGLPEVAEYWKQVIKINDYQKNRFVNRIVSSMFNTVSNKKVAILGFAFKKDTGDTRETPAIDVCKGLLGDKAQISIYDPQVTEEQIQRDLSMKKFDWDHPLHLQPMSPTTVKQVSVTWDAYEATKDAHAVCVLTEWDEFKSLDYQKIFDNMQKPAFIFDGRNIMNVNKLREIGFIVYSIGKPLDPWLKDMPAFV

SEQ ID NO: 86296 - DNA, 1429 bp, Arabidopsis thaliana
  misc_feature (1)..(1429): Ceres Seq. ID no. 12688608
  misc_feature: MA Experiment ID: 20000173 Result: Down-regulated in Transcription
  misc_feature: MA Experiment 20000173 PARAMETER Experiment Name: At_42deg_Heat_P Parameter: Age (day) Value: 14
  misc_feature: MA Experiment 20000173 PARAMETER Experiment Name: At_42deg_Heat_P Parameter: Organism Value: A. thaliana
  misc_feature: MA Experiment 20000173 PARAMETER Experiment Name: At_42deg_Heat_P Parameter: Plant Line Value: WS
  misc_feature: MA Experiment 20000173 PARAMETER Experiment Name: At_42deg_Heat_P Parameter: Temperature (deg C) Value: 42 vs. 22
  misc_feature: MA Experiment 20000173 PARAMETER Experiment Name: At_42deg_Heat_P Parameter: Timepoint (hr) Value: 6
  misc_feature: MA Experiment 20000173 PARAMETER Experiment Name: At_42deg_Heat_P Parameter: Tissue Value: Aerial
  misc_feature: MA Experiment ID: 20000179 Result: Up-regulated in Transcription
  misc_feature: MA Experiment 20000179 PARAMETER Experiment Name: At_Germinating_Seeds_P Parameter: Age (hr) Value: 6 vs. 0
  misc_feature: MA Experiment 20000179 PARAMETER Experiment Name: At_Germinating_Seeds_P Parameter: Tissue Value: Germinating Seeds
  misc_feature: MA Experiment ID: 20000180 Result: Up-regulated in Transcription
  misc_feature: MA Experiment 20000180 PARAMETER Experiment Name: At_Germinating_Seeds_P Parameter: Age (hr) Value: 24 vs. 0
  misc_feature: MA Experiment 20000180 PARAMETER Experiment Name: At_Germinating_Seeds_P Parameter: Tissue Value: Germinating Seeds
  misc_feature: MA Experiment ID: 20000227 Result: Up-regulated in Transcription
  misc_feature: MA Experiment 20000227 PARAMETER Experiment Name: At_Root-Tips-vs-Tops_P Parameter: Tissue Value: Root Tips vs. Root Tops
  misc_feature: MA Experiment ID: 20000437 Result: Up-regulated in Transcription
  misc_feature: MA Experiment 20000437 PARAMETER Experiment Name: At_Drought_P Parameter: Age (day) Value: 8
  misc_feature: MA Experiment 20000437 PARAMETER Experiment Name: At_Drought_P Parameter: Organism Value: A. thaliana
  misc_feature: MA Experiment 20000437 PARAMETER Experiment Name: At_Drought_P Parameter: Plant Line Value: WS
  misc_feature: MA Experiment 20000437 PARAMETER Experiment Name: At_Drought_P Parameter: Timepoint (hr) Value: 24
  misc_feature: MA Experiment 20000437 PARAMETER Experiment Name: At_Drought_P Parameter: Tissue Value: Whole Plant
  misc_feature: MA Experiment 20000437 PARAMETER Experiment Name: At_Drought_P Parameter: Treatment Value: Drought vs. No Drought
  misc_feature: MA Experiment ID: 20001248 Result: Up-regulated in Transcription
  misc_feature: MA Experiment 20001248 PARAMETER Experiment Name: At_Far-red-induction_P Parameter: Age (day) Value: 7
  misc_feature: MA Experiment 20001248 PARAMETER Experiment Name: At_Far-red-induction_P Parameter: Light Value: Far-red vs. White
  misc_feature: MA Experiment 20001248 PARAMETER Experiment Name: At_Far-red-induction_P Parameter: Organism Value: A. thaliana
  misc_feature: MA Experiment 20001248 PARAMETER Experiment Name: At_Far-red-induction_P Parameter: Plant Line Value: Columbia
  misc_feature: MA Experiment 20001248 PARAMETER Experiment Name: At_Far-red-induction_P Parameter: Timepoint (hr) Value: 4
  misc_feature: MA Experiment 20001248 PARAMETER Experiment Name: At_Far-red-induction_P Parameter: Tissue Value: Whole Plant
  misc_feature: MA Experiment ID: 20001558 Result: Down-regulated in Transcription
  misc_feature: MA Experiment 20001558 PARAMETER Experiment Name: At_Drought_Soil_Dry_P Parameter: Age (day) Value: 27
  misc_feature: MA Experiment 20001558 PARAMETER Experiment Name: At_Drought_Soil_Dry_P Parameter: Organism Value: A. thaliana
  misc_feature: MA Experiment 20001558 PARAMETER Experiment Name: At_Drought_Soil_Dry_P Parameter: Plant Line Value: WS
  misc_feature: MA Experiment 20001558 PARAMETER Experiment Name: At_Drought_Soil_Dry_P Parameter: Post Timepoint (hr) Value: 6
  misc_feature: MA Experiment 20001558 PARAMETER Experiment Name: At_Drought_Soil_Dry_P Parameter: Post-Treatment Value: Re-Water vs. No Drought
  misc_feature: MA Experiment 20001558 PARAMETER Experiment Name: At_Drought_Soil_Dry_P Parameter: Timepoint (day) Value: 13
  misc_feature: MA Experiment 20001558 PARAMETER Experiment Name: At_Drought_Soil_Dry_P Parameter: Treatment Value: Drought vs. No Drought
aagaaaccaaaagagtaaaacaaacacagagaagcttcttcttaaacgatgccgtactataccagagatgacaacgacgtcgacgatttcgatgagtttgatccaacgccgtacagtggtggttacgacatcacggtgatctacggccgtccgattccaccttccgatgagacttgttatcctctctcatctggtgtcgatgatgatttcgaatacgagagacctgaatttactcagatccatgagccttctgcttacggtgatgaagctcttaacacagagtacagtagctattctcgacccaagccacgacccgcatttcgacccgattcaggttatggatctgaatccggttatgggaggaaaccggaatctgagtacggatctggctatggtggacaaacggaggtggagtatggtcggagacctgagcagagttatggatctggttatggtggaaggacggagactgaatcggagtatggatctggtggtggtggaagaactgaggttgagtatggtaggagacctgaatcagggcttggatctggttatggtgggagatcggagtctgagtatgagcgtaagcctagctatggaaggtctgaggaacaagaagaaggttataggaagcctagctatggaagatctgaagaacaagaggaaggttacaggaagccaagttatggaagatctgaggagcaggaagaaggatatagaaagcctagctatggaagatctgaggaggaacaagaggaaggttataggaagcctagctatggaagatctgaggaacaagaggaaggaagttacaggaaacctagttatgggaggtctgatgatcaggtggagagttacattaagcctagctatggaagatctgaggaacaggaggagggaagttacaggaagcctagttatgggaggtctgaggaacaggaagaggggagttacaggaagcagcctagctatggccgtggcaatgacgatgatgatgatgagcagcgtaggaaccgttctggttctggtgatgatgaggaagggagctatggccgcaagaaatatggtggcaatgactctgatgaggatgaggagaagaagaagcaccgtcacaagcatcaccaccagaagcgtcgtgacgaagacgatgagtaaactaaaccctctctgtgctagagagtgtaatgagaatgtgtgtttgcttagcctcaaaaatctactaaataaagagctaagtcacatacctttctacataatatcttccgacgttggtgttgtgtttgtttgaatctctgtattattactacagagtcttcgtactggttcataataagacctttaagtggtattgggtcaccatgtaactgttgctactctgtttcgttttctatctatcgttttgtgttatgatttacttttctatccttat

SEQ ID NO: 86297 - protein, 373 aa, Arabidopsis thaliana
  peptide (1)..(373): Ceres Seq. ID no. 12688609
  misc_feature (1)..(373): Homolog of NCBI NO: 18421880 NR Description: putative protein; protein id: At5g39570.1, by cDNA: gi_16604363 [Arabidopsis thaliana] putative protein [Arabidopsis thaliana]
MRLVILSHLVSMMISNTRDLNLLRSMSLLLTVMKLLTQSTVAILDPSHDPHFDPIQVMDLNPVMGGNRNLSTDLAMVDKRRWSMVGDLSRVMDLVMVEGRRLNRSMDLVVVEELRLSMVGDLNQGLDLVMVGDRSLSMSVSLAMEGLRNKKKVIGSLAMEDLKNKRKVTGSQVMEDLRSRKKDIESLAMEDLRRNKRKVIGSLAMEDLRNKRKEVTGNLVMGGLMIRWRVTLSLAMEDLRNRRREVTGSLVMGGLRNRKRGVTGSSLAMAVAMTMMMMSSVGTVLVLVMMRKGAMAARNMVAMTLMRMRRRRSTVTSITTRSVVTKTMSKLNPLCARECNENVCLLSLKNLLNKELSHIPFYIISSDVGVVFV

SEQ ID NO: 86298 - protein, 368 aa, Arabidopsis thaliana
  peptide (1)..(368): Ceres Seq. ID no. 12688610
  misc_feature (44)..(349): Pfam Name: High molecular weight glutenin subunit Pfam Description: High molecular weight glutenin subunit
  misc_feature (1)..(368): Homolog of NCBI NO: 9758332 NR Description: gene_id:MIJ24.6~ref|NP_013897.1~similar to protein [Arabidopsis thaliana] >gi|16604364|gb|AAL24188.1| [Arabidopsis thaliana] >gi|23308191|gb|AAN18065.1|
  misc_feature (1)..(368): Homolog of NCBI NO: 24417262 NR Description: unknown [Arabidopsis thaliana]
  misc_feature (1)..(283): Homolog of NCBI NO: 15228587 NR Description: hypothetical protein; protein id: At3g29075.1
  misc_feature (1)..(249): Homolog of NCBI NO: 21928162 NR Description: AT3g29075/MXE2_1 [Arabidopsis thaliana]
  misc_feature (92)..(314): Homolog of NCBI NO: 12580871 NR Description: hypothetical protein [Picea abies]
  misc_feature (68)..(346): Homolog of NCBI NO: 171388 NR Description: DDR48 stress protein
  misc_feature (68)..(346): Homolog of NCBI NO: 6323826 NR Description: DNA damage inducible; implicated in the
  misc_feature (51)..(343): Homolog of NCBI NO: 15228587 NR Description: hypothetical protein; protein id: At3g29075.1
  misc_feature (150)..(365): Homolog of NCBI NO: 12580871 NR Description: hypothetical protein [Picea abies]
  misc_feature (96)..(368): Homolog of NCBI NO: 15228587 NR Description: hypothetical protein; protein id: At3g29075.1
MPYYTRDDNDVDDFDEFDPTPYSGGYDITVIYGRPIPPSDETCYPLSSGVDDDFEYERPEFTQIHEPSAYGDEALNTEYSSYSRPKPRPAFRPDSGYGSESGYGRKPESEYGSGYGGQTEVEYGRRPEQSYGSGYGGRTETESEYGSGGGGRTEVEYGRRPESGLGSGYGGRSESEYERKPSYGRSEEQEEGYRKPSYGRSEEQEEGYRKPSYGRSEEQEEGYRKPSYGRSEEEQEEGYRKPSYGRSEEQEEGSYRKPSYGRSDDQVESYIKPSYGRSEEQEEGSYRKPSYGRSEEQEEGSYRKQPSYGRGNDDDDDEQRRNRSGSGDDEEGSYGRKKYGGNDSDEDEEKKKHRHKHHHQKRRDEDDE

SEQ ID NO: 86299 - protein, 362 aa, Arabidopsis thaliana
  peptide (1)..(362): Ceres Seq. ID no. 12688611
  misc_feature (1)..(362): Homolog of NCBI NO: 18421880 NR Description: putative protein; protein id: At5g39570.1, by cDNA: gi_16604363 [Arabidopsis thaliana] putative protein [Arabidopsis thaliana]
MMISNTRDLNLLRSMSLLLTVMKLLTQSTVAILDPSHDPHFDPIQVMDLNPVMGGNRNLSTDLAMVDKRRWSMVGDLSRVMDLVMVEGRRLNRSMDLVVVEELRLSMVGDLNQGLDLVMVGDRSLSMSVSLAMEGLRNKKKVIGSLAMEDLKNKRKVTGSQVMEDLRSRKKDIESLAMEDLRRNKRKVIGSLAMEDLRNKRKEVTGNLVMGGLMIRWRVTLSLAMEDLRNRRREVTGSLVMGGLRNRKRGVTGSSLAMAVAMTMMMMSSVGTVLVLVMMRKGAMAARNMVAMTLMRMRRRRSTVTSITTRSVVTKTMSKLNPLCARECNENVCLLSLKNLLNKELSHIPFYIISSDVGVVFV

SEQ ID NO: 86300 - DNA, 879 bp, Arabidopsis thaliana
  misc_feature (1)..(879): Ceres Seq. ID no. 12688616
  misc_feature: MA Experiment ID: 108461 Result: Down-regulated in Transcription
  misc_feature: MA Experiment 108461 PARAMETER Experiment Name: At_Germinating_Seeds_cDNA_P Parameter: Age (day) Value: 1 vs. 0
  misc_feature: MA Experiment 108461 PARAMETER Experiment Name: At_Germinating_Seeds_cDNA_P Parameter: Tissue Value: Germinating Seeds
  misc_feature: MA Experiment ID: 108462 Result: Down-regulated in Transcription
  misc_feature: MA Experiment 108462 PARAMETER Experiment Name: At_Germinating_Seeds_cDNA_P Parameter: Age (day) Value: 2 vs. 0
  misc_feature: MA Experiment 108462 PARAMETER Experiment Name: At_Germinating_Seeds_cDNA_P Parameter: Tissue Value: Germinating Seeds
  misc_feature: MA Experiment ID: 108463 Result: Down-regulated in Transcription
  misc_feature: MA Experiment 108463 PARAMETER Experiment Name: At_Germinating_Seeds_cDNA_P Parameter: Age (day) Value: 3 vs. 0
  misc_feature: MA Experiment 108463 PARAMETER Experiment Name: At_Germinating_Seeds_cDNA_P Parameter: Tissue Value: Germinating Seeds
  misc_feature: MA Experiment ID: 108464 Result: Down-regulated in Transcription
  misc_feature: MA Experiment 108464 PARAMETER Experiment Name: At_Germinating_Seeds_cDNA_P Parameter: Age (day) Value: 4 vs. 0
  misc_feature: MA Experiment 108464 PARAMETER Experiment Name: At_Germinating_Seeds_cDNA_P Parameter: Tissue Value: Germinating Seeds
  misc_feature: MA Experiment ID: 108573 Result: Down-regulated in Transcription
  misc_feature: MA Experiment 108573 PARAMETER Experiment Name: At_Drought_cDNA_P Parameter: Timepoint (hr) Value: 6
  misc_feature: MA Experiment 108573 PARAMETER Experiment Name: At_Drought_cDNA_P Parameter: Tissue Value: Aerial
  misc_feature: MA Experiment 108573 PARAMETER Experiment Name: At_Drought_cDNA_P Parameter: Treatment Value: Drought vs. No Drought
  misc_feature: MA Experiment ID: 108595 Result: Up-regulated in Transcription
  misc_feature: MA Experiment 108595 PARAMETER Experiment Name: At_Ler-pi_Ovule_cDNA_P Parameter: Plant Line Value: null
  misc_feature: MA Experiment ID: 20001247 Result: Down-regulated in Transcription
  misc_feature: MA Experiment 20001247 PARAMETER Experiment Name: At_Far-red-induction_P Parameter: Age (day) Value: 7
  misc_feature: MA Experiment 20001247 PARAMETER Experiment Name: At_Far-red-induction_P Parameter: Light Value: Far-red vs. White
  misc_feature: MA Experiment 20001247 PARAMETER Experiment Name: At_Far-red-induction_P Parameter: Organism Value: A. thaliana
  misc_feature: MA Experiment 20001247 PARAMETER Experiment Name: At_Far-red-induction_P Parameter: Plant Line Value: Columbia
  misc_feature: MA Experiment 20001247 PARAMETER Experiment Name: At_Far-red-induction_P Parameter: Timepoint (hr) Value: 1
  misc_feature: MA Experiment 20001247 PARAMETER Experiment Name: At_Far-red-induction_P Parameter: Tissue Value: Whole Plant
  misc_feature: MA Experiment ID: 20001556 Result: Up-regulated in Transcription
  misc_feature: MA Experiment 20001556 PARAMETER Experiment Name: At_Drought_Soil_Dry_P Parameter: Age (day) Value: 26
  misc_feature: MA Experiment 20001556 PARAMETER Experiment Name: At_Drought_Soil_Dry_P Parameter: Organism Value: A. thaliana
  misc_feature: MA Experiment 20001556 PARAMETER Experiment Name: At_Drought_Soil_Dry_P Parameter: Plant Line Value: WS
  misc_feature: MA Experiment 20001556 PARAMETER Experiment Name: At_Drought_Soil_Dry_P Parameter: Post Timepoint (hr) Value: None
  misc_feature: MA Experiment 20001556 PARAMETER Experiment Name: At_Drought_Soil_Dry_P Parameter: Post-Treatment Value: None
  misc_feature: MA Experiment 20001556 PARAMETER Experiment Name: At_Drought_Soil_Dry_P Parameter: Timepoint (day) Value: 12
  misc_feature: MA Experiment 20001556 PARAMETER Experiment Name: At_Drought_Soil_Dry_P Parameter: Treatment Value: Drought vs. No Drought
  misc_feature: MA Experiment ID: 20001904 Result: Up-regulated in Transcription
  misc_feature: MA Experiment 20001904 PARAMETER Experiment Name: At_Drought_Reproduction_P Parameter: Age (day) Value: 37
  misc_feature: MA Experiment 20001904 PARAMETER Experiment Name: At_Drought_Reproduction_P Parameter: Organism Value: A. thaliana
  misc_feature: MA Experiment 20001904 PARAMETER Experiment Name: At_Drought_Reproduction_P Parameter: Plant Line Value: WS
  misc_feature: MA Experiment 20001904 PARAMETER Experiment Name: At_Drought_Reproduction_P Parameter: Timepoint (day) Value: 7
  misc_feature: MA Experiment 20001904 PARAMETER Experiment Name: At_Drought_Reproduction_P Parameter: Tissue Value: Rosettes
  misc_feature: MA Experiment 20001904 PARAMETER Experiment Name: At_Drought_Reproduction_P Parameter: Treatment Value: Drought vs. No Drought
  misc_feature: MA Experiment ID: 20001908 Result: Up-regulated in Transcription
  misc_feature: MA Experiment 20001908 PARAMETER Experiment Name: At_Drought_Reproduction_P Parameter: Age (day) Value: 40
  misc_feature: MA Experiment 20001908 PARAMETER Experiment Name: At_Drought_Reproduction_P Parameter: Organism Value: A. thaliana
  misc_feature: MA Experiment 20001908 PARAMETER Experiment Name: At_Drought_Reproduction_P Parameter: Plant Line Value: WS
  misc_feature: MA Experiment 20001908 PARAMETER Experiment Name: At_Drought_Reproduction_P Parameter: Timepoint (day) Value: 10
  misc_feature: MA Experiment 20001908 PARAMETER Experiment Name: At_Drought_Reproduction_P Parameter: Tissue Value: Siliques
  misc_feature: MA Experiment 20001908 PARAMETER Experiment Name: At_Drought_Reproduction_P Parameter: Treatment Value: Drought vs. No Drought
  misc_feature: MA Experiment ID: 20001910 Result: Up-regulated in Transcription
  misc_feature: MA Experiment 20001910 PARAMETER Experiment Name: At_Drought_Reproduction_P Parameter: Age (day) Value: 37
  misc_feature: MA Experiment 20001910 PARAMETER Experiment Name: At_Drought_Reproduction_P Parameter: Organism Value: A. thaliana
  misc_feature: MA Experiment 20001910 PARAMETER Experiment Name: At_Drought_Reproduction_P Parameter: Plant Line Value: WS
  misc_feature: MA Experiment 20001910 PARAMETER Experiment Name: At_Drought_Reproduction_P Parameter: Timepoint (day) Value: 7
  misc_feature: MA Experiment 20001910 PARAMETER Experiment Name: At_Drought_Reproduction_P Parameter: Tissue Value: Flowers
  misc_feature: MA Experiment 20001910 PARAMETER Experiment Name: At_Drought_Reproduction_P Parameter: Treatment Value: Drought vs. No Drought
  misc_feature: MA Experiment ID: 20001911 Result: Up-regulated in Transcription
  misc_feature: MA Experiment 20001911 PARAMETER Experiment Name: At_Drought_Reproduction_P Parameter: Age (day) Value: 40
  misc_feature: MA Experiment 20001911 PARAMETER Experiment Name: At_Drought_Reproduction_P Parameter: Organism Value: A. thaliana
  misc_feature: MA Experiment 20001911 PARAMETER Experiment Name: At_Drought_Reproduction_P Parameter: Plant Line Value: WS
  misc_feature: MA Experiment 20001911 PARAMETER Experiment Name: At_Drought_Reproduction_P Parameter: Timepoint (day) Value: 10
  misc_feature: MA Experiment 20001911 PARAMETER Experiment Name: At_Drought_Reproduction_P Parameter: Tissue Value: Flowers
  misc_feature: MA Experiment 20001911 PARAMETER Experiment Name: At_Drought_Reproduction_P Parameter: Treatment Value: Drought vs. No Drought
aactctgtcttagttttgagcagcagcagctatggttaacgtcagattctaccgaaactatgggaaaacattcaagaagccacgtcgtccttatgagaaagagcgtcttgatgctgagctaaagcttgttggagaatacggtcttcgttgtaagagagagctttggagagttcaatatacacttagcagaatccgtaatgctgcaagagaactcttaactcttgatgagaagaatcctcgtcgtatctttgaaggtgaagctcttcttaggagaatgaatcgatatggtcttcttgatgaaacccagaacaagcttgattatgttcttgctttgactgttgagaatttccttgaacgtcgtctccaaactattgtctttaagtctggtatggctaagtccattcaccacgctcgtgtccttatccgacaaaggcatatcagggttgggaggcaacttgtgaacattccatcgtttatggtgagagtagagtcacagaagcacgtagacttttctctaaccagtccattcggtggtggtcgacctggaagagtgaagagaaggaacgagagagccggagctaagaaagcttctggtggtgatggagatgaggatgatgaagagtgaaaagtaccaaacccttaaaaaaatccctaagatgaaacactacctagctaaacctatcaaaatgcttttagttgataatagtttggttttgttacctctttttgtgagatatttggtttgttagtgttcttaattagtagtagaagtgaagtgtttttttttttttttataatgttttggaccttgtgttcttgaaccatgtcactttcgaatcttgcttcttataagatactagtagttgatattattatgtc

SEQ ID NO: 86301 - protein, 197 aa, Arabidopsis thaliana [sequence omitted]

SEQ ID NO: 86302 - protein, 116 aa, Arabidopsis thaliana; identical to SEQ ID NO: 37501
  peptide (1)..(116): Ceres Seq. ID no. 12688618
  misc_feature (28)..(75): Pfam Name: S4 domain Pfam Description: S4 domain
  misc_feature (1)..(116): Homolog of NCBI NO: 15242498 NR Description: 40S ribosomal protein S9-like; protein id: supported by cDNA: 41408. [Arabidopsis thaliana]
  misc_feature (1)..(116): Homolog of NCBI NO: 15242241 NR Description: 40S ribosomal protein - like; protein id:
  misc_feature (1)..(115): Homolog of NCBI NO: 6440857 NR Description: 40S ribosomal protein S9 [Chlamydomonas sp. HS-5]
  misc_feature (1)..(116): Homolog of NCBI NO: 1710780 NR Description: 40S ribosomal protein S9 (S7)
  misc_feature (1)..(116): Homolog of NCBI NO: 40741183 NR Description: RS9_PODAN 40S ribosomal protein S9 (S7)
  misc_feature (1)..(116): Homolog of NCBI NO: 14141193 NR Description: ribosomal protein S9; 40S ribosomal protein S9 sapiens] >gi|20818468|ref|XP_133123.1| RIKEN cDNA 3010033P07 [Mus >gi|20178311|sp|P46781|RS9_HUMAN 40S ribosomal protein S9 Unknown
  misc_feature (1)..(114): Homolog of NCBI NO: 15294029 NR Description: 40S ribosomal protein S9 [Ictalurus punctatus]
  misc_feature (1)..(116): Homolog of NCBI NO: 13592067 NR Description: ribosomal protein S9 [Rattus norvegicus]
  misc_feature (1)..(116): Homolog of NCBI NO: 24661707 NR Description: Ribosomal protein S9 CG3395-PA
  misc_feature (1)..(110): Homolog of NCBI NO: 38047837 NR Description: similar to Drosophila melanogaster RpS9

SEQ ID NO: 86303 - DNA, 1012 bp, Arabidopsis thaliana
  misc_feature (1)..(1012): Ceres Seq. ID no. 12688631
  misc_feature: MA Experiment ID: 108501 Result: Down-regulated in Transcription
  misc_feature: MA Experiment 108501 PARAMETER Experiment Name: At_ap2_floral_buds_cDNA_P Parameter: Plant Line Value: ap2 (Ler.)
  misc_feature: MA Experiment 108501 PARAMETER Experiment Name: At_ap2_floral_buds_cDNA_P Parameter: Tissue Value: Closed Flower
  misc_feature: MA Experiment ID: 108595 Result: Up-regulated in Transcription
  misc_feature: MA Experiment 108595 PARAMETER Experiment Name: At_Ler-pi_Ovule_cDNA_P Parameter: Plant Line Value: null
  misc_feature: MA Experiment ID: 20000171 Result: Up-regulated in Transcription
  misc_feature: MA Experiment 20000171 PARAMETER Experiment Name: At_42deg_Heat_P Parameter: Age (day) Value: 14
  misc_feature: MA Experiment 20000171 PARAMETER Experiment Name: At_42deg_Heat_P Parameter: Organism Value: A. thaliana
  misc_feature: MA Experiment 20000171 PARAMETER Experiment Name: At_42deg_Heat_P Parameter: Plant Line Value: WS
  misc_feature: MA Experiment 20000171 PARAMETER Experiment Name: At_42deg_Heat_P Parameter: Temperature (deg C) Value: 42 vs. 22
  misc_feature: MA Experiment 20000171 PARAMETER Experiment Name: At_42deg_Heat_P Parameter: Timepoint (hr) Value: 1
  misc_feature: MA Experiment 20000171 PARAMETER Experiment Name: At_42deg_Heat_P Parameter: Tissue Value: Aerial
aattaggttttcttctacacttgttcttcttcatttgctctcttcttcatcaatctctctctttttgtaaacggcgattttaaaatggttgatgcaaaacaagttcgtttcatcatcggagttatcggaaatgttatctcctttggtctctttgccgcaccagcgaagactttctggaggatcttcaagaagaaatcagtggaagagttttcgtatgtgccgtacgtagcaacggtgatgaattgtatgttgtgggtgttttacggtctccctgtggttcacaaagacagtattctagtttcaaccattaatggtgttgggttagttatcgaacttttctacgttggtgtctacttgatgtactgtggtcacaagaagaaccatcgaaggaacattttgggattcttagctcttgaagttattttggtggtggctatcattcttattacgctctttgcgcttaagggtgattttgttaagcaaacatttgttggtgtgatttgcgatgtcttcaacattgctatgtatggagctccttcattggccattattaaagtggtaaaaacaaagagtgttgaatacatgccattcttgttgtctttggtctgtttcgttaatgctggaatttggactacttactcgctcatcttcaagatcgattactacgtcctcgcaagtaatgggattggaacctttttggcactttctcagttgatagtgtacttcatgtactataagtcaactccaaaggagaagacggtgaagccatcagaagttgagatttctgctacggagagggtttaggagaattgtgctttggattctatcttcttacgtacattttacatacacaatttgtgtgtatgtttaggcttttgggtttttatgtttggtagaattttccaatcgtttagtttctggattttgaggattcgtcttggttcattttcttaatacattttttatggtgtgaaacgctttgacggaaatcatcaagttttggatttattct

SEQ ID NO: 86304 - protein, 239 aa, Arabidopsis thaliana; identical to SEQ ID NO: 28773
  peptide (1)..(239): Ceres Seq. ID no. 12688632
  misc_feature (9)..(98): Pfam Name: MtN3/saliva family Pfam Description: MtN3/saliva family
  misc_feature (1)..(239): Homolog of NCBI NO: 18421965 NR Description: putative protein; protein id: At5g40260.1, by cDNA: 11922. [Arabidopsis thaliana] contains similarity to MtN3 [Arabidopsis thaliana]
  misc_feature (28)..(239): Homolog of NCBI NO: 10177513 NR Description: contains similarity to MtN3~gene_id:MSN9.17
  misc_feature (1)..(233): Homolog of NCBI NO: 34912454 NR Description: P0681B11.31 [Oryza sativa (japonica
  misc_feature (1)..(233): Homolog of NCBI NO: 34912462 NR Description: MtN3-like protein [Oryza sativa (japonica
  misc_feature (7)..(235): Homolog of NCBI NO: 18413388 NR Description: putative protein; protein id: At4g10850.1, by cDNA: 33161. [Arabidopsis thaliana] contains similarity to Medicago truncatula MtN3 (GB:Y08726)
  misc_feature (1)..(234): Homolog of NCBI NO: 18405611 NR Description: Expressed protein; protein id: At3g28007.1, by cDNA: 22745., supported by cDNA: gi_16226221 [Arabidopsis >gi|16226222|gb|AAL16107.1|AF428275_1 unknown protein
  misc_feature (1)..(234): Homolog of NCBI NO: 21592355 NR Description: contains similarity to nodulin MtN3 protein
  misc_feature (7)..(220): Homolog of NCBI NO: 15219732 NR Description: hypothetical protein; protein id: At1g66770.1 thaliana] >gi|12597757|gb|AAG60070.1|AC013288_4 hypothetical
  misc_feature (29)..(235): Homolog of NCBI NO: 7486148 NR Description: hypothetical protein F25I24.60 - Arabidopsis >gi|4539359|emb|CAB40053.1| putative protein [Arabidopsis >gi|7267783|emb|CAB81186.1| putative protein [Arabidopsis
  misc_feature (1)..(210): Homolog of NCBI NO: 10177463 NR Description: contains similarity to MtN3

SEQ ID NO: 86305 - protein, 188 aa, Arabidopsis thaliana; identical to SEQ ID NO: 28774
  peptide (1)..(188): Ceres Seq. ID no. 12688633
  misc_feature (1)..(188): Homolog of NCBI NO: 18421965 NR Description: putative protein; protein id: At5g40260.1, by cDNA: 11922. [Arabidopsis thaliana] contains similarity to MtN3 [Arabidopsis thaliana]
  misc_feature (1)..(188): Homolog of NCBI NO: 10177513 NR Description: contains similarity to MtN3~gene_id:MSN9.17
  misc_feature (1)..(182): Homolog of NCBI NO: 34912454 NR Description: P0681B11.31 [Oryza sativa (japonica
  misc_feature (1)..(182): Homolog of NCBI NO: 34912462 NR Description: MtN3-like protein [Oryza sativa (japonica
  misc_feature (1)..(184): Homolog of NCBI NO: 18413388 NR Description: putative protein; protein id: At4g10850.1, by cDNA: 33161. [Arabidopsis thaliana] contains similarity to Medicago truncatula MtN3 (GB:Y08726)
  misc_feature (1)..(183): Homolog of NCBI NO: 18405611 NR Description: Expressed protein; protein id: At3g28007.1, by cDNA: 22745., supported by cDNA: gi_16226221 [Arabidopsis >gi|16226222|gb|AAL16107.1|AF428275_1 unknown protein
  misc_feature (1)..(183): Homolog of NCBI NO: 21592355 NR Description: contains similarity to nodulin MtN3 protein
  misc_feature (1)..(169): Homolog of NCBI NO: 15219732 NR Description: hypothetical protein; protein id: At1g66770.1 thaliana] >gi|12597757|gb|AAG60070.1|AC013288_4 hypothetical
  misc_feature (1)..(184): Homolog of NCBI NO: 7486148 NR Description: hypothetical protein F25I24.60 - Arabidopsis >gi|4539359|emb|CAB40053.1| putative protein [Arabidopsis >gi|7267783|emb|CAB81186.1| putative protein [Arabidopsis
  misc_feature (1)..(159): Homolog of NCBI NO: 10177463 NR Description: contains similarity to MtN3

SEQ ID NO: 86306 - protein, 185 aa, Arabidopsis thaliana; identical to SEQ ID NO: 28775
  peptide (1)..(185): Ceres Seq. ID no. 12688634
  misc_feature (1)..(185): Homolog of NCBI NO: 18421965 NR Description: putative protein; protein id: At5g40260.1, by cDNA: 11922. [Arabidopsis thaliana] contains similarity to MtN3 [Arabidopsis thaliana]
  misc_feature (1)..(185): Homolog of NCBI NO: 10177513 NR Description: contains similarity to MtN3~gene_id:MSN9.17
  misc_feature (1)..(179): Homolog of NCBI NO: 34912454 NR Description: P0681B11.31 [Oryza sativa (japonica
  misc_feature (1)..(179): Homolog of NCBI NO: 34912462 NR Description: MtN3-like protein [Oryza sativa (japonica
  misc_feature (1)..(181): Homolog of NCBI NO: 18413388 NR Description: putative protein; protein id: At4g10850.1, by cDNA: 33161. [Arabidopsis thaliana] contains similarity to Medicago truncatula MtN3 (GB:Y08726)
  misc_feature (1)..(180): Homolog of NCBI NO: 18405611 NR Description: Expressed protein; protein id: At3g28007.1, by cDNA: 22745., supported by cDNA: gi_16226221 [Arabidopsis >gi|16226222|gb|AAL16107.1|AF428275_1 unknown protein
  misc_feature (1)..(180): Homolog of NCBI NO: 21592355 NR Description: contains similarity to nodulin MtN3 protein
  misc_feature (1)..(166): Homolog of NCBI NO: 15219732 NR Description: hypothetical protein; protein id: At1g66770.1 thaliana] >gi|12597757|gb|AAG60070.1|AC013288_4 hypothetical
  misc_feature (1)..(181): Homolog of NCBI NO: 7486148 NR Description: hypothetical protein F25I24.60 - Arabidopsis >gi|4539359|emb|CAB40053.1| putative protein [Arabidopsis >gi|7267783|emb|CAB81186.1| putative protein [Arabidopsis
  misc_feature (1)..(156): Homolog of NCBI NO: 10177463 NR Description: contains similarity to MtN3

SEQ ID NO: 86307 - DNA, 1369 bp, Arabidopsis thaliana
  misc_feature (1)..(1369): Ceres Seq. ID no. 12688635
  misc_feature: MA Experiment ID: 108434 Result: Down-regulated in Transcription
  misc_feature: MA Experiment 108434 PARAMETER Experiment Name: At_Root_Tips_cDNA_P Parameter: Tissue Value: Root Tips
  misc_feature: MA Experiment ID: 108561 Result: Up-regulated in Transcription
  misc_feature: MA Experiment 108561 PARAMETER Experiment Name: At_100uM_ABA_cDNA_P Parameter: Timepoint (hr) Value: 6
  misc_feature: MA Experiment 108561 PARAMETER Experiment Name: At_100uM_ABA_cDNA_P Parameter: Tissue Value: Aerial
  misc_feature: MA Experiment 108561 PARAMETER Experiment Name: At_100uM_ABA_cDNA_P Parameter: Treatment Value: 100uM ABA vs. No Treatment
  misc_feature: MA Experiment ID: 108573 Result: Up-regulated in Transcription
  misc_feature: MA Experiment 108573 PARAMETER Experiment Name: At_Drought_cDNA_P Parameter: Timepoint (hr) Value: 6
  misc_feature: MA Experiment 108573 PARAMETER Experiment Name: At_Drought_cDNA_P Parameter: Tissue Value: Aerial
  misc_feature: MA Experiment 108573 PARAMETER Experiment Name: At_Drought_cDNA_P Parameter: Treatment Value: Drought vs. No Drought
  misc_feature: MA Experiment ID: 108594 Result: Down-regulated in Transcription
  misc_feature: MA Experiment 108594 PARAMETER Experiment Name: At_Ler-rhl_Root_cDNA_P Parameter: Plant Line Value: null
  misc_feature: MA Experiment ID: 108605 Result: Up-regulated in Transcription
  misc_feature: MA Experiment 108605 PARAMETER Experiment Name: At_100uM_ABA_cDNA_P Parameter: Timepoint (hr) Value: 6
  misc_feature: MA Experiment 108605 PARAMETER Experiment Name: At_100uM_ABA_cDNA_P Parameter: Tissue Value: Aerial
  misc_feature: MA Experiment 108605 PARAMETER Experiment Name: At_100uM_ABA_cDNA_P Parameter: Treatment Value: 100uM ABA vs. No Treatment
  misc_feature: MA Experiment ID: 108607 Result: Up-regulated in Transcription
  misc_feature: MA Experiment 108607 PARAMETER Experiment Name: At_100uM_ABA_cDNA_P Parameter: Timepoint (hr) Value: 4
  misc_feature: MA Experiment 108607 PARAMETER Experiment Name: At_100uM_ABA_cDNA_P Parameter: Tissue Value: Aerial
  misc_feature: MA Experiment 108607 PARAMETER Experiment Name: At_100uM_ABA_cDNA_P Parameter: Treatment Value: 100uM ABA vs. No Treatment
  misc_feature: MA Experiment ID: 20000069 Result: Up-regulated in Transcription
  misc_feature: MA Experiment 20000069 PARAMETER Experiment Name: At_100uM_ABA_Mutants_cDNA_P Parameter: Plant Line Value: CS23
  misc_feature: MA Experiment 20000069 PARAMETER Experiment Name: At_100uM_ABA_Mutants_cDNA_P Parameter: Timepoint (hr) Value: 6
  misc_feature: MA Experiment 20000069 PARAMETER Experiment Name: At_100uM_ABA_Mutants_cDNA_P Parameter: Tissue Value: Aerial
  misc_feature: MA Experiment 20000069 PARAMETER Experiment Name: At_100uM_ABA_Mutants_cDNA_P Parameter: Treatment Value: 100uM ABA vs. No Treatment
  misc_feature: MA Experiment ID: 20000070 Result: Up-regulated in Transcription
  misc_feature: MA Experiment 20000070 PARAMETER Experiment Name: At_100uM_ABA_Mutants_cDNA_P Parameter: Plant Line Value: CS24
  misc_feature: MA Experiment 20000070 PARAMETER Experiment Name: At_100uM_ABA_Mutants_cDNA_P Parameter: Timepoint (hr) Value: 6
  misc_feature: MA Experiment 20000070 PARAMETER Experiment Name: At_100uM_ABA_Mutants_cDNA_P Parameter: Tissue Value: Aerial
  misc_feature: MA Experiment 20000070 PARAMETER Experiment Name: At_100uM_ABA_Mutants_cDNA_P Parameter: Treatment Value: 100uM ABA vs. No Treatment
  misc_feature: MA Experiment ID: 20000071 Result: Up-regulated in Transcription
  misc_feature: MA Experiment 20000071 PARAMETER Experiment Name: At_100uM_ABA_Mutants_cDNA_P Parameter: Plant Line Value: CS8104
  misc_feature: MA Experiment 20000071 PARAMETER Experiment Name: At_100uM_ABA_Mutants_cDNA_P Parameter: Timepoint (hr) Value: 6
  misc_feature: MA Experiment 20000071 PARAMETER Experiment Name: At_100uM_ABA_Mutants_cDNA_P Parameter: Tissue Value: Aerial
  misc_feature: MA Experiment 20000071 PARAMETER Experiment Name: At_100uM_ABA_Mutants_cDNA_P Parameter: Treatment Value: 100uM ABA vs. No Treatment
  misc_feature: MA Experiment ID: 20000072 Result: Up-regulated in Transcription
  misc_feature: MA Experiment 20000072 PARAMETER Experiment Name: At_100uM_ABA_Mutants_cDNA_P Parameter: Plant Line Value: CS8105
  misc_feature: MA Experiment 20000072 PARAMETER Experiment Name: At_100uM_ABA_Mutants_cDNA_P Parameter: Timepoint (hr) Value: 6
  misc_feature: MA Experiment 20000072 PARAMETER Experiment Name: At_100uM_ABA_Mutants_cDNA_P Parameter: Tissue Value: Aerial
  misc_feature: MA Experiment 20000072 PARAMETER Experiment Name: At_100uM_ABA_Mutants_cDNA_P Parameter: Treatment Value: 100uM ABA vs. No Treatment
  misc_feature: MA Experiment ID: 20000086 Result: Up-regulated in Transcription
  misc_feature: MA Experiment 20000086 PARAMETER Experiment Name: At_100uM_ABA_Mutants_cDNA_P Parameter: Plant Line Value: CS22
  misc_feature: MA Experiment 20000086 PARAMETER Experiment Name: At_100uM_ABA_Mutants_cDNA_P Parameter: Timepoint (hr) Value: 6
  misc_feature: MA Experiment 20000086 PARAMETER Experiment Name: At_100uM_ABA_Mutants_cDNA_P Parameter: Tissue Value: Aerial
  misc_feature: MA Experiment 20000086 PARAMETER Experiment Name: At_100uM_ABA_Mutants_cDNA_P Parameter: Treatment Value: 100uM ABA vs. No Treatment
  misc_feature: MA Experiment ID: 20000087 Result: Up-regulated in Transcription
  misc_feature: MA Experiment 20000087 PARAMETER Experiment Name: At_100uM_ABA_Mutants_cDNA_P Parameter: Plant Line Value: WS
  misc_feature: MA Experiment 20000087 PARAMETER Experiment Name: At_100uM_ABA_Mutants_cDNA_P Parameter: Timepoint (hr) Value: 6
  misc_feature: MA Experiment 20000087 PARAMETER Experiment Name: At_100uM_ABA_Mutants_cDNA_P Parameter: Tissue Value: Aerial
  misc_feature: MA Experiment 20000087 PARAMETER Experiment Name: At_100uM_ABA_Mutants_cDNA_P Parameter: Treatment Value: 100uM ABA vs. No Treatment
  misc_feature: MA Experiment ID: 20000088 Result: Up-regulated in Transcription
  misc_feature: MA Experiment 20000088 PARAMETER Experiment Name: At_100uM_ABA_Mutants_cDNA_P Parameter: Plant Line Value: Landsberg
  misc_feature: MA Experiment 20000088 PARAMETER Experiment Name: At_100uM_ABA_Mutants_cDNA_P Parameter: Timepoint (hr) Value: 6
  misc_feature: MA Experiment 20000088 PARAMETER Experiment Name: At_100uM_ABA_Mutants_cDNA_P Parameter: Tissue Value: Aerial
  misc_feature: MA Experiment 20000088 PARAMETER Experiment Name: At_100uM_ABA_Mutants_cDNA_P Parameter: Treatment Value: 100uM ABA vs. No Treatment
  misc_feature: MA Experiment ID: 20000090 Result: Up-regulated in Transcription
  misc_feature: MA Experiment ID: 20000111 Result: Down-regulated in Transcription
  misc_feature: MA Experiment 20000111 PARAMETER Experiment Name: At_42deg_Heat_cDNA_P Parameter: Temperature (deg C) Value: 42 vs. 22
  misc_feature: MA Experiment 20000111 PARAMETER Experiment Name: At_42deg_Heat_cDNA_P Parameter: Timepoint (hr) Value: 6
  misc_feature: MA Experiment 20000111 PARAMETER Experiment Name: At_42deg_Heat_cDNA_P Parameter: Tissue Value: Aerial
  misc_feature: MA Experiment ID: 20000113 Result: Down-regulated in Transcription
  misc_feature: MA Experiment 20000113 PARAMETER Experiment Name: At_42deg_Heat_cDNA_P Parameter: Temperature (deg C) Value: 42 vs. 22
  misc_feature: MA Experiment 20000113 PARAMETER Experiment Name: At_42deg_Heat_cDNA_P Parameter: Timepoint (hr) Value: 8
  misc_feature: MA Experiment 20000113 PARAMETER Experiment Name: At_42deg_Heat_cDNA_P Parameter: Tissue Value: Aerial
  misc_feature: MA Experiment ID: 20000169 Result: Up-regulated in Transcription
  misc_feature: MA Experiment 20000169 PARAMETER Experiment Name: At_100uM_ABA_P Parameter: Age (day) Value: 14
  misc_feature: MA Experiment 20000169 PARAMETER Experiment Name: At_100uM_ABA_P Parameter: Organism Value: A. thaliana
  misc_feature: MA Experiment 20000169 PARAMETER Experiment Name: At_100uM_ABA_P Parameter: Plant Line Value: WS
  misc_feature: MA Experiment 20000169 PARAMETER Experiment Name: At_100uM_ABA_P Parameter: Timepoint (hr) Value: 6
  misc_feature: MA Experiment 20000169 PARAMETER Experiment Name: At_100uM_ABA_P Parameter: Tissue Value: Aerial
  misc_feature: MA Experiment 20000169 PARAMETER Experiment Name: At_100uM_ABA_P Parameter: Treatment Value: 100uM ABA vs. No Treatment
  misc_feature: MA Experiment ID: 20000171 Result: Down-regulated in Transcription
  misc_feature: MA Experiment 20000171 PARAMETER Experiment Name: At_42deg_Heat_P Parameter: Age (day) Value: 14
  misc_feature: MA Experiment 20000171 PARAMETER Experiment Name: At_42deg_Heat_P Parameter: Organism Value: A. thaliana
  misc_feature: MA Experiment 20000171 PARAMETER Experiment Name: At_42deg_Heat_P Parameter: Plant Line Value: WS
  misc_feature: MA Experiment 20000171 PARAMETER Experiment Name: At_42deg_Heat_P Parameter: Temperature (deg C) Value: 42 vs. 22
  misc_feature: MA Experiment 20000171 PARAMETER Experiment Name: At_42deg_Heat_P Parameter: Timepoint (hr) Value: 1
  misc_feature: MA Experiment 20000171 PARAMETER Experiment Name: At_42deg_Heat_P Parameter: Tissue Value: Aerial
  misc_feature: MA Experiment ID: 20000173 Result: Down-regulated in Transcription
  misc_feature: MA Experiment 20000173 PARAMETER Experiment Name: At_42deg_Heat_P Parameter: Age (day) Value: 14
  misc_feature: MA Experiment 20000173 PARAMETER Experiment Name: At_42deg_Heat_P Parameter: Organism Value: A. thaliana
  misc_feature: MA Experiment 20000173 PARAMETER Experiment Name: At_42deg_Heat_P Parameter: Plant Line Value: WS
  misc_feature: MA Experiment 20000173 PARAMETER Experiment Name: At_42deg_Heat_P Parameter: Temperature (deg C) Value: 42 vs. 22
  misc_feature: MA Experiment 20000173 PARAMETER Experiment Name: At_42deg_Heat_P Parameter: Timepoint (hr) Value: 6
  misc_feature: MA Experiment 20000173 PARAMETER Experiment Name: At_42deg_Heat_P Parameter: Tissue Value: Aerial
  misc_feature: MA Experiment ID: 20000184 Result: Down-regulated in Transcription
  misc_feature: MA Experiment 20000184 PARAMETER Experiment Name: At_Shoots__P Parameter: Age (day) Value: 7
  misc_feature: MA Experiment 20000184 PARAMETER Experiment Name: At_Shoots__P Parameter: Tissue Value: Shoots vs. Whole Plant
  misc_feature: MA Experiment ID: 20000227 Result: Down-regulated in Transcription
  misc_feature: MA Experiment 20000227 PARAMETER Experiment Name: At_Root-Tips-vs-Tops_P Parameter: Tissue Value: Root Tips vs. Root Tops
  misc_feature: MA Experiment ID: 20000234 Result: Down-regulated in Transcription
  misc_feature: MA Experiment 20000234 PARAMETER Experiment Name: At_Siliques_P Parameter: Age (day) Value: 21
  misc_feature: MA Experiment 20000234 PARAMETER Experiment Name: At_Siliques_P Parameter: Organism Value: A. thaliana
  misc_feature: MA Experiment 20000234 PARAMETER Experiment Name: At_Siliques_P Parameter: Plant Line Value: WS
  misc_feature: MA Experiment 20000234 PARAMETER Experiment Name: At_Siliques_P Parameter: Tissue Value: Less Than 5mm Siliques vs. Whole Plant
  misc_feature: MA Experiment ID: 20000235 Result: Down-regulated in Transcription
  misc_feature: MA Experiment 20000235 PARAMETER Experiment Name: At_Siliques_P Parameter: Age (day) Value: 21
  misc_feature: MA Experiment 20000235 PARAMETER Experiment Name: At_Siliques_P Parameter: Organism Value: A. thaliana
  misc_feature: MA Experiment 20000235 PARAMETER Experiment Name: At_Siliques_P Parameter: Plant Line Value: WS
  misc_feature: MA Experiment 20000235 PARAMETER Experiment Name: At_Siliques_P Parameter: Tissue Value: 5-10mm Siliques vs. Whole Plant
  misc_feature: MA Experiment ID: 20000265 Result: Down-regulated in Transcription
  misc_feature: MA Experiment 20000265 PARAMETER Experiment Name: At_Open_Flower_P Parameter: Age (day) Value: 21
  misc_feature: MA Experiment 20000265 PARAMETER Experiment Name: At_Open_Flower_P Parameter: Plant Line Value: WS
  misc_feature: MA Experiment 20000265 PARAMETER Experiment Name: At_Open_Flower_P Parameter: Tissue Value: Closed Flower vs. Whole Plant
  misc_feature: MA Experiment ID: 20000438 Result: Down-regulated in Transcription
  misc_feature: MA Experiment 20000438 PARAMETER Experiment Name: At_Shoots__P Parameter: Age (day) Value: 14
  misc_feature: MA Experiment 20000438 PARAMETER Experiment Name: At_Shoots__P Parameter: Tissue Value: Shoots vs. Whole Plant
  misc_feature: MA Experiment ID: 20000439 Result: Up-regulated in Transcription
  misc_feature: MA Experiment 20000439 PARAMETER Experiment Name: At_Roots__P Parameter: Age (day) Value: 14 vs. 21
  misc_feature: MA Experiment 20000439 PARAMETER Experiment Name: At_Roots__P Parameter: Organism Value: A. thaliana
  misc_feature: MA Experiment 20000439 PARAMETER Experiment Name: At_Roots__P Parameter: Tissue Value: Roots vs. Whole Plant
  misc_feature: MA Experiment ID: 20000451 Result: Down-regulated in Transcription
  misc_feature: MA Experiment 20000451 PARAMETER Experiment Name: At_CS6879_Shoots-Roots_P Parameter: Age (day) Value: 14
  misc_feature: MA Experiment 20000451 PARAMETER Experiment Name: At_CS6879_Shoots-Roots_P Parameter: Organism Value: A. thaliana
  misc_feature: MA Experiment 20000451 PARAMETER Experiment Name: At_CS6879_Shoots-Roots_P Parameter: Plant Line Value: CS6879 vs. WS
  misc_feature: MA Experiment 20000451 PARAMETER Experiment Name: At_CS6879_Shoots-Roots_P Parameter: Tissue Value: Roots
  misc_feature: MA Experiment ID: 20000495 Result: Up-regulated in Transcription
  misc_feature: MA Experiment 20000495 PARAMETER Experiment Name: At_Guard_Cells_P Parameter: Harvest Date Value: 8/2/2002
  misc_feature: MA Experiment 20000495 PARAMETER Experiment Name: At_Guard_Cells_P Parameter: Organism Value: A. thaliana
  misc_feature: MA Experiment 20000495 PARAMETER Experiment Name: At_Guard_Cells_P Parameter: Tissue Value: Guard Cells vs. Leaves
  misc_feature: MA Experiment ID: 20000527 Result: Down-regulated in Transcription
  misc_feature: MA Experiment 20000527 PARAMETER Experiment Name: At_10percent_PEG_P Parameter: Age (day) Value: 20
  misc_feature: MA Experiment 20000527 PARAMETER Experiment Name: At_10percent_PEG_P Parameter: Organism Value: A. thaliana
  misc_feature: MA Experiment 20000527 PARAMETER Experiment Name: At_10percent_PEG_P Parameter: Plant Line Value: WS
  misc_feature: MA Experiment 20000527 PARAMETER Experiment Name: At_10percent_PEG_P Parameter: Timepoint (day) Value: 20
  misc_feature: MA Experiment 20000527 PARAMETER Experiment Name: At_10percent_PEG_P Parameter: Tissue Value: Whole Plant
  misc_feature: MA Experiment 20000527 PARAMETER Experiment Name: At_10percent_PEG_P Parameter: Treatment Value: 10percent PEG vs. No Treatment
  misc_feature: MA Experiment ID: 20000575 Result: Down-regulated in Transcription
  misc_feature: MA Experiment 20000575 PARAMETER Experiment Name: At_100uM_ABA_Mutants__P Parameter: Organism Value: A. thaliana
  misc_feature: MA Experiment 20000575 PARAMETER Experiment Name: At_100uM_ABA_Mutants__P Parameter: Plant Line Value: CS22
  misc_feature: MA Experiment 20000575 PARAMETER Experiment Name: At_100uM_ABA_Mutants__P Parameter: Timepoint (hr) Value: 6
  misc_feature: MA Experiment 20000575 PARAMETER Experiment Name: At_100uM_ABA_Mutants__P Parameter: Tissue Value: Whole Plant
  misc_feature: MA Experiment 20000575 PARAMETER Experiment Name: At_100uM_ABA_Mutants__P Parameter: Treatment Value: 1uM ABA vs. No Treatment
  misc_feature: MA Experiment ID: 20000709 Result: Down-regulated in Transcription
  misc_feature: MA Experiment 20000709 PARAMETER Experiment Name: At_15mM_NH4NO3_L-to-H_P Parameter: Age (hr) Value: 14
  misc_feature: MA Experiment 20000709 PARAMETER Experiment Name: At_15mM_NH4NO3_L-to-H_P Parameter: Organism Value: A. thaliana
  misc_feature: MA Experiment 20000709 PARAMETER Experiment Name: At_15mM_NH4NO3_L-to-H_P Parameter: Plant Line Value: WS
  misc_feature: MA Experiment 20000709 PARAMETER Experiment Name: At_15mM_NH4NO3_L-to-H_P Parameter: Timepoint (hr) Value: 4
  misc_feature: MA Experiment 20000709 PARAMETER Experiment Name: At_15mM_NH4NO3_L-to-H_P Parameter: Tissue Value: Aerial
  misc_feature: MA Experiment 20000709 PARAMETER Experiment Name: At_15mM_NH4NO3_L-to-H_P Parameter: Treatment Value: 15mM NH4NO3 vs. 30mM Mannitol
  misc_feature: MA Experiment ID: 20000794 Result: Up-regulated in Transcription
  misc_feature: MA Experiment 20000794 PARAMETER Experiment Name: At_Petals_P Parameter: Age (day) Value: 23-25 days
  misc_feature: MA Experiment 20000794 PARAMETER Experiment Name: At_Petals_P Parameter: Plant Line Value: WS
  misc_feature: MA Experiment 20000794 PARAMETER Experiment Name: At_Petals_P Parameter: Tissue Value: Petals vs. Whole plant
  misc_feature: MA Experiment ID: 20001554 Result: Up-regulated in Transcription
  misc_feature: MA Experiment 20001554 PARAMETER Experiment Name: At_Drought_Soil_Dry_P Parameter: Age (day) Value: 21
  misc_feature: MA Experiment 20001554 PARAMETER Experiment Name: At_Drought_Soil_Dry_P Parameter: Organism Value: A. thaliana
  misc_feature: MA Experiment 20001554 PARAMETER Experiment Name: At_Drought_Soil_Dry_P Parameter: Plant Line Value: WS
  misc_feature: MA Experiment 20001554 PARAMETER Experiment Name: At_Drought_Soil_Dry_P Parameter: Post Timepoint (hr) Value: None
  misc_feature: MA Experiment 20001554 PARAMETER Experiment Name: At_Drought_Soil_Dry_P Parameter: Post-Treatment Value: None
  misc_feature: MA Experiment 20001554 PARAMETER Experiment Name: At_Drought_Soil_Dry_P Parameter: Timepoint (day) Value: 7
  misc_feature: MA Experiment 20001554 PARAMETER Experiment Name: At_Drought_Soil_Dry_P Parameter: Treatment Value: Drought vs. No Drought
  misc_feature: MA Experiment ID: 20001558 Result: Down-regulated in Transcription
  misc_feature: MA Experiment 20001558 PARAMETER Experiment Name: At_Drought_Soil_Dry_P Parameter: Age (day) Value: 27
  misc_feature: MA Experiment 20001558 PARAMETER Experiment Name: At_Drought_Soil_Dry_P Parameter: Organism Value: A. thaliana
  misc_feature: MA Experiment 20001558 PARAMETER Experiment Name: At_Drought_Soil_Dry_P Parameter: Plant Line Value: WS
  misc_feature: MA Experiment 20001558 PARAMETER Experiment Name: At_Drought_Soil_Dry_P Parameter: Post Timepoint (hr) Value: 6
  misc_feature: MA Experiment 20001558 PARAMETER Experiment Name: At_Drought_Soil_Dry_P Parameter: Post-Treatment Value: Re-Water vs. No Drought
  misc_feature: MA Experiment 20001558 PARAMETER Experiment Name: At_Drought_Soil_Dry_P Parameter: Timepoint (day) Value: 13
  misc_feature: MA Experiment 20001558 PARAMETER Experiment Name: At_Drought_Soil_Dry_P Parameter: Treatment Value: Drought vs. No Drought
  misc_feature: MA Experiment ID: 20001560 Result: Down-regulated in Transcription
  misc_feature: MA Experiment 20001560 PARAMETER Experiment Name: At_Drought_Soil_Dry_P Parameter: Age (day) Value: 28
  misc_feature: MA Experiment 20001560 PARAMETER Experiment Name: At_Drought_Soil_Dry_P Parameter: Organism Value: A. thaliana
  misc_feature: MA Experiment 20001560 PARAMETER Experiment Name: At_Drought_Soil_Dry_P Parameter: Plant Line Value: WS
  misc_feature: MA Experiment 20001560 PARAMETER Experiment Name: At_Drought_Soil_Dry_P Parameter: Post Timepoint (hr) Value: None
  misc_feature: MA Experiment 20001560 PARAMETER Experiment Name: At_Drought_Soil_Dry_P Parameter: Post-Treatment Value: None
  misc_feature: MA Experiment 20001560 PARAMETER Experiment Name: At_Drought_Soil_Dry_P Parameter: Timepoint (day) Value: 14
  misc_feature: MA Experiment 20001560 PARAMETER Experiment Name: At_Drought_Soil_Dry_P Parameter: Treatment Value: Drought vs. No Drought
  misc_feature: MA Experiment ID: 20001911 Result: Down-regulated in Transcription
  misc_feature: MA Experiment 20001911 PARAMETER Experiment Name: At_Drought_Reproduction_P Parameter: Age (day) Value: 40
  misc_feature: MA Experiment 20001911 PARAMETER Experiment Name: At_Drought_Reproduction_P Parameter: Organism Value: A. thaliana
  misc_feature: MA Experiment 20001911 PARAMETER Experiment Name: At_Drought_Reproduction_P Parameter: Plant Line Value: WS
  misc_feature: MA Experiment 20001911 PARAMETER Experiment Name: At_Drought_Reproduction_P Parameter: Timepoint (day) Value: 10
  misc_feature: MA Experiment 20001911 PARAMETER Experiment Name: At_Drought_Reproduction_P Parameter: Tissue Value: Flowers
  misc_feature: MA Experiment 20001911 PARAMETER Experiment Name: At_Drought_Reproduction_P Parameter: Treatment Value: Drought vs. No Drought
aaattcccagacgtggtgtagtgaacaaccaaaaaaacaacatgattgattgattctgaaattcactttaattttcaagagagagtttctgaggatcttgatatcagaatctgtcatgagagaagcaggagaagagaaagtggcgtggaagtactttaccagagatgttgtgccgtttgctgcgatgtttgcggtggagtgtgccactgttgggtcaaacacgctgtttaaggctgctactttaagaggattgagcttctatgtctttgtcttctactcttatattgtttcaacacttctccttcttccactttctgtaatctttggaaggtcaagaagattaccagcagctaagtctcctcttttcttcaagattttcttacttgggcttgttggattgctggttgtaaaggtattgcatacagttccccaactcttgcatctgctatcagcaatctcacaccggctttcacattcacactcgctgttatcttcaggatggagcaagtaaggttaaggagctctgcgactcaggctaaaatcattggtgcaatactatctatatctggtgctctggtagttgtgctgtataaaggcccacaagttctcgcctctgcatcttttacaactgtattacctaccgttacacttcaccagcagttgacctcaatagagtcaagctggataatcggagggctcttgcttgcttcacagtattttcttatatccgtctgactcgtgtcatggaggtttaccctgaagagataaccgtagtcttcttctacaatttatttgcaacactaatctcagtaccagtatgtctttttgcggagagcaacttgacttcttgggtgcttaaaccagacatttccctcgctgcaatcatatactcgggagtcttcgtttcattattcagcgcgcttacccacacatggggtctgcatctgaagggtccggtatacatatccttgttcaggccattgtctattgcgattgcagtcgccatgggtgctatattcctcggcgatgcacttcaccttgggagtgtcattggatcaatgatattgtgcattggattctacactgtgatttggggcaaagcaagagaggatacaatcaaaactgtagctggttctgagcagtcacctttgctgcttacacatatcatagaagatggagcctttccattaagctaggattgatgcaagtgaaatccttatactatttattaataaatatggatccctaaaagaggtgtaccatatatgtctatagttacatataagatatctgttctttttttcttgttttattttgatgttacatatgaatgagaattatgaatctataagaaatatttggtcctttt

SEQ ID NO: 86308 - protein, 150 aa, Arabidopsis thaliana; identical to SEQ ID NO: 36399
  peptide (1)..(150): Ceres Seq. ID no. 12688636
  misc_feature (1)..(150): Homolog of NCBI NO: 10177511 NR Description: nodulin-like protein [Arabidopsis thaliana]
  misc_feature (70)..(150): Homolog of NCBI NO: 15242614 NR Description: putative protein; protein id: At5g40240.1
  misc_feature (1)..(61): Homolog of NCBI NO: 15242614 NR Description: putative protein; protein id: At5g40240.1
  misc_feature (1)..(146): Homolog of NCBI NO: 15242612 NR Description: putative protein; protein id: At5g40230.1
  misc_feature (1)..(146): Homolog of NCBI NO: 10177510 NR Description: nodulin-like protein [Arabidopsis thaliana]
  misc_feature (1)..(144): Homolog of NCBI NO: 19347832 NR Description: unknown protein [Arabidopsis thaliana]
  misc_feature (1)..(122): Homolog of NCBI NO: 18405635 NR Description: expressed protein; protein id: At3g28050.1, by cDNA: 6530., supported by cDNA: gi_13937164 [Arabidopsis >gi|13937165|gb|AAK50076.1|AF372936_1 AT3g28050/MMG15_6
  misc_feature (1)..(122): Homolog of NCBI NO: 21594034 NR Description: nodulin MtN21-like protein [Arabidopsis thaliana]
  misc_feature (25)..(144): Homolog of NCBI NO: 18414474 NR Description: hypothetical protein; protein id: At4g15540.1
  misc_feature (1)..(138): Homolog of NCBI NO: 11994130 NR Description: contains similarity to integral membrane protein

SEQ ID NO: 86309 - protein, 131 aa, Arabidopsis thaliana; identical to SEQ ID NO: 36400
  peptide (1)..(131): Ceres Seq. ID no. 12688637
  misc_feature (30)..(94): Pfam Name: Integral membrane protein DUF6 Pfam Description: Integral membrane protein DUF6
  misc_feature (1)..(96): Homolog of NCBI NO: 10177511 NR Description: nodulin-like protein [Arabidopsis thaliana]
  misc_feature (1)..(96): Homolog of NCBI NO: 15242614 NR Description: putative protein; protein id: At5g40240.1
  misc_feature (2)..(96): Homolog of NCBI NO: 15242612 NR Description: putative protein; protein id: At5g40230.1
  misc_feature (24)..(96): Homolog of NCBI NO: 10177510 NR Description: nodulin-like protein [Arabidopsis thaliana]
  misc_feature (27)..(95): Homolog of NCBI NO: 19347832 NR Description: unknown protein [Arabidopsis thaliana]
  misc_feature (9)..(94): Homolog of NCBI NO: 18405635 NR Description: expressed protein; protein id: At3g28050.1, by cDNA: 6530., supported by cDNA: gi_13937164 [Arabidopsis >gi|13937165|gb|AAK50076.1|AF372936_1 AT3g28050/MMG15_6
  misc_feature (9)..(94): Homolog of NCBI NO: 21594034 NR Description: nodulin MtN21-like protein [Arabidopsis thaliana]
  misc_feature (6)..(118): Homolog of NCBI NO: 18414474 NR Description: hypothetical protein; protein id: At4g15540.1
  misc_feature (16)..(98): Homolog of NCBI NO: 11994130 NR Description: contains similarity to integral membrane protein
  misc_feature (6)..(118): Homolog of NCBI NO: 7485048 NR Description: hypothetical protein - Arabidopsis thaliana hypothetical protein [Arabidopsis thaliana]

SEQ ID NO: 86310 - protein, 108 aa, Arabidopsis thaliana; identical to SEQ ID NO: 36401
  peptide (1)..(108): Ceres Seq. ID no. 12688638
  misc_feature (7)..(71): Pfam Name: Integral membrane protein DUF6 Pfam Description: Integral membrane protein DUF6
  misc_feature (1)..(73): Homolog of NCBI NO: 10177511 NR Description: nodulin-like protein [Arabidopsis thaliana]
  misc_feature (1)..(73): Homolog of NCBI NO: 15242614 NR Description: putative protein; protein id: At5g40240.1
  misc_feature (1)..(73): Homolog of NCBI NO: 15242612 NR Description: putative protein; protein id: At5g40230.1
  misc_feature (1)..(73): Homolog of NCBI NO: 10177510 NR Description: nodulin-like protein [Arabidopsis thaliana]
  misc_feature (4)..(72): Homolog of NCBI NO: 19347832 NR Description: unknown protein [Arabidopsis thaliana]
  misc_feature (1)..(71): Homolog of NCBI NO: 18405635 NR Description: expressed protein; protein id: At3g28050.1, by cDNA: 6530., supported by cDNA: gi_13937164 [Arabidopsis >gi|13937165|gb|AAK50076.1|AF372936_1 AT3g28050/MMG15_6
  misc_feature (1)..(71): Homolog of NCBI NO: 21594034 NR Description: nodulin MtN21-like protein [Arabidopsis thaliana]
  misc_feature (1)..(95): Homolog of NCBI NO: 18414474 NR Description: hypothetical protein; protein id: At4g15540.1
  misc_feature (1)..(75): Homolog of NCBI NO: 11994130 NR Description: contains similarity to integral membrane protein
  misc_feature (1)..(95): Homolog of NCBI NO: 7485048 NR Description: hypothetical protein - Arabidopsis thaliana hypothetical protein [Arabidopsis thaliana]

SEQ ID NO: 86311 - DNA, 3039 bp, Arabidopsis thaliana
  misc_feature (1)..(3039): Ceres Seq. ID no. 12688669
  misc_feature: MA Experiment ID: 20000184 Result: Up-regulated in Transcription
  misc_feature: MA Experiment 20000184 PARAMETER Experiment Name: At_Shoots__P Parameter: Age (day) Value: 7
  misc_feature: MA Experiment 20000184 PARAMETER Experiment Name: At_Shoots__P Parameter: Tissue Value: Shoots vs. Whole Plant
  misc_feature: MA Experiment ID: 20000268 Result: Up-regulated in Transcription
  misc_feature: MA Experiment 20000268 PARAMETER Experiment Name: At_100mM_NaCl__P Parameter: Age (day) Value: 14
  misc_feature: MA Experiment 20000268 PARAMETER Experiment Name: At_100mM_NaCl__P Parameter: Organism Value: A. thaliana
  misc_feature: MA Experiment 20000268 PARAMETER Experiment Name: At_100mM_NaCl__P Parameter: Plant Line Value: WS
  misc_feature: MA Experiment 20000268 PARAMETER Experiment Name: At_100mM_NaCl__P Parameter: Timepoint (hr) Value: 6
  misc_feature: MA Experiment 20000268 PARAMETER Experiment Name: At_100mM_NaCl__P Parameter: Tissue Value: Whole Plant
  misc_feature: MA Experiment 20000268 PARAMETER Experiment Name: At_100mM_NaCl__P Parameter: Treatment Value: 100mM NaCl vs. No Treatment
  misc_feature: MA Experiment ID: 20000438 Result: Up-regulated in Transcription
  misc_feature: MA Experiment 20000438 PARAMETER Experiment Name: At_Shoots__P Parameter: Age (day) Value: 14
  misc_feature: MA Experiment 20000438 PARAMETER Experiment Name: At_Shoots__P Parameter: Tissue Value: Shoots vs. Whole Plant
  misc_feature: MA Experiment ID: 20000441 Result: Up-regulated in Transcription
  misc_feature: MA Experiment 20000441 PARAMETER Experiment Name: At_1uM_BR-BRZ__P Parameter: Tissue Value: Shoot Apices
  misc_feature: MA Experiment 20000441 PARAMETER Experiment Name: At_1uM_BR-BRZ__P Parameter: Treatment Value: 1uM BR vs. No Treatment
  misc_feature: MA Experiment ID: 20000455 Result: Up-regulated in Transcription
  misc_feature: MA Experiment 20000455 PARAMETER Experiment Name: At_100uM_ABA_P Parameter: Age (day) Value: 16
  misc_feature: MA Experiment 20000455 PARAMETER Experiment Name: At_100uM_ABA_P Parameter: Organism Value: A. thaliana
  misc_feature: MA Experiment 20000455 PARAMETER Experiment Name: At_100uM_ABA_P Parameter: Plant Line Value: WS
  misc_feature: MA Experiment 20000455 PARAMETER Experiment Name: At_100uM_ABA_P Parameter: Timepoint (hr) Value: 48
  misc_feature: MA Experiment 20000455 PARAMETER Experiment Name: At_100uM_ABA_P Parameter: Tissue Value: Aerial
  misc_feature: MA Experiment 20000455 PARAMETER Experiment Name: At_100uM_ABA_P Parameter: Treatment Value: 100uM ABA vs. No Treatment
  misc_feature: MA Experiment ID: 20000496 Result: Down-regulated in Transcription
  misc_feature: MA Experiment 20000496 PARAMETER Experiment Name: At_Guard_Cells_P Parameter: Harvest Date Value: 7/19/2002
  misc_feature: MA Experiment 20000496 PARAMETER Experiment Name: At_Guard_Cells_P Parameter: Organism Value: Canola
  misc_feature: MA Experiment 20000496 PARAMETER Experiment Name: At_Guard_Cells_P Parameter: Tissue Value: Guard Cells vs. Leaves
  misc_feature: MA Experiment ID: 20001247 Result: Up-regulated in Transcription
  misc_feature: MA Experiment 20001247 PARAMETER Experiment Name: At_Far-red-induction_P Parameter: Age (day) Value: 7
  misc_feature: MA Experiment 20001247 PARAMETER Experiment Name: At_Far-red-induction_P Parameter: Light Value: Far-red vs. White
  misc_feature: MA Experiment 20001247 PARAMETER Experiment Name: At_Far-red-induction_P Parameter: Organism Value: A. thaliana
  misc_feature: MA Experiment 20001247 PARAMETER Experiment Name: At_Far-red-induction_P Parameter: Plant Line Value: Columbia
  misc_feature: MA Experiment 20001247 PARAMETER Experiment Name: At_Far-red-induction_P Parameter: Timepoint (hr) Value: 1
  misc_feature: MA Experiment 20001247 PARAMETER Experiment Name: At_Far-red-induction_P Parameter: Tissue Value: Whole Plant
  misc_feature: MA Experiment ID: 20001248 Result: Down-regulated in Transcription
  misc_feature: MA Experiment 20001248 PARAMETER Experiment Name: At_Far-red-induction_P Parameter: Age (day) Value: 7
  misc_feature: MA Experiment 20001248 PARAMETER Experiment Name: At_Far-red-induction_P Parameter: Light Value: Far-red vs. White
  misc_feature: MA Experiment 20001248 PARAMETER Experiment Name: At_Far-red-induction_P Parameter: Organism Value: A. thaliana
  misc_feature: MA Experiment 20001248 PARAMETER Experiment Name: At_Far-red-induction_P Parameter: Plant Line Value: Columbia
  misc_feature: MA Experiment 20001248 PARAMETER Experiment Name: At_Far-red-induction_P Parameter: Timepoint (hr) Value: 4
  misc_feature: MA Experiment 20001248 PARAMETER Experiment Name: At_Far-red-induction_P Parameter: Tissue Value: Whole Plant
  misc_feature: MA Experiment ID: 20001555 Result: Down-regulated in Transcription
  misc_feature: MA Experiment 20001555 PARAMETER Experiment Name: At_Drought_Soil_Dry_P Parameter: Age (day) Value: 24
  misc_feature: MA Experiment 20001555 PARAMETER Experiment Name: At_Drought_Soil_Dry_P Parameter: Organism Value: A. thaliana
  misc_feature: MA Experiment 20001555 PARAMETER Experiment Name: At_Drought_Soil_Dry_P Parameter: Plant Line Value: WS
  misc_feature: MA Experiment 20001555 PARAMETER Experiment Name: At_Drought_Soil_Dry_P Parameter: Post Timepoint (hr) Value: None
  misc_feature: MA Experiment 20001555 PARAMETER Experiment Name: At_Drought_Soil_Dry_P Parameter: Post-Treatment Value: None
  misc_feature: MA Experiment 20001555 PARAMETER Experiment Name: At_Drought_Soil_Dry_P Parameter: Timepoint (day) Value: 10
  misc_feature: MA Experiment 20001555 PARAMETER Experiment Name: At_Drought_Soil_Dry_P Parameter: Treatment Value: Drought vs. No Drought
  misc_feature: MA Experiment ID: 20001556 Result: Down-regulated in Transcription
  misc_feature: MA Experiment 20001556 PARAMETER Experiment Name: At_Drought_Soil_Dry_P Parameter: Age (day) Value: 26
  misc_feature: MA Experiment 20001556 PARAMETER Experiment Name: At_Drought_Soil_Dry_P Parameter: Organism Value: A. thaliana
  misc_feature: MA Experiment 20001556 PARAMETER Experiment Name: At_Drought_Soil_Dry_P Parameter: Plant Line Value: WS
  misc_feature: MA Experiment 20001556 PARAMETER Experiment Name: At_Drought_Soil_Dry_P Parameter: Post Timepoint (hr) Value: None
  misc_feature: MA Experiment 20001556 PARAMETER Experiment Name: At_Drought_Soil_Dry_P Parameter: Post-Treatment Value: None
  misc_feature: MA Experiment 20001556 PARAMETER Experiment Name: At_Drought_Soil_Dry_P Parameter: Timepoint (day) Value: 12
  misc_feature: MA Experiment 20001556 PARAMETER Experiment Name: At_Drought_Soil_Dry_P Parameter: Treatment Value: Drought vs. No Drought
  misc_feature: MA Experiment ID: 20001557 Result: Down-regulated in Transcription
  misc_feature: MA Experiment 20001557 PARAMETER Experiment Name: At_Drought_Soil_Dry_P Parameter: Age (day) Value: 27
  misc_feature: MA Experiment 20001557 PARAMETER Experiment Name: At_Drought_Soil_Dry_P Parameter: Organism Value: A. thaliana
  misc_feature: MA Experiment 20001557 PARAMETER Experiment Name: At_Drought_Soil_Dry_P Parameter: Plant Line Value: WS
  misc_feature: MA Experiment 20001557 PARAMETER Experiment Name: At_Drought_Soil_Dry_P Parameter: Post Timepoint (hr) Value: 3
  misc_feature: MA Experiment 20001557 PARAMETER Experiment Name: At_Drought_Soil_Dry_P Parameter: Post-Treatment Value: Re-Water vs. No Drought
  misc_feature: MA Experiment 20001557 PARAMETER Experiment Name: At_Drought_Soil_Dry_P Parameter: Timepoint (day) Value: 13
  misc_feature: MA Experiment 20001557 PARAMETER Experiment Name: At_Drought_Soil_Dry_P Parameter: Treatment Value: Drought vs. No Drought
  misc_feature: MA Experiment ID: 20001558 Result: Down-regulated in Transcription
  misc_feature: MA Experiment 20001558 PARAMETER Experiment Name: At_Drought_Soil_Dry_P Parameter: Age (day) Value: 27
  misc_feature: MA Experiment 20001558 PARAMETER Experiment Name: At_Drought_Soil_Dry_P Parameter: Organism Value: A. thaliana
  misc_feature: MA Experiment 20001558 PARAMETER Experiment Name: At_Drought_Soil_Dry_P Parameter: Plant Line Value: WS
  misc_feature: MA Experiment 20001558 PARAMETER Experiment Name: At_Drought_Soil_Dry_P Parameter: Post Timepoint (hr) Value: 6
  misc_feature: MA Experiment 20001558 PARAMETER Experiment Name: At_Drought_Soil_Dry_P Parameter: Post-Treatment Value: Re-Water vs. No Drought
  misc_feature: MA Experiment 20001558 PARAMETER Experiment Name: At_Drought_Soil_Dry_P Parameter: Timepoint (day) Value: 13
  misc_feature: MA Experiment 20001558 PARAMETER Experiment Name: At_Drought_Soil_Dry_P Parameter: Treatment Value: Drought vs. No Drought
  misc_feature: MA Experiment ID: 20001559 Result: Down-regulated in Transcription
  misc_feature: MA Experiment 20001559 PARAMETER Experiment Name: At_Drought_Soil_Dry_P Parameter: Age (day) Value: 28
  misc_feature: MA Experiment 20001559 PARAMETER Experiment Name: At_Drought_Soil_Dry_P Parameter: Organism Value: A. thaliana
  misc_feature: MA Experiment 20001559 PARAMETER Experiment Name: At_Drought_Soil_Dry_P Parameter: Plant Line Value: WS
  misc_feature: MA Experiment 20001559 PARAMETER Experiment Name: At_Drought_Soil_Dry_P Parameter: Post Timepoint (hr) Value: 29
  misc_feature: MA Experiment 20001559 PARAMETER Experiment Name: At_Drought_Soil_Dry_P Parameter: Post-Treatment Value: Re-Water vs. No Drought
  misc_feature: MA Experiment 20001559 PARAMETER Experiment Name: At_Drought_Soil_Dry_P Parameter: Timepoint (day) Value: 14
  misc_feature: MA Experiment 20001559 PARAMETER Experiment Name: At_Drought_Soil_Dry_P Parameter: Treatment Value: Drought vs. No Drought
  misc_feature: MA Experiment ID: 20001560 Result: Down-regulated in Transcription
  misc_feature: MA Experiment 20001560 PARAMETER Experiment Name: At_Drought_Soil_Dry_P Parameter: Age (day) Value: 28
  misc_feature: MA Experiment 20001560 PARAMETER Experiment Name: At_Drought_Soil_Dry_P Parameter: Organism Value: A. thaliana
  misc_feature: MA Experiment 20001560 PARAMETER Experiment Name: At_Drought_Soil_Dry_P Parameter: Plant Line Value: WS
  misc_feature: MA Experiment 20001560 PARAMETER Experiment Name: At_Drought_Soil_Dry_P Parameter: Post Timepoint (hr) Value: None
  misc_feature: MA Experiment 20001560 PARAMETER Experiment Name: At_Drought_Soil_Dry_P Parameter: Post-Treatment Value: None
  misc_feature: MA Experiment 20001560 PARAMETER Experiment Name: At_Drought_Soil_Dry_P Parameter: Timepoint (day) Value: 14
  misc_feature: MA Experiment 20001560 PARAMETER Experiment Name: At_Drought_Soil_Dry_P Parameter: Treatment Value: Drought vs. No Drought
atggaagcagcttcaagttttttgtgtagaagtattcggattccgtcgactactacggcgacggcggcgttcacgttcactcgaccgccgttaaactacgtttgtgttgtcggagttcgtgttttcccgacgcggaaggtcttttgcagcggcgttaatggcggctccagtgttactaagaagaagccacgaaggaaaagtaacgtttccgataaacttaggtttaagaaaattgagaagaggaacgataatactgaatctgagagtttaagtgttgttgaggaaccgaagaacgataaagaattgagtcttcgagctttgaatcaaaatggtgatccattagggcggagagatttagggaggaacgtagtgaagtggattagtcaggcgatgaaagcgatggcttcggattttgcaactgcggaggttcagggggagttttcggagttgaggcagaacgtcggatctggtttgacgtttgtgattcaagctcaaccgtatctcaatgctattcccatgccattaggttctgaagtcatttgtttgaaggcttgtactcattatcctaccttgttcgatcatttccagagagagttgcgtgatgttcttcaagacctggagcggaagaatataatggagagttggaaggagtctgagtcttggaagctgctcaaggagattgcaaattcagctcagcatcgggaggttgctcgcaaagctgctcaagctaagcctgttcaaggagttttggggatggactcagagaaggtgaaggctatacaggaaaggattgatgagttcaccagccagatgtcgcagttacttcaagtggaacgagatacagaactggaagttacacaggaagaactagatgttgttcctactccagatgagagctctgattcctcaaaaccgattgagttcttggttaggcatggtgatgctccacaggaactttgtgatacaatttgcaatttgtatgcagttagtacctccacagggctcggaggtatgcacttggtgttgtttaaggttgggggaaaccaccgtcttcctcctactacactttcccctggtgacatggtttgcataagagtttgtgacagtaggggtgctggggcaactgcctgtacgcagggctttgttcacaaccttggagaagatgggtgtagcattggtgtggctctagaatctcgtcatggagatcctactttttccaagctctttggaaagagtgtgagaattgatcgtattcatgggttggccgatgcccttacttacgagcgtaactgcgaagccctaatgcttctgcagaagaatggtctgcagaagaaaaatccatcaatatctgttgtggcgactttatttggggatggtgaagatataacatggctggagcaaaatgattatgtagactggagtgaagcggagttgagtgatgagccagtgagtaagttatttgattcttcccaaaggagagccatagctcttggagtaaacaaaaaaagacctgttatgatagtccaaggacctcctggcacgggaaagactggaatgcttaaggaggtcattaccctggctgttcaacagggggaaagagtacttgtaacagcgcctactaatgcagctgttgataacatggtcgagaagctcttgcatcttggactaaacattgtccgagtaggaaatcccgctagaatatcatctgctgttgcttcaaagtctttgggggaaattgtgaactctaagcttgcaagcttccgagcagaattggaaaggaagaagtcagatttaagaaaagatcttcggcaatgcctgagggatgatgttcttgcagctggcattcggcagctcttgaaacagcttggaaagacgttgaagaagaaggaaaaagagactgtgaaggaaatactatcaaatgcacaggttgtttttgccactaacattggagcagctgatcctttgattaggaggttagaaacatttgatttggttgttatagatgaagctggtcagtctatcgagccttcatgctggatcccaatattgcaagggaaacgttgtattctttccggtgatccatgccaattagcaccagttgttctatcacgtaaagctttagaaggtggacttggtgtatccttactggaaagagctgcatctttacatgatggagttcttgcgacaaaattaacaactcagtatcgtatgaacgatgtaatcgctggttgggcatcaaaggagatgtatggtggatggttgaaatctgctccaagtgtggcctctcatctgcttatcgattctccttttgtgaagaaattttccattttagcattatctggtttctcttgcaactctgttggtttgtctttcatgatactatctttacttgtggttgaaatatctactgattacagcttttttatggccttattgaaaagtgatgttgctcatgagcttgcaatagatgctacttggataacgcaatgcccactggttctgcttgacacaagaatgccatatgggagtttatccgtgggctgcgaggagcgtttggatccagctggcacaggctcattatacaatgaaggagaagcagatattgtggttaatcacgtcatttctttgatatacgcaggtgttagtccaatggctattgctgttcaatccccatatgttgctcaggttcaacttctcagagaaaggctggatgattttccagtggctgatggagttgaggtcgcaaccattgacagctttcaagggcgggaggctgatgcagtgatcatctcaatggtacggtcaaacaacctaggtgcagtgggattcctaggggatagcagacggatgaatgtagccattacaagagcccggaagcacgtggcagtggtatgtgacagctccacaatctgccacaacacgttcctagcaagactgttgcgccacatacgctatttcgggagagttaagcatgcagaccctggtagcttgggagggtcaggactaggcttggacccaatgttgccctaccttggttaa

SEQ ID NO: 86312 - protein, 1012 aa, Arabidopsis thaliana
  peptide (1)..(1012): Ceres Seq. ID no. 12688670
  misc_feature (488)..(540): Pfam Name: DEAD/DEAH box helicase Pfam Description: DEAD/DEAH box helicase
  misc_feature (417)..(775): Homolog of NCBI NO: 7446669 NR Description: probable helicase At2g03270 [imported] -
  misc_feature (417)..(775): Homolog of NCBI NO: 11191231 NR Description: putative helicase [Arabidopsis thaliana]
  misc_feature (417)..(775): Homolog of NCBI NO: 18395518 NR Description: putative helicase; protein id: At2g03270.1, by cDNA: gi_20259168 [Arabidopsis thaliana] putative helicase [Arabidopsis thaliana]
  misc_feature (828)..(987): Homolog of NCBI NO: 7446669 NR Description: probable helicase At2g03270 [imported] -
  misc_feature (828)..(987): Homolog of NCBI NO: 18395518 NR Description: putative helicase; protein id: At2g03270.1, by cDNA: gi_20259168 [Arabidopsis thaliana] putative helicase [Arabidopsis thaliana]
  misc_feature (828)..(987): Homolog of NCBI NO: 11191231 NR Description: putative helicase [Arabidopsis thaliana]
  misc_feature (417)..(771): Homolog of NCBI NO: 2498040 NR Description: DNA-BINDING PROTEIN SMUBP-2 (IMMUNOGLOBULIN MU
  misc_feature (828)..(992): Homolog of NCBI NO: 2498040 NR Description: DNA-BINDING PROTEIN SMUBP-2 (IMMUNOGLOBULIN MU
  misc_feature (417)..(771): Homolog of NCBI NO: 1082534 NR Description: Ig mu chain switch region binding protein 2 -
  misc_feature (417)..(771): Homolog of NCBI NO: 4504623 NR Description: immunoglobulin mu binding protein 2 [Homo sapiens]
MEAASSFLCRSIRIPSTTTATAAFTFTRPPLNYVCVVGVRVFPTRKVFCSGVNGGSSVTKKKPRRKSNVSDKLRFKKIEKRNDNTESESLSVVEEPKNDKELSLRALNQNGDPLGRRDLGRNVVKWISQAMKAMASDFATAEVQGEFSELRQNVGSGLTFVIQAQPYLNAIPMPLGSEVICLKACTHYPTLFDHFQRELRDVLQDLERKNIMESWKESESWKLLKEIANSAQHREVARKAAQAKPVQGVLGMDSEKVKAIQERIDEFTSQMSQLLQVERDTELEVTQEELDVVPTPDESSDSSKPIEFLVRHGDAPQELCDTICNLYAVSTSTGLGGMHLVLFKVGGNHRLPPTTLSPGDMVCIRVCDSRGAGATACTQGFVHNLGEDGCSIGVALESRHGDPTFSKLFGKSVRIDRIHGLADALTYERNCEALMLLQKNGLQKKNPSISVVATLFGDGEDITWLEQNDYVDWSEAELSDEPVSKLFDSSQRRAIALGVNKKRPVMIVQGPPGTGKTGMLKEVITLAVQQGERVLVTAPTNAAVDNMVEKLLHLGLNIVRVGNPARISSAVASKSLGEIVNSKLASFRAELERKKSDLRKDLRQCLRDDVLAAGIRQLLKQLGKTLKKKEKETVKEILSNAQVVFATNIGAADPLIRRLETFDLVVIDEAGQSIEPSCWIPILQGKRCILSGDPCQLAPVVLSRKALEGGLGVSLLERAASLHDGVLATKLTTQYRMNDVIAGWASKEMYGGWLKSAPSVASHLLIDSPFVKKFSILALSGFSCNSVGLSFMILSLLVVEISTDYSFFMALLKSDVAHELAIDATWITQCPLVLLDTRMPYGSLSVGCEERLDPAGTGSLYNEGEADIVVNHVISLIYAGVSPMAIAVQSPYVAQVQLLRERLDDFPVADGVEVATIDSFQGREADAVIISMVRSNNLGAVGFLGDSRRMNVAITRARKHVAVVCDSSTICHNTFLARLLRHIRYFGRVKHADPGSLGGSGLGLDPMLPYLG

SEQ ID NO: 86313 - protein, 882 aa, Arabidopsis thaliana
  peptide (1)..(882): Ceres Seq. ID no. 12688671
  misc_feature (358)..(410): Pfam Name: DEAD/DEAH box helicase Pfam Description: DEAD/DEAH box helicase
  misc_feature (287)..(645): Homolog of NCBI NO: 7446669 NR Description: probable helicase At2g03270 [imported] -
  misc_feature (287)..(645): Homolog of NCBI NO: 11191231 NR Description: putative helicase [Arabidopsis thaliana]
  misc_feature (287)..(645): Homolog of NCBI NO: 18395518 NR Description: putative helicase; protein id: At2g03270.1, by cDNA: gi_20259168 [Arabidopsis thaliana] putative helicase [Arabidopsis thaliana]
  misc_feature (698)..(857): Homolog of NCBI NO: 7446669 NR Description: probable helicase At2g03270 [imported] -
  misc_feature (698)..(857): Homolog of NCBI NO: 11191231 NR Description: putative helicase [Arabidopsis thaliana]
  misc_feature (698)..(857): Homolog of NCBI NO: 18395518 NR Description: putative helicase; protein id: At2g03270.1, by cDNA: gi_20259168 [Arabidopsis thaliana] putative helicase [Arabidopsis thaliana]
  misc_feature (287)..(641): Homolog of NCBI NO: 2498040 NR Description: DNA-BINDING PROTEIN SMUBP-2 (IMMUNOGLOBULIN MU
  misc_feature (698)..(862): Homolog of NCBI NO: 2498040 NR Description: DNA-BINDING PROTEIN SMUBP-2 (IMMUNOGLOBULIN MU
  misc_feature (287)..(641): Homolog of NCBI NO: 1082534 NR Description: Ig mu chain switch region binding protein 2 -
  misc_feature (287)..(641): Homolog of NCBI NO: 4504623 NR Description: immunoglobulin mu binding protein 2 [Homo sapiens]
MKAMASDFATAEVQGEFSELRQNVGSGLTFVIQAQPYLNAIPMPLGSEVICLKACTHYPTLFDHFQRELRDVLQDLERKNIMESWKESESWKLLKEIANSAQHREVARKAAQAKPVQGVLGMDSEKVKAIQERIDEFTSQMSQLLQVERDTELEVTQEELDVVPTPDESSDSSKPIEFLVRHGDAPQELCDTICNLYAVSTSTGLGGMHLVLFKVGGNHRLPPTTLSPGDMVCIRVCDSRGAGATACTQGFVHNLGEDGCSIGVALESRHGDPTFSKLFGKSVRIDRIHGLADALTYERNCEALMLLQKNGLQKKNPSISVVATLFGDGEDITWLEQNDYVDWSEAELSDEPVSKLFDSSQRRAIALGVNKKRPVMIVQGPPGTGKTGMLKEVITLAVQQGERVLVTAPTNAAVDNMVEKLLHLGLNIVRVGNPARISSAVASKSLGEIVNSKLASFRAELERKKSDLRKDLRQCLRDDVLAAGIRQLLKQLGKTLKKKEKETVKEILSNAQVVFATNIGAADPLIRRLETFDLVVIDEAGQSIEPSCWIPILQGKRCILSGDPCQLAPVVLSRKALEGGLGVSLLERAASLHDGVLATKLTTQYRMNDVIAGWASKEMYGGWLKSAPSVASHLLIDSPFVKKFSILALSGFSCNSVGLSFMILSLLVVEISTDYSFFMALLKSDVAHELAIDATWITQCPLVLLDTRMPYGSLSVGCEERLDPAGTGSLYNEGEADIVVNHVISLIYAGVSPMAIAVQSPYVAQVQLLRERLDDFPVADGVEVATIDSFQGREADAVIISMVRSNNLGAVGFLGDSRRMNVAITRARKHVAVVCDSSTICHNTFLARLLRHIRYFGRVKHADPGSLGGSGLGLDPMLPYLG

SEQ ID NO: 86314 - protein, 879 aa, Arabidopsis thaliana
  peptide (1)..(879): Ceres Seq. ID no. 12688672
  misc_feature (355)..(407): Pfam Name: DEAD/DEAH box helicase Pfam Description: DEAD/DEAH box helicase
  misc_feature (284)..(642): Homolog of NCBI NO: 7446669 NR Description: probable helicase At2g03270 [imported] -
  misc_feature (284)..(642): Homolog of NCBI NO: 18395518 NR Description: putative helicase; protein id: At2g03270.1, by cDNA: gi_20259168 [Arabidopsis thaliana] putative helicase [Arabidopsis thaliana]
  misc_feature (284)..(642): Homolog of NCBI NO: 11191231 NR Description: putative helicase [Arabidopsis thaliana]
  misc_feature (695)..(854): Homolog of NCBI NO: 7446669 NR Description: probable helicase At2g03270 [imported] -
  misc_feature (695)..(854): Homolog of NCBI NO: 18395518 NR Description: putative helicase; protein id: At2g03270.1, by cDNA: gi_20259168 [Arabidopsis thaliana] putative helicase [Arabidopsis thaliana]
  misc_feature (695)..(854): Homolog of NCBI NO: 11191231 NR Description: putative helicase [Arabidopsis thaliana]
  misc_feature (284)..(638): Homolog of NCBI NO: 2498040 NR Description: DNA-BINDING PROTEIN SMUBP-2 (IMMUNOGLOBULIN MU
  misc_feature (695)..(859): Homolog of NCBI NO: 2498040 NR Description: DNA-BINDING PROTEIN SMUBP-2 (IMMUNOGLOBULIN MU
  misc_feature (284)..(638): Homolog of NCBI NO: 1082534 NR Description: Ig mu chain switch region binding protein 2 -
  misc_feature (284)..(638): Homolog of NCBI NO: 4504623 NR Description: immunoglobulin mu binding protein 2 [Homo sapiens]
MASDFATAEVQGEFSELRQNVGSGLTFVIQAQPYLNAIPMPLGSEVICLKACTHYPTLFDHFQRELRDVLQDLERKNIMESWKESESWKLLKEIANSAQHREVARKAAQAKPVQGVLGMDSEKVKAIQERIDEFTSQMSQLLQVERDTELEVTQEELDVVPTPDESSDSSKPIEFLVRHGDAPQELCDTICNLYAVSTSTGLGGMHLVLFKVGGNHRLPPTTLSPGDMVCIRVCDSRGAGATACTQGFVHNLGEDGCSIGVALESRHGDPTFSKLFGKSVRIDRIHGLADALTYERNCEALMLLQKNGLQKKNPSISVVATLFGDGEDITWLEQNDYVDWSEAELSDEPVSKLFDSSQRRAIALGVNKKRPVMIVQGPPGTGKTGMLKEVITLAVQQGERVLVTAPTNAAVDNMVEKLLHLGLNIVRVGNPARISSAVASKSLGEIVNSKLASFRAELERKKSDLRKDLRQCLRDDVLAAGIRQLLKQLGKTLKKKEKETVKEILSNAQVVFATNIGAADPLIRRLETFDLVVIDEAGQSIEPSCWIPILQGKRCILSGDPCQLAPVVLSRKALEGGLGVSLLERAASLHDGVLATKLTTQYRMNDVIAGWASKEMYGGWLKSAPSVASHLLIDSPFVKKFSILALSGFSCNSVGLSFMILSLLVVEISTDYSFFMALLKSDVAHELAIDATWITQCPLVLLDTRMPYGSLSVGCEERLDPAGTGSLYNEGEADIVVNHVISLIYAGVSPMAIAVQSPYVAQVQLLRERLDDFPVADGVEVATIDSFQGREADAVIISMVRSNNLGAVGFLGDSRRMNVAITRARKHVAVVCDSSTICHNTFLARLLRHIRYFGRVKHADPGSLGGSGLGLDPMLPYLG

SEQ ID NO: 86315 - DNA, 1218 bp, Arabidopsis thaliana
  misc_feature (1)..(1218): Ceres Seq. ID no. 12688705
  misc_feature: MA Experiment ID: 20000179 Result: Up-regulated in Transcription
  misc_feature: MA Experiment 20000179 PARAMETER Experiment Name: At_Germinating_Seeds_P Parameter: Age (hr) Value: 6 vs. 0
  misc_feature: MA Experiment 20000179 PARAMETER Experiment Name: At_Germinating_Seeds_P Parameter: Tissue Value: Germinating Seeds
  misc_feature: MA Experiment ID: 20000227 Result: Down-regulated in Transcription
  misc_feature: MA Experiment 20000227 PARAMETER Experiment Name: At_Root-Tips-vs-Tops_P Parameter: Tissue Value: Root Tips vs. Root Tops
  misc_feature: MA Experiment ID: 20000439 Result: Up-regulated in Transcription
  misc_feature: MA Experiment 20000439 PARAMETER Experiment Name: At_Roots__P Parameter: Age (day) Value: 14 vs. 21
  misc_feature: MA Experiment 20000439 PARAMETER Experiment Name: At_Roots__P Parameter: Organism Value: A. thaliana
  misc_feature: MA Experiment 20000439 PARAMETER Experiment Name: At_Roots__P Parameter: Tissue Value: Roots vs. Whole Plant
atggcaatcatgattatcctcttccttagctccattcttctttctctcctattgctccttagaaaacatttgtcacacttctcctatcccaaccttcctcccggaaataccggccttcccttaatcggagagagtttctccttcctctctgctggccgtcaaggccatccagagaagttcatcactgaccgagttcgtcgtttctcctcctcctcctcatgtgtcttcaagacccacctctttgggtctcccaccgcggtggtgactggtgcatctgggaacaagtttctattcactaacgagaacaagcttgtggtctcgtggttcacgttttcaatagcatgccgttcgttcctgagcatggaagatcccgcaagagtaaggcaactagaagagcaattcaatacggtagcggtagggatcttctcaatcccaatagacttgccaggaacacggtttaaccgagccatcaaggcgtcgaggttactcagaaaagaggtttccgctatcgtaaggcagaggaaagaagagctcaaagccgggaaagcattagaggagcacgacatattatctcacatgttgatgaatataggagagaccaaagacgaggatttggctgataaaattattggattgttaatcggaggacatgacacagctagtatcgtatgcactttcgttgtcaattatcttgctgaattccctcatgtctaccaacgtgtgctacaagagcaaaaggagatactaaaggagaaaaaagaaaaggaaggattaaggtgggaggacattgagaaaatgagatattcatggaatgttgcatgtgaagtgatgagaattgttcctcctctttctggcacttttcgtgaggccattgatcacttctcttttaagggtttttacattcccaaaggatggaagttatattggagtgccaccgcgacacatatgaatccagactacttcccagaaccagagagatttgagccaaaccgtttcgaaggaagtggtccgaagccttatacctatgttccatttggaggaggaccaagaatgtgtccagggaaagagtatgctcgtctagagattcttatattcatgcacaatcttgttaatagatttaagtgggaaaaagtgtttccaaatgaaaataaaatagttgttgatcccttaccaataccagacaaaggtctccctataagaatttttcctcaatcttga

SEQ ID NO: 86316 - protein, 405 aa, Arabidopsis thaliana
  peptide (1)..(405): Ceres Seq. ID no. 12688706
  misc_feature (98)..(405): Homolog of NCBI NO: 15239304 NR Description: cytochrome p450 family; protein id: At5g36110.1
  misc_feature (1)..(134): Homolog of NCBI NO: 15239304 NR Description: cytochrome p450 family; protein id: At5g36110.1
  misc_feature (98)..(243): Homolog of NCBI NO: 15239310 NR Description: putative protein; protein id: At5g36140.1 thaliana] >gi|8777299|dbj|BAA96889.1| contains similarity to
  misc_feature (4)..(113): Homolog of NCBI NO: 15239310 NR Description: putative protein; protein id: At5g36140.1 thaliana] >gi|8777299|dbj|BAA96889.1| contains similarity to
  misc_feature (105)..(401): Homolog of NCBI NO: 24745923 NR Description: cytochrome P450 [Solanum tuberosum]
  misc_feature (4)..(130): Homolog of NCBI NO: 24745923 NR Description: cytochrome P450 [Solanum tuberosum]
  misc_feature (110)..(405): Homolog of NCBI NO: 34901946 NR Description: 5-alpha-taxadienol-10-beta-hydroxylase-like
  misc_feature (4)..(128): Homolog of NCBI NO: 34901946 NR Description: 5-alpha-taxadienol-10-beta-hydroxylase-like
  misc_feature (127)..(401): Homolog of NCBI NO: 33146520 NR Description: putative 5-alpha-taxadienol-10-beta-hydroxylase
  misc_feature (1)..(101): Homolog of NCBI NO: 33146520 NR Description: putative 5-alpha-taxadienol-10-beta-hydroxylase
MAIMIILFLSSILLSLLLLLRKHLSHFSYPNLPPGNTGLPLIGESFSFLSAGRQGHPEKFITDRVRRFSSSSSCVFKTHLFGSPTAVVTGASGNKFLFTNENKLVVSWFTFSIACRSFLSMEDPARVRQLEEQFNTVAVGIFSIPIDLPGTRFNRAIKASRLLRKEVSAIVRQRKEELKAGKALEEHDILSHMLMNIGETKDEDLADKIIGLLIGGHDTASIVCTFVVNYLAEFPHVYQRVLQEQKEILKEKKEKEGLRWEDIEKMRYSWNVACEVMRIVPPLSGTFREAIDHFSFKGFYIPKGWKLYWSATATHMNPDYFPEPERFEPNRFEGSGPKPYTYVPFGGGPRMCPGKEYARLEILIFMHNLVNRFKWEKVFPNENKIVVDPLPIPDKGLPIRIFPQS

SEQ ID NO: 86317 - protein, 402 aa, Arabidopsis thaliana
  peptide (1)..(402): Ceres Seq. ID no. 12688707
  misc_feature (95)..(402): Homolog of NCBI NO: 15239304 NR Description: cytochrome p450 family; protein id: At5g36110.1
  misc_feature (1)..(131): Homolog of NCBI NO: 15239304 NR Description: cytochrome p450 family; protein id: At5g36110.1
  misc_feature (95)..(240): Homolog of NCBI NO: 15239310 NR Description: putative protein; protein id: At5g36140.1 thaliana] >gi|8777299|dbj|BAA96889.1| contains similarity to
  misc_feature (1)..(110): Homolog of NCBI NO: 15239310 NR Description: putative protein; protein id: At5g36140.1 thaliana] >gi|8777299|dbj|BAA96889.1| contains similarity to
  misc_feature (102)..(398): Homolog of NCBI NO: 24745923 NR Description: cytochrome P450 [Solanum tuberosum]
  misc_feature (1)..(127): Homolog of NCBI NO: 24745923 NR Description: cytochrome P450 [Solanum tuberosum]
  misc_feature (107)..(402): Homolog of NCBI NO: 34901946 NR Description: 5-alpha-taxadienol-10-beta-hydroxylase-like
  misc_feature (1)..(125): Homolog of NCBI NO: 34901946 NR Description: 5-alpha-taxadienol-10-beta-hydroxylase-like
  misc_feature (124)..(398): Homolog of NCBI NO: 33146520 NR Description: putative 5-alpha-taxadienol-10-beta-hydroxylase
  misc_feature (1)..(98): Homolog of NCBI NO: 33146520 NR Description: putative 5-alpha-taxadienol-10-beta-hydroxylase
MIILFLSSILLSLLLLLRKHLSHFSYPNLPPGNTGLPLIGESFSFLSAGRQGHPEKFITDRVRRFSSSSSCVFKTHLFGSPTAVVTGASGNKFLFTNENKLVVSWFTFSIACRSFLSMEDPARVRQLEEQFNTVAVGIFSIPIDLPGTRFNRAIKASRLLRKEVSAIVRQRKEELKAGKALEEHDILSHMLMNIGETKDEDLADKIIGLLIGGHDTASIVCTFVVNYLAEFPHVYQRVLQEQKEILKEKKEKEGLRWEDIEKMRYSWNVACEVMRIVPPLSGTFREAIDHFSFKGFYIPKGWKLYWSATATHMNPDYFPEPERFEPNRFEGSGPKPYTYVPFGGGPRMCPGKEYARLEILIFMHNLVNRFKWEKVFPNENKIVVDPLPIPDKGLPIRIFPQS

SEQ ID NO: 86318 - protein, 285 aa, Arabidopsis thaliana
  peptide (1)..(285): Ceres Seq. ID no. 12688708
  misc_feature (1)..(285): Homolog of NCBI NO: 15239304 NR Description: cytochrome p450 family; protein id: At5g36110.1
  misc_feature (1)..(14): Homolog of NCBI NO: 15239304 NR Description: cytochrome p450 family; protein id: At5g36110.1
  misc_feature (1)..(123): Homolog of NCBI NO: 15239310 NR Description: putative protein; protein id: At5g36140.1 thaliana] >gi|8777299|dbj|BAA96889.1| contains similarity to
  misc_feature (1)..(281): Homolog of NCBI NO: 24745923 NR Description: cytochrome P450 [Solanum tuberosum]
  misc_feature (1)..(285): Homolog of NCBI NO: 34901946 NR Description: 5-alpha-taxadienol-10-beta-hydroxylase-like
  misc_feature (7)..(281): Homolog of NCBI NO: 33146520 NR Description: putative 5-alpha-taxadienol-10-beta-hydroxylase
  misc_feature (1)..(284): Homolog of NCBI NO: 34901930 NR Description: putative Cytochrome P450 85 (Dwarf protein)
  misc_feature (1)..(14): Homolog of NCBI NO: 34901930 NR Description: putative Cytochrome P450 85 (Dwarf protein)
  misc_feature (1)..(285): Homolog of NCBI NO: 34901936 NR Description: OSJNBa0036M16.37 [Oryza sativa (japonica
  misc_feature (1)..(284): Homolog of NCBI NO: 34395222 NR Description: putative taxane 14b-hydroxylase [Oryza sativa
MEDPARVRQLEEQFNTVAVGIFSIPIDLPGTRFNRAIKASRLLRKEVSAIVRQRKEELKAGKALEEHDILSHMLMNIGETKDEDLADKIIGLLIGGHDTASIVCTFVVNYLAEFPHVYQRVLQEQKEILKEKKEKEGLRWEDIEKMRYSWNVACEVMRIVPPLSGTFREAIDHFSFKGFYIPKGWKLYWSATATHMNPDYFPEPERFEPNRFEGSGPKPYTYVPFGGGPRMCPGKEYARLEILIFMHNLVNRFKWEKVFPNENKIVVDPLPIPDKGLPIRIFPQS

SEQ ID NO: 86319 - DNA, 2043 bp, Arabidopsis thaliana
  misc_feature (1)..(2043): Ceres Seq. ID no. 12688727
  misc_feature: MA Experiment ID: 20001905 Result: Down-regulated in Transcription
  misc_feature: MA Experiment 20001905 PARAMETER Experiment Name: At_Drought_Reproduction_P Parameter: Age (day) Value: 40
  misc_feature: MA Experiment 20001905 PARAMETER Experiment Name: At_Drought_Reproduction_P Parameter: Organism Value: A. thaliana
  misc_feature: MA Experiment 20001905 PARAMETER Experiment Name: At_Drought_Reproduction_P Parameter: Plant Line Value: WS
  misc_feature: MA Experiment 20001905 PARAMETER Experiment Name: At_Drought_Reproduction_P Parameter: Timepoint (day) Value: 10
  misc_feature: MA Experiment 20001905 PARAMETER Experiment Name: At_Drought_Reproduction_P Parameter: Tissue Value: Rosettes
  misc_feature: MA Experiment 20001905 PARAMETER Experiment Name: At_Drought_Reproduction_P Parameter: Treatment Value: Drought vs. No Drought
atgtcttcttcttcccccgacgctgctcagactcctctaaccaccgctccttatggctcctggaaatctccaatcaccgccgacatcgtttccggagcttcaaagcgtcttggcggcaccgccgtcgattctcatggccgtctcgtcttgctcgagtctcgccctaacgaatccgggagaggagttttggtgctacaaggagaaacatcaattgatattactccaaaagacttcgctgtgagaactttaacacaagaatacggtggtggtgctttccagatttcatcagatgatacacttgtgttctctaattacaaggatcagcgattgtacaagcaagacattactgataaagatggagtctttgattcacgctttaaccgttatgttactgttagggaagatggtcgccaggatagatcaaacccaattacaacaatcgtggaggttaatctaagtggagagacacttgaaggtagattatcaaactttagtgaaagaagtattcttactcccattgaaagagtctataggggatatccagaaccaaaagtactcgtaagtggcaatgatttctatgcatttccacggttggatcccaagtgtgagcgattggcatggattgaatggagtcaccctaatatgccatgggataaagcagagctgtgggttgggtacatttccgagggcggaaatattgataagcgcgtatgtgttgctggttgtgatcccaaatacgtcgaatcacccactgagccgaagtggtcatcaagaggggaactcttttttgtaactgacagaaagaatggatgttggaatattcataaatggattgagagtaccaatgaggttgtttctgtatatcctctcgacggtgagtttgcgaaaccactatggattttcggtactaactcctacgagataatcgagtgttctgaagagaagaacctaattgcatgcagctataggcagaaagggaagtcatatctaggcattgtagatgattcacagggatcatgttctctgctcgatattcctttaacggattttgacagcattacattgggaaatcagtgcctttatgttgagggagcatcagcagttcttccaccatcagttgccagggtaacactggatcagcataagacgaaagcactcagttctgagattgtttggtcgtcgtcacccgatgttttgaagtacaaggcttacttcagcgtgccagagttgattgaatttccaacagaggttcctggtcagaacgcttatgcatacttttatcctccaaccaatccgctctacaatgctagcatggaagagaaacctccgttgttagtgaagagtcatggaggacctactgctgaatcacgtggatccttaaatctgaatatccaatactggacaagtcgaggttgggcatttgttgatgtcaattatggtggaagcacaggttatggtcgagagtatcgagagcggttgttaaggcagtggggaatagtcgacgttgatgactgttgtggctgtgctaaatacttggtatcttctggcaaggcagatgttaagcggctctgtatatctggcggttctgcaggaggttacacaactcttgcatcattggcgttcagggatgttttcaaagctggagcgtccttatacggagtggctgatttaaaaatgttgaaagaagaaggtcataaatttgaatcccgttatatcgacaatcttgttggagatgaaaaagatttctatgagagatcaccaatcaatttcgtcgataagttctcttgtcccatcatccttttccaaggactagaagacaaggttgtaactccagatcaatcacgtaaaatctatgaagcattaaagaaaaaaggtctgcctgttgctcttgtcgagtacgaaggagaacaacacggttttcgcaaggcggaaaacatcaaatacacacttgagcaacagatggtgttctttgcccgagtggttggagggttcaaagttgctgatgacatcactcctttgaaaattgacaacttcgacacttag

SEQ ID NO: 86320 - protein, 680 aa, Arabidopsis thaliana
  peptide (1)..(680): Ceres Seq. ID no. 12688728
  misc_feature (470)..(534): Pfam Name: Prolyl oligopeptidase family Pfam Description: Prolyl oligopeptidase family
  misc_feature (184)..(677): Homolog of NCBI NO: 23043087 NR Description: hypothetical protein [Trichodesmium erythraeum
  misc_feature (248)..(677): Homolog of NCBI NO: 37521039 NR Description: probable peptidase [Gloeobacter violaceus]
  misc_feature (16)..(157): Homolog of NCBI NO: 37521039 NR Description: probable peptidase [Gloeobacter violaceus]
  misc_feature (182)..(662): Homolog of NCBI NO: 16331709 NR Description: hypothetical protein [Synechocystis sp. PCC 6803]
  misc_feature (15)..(657): Homolog of NCBI NO: 23029170 NR Description: hypothetical protein [Microbulbifer degradans
  misc_feature (248)..(672): Homolog of NCBI NO: 29654820 NR Description: prolyl oligopeptidase family protein [Coxiella RSA 493] >gi|29542088|gb|AAO91026.1| prolyl oligopeptidase family
  misc_feature (248)..(662): Homolog of NCBI NO: 22972830 NR Description: hypothetical protein [Chloroflexus aurantiacus]
  misc_feature (350)..(662): Homolog of NCBI NO: 23062020 NR Description: hypothetical protein [Pseudomonas fluorescens
  misc_feature (24)..(172): Homolog of NCBI NO: 23062020 NR Description: hypothetical protein [Pseudomonas fluorescens
  misc_feature (186)..(302): Homolog of NCBI NO: 23062020 NR Description: hypothetical protein [Pseudomonas fluorescens
MSSSSPDAAQTPLTTAPYGSWKSPITADIVSGASKRLGGTAVDSHGRLVLLESRPNESGRGVLVLQGETSIDITPKDFAVRTLTQEYGGGAFQISSDDTLVFSNYKDQRLYKQDITDKDGVFDSRFNRYVTVREDGRQDRSNPITTIVEVNLSGETLEGRLSNFSERSILTPIERVYRGYPEPKVLVSGNDFYAFPRLDPKCERLAWIEWSHPNMPWDKAELWVGYISEGGNIDKRVCVAGCDPKYVESPTEPKWSSRGELFFVTDRKNGCWNIHKWIESTNEVVSVYPLDGEFAKPLWIFGTNSYEIIECSEEKNLIACSYRQKGKSYLGIVDDSQGSCSLLDIPLTDFDSITLGNQCLYVEGASAVLPPSVARVTLDQHKTKALSSEIVWSSSPDVLKYKAYFSVPELIEFPTEVPGQNAYAYFYPPTNPLYNASMEEKPPLLVKSHGGPTAESRGSLNLNIQYWTSRGWAFVDVNYGGSTGYGREYRERLLRQWGIVDVDDCCGCAKYLVSSGKADVKRLCISGGSAGGYTTLASLAFRDVFKAGASLYGVADLKMLKEEGHKFESRYIDNLVGDEKDFYERSPINFVDKFSCPIILFQGLEDKVVTPDQSRKIYEALKKKGLPVALVEYEGEQHGFRKAENIKYTLEQQMVFFARVVGGFKVADDITPLKIDNFDT

SEQ ID NO: 86321 - protein, 466 aa, Arabidopsis thaliana; identical to SEQ ID NO: 44637
  peptide (1)..(466): Ceres Seq. ID no. 12688729
  misc_feature (256)..(320): Pfam Name: Prolyl oligopeptidase family Pfam Description: Prolyl oligopeptidase family
  misc_feature (1)..(463): Homolog of NCBI NO: 23043087 NR Description: hypothetical protein [Trichodesmium erythraeum
  misc_feature (34)..(463): Homolog of NCBI NO: 37521039 NR Description: probable peptidase [Gloeobacter violaceus]
  misc_feature (1)..(448): Homolog of NCBI NO: 16331709 NR Description: hypothetical protein [Synechocystis sp. PCC 6803]
  misc_feature (1)..(443): Homolog of NCBI NO: 23029170 NR Description: hypothetical protein [Microbulbifer degradans
  misc_feature (34)..(458): Homolog of NCBI NO: 29654820 NR Description: prolyl oligopeptidase family protein [Coxiella RSA 493] >gi|29542088|gb|AAO91026.1| prolyl oligopeptidase family
  misc_feature (34)..(448): Homolog of NCBI NO: 22972830 NR Description: hypothetical protein [Chloroflexus aurantiacus]
  misc_feature (136)..(448): Homolog of NCBI NO: 23062020 NR Description: hypothetical protein [Pseudomonas fluorescens
  misc_feature (1)..(88): Homolog of NCBI NO: 23062020 NR Description: hypothetical protein [Pseudomonas fluorescens
  misc_feature (75)..(448): Homolog of NCBI NO: 21224792 NR Description: putative acyl-peptide hydrolase [Streptomyces
  misc_feature (1)..(136): Homolog of NCBI NO: 21224792 NR Description: putative acyl-peptide hydrolase [Streptomyces

SEQ ID NO: 86322 - DNA, 552 bp, Arabidopsis thaliana
  misc_feature (1)..(552): Ceres Seq. ID no. 12688797
  misc_feature: MA Experiment ID: 20000173 Result: Down-regulated in Transcription
  misc_feature: MA Experiment 20000173 PARAMETER Experiment Name: At_42deg_Heat_P Parameter: Age (day) Value: 14
  misc_feature: MA Experiment 20000173 PARAMETER Experiment Name: At_42deg_Heat_P Parameter: Organism Value: A. thaliana
  misc_feature: MA Experiment 20000173 PARAMETER Experiment Name: At_42deg_Heat_P Parameter: Plant Line Value: WS
  misc_feature: MA Experiment 20000173 PARAMETER Experiment Name: At_42deg_Heat_P Parameter: Temperature (deg C) Value: 42 vs. 22
  misc_feature: MA Experiment 20000173 PARAMETER Experiment Name: At_42deg_Heat_P Parameter: Timepoint (hr) Value: 6
  misc_feature: MA Experiment 20000173 PARAMETER Experiment Name: At_42deg_Heat_P Parameter: Tissue Value: Aerial
  misc_feature: MA Experiment ID: 20000184 Result: Up-regulated in Transcription
  misc_feature: MA Experiment 20000184 PARAMETER Experiment Name: At_Shoots__P Parameter: Age (day) Value: 7
  misc_feature: MA Experiment 20000184 PARAMETER Experiment Name: At_Shoots__P Parameter: Tissue Value: Shoots vs. Whole Plant
  misc_feature: MA Experiment ID: 20000227 Result: Down-regulated in Transcription
  misc_feature: MA Experiment 20000227 PARAMETER Experiment Name: At_Root-Tips-vs-Tops_P Parameter: Tissue Value: Root Tips vs. Root Tops
  misc_feature: MA Experiment ID: 20000234 Result: Up-regulated in Transcription
  misc_feature: MA Experiment 20000234 PARAMETER Experiment Name: At_Siliques_P Parameter: Age (day) Value: 21
  misc_feature: MA Experiment 20000234 PARAMETER Experiment Name: At_Siliques_P Parameter: Organism Value: A. thaliana
  misc_feature: MA Experiment 20000234 PARAMETER Experiment Name: At_Siliques_P Parameter: Plant Line Value: WS
  misc_feature: MA Experiment 20000234 PARAMETER Experiment Name: At_Siliques_P Parameter: Tissue Value: Less Than 5mm Siliques vs. Whole Plant
  misc_feature: MA Experiment ID: 20000436 Result: Down-regulated in Transcription
  misc_feature: MA Experiment 20000436 PARAMETER Experiment Name: At_Drought_P Parameter: Age (day) Value: 7
  misc_feature: MA Experiment 20000436 PARAMETER Experiment Name: At_Drought_P Parameter: Organism Value: A. thaliana
  misc_feature: MA Experiment 20000436 PARAMETER Experiment Name: At_Drought_P Parameter: Plant Line Value: WS
  misc_feature: MA Experiment 20000436 PARAMETER Experiment Name: At_Drought_P Parameter: Timepoint (hr) Value: 12
  misc_feature: MA Experiment 20000436 PARAMETER Experiment Name: At_Drought_P Parameter: Tissue Value: Whole Plant
  misc_feature: MA Experiment 20000436 PARAMETER Experiment Name: At_Drought_P Parameter: Treatment Value: Drought vs. No Drought
  misc_feature: MA Experiment ID: 20000437 Result: Down-regulated in Transcription
  misc_feature: MA Experiment 20000437 PARAMETER Experiment Name: At_Drought_P Parameter: Age (day) Value: 8
  misc_feature: MA Experiment 20000437 PARAMETER Experiment Name: At_Drought_P Parameter: Organism Value: A. thaliana
  misc_feature: MA Experiment 20000437 PARAMETER Experiment Name: At_Drought_P Parameter: Plant Line Value: WS
  misc_feature: MA Experiment 20000437 PARAMETER Experiment Name: At_Drought_P Parameter: Timepoint (hr) Value: 24
  misc_feature: MA Experiment 20000437 PARAMETER Experiment Name: At_Drought_P Parameter: Tissue Value: Whole Plant
  misc_feature: MA Experiment 20000437 PARAMETER Experiment Name: At_Drought_P Parameter: Treatment Value: Drought vs. No Drought
  misc_feature: MA Experiment ID: 20000495 Result: Up-regulated in Transcription
  misc_feature: MA Experiment 20000495 PARAMETER Experiment Name: At_Guard_Cells_P Parameter: Harvest Date Value: 8/2/2002
  misc_feature: MA Experiment 20000495 PARAMETER Experiment Name: At_Guard_Cells_P Parameter: Organism Value: A. thaliana
  misc_feature: MA Experiment 20000495 PARAMETER Experiment Name: At_Guard_Cells_P Parameter: Tissue Value: Guard Cells vs. Leaves
  misc_feature: MA Experiment ID: 20000794 Result: Down-regulated in Transcription
  misc_feature: MA Experiment 20000794 PARAMETER Experiment Name: At_Petals_P Parameter: Age (day) Value: 23-25 days
  misc_feature: MA Experiment 20000794 PARAMETER Experiment Name: At_Petals_P Parameter: Plant Line Value: WS
  misc_feature: MA Experiment 20000794 PARAMETER Experiment Name: At_Petals_P Parameter: Tissue Value: Petals vs. Whole plant
  misc_feature: MA Experiment ID: 20001450 Result: Down-regulated in Transcription
  misc_feature: MA Experiment 20001450 PARAMETER Experiment Name: At_Far-red-induction_P Parameter: Age (day) Value: 7
  misc_feature: MA Experiment 20001450 PARAMETER Experiment Name: At_Far-red-induction_P Parameter: Light Value: Far-red vs. White
  misc_feature: MA Experiment 20001450 PARAMETER Experiment Name: At_Far-red-induction_P Parameter: Organism Value: A. thaliana
  misc_feature: MA Experiment 20001450 PARAMETER Experiment Name: At_Far-red-induction_P Parameter: Plant Line Value: Columbia
  misc_feature: MA Experiment 20001450 PARAMETER Experiment Name: At_Far-red-induction_P Parameter: Timepoint (hr) Value: 8
  misc_feature: MA Experiment 20001450 PARAMETER Experiment Name: At_Far-red-induction_P Parameter: Tissue Value: Whole Plant
  misc_feature: MA Experiment ID: 20001911 Result: Down-regulated in Transcription
  misc_feature: MA Experiment 20001911 PARAMETER Experiment Name: At_Drought_Reproduction_P Parameter: Age (day) Value: 40
  misc_feature: MA Experiment 20001911 PARAMETER Experiment Name: At_Drought_Reproduction_P Parameter: Organism Value: A. thaliana
  misc_feature: MA Experiment 20001911 PARAMETER Experiment Name: At_Drought_Reproduction_P Parameter: Plant Line Value: WS
  misc_feature: MA Experiment 20001911 PARAMETER Experiment Name: At_Drought_Reproduction_P Parameter: Timepoint (day) Value: 10
  misc_feature: MA Experiment 20001911 PARAMETER Experiment Name: At_Drought_Reproduction_P Parameter: Tissue Value: Flowers
  misc_feature: MA Experiment 20001911 PARAMETER Experiment Name: At_Drought_Reproduction_P Parameter: Treatment Value: Drought vs. No Drought
atgggaatgtcgaaatcgaaaggcaacacacacaacatcttccttctctgcaactacatcctcttaggctcagcctcaagttgcatcttcctcacaatctccctccgtctcttcccatctctctccggtctctcccttatcttcctctacactctcacaatcgcaaccgcggtatccggctgctcgatcttcgcctcctccacatccgccaccgcgagcgatagattatacggttcacacatggtagccacagtcctcacggccattttccaaggcgctgtctctgttctgatattcacgagaacaggggatttccttaggttcttgaaatcttatgttcgggaagaagacggtgaagtgatacttaaactctctggtggtttgtgtgtattgatgttttgcttagagtggattgttcttgtgttagcgtttttgttgaagtatagtgattatttggatgagagtgttgtagatgatgatgattttaaggtgaggaggcaagaagaagatctcaaggattggccttcttacccatttcaactcaagatttaa

SEQ ID NO: 86323 - protein, 183 aa, Arabidopsis thaliana; identical to SEQ ID NO: 30610
  peptide (1)..(183): Ceres Seq. ID no. 12688798
  misc_feature (1)..(183): Homolog of NCBI NO: 15239379 NR Description: putative protein; protein id: At5g36710.1 thaliana] >gi|8885623|dbj|BAA97553.1| to unknown protein [Arabidopsis thaliana]
  misc_feature (1)..(183): Homolog of NCBI NO: 15239407 NR Description: putative protein; protein id: At5g36800.1
  misc_feature (3)..(181): Homolog of NCBI NO: 15237310 NR Description: putative protein; protein id: At5g16250.1, by cDNA: 18222. [Arabidopsis thaliana] >gi|11346160|pir||T51495
  misc_feature (3)..(181): Homolog of NCBI NO: 21553926 NR Description: unknown [Arabidopsis thaliana]
  misc_feature (3)..(181): Homolog of NCBI NO: 21703131 NR Description: AT5g16250/T21H19_170 [Arabidopsis thaliana]
  misc_feature (10)..(181): Homolog of NCBI NO: 18396262 NR Description: expressed protein; protein id: At3g02640.1, by cDNA: 4861., supported by cDNA: gi_17065095 [Arabidopsis
  misc_feature (14)..(181): Homolog of NCBI NO: 38345379 NR Description: OSJNBa0067K08.8 [Oryza sativa (japonica
  misc_feature (3)..(161): Homolog of NCBI NO: 34907616 NR Description: contains EST C27797(C52876)~unknown protein

SEQ ID NO: 86324 - protein, 181 aa, Arabidopsis thaliana; identical to SEQ ID NO: 30611
  peptide (1)..(181): Ceres Seq. ID no. 12688799
  misc_feature (1)..(181): Homolog of NCBI NO: 15239379 NR Description: putative protein; protein id: At5g36710.1 thaliana] >gi|8885623|dbj|BAA97553.1| to unknown protein [Arabidopsis thaliana]
  misc_feature (1)..(181): Homolog of NCBI NO: 15239407 NR Description: putative protein; protein id: At5g36800.1
  misc_feature (1)..(179): Homolog of NCBI NO: 15237310 NR Description: putative protein; protein id: At5g16250.1, by cDNA: 18222. [Arabidopsis thaliana] >gi|11346160|pir||T51495
  misc_feature (1)..(179): Homolog of NCBI NO: 21553926 NR Description: unknown [Arabidopsis thaliana]
  misc_feature (1)..(179): Homolog of NCBI NO: 21703131 NR Description: AT5g16250/T21H19_170 [Arabidopsis thaliana]
  misc_feature (8)..(179): Homolog of NCBI NO: 18396262 NR Description: expressed protein; protein id: At3g02640.1, by cDNA: 4861., supported by cDNA: gi_17065095 [Arabidopsis
  misc_feature (12)..(179): Homolog of NCBI NO: 38345379 NR Description: OSJNBa0067K08.8 [Oryza sativa (japonica
  misc_feature (1)..(159): Homolog of NCBI NO: 34907616 NR Description: contains EST C27797(C52876)~unknown protein

SEQ ID NO: 86325 - protein, 103 aa, Arabidopsis thaliana
  peptide (1)..(103): Ceres Seq. ID no. 12688800
  misc_feature (1)..(103): Homolog of NCBI NO: 15239379 NR Description: putative protein; protein id: At5g36710.1 thaliana] >gi|8885623|dbj|BAA97553.1| to unknown protein [Arabidopsis thaliana]
  misc_feature (1)..(103): Homolog of NCBI NO: 15239407 NR Description: putative protein; protein id: At5g36800.1
  misc_feature (1)..(101): Homolog of NCBI NO: 15237310 NR Description: putative protein; protein id: At5g16250.1, by cDNA: 18222. [Arabidopsis thaliana] >gi|11346160|pir||T51495
  misc_feature (1)..(101): Homolog of NCBI NO: 21553926 NR Description: unknown [Arabidopsis thaliana]
  misc_feature (1)..(101): Homolog of NCBI NO: 21703131 NR Description: AT5g16250/T21H19_170 [Arabidopsis thaliana]
  misc_feature (1)..(101): Homolog of NCBI NO: 18396262 NR Description: expressed protein; protein id: At3g02640.1, by cDNA: 4861., supported by cDNA: gi_17065095 [Arabidopsis
  misc_feature (1)..(101): Homolog of NCBI NO: 38345379 NR Description: OSJNBa0067K08.8 [Oryza sativa (japonica
  misc_feature (1)..(81): Homolog of NCBI NO: 34907616 NR Description: contains EST C27797(C52876)~unknown protein
MVATVLTAIFQGAVSVLIFTRTGDFLRFLKSYVREEDGEVILKLSGGLCVLMFCLEWIVLVLAFLLKYSDYLDESVVDDDDFKVRRQEEDLKDWPSYPFQLKI

SEQ ID NO: 86326 - DNA, 1851 bp, Arabidopsis thaliana
  misc_feature (1)..(1851): Ceres Seq. ID no. 12688835
  misc_feature: MA Experiment ID: 20000227 Result: Down-regulated in Transcription
  misc_feature: MA Experiment 20000227 PARAMETER Experiment Name: At_Root-Tips-vs-Tops_P Parameter: Tissue Value: Root Tips vs. Root Tops
  misc_feature: MA Experiment ID: 20000264 Result: Up-regulated in Transcription
  misc_feature: MA Experiment 20000264 PARAMETER Experiment Name: At_Open_Flower_P Parameter: Age (day) Value: 21
  misc_feature: MA Experiment 20000264 PARAMETER Experiment Name: At_Open_Flower_P Parameter: Plant Line Value: WS
  misc_feature: MA Experiment 20000264 PARAMETER Experiment Name: At_Open_Flower_P Parameter: Tissue Value: Open Flower vs. Whole Plant
  misc_feature: MA Experiment ID: 20000794 Result: Up-regulated in Transcription
  misc_feature: MA Experiment 20000794 PARAMETER Experiment Name: At_Petals_P Parameter: Age (day) Value: 23-25 days
  misc_feature: MA Experiment 20000794 PARAMETER Experiment Name: At_Petals_P Parameter: Plant Line Value: WS
  misc_feature: MA Experiment 20000794 PARAMETER Experiment Name: At_Petals_P Parameter: Tissue Value: Petals vs. Whole plant
  misc_feature: MA Experiment ID: 20001560 Result: Down-regulated in Transcription
  misc_feature: MA Experiment 20001560 PARAMETER Experiment Name: At_Drought_Soil_Dry_P Parameter: Age (day) Value: 28
  misc_feature: MA Experiment 20001560 PARAMETER Experiment Name: At_Drought_Soil_Dry_P Parameter: Organism Value: A. thaliana
  misc_feature: MA Experiment 20001560 PARAMETER Experiment Name: At_Drought_Soil_Dry_P Parameter: Plant Line Value: WS
  misc_feature: MA Experiment 20001560 PARAMETER Experiment Name: At_Drought_Soil_Dry_P Parameter: Post Timepoint (hr) Value: None
  misc_feature: MA Experiment 20001560 PARAMETER Experiment Name: At_Drought_Soil_Dry_P Parameter: Post-Treatment Value: None
  misc_feature: MA Experiment 20001560 PARAMETER Experiment Name: At_Drought_Soil_Dry_P Parameter: Timepoint (day) Value: 14
  misc_feature: MA Experiment 20001560 PARAMETER Experiment Name: At_Drought_Soil_Dry_P Parameter: Treatment Value: Drought vs. No Drought
atgggttgtttaagaagcttagtaagaaggaaacaattcgactcttcaaatggcaaagcagagactcatcatcatcaccaacagcttgcaaaagcgttgacctttcctcacttgattgccattggtgttggatcaacaattggagcaggggtttatattcttgtgggaacagtagctagagagcattcaggacctgctcttgctttatccttccttatagctggaatttctgctgccctttctgcgttttgttatgcggaactatctagtcgttttccctctgctgggagtgcctatcattattcttacatttgcattggtgaaggtgttgcgtggttgattggctgggcgctgattttggaatacacaattggtggttcaacagttgcccgcggcatatctccaaatctggcaatgattttcggtggtgaagattgtctgcctacaatattagctcgtcatcaaatcccaggccttgatattgttgttgacccgtgtgctgctgtgctagtgttcattgtaacaggactttgttgccttggagtaaaggagagcacatttgctcagggaattgtaacaacagcaaatgtctttgtcatgatatttgtcatagtagctggaagctatttgtgtttcaagacaggttgggttggttatgaacttccaacggggtattttccttacggggttgatggaatgcttactggatctgctactgtcttctttgcctacatcgggtttgatacagttgcaagtatggcagaggaggtgaaaaatccccggcgggatttaccgctcggtattgggatttcgctcctgctttgttgtttgctgtacatgatggtgtctgttgttattgttggtttagtgccgtattatgctatggaccctgacactccaatatcatccgcattttctagtcatggaattcaatgggctgcatatttgataaatttaggtgctgtcatggctctctgttctgcattaatgggctccattctccctcagccgcggattctgatggcaatggctagggatggtctcttgccttcatatttctcatatgtgaatcaacgcacgcaggttccaattaatggcaccataaccactggtgtttgtgcagcaatcttagctttctttatggatgtttcgcaactggcgggaatggtgagtgtcgggacacttgttgcatttacaatggttgcaatatcattgttgatagtcagatatgttgttcctccagatgaggtactgataagattggaactggtacctcttccctcatcacttcaagaaaactcatccagtcacgtcggaacttccatccgtagtaaacaacctttacttggcaaagtggatgattcagttgtcgataaggaaaatgctccaggaagttgggttctcaacaaaaaaaacagacggaaatttgctggttggagcattatgttcacttgtattggaaacttccttttaagctatgcagcgtcaagcttcctcttgccaggactcctccgatattctctatgtggtgttggtggattgttccttcttgtcggtttgattgttctgatttgcatagatcaggatgatgctagacacagttttgggcattctggaggcttcatttgcccgtttgttccgcttttgcctatagtttgcattcttatcaacatgtatctcttggtaaaccttggagctgcgacgtgggttcgtgtatcggtttggctgttcctcggagtggttgtttacattttctatgggagaagaaacagctctcttgtgaatgctgtttatgtctccactgctcatctccaggagattcgtcgcacttctggacattctttggcttaa

SEQ ID NO: 86327 - protein, 616 aa, Arabidopsis thaliana
  peptide (1)..(616): Ceres Seq. ID no. 12688836
  misc_feature (2)..(616): Homolog of NCBI NO: 30696198 NR Description: expressed protein [Arabidopsis thaliana]
  misc_feature (2)..(616): Homolog of NCBI NO: 23306414 NR Description: Unknown protein [Arabidopsis thaliana]
  misc_feature (2)..(611): Homolog of NCBI NO: 29244640 NR Description: putative cationic amino acid transporter [Oryza
  misc_feature (4)..(613): Homolog of NCBI NO: 22330822 NR Description: putative cationic amino acid transporter; protein At3g03720.1, supported by cDNA: gi_17064863 [Arabidopsis >gi|17064864|gb|AAL32586.1| putative cationic amino acid
  misc_feature (4)..(613): Homolog of NCBI NO: 6006869 NR Description: putative cationic amino acid transporter
  misc_feature (43)..(598): Homolog of NCBI NO: 37534696 NR Description: putative cationic amino acid transporter -like
  misc_feature (164)..(587): Homolog of NCBI NO: 6981556 NR Description: solute carrier family 7 member A1 (amino acid cationic 1) [Rattus norvegicus] >gi|1589917|gb|AAC52898.1|
  misc_feature (1)..(207): Homolog of NCBI NO: 6981556 NR Description: solute carrier family 7 member A1 (amino acid cationic 1) [Rattus norvegicus] >gi|1589917|gb|AAC52898.1|
  misc_feature (164)..(587): Homolog of NCBI NO: 18181964 NR Description: ecotropic retrovirus receptor [Rattus norvegicus]
  misc_feature (1)..(207): Homolog of NCBI NO: 18181964 NR Description: ecotropic retrovirus receptor [Rattus norvegicus]
MGCLRSLVRRKQFDSSNGKAETHHHHQQLAKALTFPHLIAIGVGSTIGAGVYILVGTVAREHSGPALALSFLIAGISAALSAFCYAELSSRFPSAGSAYHYSYICIGEGVAWLIGWALILEYTIGGSTVARGISPNLAMIFGGEDCLPTILARHQIPGLDIVVDPCAAVLVFIVTGLCCLGVKESTFAQGIVTTANVFVMIFVIVAGSYLCFKTGWVGYELPTGYFPYGVDGMLTGSATVFFAYIGFDTVASMAEEVKNPRRDLPLGIGISLLLCCLLYMMVSVVIVGLVPYYAMDPDTPISSAFSSHGIQWAAYLINLGAVMALCSALMGSILPQPRILMAMARDGLLPSYFSYVNQRTQVPINGTITTGVCAAILAFFMDVSQLAGMVSVGTLVAFTMVAISLLIVRYVVPPDEVLIRLELVPLPSSLQENSSSHVGTSIRSKQPLLGKVDDSVVDKENAPGSWVLNKKNRRKFAGWSIMFTCIGNFLLSYAASSFLLPGLLRYSLCGVGGLFLLVGLIVLICIDQDDARHSFGHSGGFICPFVPLLPIVCILINMYLLVNLGAATWVRVSVWLFLGVVVYIFYGRRNSSLVNAVYVSTAHLQEIRRTSGHSLA

SEQ ID NO: 86328 - protein, 478 aa, Arabidopsis thaliana; identical to SEQ ID NO: 72812
  peptide (1)..(478): Ceres Seq. ID no. 12688837
  misc_feature (1)..(478): Homolog of NCBI NO: 30696198 NR Description: expressed protein [Arabidopsis thaliana]
  misc_feature (1)..(478): Homolog of NCBI NO: 23306414 NR Description: Unknown protein [Arabidopsis thaliana]
  misc_feature (1)..(473): Homolog of NCBI NO: 29244640 NR Description: putative cationic amino acid transporter [Oryza
  misc_feature (1)..(475): Homolog of NCBI NO: 22330822 NR Description: putative cationic amino acid transporter; protein At3g03720.1, supported by cDNA: gi_17064863 [Arabidopsis >gi|17064864|gb|AAL32586.1| putative cationic amino acid
  misc_feature (1)..(475): Homolog of NCBI NO: 6006869 NR Description: putative cationic amino acid transporter
  misc_feature (1)..(460): Homolog of NCBI NO: 37534696 NR Description: putative cationic amino acid transporter -like
  misc_feature (26)..(449): Homolog of NCBI NO: 6981556 NR Description: solute carrier family 7 member A1 (amino acid cationic 1) [Rattus norvegicus] >gi|1589917|gb|AAC52898.1|
  misc_feature (1)..(69): Homolog of NCBI NO: 6981556 NR Description: solute carrier family 7 member A1 (amino acid cationic 1) [Rattus norvegicus] >gi|1589917|gb|AAC52898.1|
  misc_feature (26)..(449): Homolog of NCBI NO: 18181964 NR Description: ecotropic retrovirus receptor [Rattus norvegicus]
  misc_feature (1)..(69): Homolog of NCBI NO: 18181964 NR Description: ecotropic retrovirus receptor [Rattus norvegicus]

SEQ ID NO: 86329 - protein, 417 aa, Arabidopsis thaliana
  peptide (1)..(417): Ceres Seq. ID no. 12688838
  misc_feature (1)..(417): Homolog of NCBI NO: 30696198 NR Description: expressed protein [Arabidopsis thaliana]
  misc_feature (1)..(417): Homolog of NCBI NO: 23306414 NR Description: Unknown protein [Arabidopsis thaliana]
  misc_feature (1)..(412): Homolog of NCBI NO: 29244640 NR Description: putative cationic amino acid transporter [Oryza
  misc_feature (1)..(414): Homolog of NCBI NO: 22330822 NR Description: putative cationic amino acid transporter; protein At3g03720.1, supported by cDNA: gi_17064863 [Arabidopsis >gi|17064864|gb|AAL32586.1| putative cationic amino acid
  misc_feature (1)..(414): Homolog of NCBI NO: 6006869 NR Description: putative cationic amino acid transporter
  misc_feature (1)..(399): Homolog of NCBI NO: 37534696 NR Description: putative cationic amino acid transporter -like
  misc_feature (1)..(388): Homolog of NCBI NO: 6981556 NR Description: solute carrier family 7 member A1 (amino acid cationic 1) [Rattus norvegicus] >gi|1589917|gb|AAC52898.1|
  misc_feature (1)..(388): Homolog of NCBI NO: 18181964 NR Description: ecotropic retrovirus receptor [Rattus norvegicus]
  misc_feature (1)..(211): Homolog of NCBI NO: 27370304 NR Description: hypothetical protein A930013N06 [Mus musculus]
  misc_feature (315)..(410): Homolog of NCBI NO: 27370304 NR Description: hypothetical protein A930013N06 [Mus musculus]
MIFVIVAGSYLCFKTGWVGYELPTGYFPYGVDGMLTGSATVFFAYIGFDTVASMAEEVKNPRRDLPLGIGISLLLCCLLYMMVSVVIVGLVPYYAMDPDTPISSAFSSHGIQWAAYLINLGAVMALCSALMGSILPQPRILMAMARDGLLPSYFSYVNQRTQVPINGTITTGVCAAILAFFMDVSQLAGMVSVGTLVAFTMVAISLLIVRYVVPPDEVLIRLELVPLPSSLQENSSSHVGTSIRSKQPLLGKVDDSVVDKENAPGSWVLNKKNRRKFAGWSIMFTCIGNFLLSYAASSFLLPGLLRYSLCGVGGLFLLVGLIVLICIDQDDARHSFGHSGGFICPFVPLLPIVCILINMYLLVNLGAATWVRVSVWLFLGVVVYIFYGRRNSSLVNAVYVSTAHLQEIRRTSGHSLA

SEQ ID NO: 86330 - DNA, 1578 bp, Arabidopsis thaliana
  misc_feature (1)..(1578): Ceres Seq. ID no. 12688848
  misc_feature: MA Experiment ID: 20000180 Result: Up-regulated in Transcription
  misc_feature: MA Experiment 20000180 PARAMETER Experiment Name: At_Germinating_Seeds_P Parameter: Age (hr) Value: 24 vs. 0
  misc_feature: MA Experiment 20000180 PARAMETER Experiment Name: At_Germinating_Seeds_P Parameter: Tissue Value: Germinating Seeds
  misc_feature: MA Experiment ID: 20000234 Result: Up-regulated in Transcription
  misc_feature: MA Experiment 20000234 PARAMETER Experiment Name: At_Siliques_P Parameter: Age (day) Value: 21
  misc_feature: MA Experiment 20000234 PARAMETER Experiment Name: At_Siliques_P Parameter: Organism Value: A. thaliana
  misc_feature: MA Experiment 20000234 PARAMETER Experiment Name: At_Siliques_P Parameter: Plant Line Value: WS
  misc_feature: MA Experiment 20000234 PARAMETER Experiment Name: At_Siliques_P Parameter: Tissue Value: Less Than 5mm Siliques vs. Whole Plant
  misc_feature: MA Experiment ID: 20000264 Result: Up-regulated in Transcription
  misc_feature: MA Experiment 20000264 PARAMETER Experiment Name: At_Open_Flower_P Parameter: Age (day) Value: 21
  misc_feature: MA Experiment 20000264 PARAMETER Experiment Name: At_Open_Flower_P Parameter: Plant Line Value: WS
  misc_feature: MA Experiment 20000264 PARAMETER Experiment Name: At_Open_Flower_P Parameter: Tissue Value: Open Flower vs. Whole Plant
  misc_feature: MA Experiment ID: 20000265 Result: Up-regulated in Transcription
  misc_feature: MA Experiment 20000265 PARAMETER Experiment Name: At_Open_Flower_P Parameter: Age (day) Value: 21
  misc_feature: MA Experiment 20000265 PARAMETER Experiment Name: At_Open_Flower_P Parameter: Plant Line Value: WS
  misc_feature: MA Experiment 20000265 PARAMETER Experiment Name: At_Open_Flower_P Parameter: Tissue Value: Closed Flower vs. Whole Plant
  misc_feature: MA Experiment ID: 20000286 Result: Up-regulated in Transcription
  misc_feature: MA Experiment 20000286 PARAMETER Experiment Name: At_Open_Flower_P Parameter: Age (day) Value: 21
  misc_feature: MA Experiment 20000286 PARAMETER Experiment Name: At_Open_Flower_P Parameter: Plant Line Value: WS
  misc_feature: MA Experiment 20000286 PARAMETER Experiment Name: At_Open_Flower_P Parameter: Tissue Value: Half Open vs. Whole Plant
  misc_feature: MA Experiment ID: 20000495 Result: Up-regulated in Transcription
  misc_feature: MA Experiment 20000495 PARAMETER Experiment Name: At_Guard_Cells_P Parameter: Harvest Date Value: 8/2/2002
  misc_feature: MA Experiment 20000495 PARAMETER Experiment Name: At_Guard_Cells_P Parameter: Organism Value: A. thaliana
  misc_feature: MA Experiment 20000495 PARAMETER Experiment Name: At_Guard_Cells_P Parameter: Tissue Value: Guard Cells vs. Leaves
  misc_feature: MA Experiment ID: 20001451 Result: Down-regulated in Transcription
  misc_feature: MA Experiment 20001451 PARAMETER Experiment Name: At_Far-red-induction_P Parameter: Age (day) Value: 7
  misc_feature: MA Experiment 20001451 PARAMETER Experiment Name: At_Far-red-induction_P Parameter: Light Value: Far-red vs. White
  misc_feature: MA Experiment 20001451 PARAMETER Experiment Name: At_Far-red-induction_P Parameter: Organism Value: A. thaliana
  misc_feature: MA Experiment 20001451 PARAMETER Experiment Name: At_Far-red-induction_P Parameter: Plant Line Value: Columbia
  misc_feature: MA Experiment 20001451 PARAMETER Experiment Name: At_Far-red-induction_P Parameter: Timepoint (hr) Value: 24
  misc_feature: MA Experiment 20001451 PARAMETER Experiment Name: At_Far-red-induction_P Parameter: Tissue Value: Whole Plant
atggagtgttttggtattccctgtcggaattctttttgcttgtctccaattaaggtttcagtgattgagttaactaactccaatgtcactcaagtttctgtgatgaactacacaaatctttctgatgatgatgatgaggaacttgaaaataaaaaggaggatcttgatagcgaaaatgatgtggtgattagtaaggagaaggtagagatgaatgtatcttttattgctataggaaatatatctttaaggaatcctaaaatggtggttgttagctcagagtcagagtcagatccaaattcggttatgattagggttaaagatagtagaaagggtaatgttttatctctgaggaggcacaagcaagggagtgcgatttcgatatctcagatgaactcattgctgatccagagtctttcttcttttaaatctcctaagcctcggtggtcatctgctagagactctgaaatgctctctgcgagatccgagattgagaaagtctctcttgttcatgattttcttggacttaatcctttggtttatcgaaatatctccaagtttctaaggagttatgacttgatggagaggaaactcaagatttatgtgtacaaggaaggagggaaaccaatattccacacgccgatgcctcgaggaatatacgcttcagaaggttggtttatgaaactcatggaaagcaacaagaagtttgtagtaaaagaccccaggaaggctcatttgttctacatacccatcagcataaaagctcttaggtcctctctgggactggattttcagacaccgaagagtcttgcagaccatttgaaagaatatgtcgatctgatagcaggaaagtataagttctggaaccgaactggtggagctgatcattttcttgttgcttgtcatgattggggcaacaaactgacaacaaaaaccatgaagaacagtgttagatcactttgtaactcaaatgttgcccaaggcttcagaattgggaccgatactgctttaccggtaacatatatacgctcttccgaggcccctcttgagtatctcggtggaaaaacttcgtccgaaaggaagattcttgcattctttgctggcagcatgcacggatatctccgtccgatactagtgaagctttgggagaataaagaacctgacatgaagatttttggtccaatgcctcgtgaccctaaaagcaagaaacaataccgagaatatatgaagagcagcaggtactgcatatgtgcgaggggttatgaagtccacactcctagggttgtcgaggctatcattaatgaatgtgttccggttatcattgctgacaactacgtgcctccctttttcgaggttttgaactgggaggaatttgctgtgtttgttgaggagaaagatataccgaatctgagaaacattctgctatccatacccgaagatagatatattggcatgcaagcaagggttaaagcggtgcagcaacatttcctgtggcacaagaaaccggtgaagttcgatcaattccatatgattttgcattctatttggtacagccgagttcatagaattaaaaccaggtga

SEQ ID NO: 86331 - protein, 525 aa, Arabidopsis thaliana
  peptide (1)..(525): Ceres Seq. ID no. 12688849
  misc_feature (199)..(488): Pfam Name: Exostosin family Pfam Description: Exostosin family
  misc_feature (1)..(525): Homolog of NCBI NO: 9758523 NR Description: contains similarity to limonene
  misc_feature (1)..(501): Homolog of NCBI NO: 15239475 NR Description: putative protein; protein id: At5g37000.1
  misc_feature (33)..(522): Homolog of NCBI NO: 15233924 NR Description: putative protein; protein id: At4g32790.1
  misc_feature (125)..(522): Homolog of NCBI NO: 15239502 NR Description: putative protein; protein id: At5g25820.1
  misc_feature (46)..(525): Homolog of NCBI NO: 15241150 NR Description: putative protein; protein id: At5g19670.1
  misc_feature (12)..(519): Homolog of NCBI NO: 15239118 NR Description: putative protein; protein id: At5g11610.1
  misc_feature (12)..(519): Homolog of NCBI NO: 26450497 NR Description: unknown protein [Arabidopsis thaliana]
  misc_feature (6)..(524): Homolog of NCBI NO: 30683790 NR Description: expressed protein [Arabidopsis thaliana] unknown protein [Arabidopsis thaliana]
  misc_feature (148)..(523): Homolog of NCBI NO: 34911614 NR Description: limonene cyclase-like protein [Oryza sativa
  misc_feature (267)..(522): Homolog of NCBI NO: 26451681 NR Description: unknown protein [Arabidopsis thaliana]
MECFGIPCRNSFCLSPIKVSVIELTNSNVTQVSVMNYTNLSDDDDEELENKKEDLDSENDVVISKEKVEMNVSFIAIGNISLRNPKMVVVSSESESDPNSVMIRVKDSRKGNVLSLRRHKQGSAISISQMNSLLIQSLSSFKSPKPRWSSARDSEMLSARSEIEKVSLVHDFLGLNPLVYRNISKFLRSYDLMERKLKIYVYKEGGKPIFHTPMPRGIYASEGWFMKLMESNKKFVVKDPRKAHLFYIPISIKALRSSLGLDFQTPKSLADHLKEYVDLIAGKYKFWNRTGGADHFLVACHDWGNKLTTKTMKNSVRSLCNSNVAQGFRIGTDTALPVTYIRSSEAPLEYLGGKTSSERKILAFFAGSMHGYLRPILVKLWENKEPDMKIFGPMPRDPKSKKQYREYMKSSRYCICARGYEVHTPRVVEAIINECVPVIIADNYVPPFFEVLNWEEFAVFVEEKDIPNLRNILLSIPEDRYIGMQARVKAVQQHFLWHKKPVKFDQFHMILHSIWYSRVHRIKTR

SEQ ID NO: 86332 - protein, 491 aa, Arabidopsis thaliana
  peptide (1)..(491): Ceres Seq. ID no. 12688850
  misc_feature (165)..(454): Pfam Name: Exostosin family Pfam Description: Exostosin family
  misc_feature (1)..(491): Homolog of NCBI NO: 9758523 NR Description: contains similarity to limonene
  misc_feature (1)..(467): Homolog of NCBI NO: 15239475 NR Description: putative protein; protein id: At5g37000.1
  misc_feature (1)..(488): Homolog of NCBI NO: 15233924 NR Description: putative protein; protein id: At4g32790.1
  misc_feature (91)..(488): Homolog of NCBI NO: 15239502 NR Description: putative protein; protein id: At5g25820.1
  misc_feature (12)..(491): Homolog of NCBI NO: 15241150 NR Description: putative protein; protein id: At5g19670.1
  misc_feature (1)..(485): Homolog of NCBI NO: 15239118 NR Description: putative protein; protein id: At5g11610.1
  misc_feature (1)..(485): Homolog of NCBI NO: 26450497 NR Description: unknown protein [Arabidopsis thaliana]
  misc_feature (1)..(490): Homolog of NCBI NO: 30683790 NR Description: expressed protein [Arabidopsis thaliana] unknown protein [Arabidopsis thaliana]
  misc_feature (114)..(489): Homolog of NCBI NO: 34911614 NR Description: limonene cyclase-like protein [Oryza sativa
  misc_feature (233)..(488): Homolog of NCBI NO: 26451681 NR Description: unknown protein [Arabidopsis thaliana]
MNYTNLSDDDDEELENKKEDLDSENDVVISKEKVEMNVSFIAIGNISLRNPKMVVVSSESESDPNSVMIRVKDSRKGNVLSLRRHKQGSAISISQMNSLLIQSLSSFKSPKPRWSSARDSEMLSARSEIEKVSLVHDFLGLNPLVYRNISKFLRSYDLMERKLKIYVYKEGGKPIFHTPMPRGIYASEGWFMKLMESNKKFVVKDPRKAHLFYIPISIKALRSSLGLDFQTPKSLADHLKEYVDLIAGKYKFWNRTGGADHFLVACHDWGNKLTTKTMKNSVRSLCNSNVAQGFRIGTDTALPVTYIRSSEAPLEYLGGKTSSERKILAFFAGSMHGYLRPILVKLWENKEPDMKIFGPMPRDPKSKKQYREYMKSSRYCICARGYEVHTPRVVEAIINECVPVIIADNYVPPFFEVLNWEEFAVFVEEKDIPNLRNILLSIPEDRYIGMQARVKAVQQHFLWHKKPVKFDQFHMILHSIWYSRVHRIKTR

SEQ ID NO: 86333 - protein, 456 aa, Arabidopsis thaliana
  peptide (1)..(456): Ceres Seq. ID no. 12688851
  misc_feature (130)..(419): Pfam Name: Exostosin family Pfam Description: Exostosin family
  misc_feature (1)..(456): Homolog of NCBI NO: 9758523 NR Description: contains similarity to limonene
  misc_feature (1)..(432): Homolog of NCBI NO: 15239475 NR Description: putative protein; protein id: At5g37000.1
  misc_feature (1)..(453): Homolog of NCBI NO: 15233924 NR Description: putative protein; protein id: At4g32790.1
  misc_feature (56)..(453): Homolog of NCBI NO: 15239502 NR Description: putative protein; protein id: At5g25820.1
  misc_feature (1)..(456): Homolog of NCBI NO: 15241150 NR Description: putative protein; protein id: At5g19670.1
  misc_feature (1)..(450): Homolog of NCBI NO: 15239118 NR Description: putative protein; protein id: At5g11610.1
  misc_feature (1)..(450): Homolog of NCBI NO: 26450497 NR Description: unknown protein [Arabidopsis thaliana]
  misc_feature (1)..(455): Homolog of NCBI NO: 30683790 NR Description: expressed protein [Arabidopsis thaliana] unknown protein [Arabidopsis thaliana]
  misc_feature (79)..(454): Homolog of NCBI NO: 34911614 NR Description: limonene cyclase-like protein [Oryza sativa
  misc_feature (198)..(453): Homolog of NCBI NO: 26451681 NR Description: unknown protein [Arabidopsis thaliana]
MNVSFIAIGNISLRNPKMVVVSSESESDPNSVMIRVKDSRKGNVLSLRRHKQGSAISISQMNSLLIQSLSSFKSPKPRWSSARDSEMLSARSEIEKVSLVHDFLGLNPLVYRNISKFLRSYDLMERKLKIYVYKEGGKPIFHTPMPRGIYASEGWFMKLMESNKKFVVKDPRKAHLFYIPISIKALRSSLGLDFQTPKSLADHLKEYVDLIAGKYKFWNRTGGADHFLVACHDWGNKLTTKTMKNSVRSLCNSNVAQGFRIGTDTALPVTYIRSSEAPLEYLGGKTSSERKILAFFAGSMHGYLRPILVKLWENKEPDMKIFGPMPRDPKSKKQYREYMKSSRYCICARGYEVHTPRVVEAIINECVPVIIADNYVPPFFEVLNWEEFAVFVEEKDIPNLRNILLSIPEDRYIGMQARVKAVQQHFLWHKKPVKFDQFHMILHSIWYSRVHRIKTR

SEQ ID NO: 86334 - DNA, 1605 bp, Arabidopsis thaliana
  misc_feature (1)..(1605): Ceres Seq. ID no. 12688861
  misc_feature: MA Experiment ID: 20000179 Result: Up-regulated in Transcription
  misc_feature: MA Experiment 20000179 PARAMETER Experiment Name: At_Germinating_Seeds_P Parameter: Age (hr) Value: 6 vs. 0
  misc_feature: MA Experiment 20000179 PARAMETER Experiment Name: At_Germinating_Seeds_P Parameter: Tissue Value: Germinating Seeds
  misc_feature: MA Experiment ID: 20000180 Result: Up-regulated in Transcription
  misc_feature: MA Experiment 20000180 PARAMETER Experiment Name: At_Germinating_Seeds_P Parameter: Age (hr) Value: 24 vs. 0
  misc_feature: MA Experiment 20000180 PARAMETER Experiment Name: At_Germinating_Seeds_P Parameter: Tissue Value: Germinating Seeds
  misc_feature: MA Experiment ID: 20000265 Result: Up-regulated in Transcription
  misc_feature: MA Experiment 20000265 PARAMETER Experiment Name: At_Open_Flower_P Parameter: Age (day) Value: 21
  misc_feature: MA Experiment 20000265 PARAMETER Experiment Name: At_Open_Flower_P Parameter: Plant Line Value: WS
  misc_feature: MA Experiment 20000265 PARAMETER Experiment Name: At_Open_Flower_P Parameter: Tissue Value: Closed Flower vs. Whole Plant
  misc_feature: MA Experiment ID: 20000495 Result: Up-regulated in Transcription
  misc_feature: MA Experiment 20000495 PARAMETER Experiment Name: At_Guard_Cells_P Parameter: Harvest Date Value: 8/2/2002
  misc_feature: MA Experiment 20000495 PARAMETER Experiment Name: At_Guard_Cells_P Parameter: Organism Value: A. thaliana
  misc_feature: MA Experiment 20000495 PARAMETER Experiment Name: At_Guard_Cells_P Parameter: Tissue Value: Guard Cells vs. Leaves
  misc_feature: MA Experiment ID: 20000573 Result: Down-regulated in Transcription
  misc_feature: MA Experiment 20000573 PARAMETER Experiment Name: At_100uM_ABA_Mutants__P Parameter: Organism Value: A. thaliana
  misc_feature: MA Experiment 20000573 PARAMETER Experiment Name: At_100uM_ABA_Mutants__P Parameter: Plant Line Value: CS22 vs. Ler wt
  misc_feature: MA Experiment 20000573 PARAMETER Experiment Name: At_100uM_ABA_Mutants__P Parameter: Timepoint (hr) Value: N/A
  misc_feature: MA Experiment 20000573 PARAMETER Experiment Name: At_100uM_ABA_Mutants__P Parameter: Tissue Value: Whole Plant
  misc_feature: MA Experiment 20000573 PARAMETER Experiment Name: At_100uM_ABA_Mutants__P Parameter: Treatment Value: None
atgtggtgtttgtcctgctttaaaccttccactaaacatgatccctctgaggatcgttttgaagaagaaacaaatatcgttacaggtatttctctgtatgaagatgtcatcttacgtcagagaagatcagaagctgatcagatagaatgggctattcaagatagcttcaacccgcaagaaacttctcgttgtcgtcagcgagaggaggatgatcagatagcgcgtggtttgcaatatgtggaagaaactgagcttgataaatcagttgtggacgaagaagatcagcagctttctaagattgttgaggagagtttgaaggagaaaggcaaaagtaagcaatttgaagatgatcaagtggaaaatgatgaacagcaagctctgatggttcaggagagtctatacatggtggagctttctgctcaacttgaagaagataaaaacatttcaacaatacctccgctgaatgaagatgcgcagcttcagaaggttatttgggaaagcgcgaagggtaaaggccaaatagagcatttcaaagatccagtggaagaagatggaaatcttccaagggtagatctcaacgttaaccatcctcatagcatatgtgatggttgcaaatctgcgattgaatatggaagatctgttcatgccttgggtgttaattggcatcctgaatgtttctgttgtcgttattgcgacaaaccaatcgctatgcacgagtttcctggtagaaagtataaagaacatcccttctggaaggaaaagtactgcccttttcatgaagttgatggaactcccaagtgttgcagttgtgaaagattagagccctggggaacgaagtatgtaatgcttgctgacaatcggtggctatgcgtaaaatgtatggaatgcgcggttatggatacttatgagtgccaaccattgcactttgaaatccgtgaattcttcggaagcttaaacatgaaggttgagaaagaattccctcttcttttggtggagaaagaagcgctgaaaaaagctgaggcgcaagaaaagatcgacaatcagcatggggttgtaaccagaggtatttgcctgtctgaagggcagattgtcaatagtgtctttaaaaagccaaccatggggccaaacggcgagctagtaagcttgggtacagaacctcaaaaggttgttggtggatgtgaggtcactgcaattctcatcctatatggacttcctaggttactaactggatatatcttggctcatgagatgatgcatgcttggcttagactcaatggttataggaatcttaagttagagctggaagaaggaatatgccaagtgctaggccacatgtggttggagtcacagacatactccagttctgcagctgcatcatcagcttcttcttcttcgaggactccagctgctaatgcatcaaagaaaggtgctcaatctgattacgagaagaaactggtggaattttgcaaggatcagatagaaacagacgattcaccggtctacggtgttggattcaggaaagttaaccagatggtctcagactccagcctccataaaatcctgaaaagtattcaacactggacgaaaccagattcaaatctttga

SEQ ID NO: 86335 - protein, 534 aa, Arabidopsis thaliana
  peptide (1)..(534): Ceres Seq. ID no. 12688862
  misc_feature (201)..(275): Pfam Name: LIM domain Pfam Description: LIM domain
  misc_feature (1)..(534): Homolog of NCBI NO: 15240017 NR Description: putative protein; protein id: At5g66610.1 thaliana] >gi|10177542|dbj|BAB10937.1|
  misc_feature (37)..(524): Homolog of NCBI NO: 15240018 NR Description: putative protein; protein id: At5g66620.1 thaliana] >gi|10177543|dbj|BAB10938.1|
  misc_feature (110)..(534): Homolog of NCBI NO: 30698242 NR Description: expressed protein [Arabidopsis thaliana]
  misc_feature (110)..(534): Homolog of NCBI NO: 8843722 NR Description: emb|CAB16816.1~gene_id:MSN2.2~similar to unknown
  misc_feature (92)..(524): Homolog of NCBI NO: 27808630 NR Description: At5g66630 [Arabidopsis thaliana]
  misc_feature (92)..(524): Homolog of NCBI NO: 30698240 NR Description: expressed protein [Arabidopsis thaliana]
  misc_feature (38)..(524): Homolog of NCBI NO: 22326876 NR Description: disease resistance protein (TIR-NBS-LRR class), protein id: At5g17890.1, supported by cDNA: gi_19310532
  misc_feature (222)..(524): Homolog of NCBI NO: 10177891 NR Description: emb|CAB16816.1|~gene_id:MPI7.6~similar to unknown
  misc_feature (44)..(525): Homolog of NCBI NO: 25407769 NR Description: hypothetical protein AT4g36860 [imported] - thaliana >gi|4006886|emb|CAB16816.1| putative protein thaliana] >gi|7270635|emb|CAB80352.1| putative protein
  misc_feature (196)..(525): Homolog of NCBI NO: 17065046 NR Description: Unknown protein [Arabidopsis thaliana]
MWCLSCFKPSTKHDPSEDRFEEETNIVTGISLYEDVILRQRRSEADQIEWAIQDSFNPQETSRCRQREEDDQIARGLQYVEETELDKSVVDEEDQQLSKIVEESLKEKGKSKQFEDDQVENDEQQALMVQESLYMVELSAQLEEDKNISTIPPLNEDAQLQKVIWESAKGKGQIEHFKDPVEEDGNLPRVDLNVNHPHSICDGCKSAIEYGRSVHALGVNWHPECFCCRYCDKPIAMHEFPGRKYKEHPFWKEKYCPFHEVDGTPKCCSCERLEPWGTKYVMLADNRWLCVKCMECAVMDTYECQPLHFEIREFFGSLNMKVEKEFPLLLVEKEALKKAEAQEKIDNQHGVVTRGICLSEGQIVNSVFKKPTMGPNGELVSLGTEPQKVVGGCEVTAILILYGLPRLLTGYILAHEMMHAWLRLNGYRNLKLELEEGICQVLGHMWLESQTYSSSAAASSASSSSRTPAANASKKGAQSDYEKKLVEFCKDQIETDDSPVYGVGFRKVNQMVSDSSLHKILKSIQHWTKPDSNL

SEQ ID NO: 86336 - protein, 407 aa, Arabidopsis thaliana
  peptide (1)..(407): Ceres Seq. ID no. 12688863
  misc_feature (74)..(148): Pfam Name: LIM domain Pfam Description: LIM domain
  misc_feature (1)..(407): Homolog of NCBI NO: 15240017 NR Description: putative protein; protein id: At5g66610.1 thaliana] >gi|10177542|dbj|BAB10937.1|
  misc_feature (1)..(397): Homolog of NCBI NO: 15240018 NR Description: putative protein; protein id: At5g66620.1 thaliana] >gi|10177543|dbj|BAB10938.1|
  misc_feature (1)..(407): Homolog of NCBI NO: 30698242 NR Description: expressed protein [Arabidopsis thaliana]
  misc_feature (1)..(407): Homolog of NCBI NO: 8843722 NR Description: emb|CAB16816.1~gene_id:MSN2.2~similar to unknown
  misc_feature (1)..(397): Homolog of NCBI NO: 27808630 NR Description: At5g66630 [Arabidopsis thaliana]
  misc_feature (1)..(397): Homolog of NCBI NO: 30698240 NR Description: expressed protein [Arabidopsis thaliana]
  misc_feature (1)..(397): Homolog of NCBI NO: 22326876 NR Description: disease resistance protein (TIR-NBS-LRR class), protein id: At5g17890.1, supported by cDNA: gi_19310532
  misc_feature (95)..(397): Homolog of NCBI NO: 10177891 NR Description: emb|CAB16816.1|~gene_id:MPI7.6~similar to unknown
  misc_feature (1)..(398): Homolog of NCBI NO: 25407769 NR Description: hypothetical protein AT4g36860 [imported] - thaliana >gi|4006886|emb|CAB16816.1| putative protein thaliana] >gi|7270635|emb|CAB80352.1| putative protein
  misc_feature (69)..(398): Homolog of NCBI NO: 17065046 NR Description: Unknown protein [Arabidopsis thaliana]
MVQESLYMVELSAQLEEDKNISTIPPLNEDAQLQKVIWESAKGKGQIEHFKDPVEEDGNLPRVDLNVNHPHSICDGCKSAIEYGRSVHALGVNWHPECFCCRYCDKPIAMHEFPGRKYKEHPFWKEKYCPFHEVDGTPKCCSCERLEPWGTKYVMLADNRWLCVKCMECAVMDTYECQPLHFEIREFFGSLNMKVEKEFPLLLVEKEALKKAEAQEKIDNQHGVVTRGICLSEGQIVNSVFKKPTMGPNGELVSLGTEPQKVVGGCEVTAILILYGLPRLLTGYILAHEMMHAWLRLNGYRNLKLELEEGICQVLGHMWLESQTYSSSAAASSASSSSRTPAANASKKGAQSDYEKKLVEFCKDQIETDDSPVYGVGFRKVNQMVSDSSLHKILKSIQHWTKPDSNL

SEQ ID NO: 86337 - protein, 400 aa, Arabidopsis thaliana
  peptide (1)..(400): Ceres Seq. ID no. 12688864
  misc_feature (67)..(141): Pfam Name: LIM domain Pfam Description: LIM domain
  misc_feature (1)..(400): Homolog of NCBI NO: 15240017 NR Description: putative protein; protein id: At5g66610.1 thaliana] >gi|10177542|dbj|BAB10937.1|
  misc_feature (1)..(390): Homolog of NCBI NO: 15240018 NR Description: putative protein; protein id: At5g66620.1 thaliana] >gi|10177543|dbj|BAB10938.1|
  misc_feature (1)..(400): Homolog of NCBI NO: 30698242 NR Description: expressed protein [Arabidopsis thaliana]
  misc_feature (1)..(400): Homolog of NCBI NO: 8843722 NR Description: emb|CAB16816.1~gene_id:MSN2.2~similar to unknown
  misc_feature (1)..(390): Homolog of NCBI NO: 27808630 NR Description: At5g66630 [Arabidopsis thaliana]
  misc_feature (1)..(390): Homolog of NCBI NO: 30698240 NR Description: expressed protein [Arabidopsis thaliana]
  misc_feature (1)..(390): Homolog of NCBI NO: 22326876 NR Description: disease resistance protein (TIR-NBS-LRR class), protein id: At5g17890.1, supported by cDNA: gi_19310532
  misc_feature (88)..(390): Homolog of NCBI NO: 10177891 NR Description: emb|CAB16816.1|~gene_id:MPI7.6~similar to unknown
  misc_feature (1)..(391): Homolog of NCBI NO: 25407769 NR Description: hypothetical protein AT4g36860 [imported] - thaliana >gi|4006886|emb|CAB16816.1| putative protein thaliana] >gi|7270635|emb|CAB80352.1| putative protein
  misc_feature (62)..(391): Homolog of NCBI NO: 17065046 NR Description: Unknown protein [Arabidopsis thaliana]
MVELSAQLEEDKNISTIPPLNEDAQLQKVIWESAKGKGQIEHFKDPVEEDGNLPRVDLNVNHPHSICDGCKSAIEYGRSVHALGVNWHPECFCCRYCDKPIAMHEFPGRKYKEHPFWKEKYCPFHEVDGTPKCCSCERLEPWGTKYVMLADNRWLCVKCMECAVMDTYECQPLHFEIREFFGSLNMKVEKEFPLLLVEKEALKKAEAQEKIDNQHGVVTRGICLSEGQIVNSVFKKPTMGPNGELVSLGTEPQKVVGGCEVTAILILYGLPRLLTGYILAHEMMHAWLRLNGYRNLKLELEEGICQVLGHMWLESQTYSSSAAASSASSSSRTPAANASKKGAQSDYEKKLVEFCKDQIETDDSPVYGVGFRKVNQMVSDSSLHKILKSIQHWTKPDSNL

SEQ ID NO: 86338 - DNA, 966 bp, Arabidopsis thaliana
  misc_feature (1)..(966): Ceres Seq. ID no. 12688873
  misc_feature: MA Experiment ID: 20000166 Result: Up-regulated in Transcription
  misc_feature: MA Experiment 20000166 PARAMETER Experiment Name: At_100uM_ABA_P Parameter: Age (day) Value: 14
  misc_feature: MA Experiment 20000166 PARAMETER Experiment Name: At_100uM_ABA_P Parameter: Organism Value: A. thaliana
  misc_feature: MA Experiment 20000166 PARAMETER Experiment Name: At_100uM_ABA_P Parameter: Plant Line Value: WS
  misc_feature: MA Experiment 20000166 PARAMETER Experiment Name: At_100uM_ABA_P Parameter: Timepoint (hr) Value: 1
  misc_feature: MA Experiment 20000166 PARAMETER Experiment Name: At_100uM_ABA_P Parameter: Tissue Value: Aerial
  misc_feature: MA Experiment 20000166 PARAMETER Experiment Name: At_100uM_ABA_P Parameter: Treatment Value: 100uM ABA vs. No Treatment
  misc_feature: MA Experiment ID: 20000227 Result: Down-regulated in Transcription
  misc_feature: MA Experiment 20000227 PARAMETER Experiment Name: At_Root-Tips-vs-Tops_P Parameter: Tissue Value: Root Tips vs. Root Tops
  misc_feature: MA Experiment ID: 20000460 Result: Up-regulated in Transcription
  misc_feature: MA Experiment 20000460 PARAMETER Experiment Name: At_10percent_PEG_P Parameter: Age (day) Value: 12
  misc_feature: MA Experiment 20000460 PARAMETER Experiment Name: At_10percent_PEG_P Parameter: Organism Value: A. thaliana
  misc_feature: MA Experiment 20000460 PARAMETER Experiment Name: At_10percent_PEG_P Parameter: Plant Line Value: WS
  misc_feature: MA Experiment 20000460 PARAMETER Experiment Name: At_10percent_PEG_P Parameter: Timepoint (day) Value: 12
  misc_feature: MA Experiment 20000460 PARAMETER Experiment Name: At_10percent_PEG_P Parameter: Tissue Value: Whole Plant
  misc_feature: MA Experiment 20000460 PARAMETER Experiment Name: At_10percent_PEG_P Parameter: Treatment Value: 10percent PEG vs. No Treatment
  misc_feature: MA Experiment ID: 20000527 Result: Up-regulated in Transcription
  misc_feature: MA Experiment 20000527 PARAMETER Experiment Name: At_10percent_PEG_P Parameter: Age (day) Value: 20
  misc_feature: MA Experiment 20000527 PARAMETER Experiment Name: At_10percent_PEG_P Parameter: Organism Value: A. thaliana
  misc_feature: MA Experiment 20000527 PARAMETER Experiment Name: At_10percent_PEG_P Parameter: Plant Line Value: WS
  misc_feature: MA Experiment 20000527 PARAMETER Experiment Name: At_10percent_PEG_P Parameter: Timepoint (day) Value: 20
  misc_feature: MA Experiment 20000527 PARAMETER Experiment Name: At_10percent_PEG_P Parameter: Tissue Value: Whole Plant
  misc_feature: MA Experiment 20000527 PARAMETER Experiment Name: At_10percent_PEG_P Parameter: Treatment Value: 10percent PEG vs. No Treatment
  misc_feature: MA Experiment ID: 20000573 Result: Down-regulated in Transcription
  misc_feature: MA Experiment 20000573 PARAMETER Experiment Name: At_100uM_ABA_Mutants__P Parameter: Organism Value: A. thaliana
  misc_feature: MA Experiment 20000573 PARAMETER Experiment Name: At_100uM_ABA_Mutants__P Parameter: Plant Line Value: CS22 vs. Ler wt
  misc_feature: MA Experiment 20000573 PARAMETER Experiment Name: At_100uM_ABA_Mutants__P Parameter: Timepoint (hr) Value: N/A
  misc_feature: MA Experiment 20000573 PARAMETER Experiment Name: At_100uM_ABA_Mutants__P Parameter: Tissue Value: Whole Plant
  misc_feature: MA Experiment 20000573 PARAMETER Experiment Name: At_100uM_ABA_Mutants__P Parameter: Treatment Value: None
  misc_feature: MA Experiment ID: 20000574 Result: Down-regulated in Transcription
  misc_feature: MA Experiment 20000574 PARAMETER Experiment Name: At_100uM_ABA_Mutants__P Parameter: Organism Value: A. thaliana
  misc_feature: MA Experiment 20000574 PARAMETER Experiment Name: At_100uM_ABA_Mutants__P Parameter: Plant Line Value: CS23 vs. Ler wt
  misc_feature: MA Experiment 20000574 PARAMETER Experiment Name: At_100uM_ABA_Mutants__P Parameter: Timepoint (hr) Value: N/A
  misc_feature: MA Experiment 20000574 PARAMETER Experiment Name: At_100uM_ABA_Mutants__P Parameter: Tissue Value: Whole Plant
  misc_feature: MA Experiment 20000574 PARAMETER Experiment Name: At_100uM_ABA_Mutants__P Parameter: Treatment Value: None
  misc_feature: MA Experiment ID: 20000794 Result: Down-regulated in Transcription
  misc_feature: MA Experiment 20000794 PARAMETER Experiment Name: At_Petals_P Parameter: Age (day) Value: 23-25 days
  misc_feature: MA Experiment 20000794 PARAMETER Experiment Name: At_Petals_P Parameter: Plant Line Value: WS
  misc_feature: MA Experiment 20000794 PARAMETER Experiment Name: At_Petals_P Parameter: Tissue Value: Petals vs. Whole plant
  misc_feature: MA Experiment ID: 20001247 Result: Up-regulated in Transcription
  misc_feature: MA Experiment 20001247 PARAMETER Experiment Name: At_Far-red-induction_P Parameter: Age (day) Value: 7
  misc_feature: MA Experiment 20001247 PARAMETER Experiment Name: At_Far-red-induction_P Parameter: Light Value: Far-red vs. White
  misc_feature: MA Experiment 20001247 PARAMETER Experiment Name: At_Far-red-induction_P Parameter: Organism Value: A. thaliana
  misc_feature: MA Experiment 20001247 PARAMETER Experiment Name: At_Far-red-induction_P Parameter: Plant Line Value: Columbia
  misc_feature: MA Experiment 20001247 PARAMETER Experiment Name: At_Far-red-induction_P Parameter: Timepoint (hr) Value: 1
  misc_feature: MA Experiment 20001247 PARAMETER Experiment Name: At_Far-red-induction_P Parameter: Tissue Value: Whole Plant
  misc_feature: MA Experiment ID: 20001248 Result: Up-regulated in Transcription
  misc_feature: MA Experiment 20001248 PARAMETER Experiment Name: At_Far-red-induction_P Parameter: Age (day) Value: 7
  misc_feature: MA Experiment 20001248 PARAMETER Experiment Name: At_Far-red-induction_P Parameter: Light Value: Far-red vs. White
  misc_feature: MA Experiment 20001248 PARAMETER Experiment Name: At_Far-red-induction_P Parameter: Organism Value: A. thaliana
  misc_feature: MA Experiment 20001248 PARAMETER Experiment Name: At_Far-red-induction_P Parameter: Plant Line Value: Columbia
  misc_feature: MA Experiment 20001248 PARAMETER Experiment Name: At_Far-red-induction_P Parameter: Timepoint (hr) Value: 4
  misc_feature: MA Experiment 20001248 PARAMETER Experiment Name: At_Far-red-induction_P Parameter: Tissue Value: Whole Plant
  misc_feature: MA Experiment ID: 20001450 Result: Up-regulated in Transcription
  misc_feature: MA Experiment 20001450 PARAMETER Experiment Name: At_Far-red-induction_P Parameter: Age (day) Value: 7
  misc_feature: MA Experiment 20001450 PARAMETER Experiment Name: At_Far-red-induction_P Parameter: Light Value: Far-red vs. White
  misc_feature: MA Experiment 20001450 PARAMETER Experiment Name: At_Far-red-induction_P Parameter: Organism Value: A. thaliana
  misc_feature: MA Experiment 20001450 PARAMETER Experiment Name: At_Far-red-induction_P Parameter: Plant Line Value: Columbia
  misc_feature: MA Experiment 20001450 PARAMETER Experiment Name: At_Far-red-induction_P Parameter: Timepoint (hr) Value: 8
  misc_feature: MA Experiment 20001450 PARAMETER Experiment Name: At_Far-red-induction_P Parameter: Tissue Value: Whole Plant
  misc_feature: MA Experiment ID: 20001757 Result: Down-regulated in Transcription
  misc_feature: MA Experiment 20001757 PARAMETER Experiment Name: At_50mM_NH4NO3_L-to-H_P Parameter: Timepoint (hr) Value: 6
  misc_feature: MA Experiment 20001757 PARAMETER Experiment Name: At_50mM_NH4NO3_L-to-H_P Parameter: Tissue Value: Leaf
  misc_feature: MA Experiment 20001757 PARAMETER Experiment Name: At_50mM_NH4NO3_L-to-H_P Parameter: Treatment Value: 50mM NH4NO3 vs 100mM Mannitol
  misc_feature: MA Experiment ID: 20001905 Result: Up-regulated in Transcription
  misc_feature: MA Experiment 20001905 PARAMETER Experiment Name: At_Drought_Reproduction_P Parameter: Age (day) Value: 40
  misc_feature: MA Experiment 20001905 PARAMETER Experiment Name: At_Drought_Reproduction_P Parameter: Organism Value: A. thaliana
  misc_feature: MA Experiment 20001905 PARAMETER Experiment Name: At_Drought_Reproduction_P Parameter: Plant Line Value: WS
  misc_feature: MA Experiment 20001905 PARAMETER Experiment Name: At_Drought_Reproduction_P Parameter: Timepoint (day) Value: 10
  misc_feature: MA Experiment 20001905 PARAMETER Experiment Name: At_Drought_Reproduction_P Parameter: Tissue Value: Rosettes
  misc_feature: MA Experiment 20001905 PARAMETER Experiment Name: At_Drought_Reproduction_P Parameter: Treatment Value: Drought vs. No Drought
atgtcgtcgaagaaatccctagttcaaagtctcttcaacatttccaaaacctactccaggatttctggtcttacccgaatgcgtccgaccaaatccggcggcattcctcccgacgccggagattctggaatccgccgcagatttctccacaagagggcatttttctcgccggagatagttcctaaaggtggtaacttgatggagaaactcagggaattgactttgtccaataataatcgtattagactcgacgagatgttaccgccaccttcgccgaagaaatcatcaccggagtttttcccggcggtcacggtggaagacgtgaagaagctcatgagagcagcggaaatggagctggtgaaatcgaagctgagagagattggcaagaactgggttccttattcggagtttgttcgggtctgcggagaatacagttcggatcctgaacaaggtaaccgggtcgcgaatatgcttgacgaagctggaaacgtcatcgttttgggaaaactcgtctgccttaaacccgaagagctaacaagcgccatggctggtctgattccgacactcgaacccagtctcgacgccgagacaagacaagagttcgaacaacttgagatcataaaatcagatatcgacaaaagagccgatgatctggttcgaaaagaattatgggccggattaggcctaataatggcccaaacagttggattttttaggctgacgttttgggaactgtcgtgggacgtgatggaacccatatgcttctacgtaacttcgacatatttcatggctggttacgccttcttcctccgaacttcaaaggaaccttcctttgaaggtttttacaaaagccggttcgagacgaagcagaaacgtttgattaaaatgcttgatttcgatatcgatcgatttaccaagctacagaagatgcatcgtccaaatttgactaaatctggtcgttgttga

SEQ ID NO: 86339 - protein, 321 aa, Arabidopsis thaliana
  peptide (1)..(321): Ceres Seq. ID no. 12688874
  misc_feature (140)..(320): Pfam Name: Protein of unknown function, DUF607 Pfam Description: Protein of unknown function, DUF607
  misc_feature (1)..(321): Homolog of NCBI NO: 15240047 NR Description: putative protein; protein id: At5g66650.1, by cDNA: gi_14596230 [Arabidopsis thaliana] contains similarity to unknown
  misc_feature (1)..(321): Homolog of NCBI NO: 14596231 NR Description: Unknown protein [Arabidopsis thaliana]
  misc_feature (9)..(310): Homolog of NCBI NO: 15224063 NR Description: hypothetical protein; protein id: At2g23790.1
  misc_feature (9)..(310): Homolog of NCBI NO: 24496456 NR Description: hypothetical protein [Arabidopsis thaliana]
  misc_feature (5)..(313): Homolog of NCBI NO: 15234535 NR Description: putative protein; protein id: At4g36820.1
  misc_feature (36)..(309): Homolog of NCBI NO: 37535778 NR Description: unknown protein [Oryza sativa (japonica
  misc_feature (79)..(309): Homolog of NCBI NO: 20330769 NR Description: Hypothetical protein [Oryza sativa (japonica
  misc_feature (81)..(310): Homolog of NCBI NO: 15239011 NR Description: unknown protein; protein id: At5g42610.1 thaliana] >gi|10177139|dbj|BAB10499.1| gene_id:MFO20.2~unknown
  misc_feature (103)..(317): Homolog of NCBI NO: 34909244 NR Description: B1148D12.10 [Oryza sativa (japonica
  misc_feature (91)..(312): Homolog of NCBI NO: 18391039 NR Description: Expressed protein; protein id: At1g09575.1,
MSSKKSLVQSLFNISKTYSRISGLTRMRPTKSGGIPPDAGDSGIRRRFLHKRAFFSPEIVPKGGNLMEKLRELTLSNNNRIRLDEMLPPPSPKKSSPEFFPAVTVEDVKKLMRAAEMELVKSKLREIGKNWVPYSEFVRVCGEYSSDPEQGNRVANMLDEAGNVIVLGKLVCLKPEELTSAMAGLIPTLEPSLDAETRQEFEQLEIIKSDIDKRADDLVRKELWAGLGLIMAQTVGFFRLTFWELSWDVMEPICFYVTSTYFMAGYAFFLRTSKEPSFEGFYKSRFETKQKRLIKMLDFDIDRFTKLQKMHRPNLTKSGRC

SEQ ID NO: 86340 - protein, 295 aa, Arabidopsis thaliana
  peptide (1)..(295): Ceres Seq. ID no. 12688875
  misc_feature (114)..(294): Pfam Name: Protein of unknown function, DUF607 Pfam Description: Protein of unknown function, DUF607
  misc_feature (1)..(295): Homolog of NCBI NO: 15240047 NR Description: putative protein; protein id: At5g66650.1, by cDNA: gi_14596230 [Arabidopsis thaliana] contains similarity to unknown
  misc_feature (1)..(295): Homolog of NCBI NO: 14596231 NR Description: Unknown protein [Arabidopsis thaliana]
  misc_feature (1)..(284): Homolog of NCBI NO: 15224063 NR Description: hypothetical protein; protein id: At2g23790.1
  misc_feature (1)..(284): Homolog of NCBI NO: 24496456 NR Description: hypothetical protein [Arabidopsis thaliana]
  misc_feature (1)..(287): Homolog of NCBI NO: 15234535 NR Description: putative protein; protein id: At4g36820.1
  misc_feature (10)..(283): Homolog of NCBI NO: 37535778 NR Description: unknown protein [Oryza sativa (japonica
  misc_feature (53)..(283): Homolog of NCBI NO: 20330769 NR Description: Hypothetical protein [Oryza sativa (japonica
  misc_feature (55)..(284): Homolog of NCBI NO: 15239011 NR Description: unknown protein; protein id: At5g42610.1 thaliana] >gi|10177139|dbj|BAB10499.1| gene_id:MFO20.2~unknown
  misc_feature (77)..(291): Homolog of NCBI NO: 34909244 NR Description: B1148D12.10 [Oryza sativa (japonica
  misc_feature (65)..(286): Homolog of NCBI NO: 18391039 NR Description: Expressed protein; protein id: At1g09575.1,
MRPTKSGGIPPDAGDSGIRRRFLHKRAFFSPEIVPKGGNLMEKLRELTLSNNNRIRLDEMLPPPSPKKSSPEFFPAVTVEDVKKLMRAAEMELVKSKLREIGKNWVPYSEFVRVCGEYSSDPEQGNRVANMLDEAGNVIVLGKLVCLKPEELTSAMAGLIPTLEPSLDAETRQEFEQLEIIKSDIDKRADDLVRKELWAGLGLIMAQTVGFFRLTFWELSWDVMEPICFYVTSTYFMAGYAFFLRTSKEPSFEGFYKSRFETKQKRLIKMLDFDIDRFTKLQKMHRPNLTKSGRC

SEQ ID NO: 86341 - protein, 255 aa, Arabidopsis thaliana
  peptide (1)..(255): Ceres Seq. ID no. 12688876
  misc_feature (74)..(254): Pfam Name: Protein of unknown function, DUF607 Pfam Description: Protein of unknown function, DUF607
  misc_feature (1)..(255): Homolog of NCBI NO: 15240047 NR Description: putative protein; protein id: At5g66650.1, by cDNA: gi_14596230 [Arabidopsis thaliana] contains similarity to unknown
  misc_feature (1)..(255): Homolog of NCBI NO: 14596231 NR Description: Unknown protein [Arabidopsis thaliana]
  misc_feature (1)..(244): Homolog of NCBI NO: 15224063 NR Description: hypothetical protein; protein id: At2g23790.1
  misc_feature (1)..(244): Homolog of NCBI NO: 24496456 NR Description: hypothetical protein [Arabidopsis thaliana]
  misc_feature (1)..(247): Homolog of NCBI NO: 15234535 NR Description: putative protein; protein id: At4g36820.1
  misc_feature (1)..(243): Homolog of NCBI NO: 37535778 NR Description: unknown protein [Oryza sativa (japonica
  misc_feature (13)..(243): Homolog of NCBI NO: 20330769 NR Description: Hypothetical protein [Oryza sativa (japonica
  misc_feature (15)..(244): Homolog of NCBI NO: 15239011 NR Description: unknown protein; protein id: At5g42610.1 thaliana] >gi|10177139|dbj|BAB10499.1| gene_id:MFO20.2~unknown
  misc_feature (37)..(251): Homolog of NCBI NO: 34909244 NR Description: B1148D12.10 [Oryza sativa (japonica
  misc_feature (25)..(246): Homolog of NCBI NO: 18391039 NR Description: Expressed protein; protein id: At1g09575.1,
MEKLRELTLSNNNRIRLDEMLPPPSPKKSSPEFFPAVTVEDVKKLMRAAEMELVKSKLREIGKNWVPYSEFVRVCGEYSSDPEQGNRVANMLDEAGNVIVLGKLVCLKPEELTSAMAGLIPTLEPSLDAETRQEFEQLEIIKSDIDKRADDLVRKELWAGLGLIMAQTVGFFRLTFWELSWDVMEPICFYVTSTYFMAGYAFFLRTSKEPSFEGFYKSRFETKQKRLIKMLDFDIDRFTKLQKMHRPNLTKSGRC

SEQ ID NO: 86342 - DNA, 1263 bp, Arabidopsis thaliana
  misc_feature (1)..(1263): Ceres Seq. ID no. 12688884
atgagacctcgcgggtatcaacgagctccgtcaatgcagaaaccaacagattatccgacggataagacgcttcatccgaattacccatttctcatgtcctctcatggtctcaagtcctttgaatcggacgacgaagacgacgactccgactcctccaacgatcaattcgctttcactatcaacacagagttgcttgtcgatgtcaaagacatatctataggggacttcatcggcgaaggttcatcatctactgtctacagaggattgtgggtttctcgtttctcaatctcctacttcgaaattgcttctgggttcaggagagttgtccctgtgtctgtgaagatattccagcctaaaagaacatctgctttaagcattgagcagaggaagaagtttcagagagaggttttgctgctttccaagtttagacatgaaaacattgtgcggttcattggggcgtgcatagaaccaaagttgatgataattactgaactcatggaaggcaatactcttcagaagtttatgttgagtgttcgtccaaagcctcttgatctgaagctctccattagctttgcgttggatattgctcggggaatggagttcttgaatgcaaatggcattattcaccgagatttgaaaccaagtaatatgctcttaacaggtgatcagaaacatgtaaagttggctgactttggacttgctagagaggagactaaaggtttcatgacctttgaggctggtacatacagatggatggctccagagttattcagctatgacacgcttgaaattggcgaaaagaaacactacgatcataaggtggacgtttacagtttcgccattgttttctgggagttacttaccaacaaaaccccattcaaaggaaagaacaacatctttgtagcttatgctgccagcaaaaaccagagaccaagtgtggagaatcttccagaaggcgttgtttctatcctgcaatcatgctgggcagagaatcctgacgctcgtcctgagtttaaagaaattacatattcactaacaaacttgctcagaagcttaagctcagacactgatgctacttcatccaatagcaaagccaatatagctaccgaggattcaacaagcagtctggttcaagaacgtgttgtctgtgattgtcccggactaaagatgagcaagacgaagaagctgaagaagaagacgaataaactgatgaatatgatcgtcccttttctcaagatcttcaaaagttgtatgtccaagtga

SEQ ID NO: 86343 - protein, 420 aa, Arabidopsis thaliana
  peptide (1)..(420): Ceres Seq. ID no. 12688885
  misc_feature (1)..(420): Homolog of NCBI NO: 15240070 NR Description: protein kinase ATN1-like protein; protein id:
  misc_feature (29)..(416): Homolog of NCBI NO: 15230295 NR Description: protein kinase ATN1 -like protein; protein id:
  misc_feature (49)..(415): Homolog of NCBI NO: 15230296 NR Description: protein kinase ATN1 - like protein; protein id:
  misc_feature (58)..(395): Homolog of NCBI NO: 15240630 NR Description: protein kinase ATN1-like protein; protein id:
  misc_feature (58)..(353): Homolog of NCBI NO: 32815816 NR Description: protein kinase [Cucumis sativus]
  misc_feature (58)..(354): Homolog of NCBI NO: 2129698 NR Description: protein kinase ATN1 (EC 2.7.1.-) - Arabidopsis
  misc_feature (58)..(354): Homolog of NCBI NO: 15232197 NR Description: putative protein kinase, ATN1; protein id: supported by cDNA: gi_16604327, supported by cDNA: gi_19699189 thaliana] >gi|11994183|dbj|BAB01286.1| nearly identical to
  misc_feature (58)..(372): Homolog of NCBI NO: 15237443 NR Description: protein kinase - like protein; protein id: [Arabidopsis thaliana] >gi|9758080|dbj|BAB08524.1| protein kinase
  misc_feature (59)..(353): Homolog of NCBI NO: 30679428 NR Description: protein kinase, putative [Arabidopsis thaliana]
  misc_feature (60)..(376): Homolog of NCBI NO: 28876011 NR Description: putative protein kinase [Oryza sativa (japonica
MRPRGYQRAPSMQKPTDYPTDKTLHPNYPFLMSSHGLKSFESDDEDDDSDSSNDQFAFTINTELLVDVKDISIGDFIGEGSSSTVYRGLWVSRFSISYFEIASGFRRVVPVSVKIFQPKRTSALSIEQRKKFQREVLLLSKFRHENIVRFIGACIEPKLMIITELMEGNTLQKFMLSVRPKPLDLKLSISFALDIARGMEFLNANGIIHRDLKPSNMLLTGDQKHVKLADFGLAREETKGFMTFEAGTYRWMAPELFSYDTLEIGEKKHYDHKVDVYSFAIVFWELLTNKTPFKGKNNIFVAYAASKNQRPSVENLPEGVVSILQSCWAENPDARPEFKEITYSLTNLLRSLSSDTDATSSNSKANIATEDSTSSLVQERVVCDCPGLKMSKTKKLKKKTNKLMNMIVPFLKIFKSCMSK

SEQ ID NO: 86344 - protein, 409 aa, Arabidopsis thaliana
  peptide (1)..(409): Ceres Seq. ID no. 12688886
  misc_feature (1)..(409): Homolog of NCBI NO: 15240070 NR Description: protein kinase ATN1-like protein; protein id:
  misc_feature (18)..(405): Homolog of NCBI NO: 15230295 NR Description: protein kinase ATN1 -like protein; protein id:
  misc_feature (38)..(404): Homolog of NCBI NO: 15230296 NR Description: protein kinase ATN1 - like protein; protein id:
  misc_feature (47)..(384): Homolog of NCBI NO: 15240630 NR Description: protein kinase ATN1-like protein; protein id:
  misc_feature (47)..(342): Homolog of NCBI NO: 32815816 NR Description: protein kinase [Cucumis sativus]
  misc_feature (47)..(343): Homolog of NCBI NO: 2129698 NR Description: protein kinase ATN1 (EC 2.7.1.-) - Arabidopsis
  misc_feature (47)..(343): Homolog of NCBI NO: 15232197 NR Description: putative protein kinase, ATN1; protein id: supported by cDNA: gi_16604327, supported by cDNA: gi_19699189 thaliana] >gi|11994183|dbj|BAB01286.1| nearly identical to
  misc_feature (47)..(361): Homolog of NCBI NO: 15237443 NR Description: protein kinase - like protein; protein id: [Arabidopsis thaliana] >gi|9758080|dbj|BAB08524.1| protein kinase
  misc_feature (48)..(342): Homolog of NCBI NO: 30679428 NR Description: protein kinase, putative [Arabidopsis thaliana]
  misc_feature (49)..(365): Homolog of NCBI NO: 28876011 NR Description: putative protein kinase [Oryza sativa (japonica
MQKPTDYPTDKTLHPNYPFLMSSHGLKSFESDDEDDDSDSSNDQFAFTINTELLVDVKDISIGDFIGEGSSSTVYRGLWVSRFSISYFEIASGFRRVVPVSVKIFQPKRTSALSIEQRKKFQREVLLLSKFRHENIVRFIGACIEPKLMIITELMEGNTLQKFMLSVRPKPLDLKLSISFALDIARGMEFLNANGIIHRDLKPSNMLLTGDQKHVKLADFGLAREETKGFMTFEAGTYRWMAPELFSYDTLEIGEKKHYDHKVDVYSFAIVFWELLTNKTPFKGKNNIFVAYAASKNQRPSVENLPEGVVSILQSCWAENPDARPEFKEITYSLTNLLRSLSSDTDATSSNSKANIATEDSTSSLVQERVVCDCPGLKMSKTKKLKKKTNKLMNMIVPFLKIFKSCMSK

SEQ ID NO: 86345 - protein, 389 aa, Arabidopsis thaliana
  peptide (1)..(389): Ceres Seq. ID no. 12688887
  misc_feature (1)..(389): Homolog of NCBI NO: 15240070 NR Description: protein kinase ATN1-like protein; protein id:
  misc_feature (1)..(385): Homolog of NCBI NO: 15230295 NR Description: protein kinase ATN1 -like protein; protein id:
  misc_feature (18)..(384): Homolog of NCBI NO: 15230296 NR Description: protein kinase ATN1 - like protein; protein id:
  misc_feature (27)..(364): Homolog of NCBI NO: 15240630 NR Description: protein kinase ATN1-like protein; protein id:
  misc_feature (27)..(322): Homolog of NCBI NO: 32815816 NR Description: protein kinase [Cucumis sativus]
  misc_feature (27)..(323): Homolog of NCBI NO: 2129698 NR Description: protein kinase ATN1 (EC 2.7.1.-) - Arabidopsis
  misc_feature (27)..(323): Homolog of NCBI NO: 15232197 NR Description: putative protein kinase, ATN1; protein id: supported by cDNA: gi_16604327, supported by cDNA: gi_19699189 thaliana] >gi|11994183|dbj|BAB01286.1| nearly identical to
  misc_feature (27)..(341): Homolog of NCBI NO: 15237443 NR Description: protein kinase - like protein; protein id: [Arabidopsis thaliana] >gi|9758080|dbj|BAB08524.1| protein kinase
  misc_feature (28)..(322): Homolog of NCBI NO: 30679428 NR Description: protein kinase, putative [Arabidopsis thaliana]
  misc_feature (29)..(345): Homolog of NCBI NO: 28876011 NR Description: putative protein kinase [Oryza sativa (japonica
MSSHGLKSFESDDEDDDSDSSNDQFAFTINTELLVDVKDISIGDFIGEGSSSTVYRGLWVSRFSISYFEIASGFRRVVPVSVKIFQPKRTSALSIEQRKKFQREVLLLSKFRHENIVRFIGACIEPKLMIITELMEGNTLQKFMLSVRPKPLDLKLSISFALDIARGMEFLNANGIIHRDLKPSNMLLTGDQKHVKLADFGLAREETKGFMTFEAGTYRWMAPELFSYDTLEIGEKKHYDHKVDVYSFAIVFWELLTNKTPFKGKNNIFVAYAASKNQRPSVENLPEGVVSILQSCWAENPDARPEFKEITYSLTNLLRSLSSDTDATSSNSKANIATEDSTSSLVQERVVCDCPGLKMSKTKKLKKKTNKLMNMIVPFLKIFKSCMSK

SEQ ID NO: 86346 - DNA, 1824 bp, Arabidopsis thaliana
  misc_feature (1)..(1824): Ceres Seq. ID no. 12688888
  misc_feature: MA Experiment ID: 20000184 Result: Down-regulated in Transcription
  misc_feature: MA Experiment 20000184 PARAMETER Experiment Name: At_Shoots__P Parameter: Age (day) Value: 7
  misc_feature: MA Experiment 20000184 PARAMETER Experiment Name: At_Shoots__P Parameter: Tissue Value: Shoots vs. Whole Plant
  misc_feature: MA Experiment ID: 20000185 Result: Down-regulated in Transcription
  misc_feature: MA Experiment 20000185 PARAMETER Experiment Name: At_Roots__P Parameter: Age (day) Value: 7 vs. 21
  misc_feature: MA Experiment 20000185 PARAMETER Experiment Name: At_Roots__P Parameter: Organism Value: A. thaliana
  misc_feature: MA Experiment 20000185 PARAMETER Experiment Name: At_Roots__P Parameter: Tissue Value: Roots vs. Whole Plant
  misc_feature: MA Experiment ID: 20000227 Result: Down-regulated in Transcription
  misc_feature: MA Experiment 20000227 PARAMETER Experiment Name: At_Root-Tips-vs-Tops_P Parameter: Tissue Value: Root Tips vs. Root Tops
  misc_feature: MA Experiment ID: 20000234 Result: Down-regulated in Transcription
  misc_feature: MA Experiment 20000234 PARAMETER Experiment Name: At_Siliques_P Parameter: Age (day) Value: 21
  misc_feature: MA Experiment 20000234 PARAMETER Experiment Name: At_Siliques_P Parameter: Organism Value: A. thaliana
  misc_feature: MA Experiment 20000234 PARAMETER Experiment Name: At_Siliques_P Parameter: Plant Line Value: WS
  misc_feature: MA Experiment 20000234 PARAMETER Experiment Name: At_Siliques_P Parameter: Tissue Value: Less Than 5mm Siliques vs. Whole Plant
  misc_feature: MA Experiment ID: 20000235 Result: Down-regulated in Transcription
  misc_feature: MA Experiment 20000235 PARAMETER Experiment Name: At_Siliques_P Parameter: Age (day) Value: 21
  misc_feature: MA Experiment 20000235 PARAMETER Experiment Name: At_Siliques_P Parameter: Organism Value: A. thaliana
  misc_feature: MA Experiment 20000235 PARAMETER Experiment Name: At_Siliques_P Parameter: Plant Line Value: WS
  misc_feature: MA Experiment 20000235 PARAMETER Experiment Name: At_Siliques_P Parameter: Tissue Value: 5-10mm Siliques vs. Whole Plant
  misc_feature: MA Experiment ID: 20000264 Result: Down-regulated in Transcription
  misc_feature: MA Experiment 20000264 PARAMETER Experiment Name: At_Open_Flower_P Parameter: Age (day) Value: 21
  misc_feature: MA Experiment 20000264 PARAMETER Experiment Name: At_Open_Flower_P Parameter: Plant Line Value: WS
  misc_feature: MA Experiment 20000264 PARAMETER Experiment Name: At_Open_Flower_P Parameter: Tissue Value: Open Flower vs. Whole Plant
  misc_feature: MA Experiment ID: 20000437 Result: Up-regulated in Transcription
  misc_feature: MA Experiment 20000437 PARAMETER Experiment Name: At_Drought_P Parameter: Age (day) Value: 8
  misc_feature: MA Experiment 20000437 PARAMETER Experiment Name: At_Drought_P Parameter: Organism Value: A. thaliana
  misc_feature: MA Experiment 20000437 PARAMETER Experiment Name: At_Drought_P Parameter: Plant Line Value: WS
  misc_feature: MA Experiment 20000437 PARAMETER Experiment Name: At_Drought_P Parameter: Timepoint (hr) Value: 24
  misc_feature: MA Experiment 20000437 PARAMETER Experiment Name: At_Drought_P Parameter: Tissue Value: Whole Plant
  misc_feature: MA Experiment 20000437 PARAMETER Experiment Name: At_Drought_P Parameter: Treatment Value: Drought vs. No Drought
  misc_feature: MA Experiment ID: 20000438 Result: Down-regulated in Transcription
  misc_feature: MA Experiment 20000438 PARAMETER Experiment Name: At_Shoots__P Parameter: Age (day) Value: 14
  misc_feature: MA Experiment 20000438 PARAMETER Experiment Name: At_Shoots__P Parameter: Tissue Value: Shoots vs. Whole Plant
  misc_feature: MA Experiment ID: 20000439 Result: Down-regulated in Transcription
  misc_feature: MA Experiment 20000439 PARAMETER Experiment Name: At_Roots__P Parameter: Age (day) Value: 14 vs. 21
  misc_feature: MA Experiment 20000439 PARAMETER Experiment Name: At_Roots__P Parameter: Organism Value: A. thaliana
  misc_feature: MA Experiment 20000439 PARAMETER Experiment Name: At_Roots__P Parameter: Tissue Value: Roots vs. Whole Plant
  misc_feature: MA Experiment ID: 20000794 Result: Down-regulated in Transcription
  misc_feature: MA Experiment 20000794 PARAMETER Experiment Name: At_Petals_P Parameter: Age (day) Value: 23-25 days
  misc_feature: MA Experiment 20000794 PARAMETER Experiment Name: At_Petals_P Parameter: Plant Line Value: WS
  misc_feature: MA Experiment 20000794 PARAMETER Experiment Name: At_Petals_P Parameter: Tissue Value: Petals vs. Whole plant
  misc_feature: MA Experiment ID: 20001248 Result: Up-regulated in Transcription
  misc_feature: MA Experiment 20001248 PARAMETER Experiment Name: At_Far-red-induction_P Parameter: Age (day) Value: 7
  misc_feature: MA Experiment 20001248 PARAMETER Experiment Name: At_Far-red-induction_P Parameter: Light Value: Far-red vs. White
  misc_feature: MA Experiment 20001248 PARAMETER Experiment Name: At_Far-red-induction_P Parameter: Organism Value: A. thaliana
  misc_feature: MA Experiment 20001248 PARAMETER Experiment Name: At_Far-red-induction_P Parameter: Plant Line Value: Columbia
  misc_feature: MA Experiment 20001248 PARAMETER Experiment Name: At_Far-red-induction_P Parameter: Timepoint (hr) Value: 4
  misc_feature: MA Experiment 20001248 PARAMETER Experiment Name: At_Far-red-induction_P Parameter: Tissue Value: Whole Plant
  misc_feature: MA Experiment ID: 20001450 Result: Up-regulated in Transcription
  misc_feature: MA Experiment 20001450 PARAMETER Experiment Name: At_Far-red-induction_P Parameter: Age (day) Value: 7
  misc_feature: MA Experiment 20001450 PARAMETER Experiment Name: At_Far-red-induction_P Parameter: Light Value: Far-red vs. White
  misc_feature: MA Experiment 20001450 PARAMETER Experiment Name: At_Far-red-induction_P Parameter: Organism Value: A. thaliana
  misc_feature: MA Experiment 20001450 PARAMETER Experiment Name: At_Far-red-induction_P Parameter: Plant Line Value: Columbia
  misc_feature: MA Experiment 20001450 PARAMETER Experiment Name: At_Far-red-induction_P Parameter: Timepoint (hr) Value: 8
  misc_feature: MA Experiment 20001450 PARAMETER Experiment Name: At_Far-red-induction_P Parameter: Tissue Value: Whole Plant
  misc_feature: MA Experiment ID: 20001558 Result: Down-regulated in Transcription
  misc_feature: MA Experiment 20001558 PARAMETER Experiment Name: At_Drought_Soil_Dry_P Parameter: Age (day) Value: 27
  misc_feature: MA Experiment 20001558 PARAMETER Experiment Name: At_Drought_Soil_Dry_P Parameter: Organism Value: A. thaliana
  misc_feature: MA Experiment 20001558 PARAMETER Experiment Name: At_Drought_Soil_Dry_P Parameter: Plant Line Value: WS
  misc_feature: MA Experiment 20001558 PARAMETER Experiment Name: At_Drought_Soil_Dry_P Parameter: Post Timepoint (hr) Value: 6
  misc_feature: MA Experiment 20001558 PARAMETER Experiment Name: At_Drought_Soil_Dry_P Parameter: Post-Treatment Value: Re-Water vs. No Drought
  misc_feature: MA Experiment 20001558 PARAMETER Experiment Name: At_Drought_Soil_Dry_P Parameter: Timepoint (day) Value: 13
  misc_feature: MA Experiment 20001558 PARAMETER Experiment Name: At_Drought_Soil_Dry_P Parameter: Treatment Value: Drought vs. No Drought
  misc_feature: MA Experiment ID: 20001560 Result: Down-regulated in Transcription
  misc_feature: MA Experiment 20001560 PARAMETER Experiment Name: At_Drought_Soil_Dry_P Parameter: Age (day) Value: 28
  misc_feature: MA Experiment 20001560 PARAMETER Experiment Name: At_Drought_Soil_Dry_P Parameter: Organism Value: A. thaliana
  misc_feature: MA Experiment 20001560 PARAMETER Experiment Name: At_Drought_Soil_Dry_P Parameter: Plant Line Value: WS
  misc_feature: MA Experiment 20001560 PARAMETER Experiment Name: At_Drought_Soil_Dry_P Parameter: Post Timepoint (hr) Value: None
  misc_feature: MA Experiment 20001560 PARAMETER Experiment Name: At_Drought_Soil_Dry_P Parameter: Post-Treatment Value: None
  misc_feature: MA Experiment 20001560 PARAMETER Experiment Name: At_Drought_Soil_Dry_P Parameter: Timepoint (day) Value: 14
  misc_feature: MA Experiment 20001560 PARAMETER Experiment Name: At_Drought_Soil_Dry_P Parameter: Treatment Value: Drought vs. No Drought
  misc_feature: MA Experiment ID: 20001905 Result: Down-regulated in Transcription
  misc_feature: MA Experiment 20001905 PARAMETER Experiment Name: At_Drought_Reproduction_P Parameter: Age (day) Value: 40
  misc_feature: MA Experiment 20001905 PARAMETER Experiment Name: At_Drought_Reproduction_P Parameter: Organism Value: A. thaliana
  misc_feature: MA Experiment 20001905 PARAMETER Experiment Name: At_Drought_Reproduction_P Parameter: Plant Line Value: WS
  misc_feature: MA Experiment 20001905 PARAMETER Experiment Name: At_Drought_Reproduction_P Parameter: Timepoint (day) Value: 10
  misc_feature: MA Experiment 20001905 PARAMETER Experiment Name: At_Drought_Reproduction_P Parameter: Tissue Value: Rosettes
  misc_feature: MA Experiment 20001905 PARAMETER Experiment Name: At_Drought_Reproduction_P Parameter: Treatment Value: Drought vs. No Drought
atggcagaaactcctcaaccgtatctcatcttcgtcttcttcgtcttcactctaaccgttgctacacaaaccaccggttcggttaagtgcaaaacaagtttgctccgttacccgtttggtttctccgacggttatccgatccgattcaactgctctgagataaccggagaggccgtgatcggtgaattcgctgtgcaagaagtgacaaactccaacatctacgtcgaaatcccgccggtttgcaaacgcaacatccgtaaaatcgaacaacttttccgggaaaatcttgctccgtcgaaattacagaacataattctcgtccaaggatgcaagaaacagaacaagtcttctaattgcttaatccgcaataaattcgttgaaaaccggttaaatctcagcaaatgtaaatctccggttagctgtctcgacggagcaacaacgacaactgccgatgtgatgagtttaggcgacgttgtgaacggaagtggatgtaagtattggttctcttctatttctcaatcgcaagtttcggtcaatttgggtcgactcaagcttgattggtggcttaagggaagttgcagtaacaccacttgctcggagaacgcagactgtgccaaagttaagctcgacgacggtggactcggtcatcgctgcacttgtcgtgaaggatttagcggtaaagccttcaccgtgcctggtggttgccaccgattagcggggattttggttggagttttagtaatcgtggtcttgatagctacatatttcttccggaacaagcaatctgcgtcatctgaaagagcatcaatcgcgaatcgcttgctttgcgagctagccggaaactcaagtgttcctttctacacctacaaagagattgagaaagctaccgatagtttctccgacaagaacatgctcggaaccggagcatacggaacagtctacgcaggcgaattcccaaacagctcatgcgtcgctataaaacgtctcaaacacaaagacactacaagcattgaccaagttgtgaacgagatcaagcttctttcctctgtgagccacccaaatctagtacgtctcttaggttgttgctttgcagatggagaaccgtttctagtctatgagttcatgccaaacggaactctttatcagcatttacaacacgagagaggccaaccaccactttcttggcagctccgactcgccattgcgtgtcaaaccgcaaacgcaatcgcacatctccactcttcagtaaaccctcctatctaccaccgagacataaaatctagtaacatcctccttgaccacgaattcaactccaagatatctgatttcggactctctaggctcggcatgtctaccgatttcgaagcctctcatatctccacggctccacaaggcactccaggatacttagatcctcaatatcaccaagattttcagctctcggacaagagtgatgtctatagctttggagttgttctcgtagaaatcatctcaggctttaaagtcatagacttcactcgtccctactctgaagtgaacctagcctctcttgccgtcgacaggatcggaagagggcgtgtggtagatatcatcgatccctgcttaaacaaagaaatcaatccgaaaatgtttgcatctatccacaacttagcagaattggcgtttcgctgcttatcctttcacagaaacatgaggcctacgatggtagaaattacggaagatctccaccggattaagcttatgcactatggtacagagtcaggtaagttcaaaaaccgatccgaaatagatatgaagagacaacaatcatttccgagagaatga

SEQ ID NO: 86347 - protein, 607 aa, Arabidopsis thaliana
  peptide (1)..(607): Ceres Seq. ID no. 12688889
  misc_feature (153)..(607): Homolog of NCBI NO: 30698255 NR Description: protein kinase family [Arabidopsis thaliana]
  misc_feature (238)..(580): Homolog of NCBI NO: 7486158 NR Description: probable protein kinase [imported] - Arabidopsis
  misc_feature (238)..(580): Homolog of NCBI NO: 18400282 NR Description: putative protein kinase; protein id: At2g23450.1, by cDNA: 19958., supported by cDNA: gi_19715596 [Arabidopsis >gi|20197000|gb|AAC23760.2| putative protein kinase [Arabidopsis
  misc_feature (29)..(237): Homolog of NCBI NO: 7486158 NR Description: probable protein kinase [imported] - Arabidopsis
  misc_feature (29)..(237): Homolog of NCBI NO: 18400282 NR Description: putative protein kinase; protein id: At2g23450.1, by cDNA: 19958., supported by cDNA: gi_19715596 [Arabidopsis >gi|20197000|gb|AAC23760.2| putative protein kinase [Arabidopsis
  misc_feature (238)..(580): Homolog of NCBI NO: 19715597 NR Description: At2g23450/F26B6.10 [Arabidopsis thaliana]
  misc_feature (29)..(237): Homolog of NCBI NO: 19715597 NR Description: At2g23450/F26B6.10 [Arabidopsis thaliana]
  misc_feature (238)..(580): Homolog of NCBI NO: 34902300 NR Description: Putative protein kinase [Oryza sativa (japonica group)] >gi|24308627|gb|AAN52750.1| Putative protein kinase
  misc_feature (239)..(578): Homolog of NCBI NO: 15241674 NR Description: putative protein kinase; protein id: At5g02070.1
  misc_feature (9)..(579): Homolog of NCBI NO: 15222572 NR Description: wall-associated kinase, putative; protein id: supported by cDNA: gi_15529241 [Arabidopsis thaliana]
MAETPQPYLIFVFFVFTLTVATQTTGSVKCKTSLLRYPFGFSDGYPIRFNCSEITGEAVIGEFAVQEVTNSNIYVEIPPVCKRNIRKIEQLFRENLAPSKLQNIILVQGCKKQNKSSNCLIRNKFVENRLNLSKCKSPVSCLDGATTTTADVMSLGDVVNGSGCKYWFSSISQSQVSVNLGRLKLDWWLKGSCSNTTCSENADCAKVKLDDGGLGHRCTCREGFSGKAFTVPGGCHRLAGILVGVLVIVVLIATYFFRNKQSASSERASIANRLLCELAGNSSVPFYTYKEIEKATDSFSDKNMLGTGAYGTVYAGEFPNSSCVAIKRLKHKDTTSIDQVVNEIKLLSSVSHPNLVRLLGCCFADGEPFLVYEFMPNGTLYQHLQHERGQPPLSWQLRLAIACQTANAIAHLHSSVNPPIYHRDIKSSNILLDHEFNSKISDFGLSRLGMSTDFEASHISTAPQGTPGYLDPQYHQDFQLSDKSDVYSFGVVLVEIISGFKVIDFTRPYSEVNLASLAVDRIGRGRVVDIIDPCLNKEINPKMFASIHNLAELAFRCLSFHRNMRPTMVEITEDLHRIKLMHYGTESGKFKNRSEIDMKRQQSFPRE

SEQ ID NO: 86348 - protein, 455 aa, Arabidopsis thaliana
  peptide (1)..(455): Ceres Seq. ID no. 12688890
  misc_feature (1)..(455): Homolog of NCBI NO: 30698255 NR Description: protein kinase family [Arabidopsis thaliana]
  misc_feature (86)..(428): Homolog of NCBI NO: 7486158 NR Description: probable protein kinase [imported] - Arabidopsis
  misc_feature (86)..(428): Homolog of NCBI NO: 18400282 NR Description: putative protein kinase; protein id: At2g23450.1, by cDNA: 19958., supported by cDNA: gi_19715596 [Arabidopsis >gi|20197000|gb|AAC23760.2| putative protein kinase [Arabidopsis
  misc_feature (1)..(85): Homolog of NCBI NO: 7486158 NR Description: probable protein kinase [imported] - Arabidopsis
  misc_feature (1)..(85): Homolog of NCBI NO: 18400282 NR Description: putative protein kinase; protein id: At2g23450.1, by cDNA: 19958., supported by cDNA: gi_19715596 [Arabidopsis >gi|20197000|gb|AAC23760.2| putative protein kinase [Arabidopsis
  misc_feature (86)..(428): Homolog of NCBI NO: 19715597 NR Description: At2g23450/F26B6.10 [Arabidopsis thaliana]
  misc_feature (1)..(85): Homolog of NCBI NO: 19715597 NR Description: At2g23450/F26B6.10 [Arabidopsis thaliana]
  misc_feature (86)..(428): Homolog of NCBI NO: 34902300 NR Description: Putative protein kinase [Oryza sativa (japonica group)] >gi|24308627|gb|AAN52750.1| Putative protein kinase
  misc_feature (87)..(426): Homolog of NCBI NO: 15241674 NR Description: putative protein kinase; protein id: At5g02070.1
  misc_feature (1)..(427): Homolog of NCBI NO: 15222572 NR Description: wall-associated kinase, putative; protein id: supported by cDNA: gi_15529241 [Arabidopsis thaliana]
MSLGDVVNGSGCKYWFSSISQSQVSVNLGRLKLDWWLKGSCSNTTCSENADCAKVKLDDGGLGHRCTCREGFSGKAFTVPGGCHRLAGILVGVLVIVVLIATYFFRNKQSASSERASIANRLLCELAGNSSVPFYTYKEIEKATDSFSDKNMLGTGAYGTVYAGEFPNSSCVAIKRLKHKDTTSIDQVVNEIKLLSSVSHPNLVRLLGCCFADGEPFLVYEFMPNGTLYQHLQHERGQPPLSWQLRLAIACQTANAIAHLHSSVNPPIYHRDIKSSNILLDHEFNSKISDFGLSRLGMSTDFEASHISTAPQGTPGYLDPQYHQDFQLSDKSDVYSFGVVLVEIISGFKVIDFTRPYSEVNLASLAVDRIGRGRVVDIIDPCLNKEINPKMFASIHNLAELAFRCLSFHRNMRPTMVEITEDLHRIKLMHYGTESGKFKNRSEIDMKRQQSFPRE

SEQ ID NO: 86349 - protein, 304 aa, Arabidopsis thaliana
  peptide (1)..(304): Ceres Seq. ID no. 12688891
  misc_feature (1)..(304): Homolog of NCBI NO: 30698255 NR Description: protein kinase family [Arabidopsis thaliana]
  misc_feature (1)..(277): Homolog of NCBI NO: 7486158 NR Description: probable protein kinase [imported] - Arabidopsis
  misc_feature (1)..(277): Homolog of NCBI NO: 18400282 NR Description: putative protein kinase; protein id: At2g23450.1, by cDNA: 19958., supported by cDNA: gi_19715596 [Arabidopsis >gi|20197000|gb|AAC23760.2| putative protein kinase [Arabidopsis
  misc_feature (1)..(277): Homolog of NCBI NO: 19715597 NR Description: At2g23450/F26B6.10 [Arabidopsis thaliana]
  misc_feature (1)..(277): Homolog of NCBI NO: 34902300 NR Description: Putative protein kinase [Oryza sativa (japonica group)] >gi|24308627|gb|AAN52750.1| Putative protein kinase
  misc_feature (1)..(275): Homolog of NCBI NO: 15241674 NR Description: putative protein kinase; protein id: At5g02070.1
  misc_feature (1)..(276): Homolog of NCBI NO: 15222572 NR Description: wall-associated kinase, putative; protein id: supported by cDNA: gi_15529241 [Arabidopsis thaliana]
  misc_feature (1)..(288): Homolog of NCBI NO: 34911340 NR Description: P0034C09.1 [Oryza sativa (japonica
  misc_feature (1)..(276): Homolog of NCBI NO: 38567981 NR Description: OSJNBa0093F12.22 [Oryza sativa (japonica
  misc_feature (1)..(276): Homolog of NCBI NO: 15529242 NR Description: At1g25390/F2J7_14 [Arabidopsis thaliana]
MLGTGAYGTVYAGEFPNSSCVAIKRLKHKDTTSIDQVVNEIKLLSSVSHPNLVRLLGCCFADGEPFLVYEFMPNGTLYQHLQHERGQPPLSWQLRLAIACQTANAIAHLHSSVNPPIYHRDIKSSNILLDHEFNSKISDFGLSRLGMSTDFEASHISTAPQGTPGYLDPQYHQDFQLSDKSDVYSFGVVLVEIISGFKVIDFTRPYSEVNLASLAVDRIGRGRVVDIIDPCLNKEINPKMFASIHNLAELAFRCLSFHRNMRPTMVEITEDLHRIKLMHYGTESGKFKNRSEIDMKRQQSFPRE

SEQ ID NO: 86350 - DNA, 2008 bp, Arabidopsis thaliana
  misc_feature (1)..(2008): Ceres Seq. ID no. 12688912
  misc_feature: MA Experiment ID: 108462 Result: Down-regulated in Transcription
  misc_feature: MA Experiment 108462 PARAMETER Experiment Name: At_Germinating_Seeds_cDNA_P Parameter: Age (day) Value: 2 vs. 0
  misc_feature: MA Experiment 108462 PARAMETER Experiment Name: At_Germinating_Seeds_cDNA_P Parameter: Tissue Value: Germinating Seeds
  misc_feature: MA Experiment ID: 108463 Result: Down-regulated in Transcription
  misc_feature: MA Experiment 108463 PARAMETER Experiment Name: At_Germinating_Seeds_cDNA_P Parameter: Age (day) Value: 3 vs. 0
  misc_feature: MA Experiment 108463 PARAMETER Experiment Name: At_Germinating_Seeds_cDNA_P Parameter: Tissue Value: Germinating Seeds
  misc_feature: MA Experiment ID: 108464 Result: Down-regulated in Transcription
  misc_feature: MA Experiment 108464 PARAMETER Experiment Name: At_Germinating_Seeds_cDNA_P Parameter: Age (day) Value: 4 vs. 0
  misc_feature: MA Experiment 108464 PARAMETER Experiment Name: At_Germinating_Seeds_cDNA_P Parameter: Tissue Value: Germinating Seeds
  misc_feature: MA Experiment ID: 20000071 Result: Down-regulated in Transcription
  misc_feature: MA Experiment 20000071 PARAMETER Experiment Name: At_100uM_ABA_Mutants_cDNA_P Parameter: Plant Line Value: CS8104
  misc_feature: MA Experiment 20000071 PARAMETER Experiment Name: At_100uM_ABA_Mutants_cDNA_P Parameter: Timepoint (hr) Value: 6
  misc_feature: MA Experiment 20000071 PARAMETER Experiment Name: At_100uM_ABA_Mutants_cDNA_P Parameter: Tissue Value: Aerial
  misc_feature: MA Experiment 20000071 PARAMETER Experiment Name: At_100uM_ABA_Mutants_cDNA_P Parameter: Treatment Value: 100uM ABA vs. No Treatment
  misc_feature: MA Experiment ID: 20000072 Result: Down-regulated in Transcription
  misc_feature: MA Experiment 20000072 PARAMETER Experiment Name: At_100uM_ABA_Mutants_cDNA_P Parameter: Plant Line Value: CS8105
  misc_feature: MA Experiment 20000072 PARAMETER Experiment Name: At_100uM_ABA_Mutants_cDNA_P Parameter: Timepoint (hr) Value: 6
  misc_feature: MA Experiment 20000072 PARAMETER Experiment Name: At_100uM_ABA_Mutants_cDNA_P Parameter: Tissue Value: Aerial
  misc_feature: MA Experiment 20000072 PARAMETER Experiment Name: At_100uM_ABA_Mutants_cDNA_P Parameter: Treatment Value: 100uM ABA vs. No Treatment
  misc_feature: MA Experiment ID: 20000087 Result: Down-regulated in Transcription
  misc_feature: MA Experiment 20000087 PARAMETER Experiment Name: At_100uM_ABA_Mutants_cDNA_P Parameter: Plant Line Value: WS
  misc_feature: MA Experiment 20000087 PARAMETER Experiment Name: At_100uM_ABA_Mutants_cDNA_P Parameter: Timepoint (hr) Value: 6
  misc_feature: MA Experiment 20000087 PARAMETER Experiment Name: At_100uM_ABA_Mutants_cDNA_P Parameter: Tissue Value: Aerial
  misc_feature: MA Experiment 20000087 PARAMETER Experiment Name: At_100uM_ABA_Mutants_cDNA_P Parameter: Treatment Value: 100uM ABA vs. No Treatment
  misc_feature: MA Experiment ID: 20000117 Result: Down-regulated in Transcription
  misc_feature: MA Experiment 20000117 PARAMETER Experiment Name: At_100uM_ABA_Mutants_cDNA_P Parameter: Plant Line Value: Columbia
  misc_feature: MA Experiment 20000117 PARAMETER Experiment Name: At_100uM_ABA_Mutants_cDNA_P Parameter: Timepoint (hr) Value: 6
  misc_feature: MA Experiment 20000117 PARAMETER Experiment Name: At_100uM_ABA_Mutants_cDNA_P Parameter: Tissue Value: Aerial
  misc_feature: MA Experiment 20000117 PARAMETER Experiment Name: At_100uM_ABA_Mutants_cDNA_P Parameter: Treatment Value: 100uM ABA vs. No Treatment
  misc_feature: MA Experiment ID: 20000185 Result: Up-regulated in Transcription
  misc_feature: MA Experiment 20000185 PARAMETER Experiment Name: At_Roots__P Parameter: Age (day) Value: 7 vs. 21
  misc_feature: MA Experiment 20000185 PARAMETER Experiment Name: At_Roots__P Parameter: Organism Value: A. thaliana
  misc_feature: MA Experiment 20000185 PARAMETER Experiment Name: At_Roots__P Parameter: Tissue Value: Roots vs. Whole Plant
  misc_feature: MA Experiment ID: 20000227 Result: Up-regulated in Transcription
  misc_feature: MA Experiment 20000227 PARAMETER Experiment Name: At_Root-Tips-vs-Tops_P Parameter: Tissue Value: Root Tips vs. Root Tops
  misc_feature: MA Experiment ID: 20000234 Result: Up-regulated in Transcription
  misc_feature: MA Experiment 20000234 PARAMETER Experiment Name: At_Siliques_P Parameter: Age (day) Value: 21
  misc_feature: MA Experiment 20000234 PARAMETER Experiment Name: At_Siliques_P Parameter: Organism Value: A. thaliana
  misc_feature: MA Experiment 20000234 PARAMETER Experiment Name: At_Siliques_P Parameter: Plant Line Value: WS
  misc_feature: MA Experiment 20000234 PARAMETER Experiment Name: At_Siliques_P Parameter: Tissue Value: Less Than 5mm Siliques vs. Whole Plant
  misc_feature: MA Experiment ID: 20000235 Result: Up-regulated in Transcription
  misc_feature: MA Experiment 20000235 PARAMETER Experiment Name: At_Siliques_P Parameter: Age (day) Value: 21
  misc_feature: MA Experiment 20000235 PARAMETER Experiment Name: At_Siliques_P Parameter: Organism Value: A. thaliana
  misc_feature: MA Experiment 20000235 PARAMETER Experiment Name: At_Siliques_P Parameter: Plant Line Value: WS
  misc_feature: MA Experiment 20000235 PARAMETER Experiment Name: At_Siliques_P Parameter: Tissue Value: 5-10mm Siliques vs. Whole Plant
  misc_feature: MA Experiment ID: 20000265 Result: Down-regulated in Transcription
  misc_feature: MA Experiment 20000265 PARAMETER Experiment Name: At_Open_Flower_P Parameter: Age (day) Value: 21
  misc_feature: MA Experiment 20000265 PARAMETER Experiment Name: At_Open_Flower_P Parameter: Plant Line Value: WS
  misc_feature: MA Experiment 20000265 PARAMETER Experiment Name: At_Open_Flower_P Parameter: Tissue Value: Closed Flower vs. Whole Plant
  misc_feature: MA Experiment ID: 20000437 Result: Down-regulated in Transcription
  misc_feature: MA Experiment 20000437 PARAMETER Experiment Name: At_Drought_P Parameter: Age (day) Value: 8
  misc_feature: MA Experiment 20000437 PARAMETER Experiment Name: At_Drought_P Parameter: Organism Value: A. thaliana
  misc_feature: MA Experiment 20000437 PARAMETER Experiment Name: At_Drought_P Parameter: Plant Line Value: WS
  misc_feature: MA Experiment 20000437 PARAMETER Experiment Name: At_Drought_P Parameter: Timepoint (hr) Value: 24
  misc_feature: MA Experiment 20000437 PARAMETER Experiment Name: At_Drought_P Parameter: Tissue Value: Whole Plant
  misc_feature: MA Experiment 20000437 PARAMETER Experiment Name: At_Drought_P Parameter: Treatment Value: Drought vs. No Drought
  misc_feature: MA Experiment ID: 20000495 Result: Up-regulated in Transcription
  misc_feature: MA Experiment 20000495 PARAMETER Experiment Name: At_Guard_Cells_P Parameter: Harvest Date Value: 8/2/2002
  misc_feature: MA Experiment 20000495 PARAMETER Experiment Name: At_Guard_Cells_P Parameter: Organism Value: A. thaliana
  misc_feature: MA Experiment 20000495 PARAMETER Experiment Name: At_Guard_Cells_P Parameter: Tissue Value: Guard Cells vs. Leaves
  misc_feature: MA Experiment ID: 20000573 Result: Up-regulated in Transcription
  misc_feature: MA Experiment 20000573 PARAMETER Experiment Name: At_100uM_ABA_Mutants__P Parameter: Organism Value: A. thaliana
  misc_feature: MA Experiment 20000573 PARAMETER Experiment Name: At_100uM_ABA_Mutants__P Parameter: Plant Line Value: CS22 vs. Ler wt
  misc_feature: MA Experiment 20000573 PARAMETER Experiment Name: At_100uM_ABA_Mutants__P Parameter: Timepoint (hr) Value: N/A
  misc_feature: MA Experiment 20000573 PARAMETER Experiment Name: At_100uM_ABA_Mutants__P Parameter: Tissue Value: Whole Plant
  misc_feature: MA Experiment 20000573 PARAMETER Experiment Name: At_100uM_ABA_Mutants__P Parameter: Treatment Value: None
  misc_feature: MA Experiment ID: 20000794 Result: Down-regulated in Transcription
  misc_feature: MA Experiment 20000794 PARAMETER Experiment Name: At_Petals_P Parameter: Age (day) Value: 23-25 days
  misc_feature: MA Experiment 20000794 PARAMETER Experiment Name: At_Petals_P Parameter: Plant Line Value: WS
  misc_feature: MA Experiment 20000794 PARAMETER Experiment Name: At_Petals_P Parameter: Tissue Value: Petals vs. Whole plant
  misc_feature: MA Experiment ID: 20001247 Result: Up-regulated in Transcription
  misc_feature: MA Experiment 20001247 PARAMETER Experiment Name: At_Far-red-induction_P Parameter: Age (day) Value: 7
  misc_feature: MA Experiment 20001247 PARAMETER Experiment Name: At_Far-red-induction_P Parameter: Light Value: Far-red vs. White
  misc_feature: MA Experiment 20001247 PARAMETER Experiment Name: At_Far-red-induction_P Parameter: Organism Value: A. thaliana
  misc_feature: MA Experiment 20001247 PARAMETER Experiment Name: At_Far-red-induction_P Parameter: Plant Line Value: Columbia
  misc_feature: MA Experiment 20001247 PARAMETER Experiment Name: At_Far-red-induction_P Parameter: Timepoint (hr) Value: 1
  misc_feature: MA Experiment 20001247 PARAMETER Experiment Name: At_Far-red-induction_P Parameter: Tissue Value: Whole Plant
  misc_feature: MA Experiment ID: 20001556 Result: Down-regulated in Transcription
  misc_feature: MA Experiment 20001556 PARAMETER Experiment Name: At_Drought_Soil_Dry_P Parameter: Age (day) Value: 26
  misc_feature: MA Experiment 20001556 PARAMETER Experiment Name: At_Drought_Soil_Dry_P Parameter: Organism Value: A. thaliana
  misc_feature: MA Experiment 20001556 PARAMETER Experiment Name: At_Drought_Soil_Dry_P Parameter: Plant Line Value: WS
  misc_feature: MA Experiment 20001556 PARAMETER Experiment Name: At_Drought_Soil_Dry_P Parameter: Post Timepoint (hr) Value: None
  misc_feature: MA Experiment 20001556 PARAMETER Experiment Name: At_Drought_Soil_Dry_P Parameter: Post-Treatment Value: None
  misc_feature: MA Experiment 20001556 PARAMETER Experiment Name: At_Drought_Soil_Dry_P Parameter: Timepoint (day) Value: 12
  misc_feature: MA Experiment 20001556 PARAMETER Experiment Name: At_Drought_Soil_Dry_P Parameter: Treatment Value: Drought vs. No Drought
  misc_feature: MA Experiment ID: 20001557 Result: Up-regulated in Transcription
  misc_feature: MA Experiment 20001557 PARAMETER Experiment Name: At_Drought_Soil_Dry_P Parameter: Age (day) Value: 27
  misc_feature: MA Experiment 20001557 PARAMETER Experiment Name: At_Drought_Soil_Dry_P Parameter: Organism Value: A. thaliana
  misc_feature: MA Experiment 20001557 PARAMETER Experiment Name: At_Drought_Soil_Dry_P Parameter: Plant Line Value: WS
  misc_feature: MA Experiment 20001557 PARAMETER Experiment Name: At_Drought_Soil_Dry_P Parameter: Post Timepoint (hr) Value: 3
  misc_feature: MA Experiment 20001557 PARAMETER Experiment Name: At_Drought_Soil_Dry_P Parameter: Post-Treatment Value: Re-Water vs. No Drought
  misc_feature: MA Experiment 20001557 PARAMETER Experiment Name: At_Drought_Soil_Dry_P Parameter: Timepoint (day) Value: 13
  misc_feature: MA Experiment 20001557 PARAMETER Experiment Name: At_Drought_Soil_Dry_P Parameter: Treatment Value: Drought vs. No Drought
  misc_feature: MA Experiment ID: 20001558 Result: Up-regulated in Transcription
  misc_feature: MA Experiment 20001558 PARAMETER Experiment Name: At_Drought_Soil_Dry_P Parameter: Age (day) Value: 27
  misc_feature: MA Experiment 20001558 PARAMETER Experiment Name: At_Drought_Soil_Dry_P Parameter: Organism Value: A. thaliana
  misc_feature: MA Experiment 20001558 PARAMETER Experiment Name: At_Drought_Soil_Dry_P Parameter: Plant Line Value: WS
  misc_feature: MA Experiment 20001558 PARAMETER Experiment Name: At_Drought_Soil_Dry_P Parameter: Post Timepoint (hr) Value: 6
  misc_feature: MA Experiment 20001558 PARAMETER Experiment Name: At_Drought_Soil_Dry_P Parameter: Post-Treatment Value: Re-Water vs. No Drought
  misc_feature: MA Experiment 20001558 PARAMETER Experiment Name: At_Drought_Soil_Dry_P Parameter: Timepoint (day) Value: 13
  misc_feature: MA Experiment 20001558 PARAMETER Experiment Name: At_Drought_Soil_Dry_P Parameter: Treatment Value: Drought vs. No Drought
  misc_feature: MA Experiment ID: 20001911 Result: Down-regulated in Transcription
  misc_feature: MA Experiment 20001911 PARAMETER Experiment Name: At_Drought_Reproduction_P Parameter: Age (day) Value: 40
  misc_feature: MA Experiment 20001911 PARAMETER Experiment Name: At_Drought_Reproduction_P Parameter: Organism Value: A. thaliana
  misc_feature: MA Experiment 20001911 PARAMETER Experiment Name: At_Drought_Reproduction_P Parameter: Plant Line Value: WS
  misc_feature: MA Experiment 20001911 PARAMETER Experiment Name: At_Drought_Reproduction_P Parameter: Timepoint (day) Value: 10
  misc_feature: MA Experiment 20001911 PARAMETER Experiment Name: At_Drought_Reproduction_P Parameter: Tissue Value: Flowers
  misc_feature: MA Experiment 20001911 PARAMETER Experiment Name: At_Drought_Reproduction_P Parameter: Treatment Value: Drought vs. No Drought
gcactttttatagaccaaagtccctacattactctattttctcaaaccccatttagaagaagagttcttagctgtcttcaatctctttgtctgtatcattctttacggaagccatgaaaatggcatcaagaaaaacaacatccttgcttaatcatcttcttcttcttggagctttgactcttttgagcagtttggtgatagtgaaaggagaaagcccttacaagttttacacttggactgtgacttatggcattatctctcctcttggtgttcctcaacaggttattctcatcaatggtcagtttcctggtccaaaacttgaagttgtgaccaacgacaacatcatcctcaacctcatcaacaaacttgaccagcctttcctcttgacctggaatgggattaagcagaggaagaactcatggcaagatggtgttttgggaacaaactgtccgatccaaccaaactcaaacttcacttacaaattccaaaccaaagatcagatcggaactttcaactacttcccttccactgcttttcacaaagccgccggtggattcggagccatcaatgtctacgcaagacctggaattccaatcccttaccctctcccaaccgcagatttcactttactcgttggtgattggttcaaaaccaaccacaaaacgcttcaacagcgtttggattctggtggggttcttccatttcccgatgggatgcttataaatggacaaacccaatcaacgttttcaggcgaccaagggaagacttacatgttgagaatctccaatgttgggttatcaagcactttcaatttcagaatccaaggccatacaatgaaagtagttgaagttgaaggctctcatgttattcaaactgattatgattctcttgacattcacgttggccagtctttagcagttcttgttactttaaaccaatctcctaaagattattacatcgttgcaagcacccggttcataagaagcaagctttctgttatgggtttgttgcgttattctaactctcgcgtcccagcttctggtgatcctcccgctcttccacctggagagcttgtttggtccatgagacaagctagaaccttcagatggaacttaacagcaaatgcagctagaccaaaccctcaaggatctttccactatggaatgatcagtccaacaaagacatttgtcttctcaaattcagctcctttgattaatgggaagcaaagatatgcagtcaatggagtctcttatgtgaaatcagagacgcctcttaaactcgctgatcactttggcatctcaggagttttcagcaccaatgccattcaaagcgtcccatcaaactctccgccaacagttgcaacatcagttgttcaaacatctcaccatgacttccttgaaattgtatttcagaacaatgagaagtcaatgcagtcttggcatcttgatggatatgacttctgggtcgttggatttggttctggacaatggacacctgcaaaaagatcacttcacaatcttgttgatgctctgaccagacacacaactcaggtctacccagagtcttggacaacaatcttagtgtctttagacaatcaagggatgtggaatatgagatcagcgatatgggaaagacaatattcaggacaacagttttatctcaaagtatggaattcagtacagagtcttgccaatgaatacaatcctcctgacaatcttcaactctgtggcaaagctgttggacgacatgtttagagaaaatcctcttacagtttcctctgttctttcttaaaagtgatttactttaaggctttttcgattcaatttggttgaggttttgcgtttgttcgttatggtcatgagagtatggctgatggcttacttgtagtaaacaaagggaagaggaaagttatatgtgtcattggtggtaggctagcttggagttttataataatcttcctatatacaattctattcatgtgttttttctaatcgaaatctcttgcggt

SEQ ID NO: 86351 - protein, 546 aa, Arabidopsis thaliana; identical to SEQ ID NO: 40844
  peptide (1)..(546): Ceres Seq. ID no. 12688913
  misc_feature (1)..(546): Homolog of NCBI NO: 18425129 NR Description: pectinesterase (pectin methylesterase) family; id: At5g66920.1, supported by cDNA: 116979., supported by cDNA: [Arabidopsis thaliana] >gi|20453070|gb|AAM19780.1|
  misc_feature (1)..(546): Homolog of NCBI NO: 21536987 NR Description: pectinesterase-like protein [Arabidopsis thaliana]
  misc_feature (3)..(546): Homolog of NCBI NO: 9758142 NR Description: pectinesterase like protein [Arabidopsis thaliana]
  misc_feature (14)..(541): Homolog of NCBI NO: 18400335 NR Description: pectinesterase (pectin methylesterase) family; id: At2g23630.1 [Arabidopsis thaliana] >gi|7432991|pir||T01152
  misc_feature (7)..(541): Homolog of NCBI NO: 15235448 NR Description: pectinesterase (pectin methylesterase) family; id: At4g37160.1 [Arabidopsis thaliana] >gi|25285553|pir||A85439
  misc_feature (20)..(545): Homolog of NCBI NO: 15234688 NR Description: pectinesterase (pectin methylesterase), putative; id: At4g22010.1, supported by cDNA: gi_19698976 [Arabidopsis
  misc_feature (16)..(545): Homolog of NCBI NO: 1255951 NR Description: PS60 [Nicotiana tabacum]
  misc_feature (21)..(545): Homolog of NCBI NO: 16648889 NR Description: Unknown protein [Arabidopsis thaliana]
  misc_feature (21)..(545): Homolog of NCBI NO: 18400509 NR Description: pectinesterase (pectin methylesterase), putative; id: At1g41830.1, supported by cDNA: gi_16648888 [Arabidopsis
  misc_feature (8)..(289): Homolog of NCBI NO: 22328918 NR Description: pectinesterase (pectin methylesterase) family; id: At4g25240.1, supported by cDNA: gi_18389263, supported by gi_20259624 [Arabidopsis thaliana] >gi|18389264|gb|AAL67075.1|

SEQ ID NO: 86352 - protein, 544 aa, Arabidopsis thaliana; identical to SEQ ID NO: 40845
  peptide (1)..(544): Ceres Seq. ID no. 12688914
  misc_feature (1)..(544): Homolog of NCBI NO: 18425129 NR Description: pectinesterase (pectin methylesterase) family; id: At5g66920.1, supported by cDNA: 116979., supported by cDNA: [Arabidopsis thaliana] >gi|20453070|gb|AAM19780.1|
  misc_feature (1)..(544): Homolog of NCBI NO: 21536987 NR Description: pectinesterase-like protein [Arabidopsis thaliana]
  misc_feature (1)..(544): Homolog of NCBI NO: 9758142 NR Description: pectinesterase like protein [Arabidopsis thaliana]
  misc_feature (12)..(539): Homolog of NCBI NO: 18400335 NR Description: pectinesterase (pectin methylesterase) family; id: At2g23630.1 [Arabidopsis thaliana] >gi|7432991|pir||T01152
  misc_feature (5)..(539): Homolog of NCBI NO: 15235448 NR Description: pectinesterase (pectin methylesterase) family; id: At4g37160.1 [Arabidopsis thaliana] >gi|25285553|pir||A85439
  misc_feature (18)..(543): Homolog of NCBI NO: 15234688 NR Description: pectinesterase (pectin methylesterase), putative; id: At4g22010.1, supported by cDNA: gi_19698976 [Arabidopsis
  misc_feature (14)..(543): Homolog of NCBI NO: 1255951 NR Description: PS60 [Nicotiana tabacum]
  misc_feature (19)..(543): Homolog of NCBI NO: 16648889 NR Description: Unknown protein [Arabidopsis thaliana]
  misc_feature (19)..(543): Homolog of NCBI NO: 18400509 NR Description: pectinesterase (pectin methylesterase), putative; id: At1g41830.1, supported by cDNA: gi_16648888 [Arabidopsis
  misc_feature (6)..(287): Homolog of NCBI NO: 22328918 NR Description: pectinesterase (pectin methylesterase) family; id: At4g25240.1, supported by cDNA: gi_18389263, supported by gi_20259624 [Arabidopsis thaliana] >gi|18389264|gb|AAL67075.1|

SEQ ID NO: 86353 - protein, 346 aa, Arabidopsis thaliana; identical to SEQ ID NO: 40846
  peptide (1)..(346): Ceres Seq. ID no. 12688915
  misc_feature (1)..(346): Homolog of NCBI NO: 18425129 NR Description: pectinesterase (pectin methylesterase) family; id: At5g66920.1, supported by cDNA: 116979., supported by cDNA: [Arabidopsis thaliana] >gi|20453070|gb|AAM19780.1|
  misc_feature (1)..(346): Homolog of NCBI NO: 21536987 NR Description: pectinesterase-like protein [Arabidopsis thaliana]
  misc_feature (1)..(346): Homolog of NCBI NO: 9758142 NR Description: pectinesterase like protein [Arabidopsis thaliana]
  misc_feature (1)..(341): Homolog of NCBI NO: 18400335 NR Description: pectinesterase (pectin methylesterase) family; id: At2g23630.1 [Arabidopsis thaliana] >gi|7432991|pir||T01152
  misc_feature (1)..(341): Homolog of NCBI NO: 15235448 NR Description: pectinesterase (pectin methylesterase) family; id: At4g37160.1 [Arabidopsis thaliana] >gi|25285553|pir||A85439
  misc_feature (1)..(345): Homolog of NCBI NO: 15234688 NR Description: pectinesterase (pectin methylesterase), putative; id: At4g22010.1, supported by cDNA: gi_19698976 [Arabidopsis
  misc_feature (1)..(345): Homolog of NCBI NO: 1255951 NR Description: PS60 [Nicotiana tabacum]
  misc_feature (1)..(345): Homolog of NCBI NO: 16648889 NR Description: Unknown protein [Arabidopsis thaliana]
  misc_feature (1)..(345): Homolog of NCBI NO: 18400509 NR Description: pectinesterase (pectin methylesterase), putative; id: At1g41830.1, supported by cDNA: gi_16648888 [Arabidopsis
  misc_feature (1)..(89): Homolog of NCBI NO: 22328918 NR Description: pectinesterase (pectin methylesterase) family; id: At4g25240.1, supported by cDNA: gi_18389263, supported by gi_20259624 [Arabidopsis thaliana] >gi|18389264|gb|AAL67075.1|

SEQ ID NO: 86354 - DNA, 899 bp, Arabidopsis thaliana
  misc_feature (1)..(899): Ceres Seq. ID no. 12688916
  misc_feature: MA Experiment ID: 108434 Result: Down-regulated in Transcription
  misc_feature: MA Experiment 108434 PARAMETER Experiment Name: At_Root_Tips_cDNA_P Parameter: Tissue Value: Root Tips
  misc_feature: MA Experiment ID: 108464 Result: Up-regulated in Transcription
  misc_feature: MA Experiment 108464 PARAMETER Experiment Name: At_Germinating_Seeds_cDNA_P Parameter: Age (day) Value: 4 vs. 0
  misc_feature: MA Experiment 108464 PARAMETER Experiment Name: At_Germinating_Seeds_cDNA_P Parameter: Tissue Value: Germinating Seeds
  misc_feature: MA Experiment ID: 108488 Result: Down-regulated in Transcription
  misc_feature: MA Experiment ID: 108573 Result: Up-regulated in Transcription
  misc_feature: MA Experiment 108573 PARAMETER Experiment Name: At_Drought_cDNA_P Parameter: Timepoint (hr) Value: 6
  misc_feature: MA Experiment 108573 PARAMETER Experiment Name: At_Drought_cDNA_P Parameter: Tissue Value: Aerial
  misc_feature: MA Experiment 108573 PARAMETER Experiment Name: At_Drought_cDNA_P Parameter: Treatment Value: Drought vs. No Drought
  misc_feature: MA Experiment ID: 20000794 Result: Up-regulated in Transcription
  misc_feature: MA Experiment 20000794 PARAMETER Experiment Name: At_Petals_P Parameter: Age (day) Value: 23-25 days
  misc_feature: MA Experiment 20000794 PARAMETER Experiment Name: At_Petals_P Parameter: Plant Line Value: WS
  misc_feature: MA Experiment 20000794 PARAMETER Experiment Name: At_Petals_P Parameter: Tissue Value: Petals vs. Whole plant
  misc_feature: MA Experiment ID: 20001905 Result: Up-regulated in Transcription
  misc_feature: MA Experiment 20001905 PARAMETER Experiment Name: At_Drought_Reproduction_P Parameter: Age (day) Value: 40
  misc_feature: MA Experiment 20001905 PARAMETER Experiment Name: At_Drought_Reproduction_P Parameter: Organism Value: A. thaliana
  misc_feature: MA Experiment 20001905 PARAMETER Experiment Name: At_Drought_Reproduction_P Parameter: Plant Line Value: WS
  misc_feature: MA Experiment 20001905 PARAMETER Experiment Name: At_Drought_Reproduction_P Parameter: Timepoint (day) Value: 10
  misc_feature: MA Experiment 20001905 PARAMETER Experiment Name: At_Drought_Reproduction_P Parameter: Tissue Value: Rosettes
  misc_feature: MA Experiment 20001905 PARAMETER Experiment Name: At_Drought_Reproduction_P Parameter: Treatment Value: Drought vs. No Drought
  misc_feature: MA Experiment ID: 20001911 Result: Up-regulated in Transcription
  misc_feature: MA Experiment 20001911 PARAMETER Experiment Name: At_Drought_Reproduction_P Parameter: Age (day) Value: 40
  misc_feature: MA Experiment 20001911 PARAMETER Experiment Name: At_Drought_Reproduction_P Parameter: Organism Value: A. thaliana
  misc_feature: MA Experiment 20001911 PARAMETER Experiment Name: At_Drought_Reproduction_P Parameter: Plant Line Value: WS
  misc_feature: MA Experiment 20001911 PARAMETER Experiment Name: At_Drought_Reproduction_P Parameter: Timepoint (day) Value: 10
  misc_feature: MA Experiment 20001911 PARAMETER Experiment Name: At_Drought_Reproduction_P Parameter: Tissue Value: Flowers
  misc_feature: MA Experiment 20001911 PARAMETER Experiment Name: At_Drought_Reproduction_P Parameter: Treatment Value: Drought vs. No Drought
aacaaggacgatcagaagaaatcttagagaaatcggaaaattctcttactcgggttttgcatcggtgaatatgaattgcgaagtttgtcagctaaaggaactggaagtggaatccttcgagatacgcgaagttttgcgctgcattctacatacgattgtctttcatcgtgcgcttggtcttatccgccctaaagatattgatttggagctttttgagatcacttatgtacaatgcggtgaaattgaagtggagaagaaaatcgatgaaaagattgagcagttcattaactggattgagaaacacccaaacaaaaagagtcagatttgtctatcgttctatgaagtcaaaagcaaacagccttcttggttcaccaaaatcgaacggttgtactgggaacaatggtacatcaatctgaatgtgcttcagcccactaagccccctgtcggaaagtctcaccattctaaactagttatggaccctggagaggcatcggaggagagaagttctcgtaggacactgcttgagcaatcccttcaagaagtcttgttccaaatcataaaattcgtgaatgagaagaaggatcatgttcctcccattaacgatggtgtaatctactacccttttgagatcactatcccaagctcatcggactctgcctttgggatggatatgttcaagaggatactacacagtggccatccatcaatgctcggctaaattccattttccacttaacttagtacatatacactttgatgtttcttggtgcagcctaactccaatcaacactttcctagttacattttctgtgtaaatatattatatgttaccctctcctcgtcgatggataatgttaccttatctatgctttgttgtatataagtgatgtgttgtatat

SEQ ID NO: 86355 - protein, 238 aa, Arabidopsis thaliana
  peptide (1)..(238): Ceres Seq. ID no. 12688917
  misc_feature (24)..(238): Homolog of NCBI NO: 30698268 NR Description: expressed protein [Arabidopsis thaliana]
  misc_feature (35)..(213): Homolog of NCBI NO: 9758143 NR Description: gene_id:MUD21.19~pir||T38383~similar to unknown
  misc_feature (24)..(166): Homolog of NCBI NO: 30698266 NR Description: expressed protein [Arabidopsis thaliana]
  misc_feature (24)..(166): Homolog of NCBI NO: 15810345 NR Description: unknown protein [Arabidopsis thaliana]
  misc_feature (33)..(222): Homolog of NCBI NO: 40745235 NR Description: hypothetical protein AN2280.2 [Aspergillus
TRTIRRNLREIGKFSYSGFASVNMNCEVCQLKELEVESFEIREVLRCILHTIVFHRALGLIRPKDIDLELFEITYVQCGEIEVEKKIDEKIEQFINWIEKHPNKKSQICLSFYEVKSKQPSWFTKIERLYWEQWYINLNVLQPTKPPVGKSHHSKLVMDPGEASEERSSRRTLLEQSLQEVLFQIIKFVNEKKDHVPPINDGVIYYPFEITIPSSSDSAFGMDMFKRILHSGHPSMLG

SEQ ID NO: 86356 - protein, 215 aa, Arabidopsis thaliana; identical to SEQ ID NO: 29785
  peptide (1)..(215): Ceres Seq. ID no. 12688918
  misc_feature (1)..(215): Homolog of NCBI NO: 30698268 NR Description: expressed protein [Arabidopsis thaliana]
  misc_feature (12)..(190): Homolog of NCBI NO: 9758143 NR Description: gene_id:MUD21.19~pir||T38383~similar to unknown
  misc_feature (1)..(143): Homolog of NCBI NO: 30698266 NR Description: expressed protein [Arabidopsis thaliana]
  misc_feature (1)..(143): Homolog of NCBI NO: 15810345 NR Description: unknown protein [Arabidopsis thaliana]
  misc_feature (10)..(199): Homolog of NCBI NO: 40745235 NR Description: hypothetical protein AN2280.2 [Aspergillus

SEQ ID NO: 86357 - DNA, 2442 bp, Arabidopsis thaliana
  misc_feature (1)..(2442): Ceres Seq. ID no. 12689243
  misc_feature: MA Experiment ID: 20000179 Result: Up-regulated in Transcription
  misc_feature: MA Experiment 20000179 PARAMETER Experiment Name: At_Germinating_Seeds_P Parameter: Age (hr) Value: 6 vs. 0
  misc_feature: MA Experiment 20000179 PARAMETER Experiment Name: At_Germinating_Seeds_P Parameter: Tissue Value: Germinating Seeds
  misc_feature: MA Experiment ID: 20000185 Result: Down-regulated in Transcription
  misc_feature: MA Experiment 20000185 PARAMETER Experiment Name: At_Roots__P Parameter: Age (day) Value: 7 vs. 21
  misc_feature: MA Experiment 20000185 PARAMETER Experiment Name: At_Roots__P Parameter: Organism Value: A. thaliana
  misc_feature: MA Experiment 20000185 PARAMETER Experiment Name: At_Roots__P Parameter: Tissue Value: Roots vs. Whole Plant
  misc_feature: MA Experiment ID: 20000439 Result: Down-regulated in Transcription
  misc_feature: MA Experiment 20000439 PARAMETER Experiment Name: At_Roots__P Parameter: Age (day) Value: 14 vs. 21
  misc_feature: MA Experiment 20000439 PARAMETER Experiment Name: At_Roots__P Parameter: Organism Value: A. thaliana
  misc_feature: MA Experiment 20000439 PARAMETER Experiment Name: At_Roots__P Parameter: Tissue Value: Roots vs. Whole Plant
  misc_feature: MA Experiment ID: 20000495 Result: Down-regulated in Transcription
  misc_feature: MA Experiment 20000495 PARAMETER Experiment Name: At_Guard_Cells_P Parameter: Harvest Date Value: 8/2/2002
  misc_feature: MA Experiment 20000495 PARAMETER Experiment Name: At_Guard_Cells_P Parameter: Organism Value: A. thaliana
  misc_feature: MA Experiment 20000495 PARAMETER Experiment Name: At_Guard_Cells_P Parameter: Tissue Value: Guard Cells vs. Leaves
  misc_feature: MA Experiment ID: 20000496 Result: Down-regulated in Transcription
  misc_feature: MA Experiment 20000496 PARAMETER Experiment Name: At_Guard_Cells_P Parameter: Harvest Date Value: 7/19/2002
  misc_feature: MA Experiment 20000496 PARAMETER Experiment Name: At_Guard_Cells_P Parameter: Organism Value: Canola
  misc_feature: MA Experiment 20000496 PARAMETER Experiment Name: At_Guard_Cells_P Parameter: Tissue Value: Guard Cells vs. Leaves
  misc_feature: MA Experiment ID: 20000527 Result: Up-regulated in Transcription
  misc_feature: MA Experiment 20000527 PARAMETER Experiment Name: At_10percent_PEG_P Parameter: Age (day) Value: 20
  misc_feature: MA Experiment 20000527 PARAMETER Experiment Name: At_10percent_PEG_P Parameter: Organism Value: A. thaliana
  misc_feature: MA Experiment 20000527 PARAMETER Experiment Name: At_10percent_PEG_P Parameter: Plant Line Value: WS
  misc_feature: MA Experiment 20000527 PARAMETER Experiment Name: At_10percent_PEG_P Parameter: Timepoint (day) Value: 20
  misc_feature: MA Experiment 20000527 PARAMETER Experiment Name: At_10percent_PEG_P Parameter: Tissue Value: Whole Plant
  misc_feature: MA Experiment 20000527 PARAMETER Experiment Name: At_10percent_PEG_P Parameter: Treatment Value: 10percent PEG vs. No Treatment
  misc_feature: MA Experiment ID: 20001247 Result: Down-regulated in Transcription
  misc_feature: MA Experiment 20001247 PARAMETER Experiment Name: At_Far-red-induction_P Parameter: Age (day) Value: 7
  misc_feature: MA Experiment 20001247 PARAMETER Experiment Name: At_Far-red-induction_P Parameter: Light Value: Far-red vs. White
  misc_feature: MA Experiment 20001247 PARAMETER Experiment Name: At_Far-red-induction_P Parameter: Organism Value: A. thaliana
  misc_feature: MA Experiment 20001247 PARAMETER Experiment Name: At_Far-red-induction_P Parameter: Plant Line Value: Columbia
  misc_feature: MA Experiment 20001247 PARAMETER Experiment Name: At_Far-red-induction_P Parameter: Timepoint (hr) Value: 1
  misc_feature: MA Experiment 20001247 PARAMETER Experiment Name: At_Far-red-induction_P Parameter: Tissue Value: Whole Plant
  misc_feature: MA Experiment ID: 20001248 Result: Down-regulated in Transcription
  misc_feature: MA Experiment 20001248 PARAMETER Experiment Name: At_Far-red-induction_P Parameter: Age (day) Value: 7
  misc_feature: MA Experiment 20001248 PARAMETER Experiment Name: At_Far-red-induction_P Parameter: Light Value: Far-red vs. White
  misc_feature: MA Experiment 20001248 PARAMETER Experiment Name: At_Far-red-induction_P Parameter: Organism Value: A. thaliana
  misc_feature: MA Experiment 20001248 PARAMETER Experiment Name: At_Far-red-induction_P Parameter: Plant Line Value: Columbia
  misc_feature: MA Experiment 20001248 PARAMETER Experiment Name: At_Far-red-induction_P Parameter: Timepoint (hr) Value: 4
  misc_feature: MA Experiment 20001248 PARAMETER Experiment Name: At_Far-red-induction_P Parameter: Tissue Value: Whole Plant
  misc_feature: MA Experiment ID: 20001450 Result: Down-regulated in Transcription
  misc_feature: MA Experiment 20001450 PARAMETER Experiment Name: At_Far-red-induction_P Parameter: Age (day) Value: 7
  misc_feature: MA Experiment 20001450 PARAMETER Experiment Name: At_Far-red-induction_P Parameter: Light Value: Far-red vs. White
  misc_feature: MA Experiment 20001450 PARAMETER Experiment Name: At_Far-red-induction_P Parameter: Organism Value: A. thaliana
  misc_feature: MA Experiment 20001450 PARAMETER Experiment Name: At_Far-red-induction_P Parameter: Plant Line Value: Columbia
  misc_feature: MA Experiment 20001450 PARAMETER Experiment Name: At_Far-red-induction_P Parameter: Timepoint (hr) Value: 8
  misc_feature: MA Experiment 20001450 PARAMETER Experiment Name: At_Far-red-induction_P Parameter: Tissue Value: Whole Plant
ataaaccatattaagaactagcttatagataaggatatggcctttacgaacgtttgcctatggacgctactcgccttcatgctgacttggacagtgttctacgtcacaaacagggggaagaaggcgacgcagttggcggatgcggtggttgaagagcgagaagacggtgctactgacgttatcatcgttggggctggagtaggcggctcggctctcgcatatgctcttgctaaggacgggcgtcgagtccatgtaatagagagggacctgagagaaccagagagaatcatgggtgagtttatgcaaccaggaggacgactcatgctctctaagcttggtcttgaaggtcggtctctatttcagtttcatttatgtaattaaatcagaaagtcatataattgtgtcttagtttcatgatcatatttttgcgattatatatatatatatatatatgtatagattgtttggagggaatagatgcccaaaaagccacgggcatgacagtttataaggacggaaaagaagcagtcgcatcttttcccgtggacaacaacaattttccttttgatccttcggctcgatcttttcacaatggccgattcgtccaacgattgcggcaaaaggcttcttctcttcccaagtaagtattatggtcatgttcgttaggaagtcagcgaccaagtgttgttgttcgtttgacagtggatacaccgattaatcgtagcgatcaacgactaaagttttcagtccttagatttctcaaatctcaaataactaactacaaaacgaactgactacaaataaaattaaaagaaacaaatataattctaattaaataaaaatttaatttaaaataaatataaaatatattaggttaaacaaaataaacctaattgaatatatatgaagtaataaataaggaaaaaaatcccttcagttagcacctcatattttttaaacattggacaatagctactatataataagcttgacaataggaatggtttgttttataacgctaatcaatacactgcaccaaacatttattggtagtgtgcgcctggaagaaggaacggtgaagtctttgatagaagaaaaaggagtgatcaaaggagtgacatacaaaaatagcgcaggcgaagaaacaacagccttggcacctctcactgtagtatgcgacggttgctactcaaaccttcgccggtctcttaatgacaacaatgcggaggttctgtcataccaagttggttttatctcaaagaactgtcagcttgaagaacccgaaaagttaaagttgataatgtctaaaccctccttcaccatgttgtatcaaatcagcagcaccgacgttcgttgtgtttttgaagttctccccaacaacattccttctatttcaaatggtgaaatggctactttcgtgaagaacactattgctcctcaggtacactacacattgggctttattcaattaaaaaaccaactcaatatagaactatattactaagtttgtgtacatagtagataagtaatacatatacacattctaaatttgttataagtacatgcatatatatatgtcttaacgtttttgaacatttcttttcaaggtacctttaaaactccgcaaaatatttttgaaagggattgatgaaggagaacatataaaagccatgccaacaaagaagatgacagctactttgagcgagaagaaaggagtgattttattgggagatgcattcaacatgcgtcatccagcaatcgcatctggaatgatggttttattatctgacattctcattctacgccgtcttctccagccattaagcaaccttggcaatgcgcaaaaaatctcacaagttatcaagtccttttatgatatccgcaagccaatgtcagcgacagttaacacgttaggaaatgcattctctcaagtgctagttgcatcgacggacgaagcaaaagaggcaatgagacaaggttgctatgattacctctctagtggtgggtttcgcacgtcagggatgatggctttgctaggcggcatgaaccctcgtccgatctctctcatctatcatctatgtgctatcactctatcctccattggccatctactctctccatttccctctccccttcgcatttggcatagccttcgactttttggtttggctatgaaaatgttggttccccatctcaaggctgaaggagttagccaaatgttgtttccagtcaacgccgccgcgtatagcaaaagctatatggctgcaacggctctctaaaacactggtgctttaaactgcaaaatataacacatatataaatcacgaatctttgtgattctgcatatattgtgttctacaattattctcatataaatgaaaattgttctacgtaaaagtaaaaagaaggaattgtaatactaataaaacgagtttttaattc

SEQ ID NO: 86358 - protein, 202 aa, Arabidopsis thaliana
  peptide (1)..(202): Ceres Seq. ID no. 12689244
  misc_feature (1)..(83): Pfam Name: Monooxygenase Pfam Description: Monooxygenase
  misc_feature (1)..(202): Homolog of NCBI NO: 15237902 NR Description: squalene monooxygenase 1,1 (squalene epoxidase protein id: At5g24150.1 [Arabidopsis thaliana] Squalene monooxygenase 1,1 (Squalene epoxidase 1,1) (SE 1,1)
  misc_feature (1)..(202): Homolog of NCBI NO: 11358675 NR Description: probable squalene monooxygenase (EC 1.14.99.7)
  misc_feature (1)..(202): Homolog of NCBI NO: 15237903 NR Description: squalene monooxygenase 1,2 (squalene epoxidase (SQP1,2)(SE1,2); protein id: At5g24160.1 [Arabidopsis thaliana] Squalene monooxygenase 1,2 (Squalene epoxidase 1,2) (SE 1,2)
  misc_feature (1)..(202): Homolog of NCBI NO: 6685411 NR Description: Squalene monooxygenase 1,1 (Squalene epoxidase
  misc_feature (1)..(202): Homolog of NCBI NO: 6685410 NR Description: Squalene monooxygenase 1,2 (Squalene epoxidase
  misc_feature (1)..(202): Homolog of NCBI NO: 15237900 NR Description: squalene monooxygenase 2 (squalene epoxidase 2) protein id: At5g24140.1 [Arabidopsis thaliana] Squalene monooxygenase 2 (Squalene epoxidase 2) (SE 2)
  misc_feature (1)..(195): Homolog of NCBI NO: 27311241 NR Description: Putative Squalene monooxygenase [Oryza sativa
  misc_feature (1)..(195): Homolog of NCBI NO: 27475610 NR Description: squalene monooxygenase 2 [Medicago truncatula]
  misc_feature (1)..(195): Homolog of NCBI NO: 27475612 NR Description: squalene monooxygenase 1 [Medicago truncatula]
  misc_feature (1)..(195): Homolog of NCBI NO: 27311240 NR Description: Putative Squalene monooxygenase [Oryza sativa
MPTKKMTATLSEKKGVILLGDAFNMRHPAIASGMMVLLSDILILRRLLQPLSNLGNAQKISQVIKSFYDIRKPMSATVNTLGNAFSQVLVASTDEAKEAMRQGCYDYLSSGGFRTSGMMALLGGMNPRPISLIYHLCAITLSSIGHLLSPFPSPLRIWHSLRLFGLAMKMLVPHLKAEGVSQMLFPVNAAAYSKSYMAATAL

SEQ ID NO: 86359 - protein, 197 aa, Arabidopsis thaliana
  peptide (1)..(197): Ceres Seq. ID no. 12689245
  misc_feature (1)..(78): Pfam Name: Monooxygenase Pfam Description: Monooxygenase
  misc_feature (1)..(197): Homolog of NCBI NO: 15237902 NR Description: squalene monooxygenase 1,1 (squalene epoxidase protein id: At5g24150.1 [Arabidopsis thaliana] Squalene monooxygenase 1,1 (Squalene epoxidase 1,1) (SE 1,1)
  misc_feature (1)..(197): Homolog of NCBI NO: 11358675 NR Description: probable squalene monooxygenase (EC 1.14.99.7)
  misc_feature (1)..(197): Homolog of NCBI NO: 15237903 NR Description: squalene monooxygenase 1,2 (squalene epoxidase (SQP1,2)(SE1,2); protein id: At5g24160.1 [Arabidopsis thaliana] Squalene monooxygenase 1,2 (Squalene epoxidase 1,2) (SE 1,2)
  misc_feature (1)..(197): Homolog of NCBI NO: 6685411 NR Description: Squalene monooxygenase 1,1 (Squalene epoxidase
  misc_feature (1)..(197): Homolog of NCBI NO: 6685410 NR Description: Squalene monooxygenase 1,2 (Squalene epoxidase
  misc_feature (1)..(197): Homolog of NCBI NO: 15237900 NR Description: squalene monooxygenase 2 (squalene epoxidase 2) protein id: At5g24140.1 [Arabidopsis thaliana] Squalene monooxygenase 2 (Squalene epoxidase 2) (SE 2)
  misc_feature (1)..(190): Homolog of NCBI NO: 27311241 NR Description: Putative Squalene monooxygenase [Oryza sativa
  misc_feature (1)..(190): Homolog of NCBI NO: 27475610 NR Description: squalene monooxygenase 2 [Medicago truncatula]
  misc_feature (1)..(190): Homolog of NCBI NO: 27475612 NR Description: squalene monooxygenase 1 [Medicago truncatula]
  misc_feature (1)..(190): Homolog of NCBI NO: 27311240 NR Description: Putative Squalene monooxygenase [Oryza sativa
MTATLSEKKGVILLGDAFNMRHPAIASGMMVLLSDILILRRLLQPLSNLGNAQKISQVIKSFYDIRKPMSATVNTLGNAFSQVLVASTDEAKEAMRQGCYDYLSSGGFRTSGMMALLGGMNPRPISLIYHLCAITLSSIGHLLSPFPSPLRIWHSLRLFGLAMKMLVPHLKAEGVSQMLFPVNAAAYSKSYMAATAL

SEQ ID NO: 86360 - protein, 178 aa, Arabidopsis thaliana
  peptide (1)..(178): Ceres Seq. ID no. 12689246
  misc_feature (1)..(59): Pfam Name: Monooxygenase Pfam Description: Monooxygenase
  misc_feature (1)..(178): Homolog of NCBI NO: 15237902 NR Description: squalene monooxygenase 1,1 (squalene epoxidase protein id: At5g24150.1 [Arabidopsis thaliana] Squalene monooxygenase 1,1 (Squalene epoxidase 1,1) (SE 1,1)
  misc_feature (1)..(178): Homolog of NCBI NO: 11358675 NR Description: probable squalene monooxygenase (EC 1.14.99.7)
  misc_feature (1)..(178): Homolog of NCBI NO: 15237903 NR Description: squalene monooxygenase 1,2 (squalene epoxidase (SQP1,2)(SE1,2); protein id: At5g24160.1 [Arabidopsis thaliana] Squalene monooxygenase 1,2 (Squalene epoxidase 1,2) (SE 1,2)
  misc_feature (1)..(178): Homolog of NCBI NO: 6685411 NR Description: Squalene monooxygenase 1,1 (Squalene epoxidase
  misc_feature (1)..(178): Homolog of NCBI NO: 6685410 NR Description: Squalene monooxygenase 1,2 (Squalene epoxidase
  misc_feature (1)..(178): Homolog of NCBI NO: 15237900 NR Description: squalene monooxygenase 2 (squalene epoxidase 2) protein id: At5g24140.1 [Arabidopsis thaliana] Squalene monooxygenase 2 (Squalene epoxidase 2) (SE 2)
  misc_feature (1)..(171): Homolog of NCBI NO: 27311241 NR Description: Putative Squalene monooxygenase [Oryza sativa
  misc_feature (1)..(171): Homolog of NCBI NO: 27475610 NR Description: squalene monooxygenase 2 [Medicago truncatula]
  misc_feature (1)..(171): Homolog of NCBI NO: 27475612 NR Description: squalene monooxygenase 1 [Medicago truncatula]
  misc_feature (1)..(171): Homolog of NCBI NO: 27311240 NR Description: Putative Squalene monooxygenase [Oryza sativa
MRHPAIASGMMVLLSDILILRRLLQPLSNLGNAQKISQVIKSFYDIRKPMSATVNTLGNAFSQVLVASTDEAKEAMRQGCYDYLSSGGFRTSGMMALLGGMNPRPISLIYHLCAITLSSIGHLLSPFPSPLRIWHSLRLFGLAMKMLVPHLKAEGVSQMLFPVNAAAYSKSYMAATAL

SEQ ID NO: 86361 - DNA, 964 bp, Arabidopsis thaliana
  misc_feature (1)..(964): Ceres Seq. ID no. 12689271
  misc_feature: MA Experiment ID: 108433 Result: Up-regulated in Transcription
  misc_feature: MA Experiment 108433 PARAMETER Experiment Name: At_rhl_Mutant2_cDNA_P Parameter: Age (day) Value: 7
  misc_feature: MA Experiment 108433 PARAMETER Experiment Name: At_rhl_Mutant2_cDNA_P Parameter: Organism Value: A. thaliana
  misc_feature: MA Experiment 108433 PARAMETER Experiment Name: At_rhl_Mutant2_cDNA_P Parameter: Plant Line Value: rhl Mutant vs. wt landsburg
  misc_feature: MA Experiment 108433 PARAMETER Experiment Name: At_rhl_Mutant2_cDNA_P Parameter: Tissue Value: Roots
  misc_feature: MA Experiment ID: 108569 Result: Up-regulated in Transcription
  misc_feature: MA Experiment 108569 PARAMETER Experiment Name: At_0.001%_MeJA__cDNA_P Parameter: Timepoint (hr) Value: 6
  misc_feature: MA Experiment 108569 PARAMETER Experiment Name: At_0.001%_MeJA__cDNA_P Parameter: Tissue Value: Aerial
  misc_feature: MA Experiment 108569 PARAMETER Experiment Name: At_0.001%_MeJA__cDNA_P Parameter: Treatment Value: 0.001% MeJA vs. No Treatment
  misc_feature: MA Experiment ID: 108572 Result: Up-regulated in Transcription
  misc_feature: MA Experiment 108572 PARAMETER Experiment Name: At_Drought_cDNA_P Parameter: Timepoint (hr) Value: 1
  misc_feature: MA Experiment 108572 PARAMETER Experiment Name: At_Drought_cDNA_P Parameter: Tissue Value: Aerial
  misc_feature: MA Experiment 108572 PARAMETER Experiment Name: At_Drought_cDNA_P Parameter: Treatment Value: Drought vs. No Drought
  misc_feature: MA Experiment ID: 108573 Result: Up-regulated in Transcription
  misc_feature: MA Experiment 108573 PARAMETER Experiment Name: At_Drought_cDNA_P Parameter: Timepoint (hr) Value: 6
  misc_feature: MA Experiment 108573 PARAMETER Experiment Name: At_Drought_cDNA_P Parameter: Tissue Value: Aerial
  misc_feature: MA Experiment 108573 PARAMETER Experiment Name: At_Drought_cDNA_P Parameter: Treatment Value: Drought vs. No Drought
  misc_feature: MA Experiment ID: 108595 Result: Up-regulated in Transcription
  misc_feature: MA Experiment 108595 PARAMETER Experiment Name: At_Ler-pi_Ovule_cDNA_P Parameter: Plant Line Value: null
  misc_feature: MA Experiment ID: 20000069 Result: Up-regulated in Transcription
  misc_feature: MA Experiment 20000069 PARAMETER Experiment Name: At_100uM_ABA_Mutants_cDNA_P Parameter: Plant Line Value: CS23
  misc_feature: MA Experiment 20000069 PARAMETER Experiment Name: At_100uM_ABA_Mutants_cDNA_P Parameter: Timepoint (hr) Value: 6
  misc_feature: MA Experiment 20000069 PARAMETER Experiment Name: At_100uM_ABA_Mutants_cDNA_P Parameter: Tissue Value: Aerial
  misc_feature: MA Experiment 20000069 PARAMETER Experiment Name: At_100uM_ABA_Mutants_cDNA_P Parameter: Treatment Value: 100uM ABA vs. No Treatment
  misc_feature: MA Experiment ID: 20000070 Result: Up-regulated in Transcription
  misc_feature: MA Experiment 20000070 PARAMETER Experiment Name: At_100uM_ABA_Mutants_cDNA_P Parameter: Plant Line Value: CS24
  misc_feature: MA Experiment 20000070 PARAMETER Experiment Name: At_100uM_ABA_Mutants_cDNA_P Parameter: Timepoint (hr) Value: 6
  misc_feature: MA Experiment 20000070 PARAMETER Experiment Name: At_100uM_ABA_Mutants_cDNA_P Parameter: Tissue Value: Aerial
  misc_feature: MA Experiment 20000070 PARAMETER Experiment Name: At_100uM_ABA_Mutants_cDNA_P Parameter: Treatment Value: 100uM ABA vs. No Treatment
  misc_feature: MA Experiment ID: 20000071 Result: Up-regulated in Transcription
  misc_feature: MA Experiment 20000071 PARAMETER Experiment Name: At_100uM_ABA_Mutants_cDNA_P Parameter: Plant Line Value: CS8104
  misc_feature: MA Experiment 20000071 PARAMETER Experiment Name: At_100uM_ABA_Mutants_cDNA_P Parameter: Timepoint (hr) Value: 6
  misc_feature: MA Experiment 20000071 PARAMETER Experiment Name: At_100uM_ABA_Mutants_cDNA_P Parameter: Tissue Value: Aerial
  misc_feature: MA Experiment 20000071 PARAMETER Experiment Name: At_100uM_ABA_Mutants_cDNA_P Parameter: Treatment Value: 100uM ABA vs. No Treatment
  misc_feature: MA Experiment ID: 20000088 Result: Up-regulated in Transcription
  misc_feature: MA Experiment 20000088 PARAMETER Experiment Name: At_100uM_ABA_Mutants_cDNA_P Parameter: Plant Line Value: Landsberg
  misc_feature: MA Experiment 20000088 PARAMETER Experiment Name: At_100uM_ABA_Mutants_cDNA_P Parameter: Timepoint (hr) Value: 6
  misc_feature: MA Experiment 20000088 PARAMETER Experiment Name: At_100uM_ABA_Mutants_cDNA_P Parameter: Tissue Value: Aerial
  misc_feature: MA Experiment 20000088 PARAMETER Experiment Name: At_100uM_ABA_Mutants_cDNA_P Parameter: Treatment Value: 100uM ABA vs. No Treatment
  misc_feature: MA Experiment ID: 20000314 Result: Down-regulated in Transcription
  misc_feature: MA Experiment 20000314 PARAMETER Experiment Name: At_14day_Shoots-Roots_Sub_P Parameter: Age (day) Value: 14
  misc_feature: MA Experiment 20000314 PARAMETER Experiment Name: At_14day_Shoots-Roots_Sub_P Parameter: Organism Value: A. thaliana
  misc_feature: MA Experiment 20000314 PARAMETER Experiment Name: At_14day_Shoots-Roots_Sub_P Parameter: Plant Line Value: WS
  misc_feature: MA Experiment 20000314 PARAMETER Experiment Name: At_14day_Shoots-Roots_Sub_P Parameter: Tissue Value: Roots vs. Whole Plant
  misc_feature: MA Experiment ID: 20000315 Result: Down-regulated in Transcription
  misc_feature: MA Experiment 20000315 PARAMETER Experiment Name: At_14day_Shoots-Roots_Sub_P Parameter: Age (day) Value: 14
  misc_feature: MA Experiment 20000315 PARAMETER Experiment Name: At_14day_Shoots-Roots_Sub_P Parameter: Organism Value: A. thaliana
  misc_feature: MA Experiment 20000315 PARAMETER Experiment Name: At_14day_Shoots-Roots_Sub_P Parameter: Plant Line Value: WS
  misc_feature: MA Experiment 20000315 PARAMETER Experiment Name: At_14day_Shoots-Roots_Sub_P Parameter: Tissue Value: Shoots vs. Whole Plant
  misc_feature: MA Experiment ID: 20000348 Result: Up-regulated in Transcription
  misc_feature: MA Experiment 20000348 PARAMETER Experiment Name: At_100uM_ABA_Sub_P Parameter: Age (day) Value: 14
  misc_feature: MA Experiment 20000348 PARAMETER Experiment Name: At_100uM_ABA_Sub_P Parameter: Organism Value: A. thaliana
  misc_feature: MA Experiment 20000348 PARAMETER Experiment Name: At_100uM_ABA_Sub_P Parameter: Plant Line Value: WS
  misc_feature: MA Experiment 20000348 PARAMETER Experiment Name: At_100uM_ABA_Sub_P Parameter: Timepoint (hr) Value: 1
  misc_feature: MA Experiment 20000348 PARAMETER Experiment Name: At_100uM_ABA_Sub_P Parameter: Tissue Value: Aerial
  misc_feature: MA Experiment 20000348 PARAMETER Experiment Name: At_100uM_ABA_Sub_P Parameter: Treatment Value: 100uM ABA vs. No Treatment
  misc_feature: MA Experiment ID: 20000349 Result: Up-regulated in Transcription
  misc_feature: MA Experiment 20000349 PARAMETER Experiment Name: At_100uM_ABA_Sub_P Parameter: Age (day) Value: 14
  misc_feature: MA Experiment 20000349 PARAMETER Experiment Name: At_100uM_ABA_Sub_P Parameter: Organism Value: A. thaliana
  misc_feature: MA Experiment 20000349 PARAMETER Experiment Name: At_100uM_ABA_Sub_P Parameter: Plant Line Value: WS
  misc_feature: MA Experiment 20000349 PARAMETER Experiment Name: At_100uM_ABA_Sub_P Parameter: Timepoint (hr) Value: 6
  misc_feature: MA Experiment 20000349 PARAMETER Experiment Name: At_100uM_ABA_Sub_P Parameter: Tissue Value: Aerial
  misc_feature: MA Experiment 20000349 PARAMETER Experiment Name: At_100uM_ABA_Sub_P Parameter: Treatment Value: 100uM ABA vs. No Treatment
aaacaccataaactaaacaataaaccatacaaaaaaatatgaaaatcctctcactttcactactcttgctcttggccgctacggtctcccacgtccagtcttcggcatccgttccagggctcatcgaactcctcgaatcgaacaccatctttgggaacgaagccgaactcttagagaaagagggactgtccatcaactaccccaactgcagaagctggcaccttggtgttgagacctctaacatcataaacttcgacacggtgcccgcaaattgcaaagcctatgttgaagactacttgatcacttccaaacagtaccaatacgactccaaaactgtaaacaaagaggcatatttttacgccaaaggacttgccctaaagaacgataccgtcaatgtttggatctttgacctagacgacactctcctctctagtattccctactacgctaaatatggatatgggaccgagaacacagccccgggggcgtactggtcgtggttagagtccggagaatcaactccaggactcccggagaccttgcatctatacgaaaacctcttggaactcgggattgaacccatcataatctctgacagatggaaaaaattgtcagaagtcactgtcgagaatctcaaggctgttggtgtaacaaaatggaagcatctcatactcaagccaaacggatcgaagttgacgcaagtggtgtacaagtcaaaggttaggaatagccttgtgaagaaagggtacaacatcgttgggaatattggagaccaatgggctgatttggttgaggatactcctggaagggtttttaagctcccaaatccactctactacgtaccttcttaattaagcatctatcttcatggcattgtccccttgtatccatttcatatctatgtcgtttcgtttatctttgtagccgttttggcaccactgcttaaataaaatgccaatcctat

SEQ ID NO: 86362 - protein, 270 aa, Arabidopsis thaliana
  peptide (1)..(270): Ceres Seq. ID no. 12689272
  misc_feature (41)..(269): Pfam Name: HAD superfamily, subfamily IIIB (Acid phosphatase) Pfam Description: HAD superfamily, subfamily IIIB (Acid
  misc_feature (1)..(270): Homolog of NCBI NO: 18420838 NR Description: vegetative storage protein Vsp1; protein id: supported by cDNA: 32606., supported by cDNA: gi_14423385, by cDNA: gi_14994268, supported by cDNA: gi_18377509, supported
  misc_feature (1)..(270): Homolog of NCBI NO: 18206363 NR Description: Vegetative storage protein 1 precursor putative vegetative storage protein [Arabidopsis thaliana]
  misc_feature (1)..(270): Homolog of NCBI NO: 2373397 NR Description: vegetative storage protein [Arabidopsis thaliana]
  misc_feature (3)..(270): Homolog of NCBI NO: 629583 NR Description: vegetative storage protein, 30K - Arabidopsis >gi|512404|emb|CAA56036.1| vegetative storage product
  misc_feature (1)..(270): Homolog of NCBI NO: 18420836 NR Description: vegetative storage protein Vsp2; protein id: supported by cDNA: 124735., supported by cDNA: gi_15081778, by cDNA: gi_15292770, supported by cDNA: gi_20260183, supported
  misc_feature (1)..(270): Homolog of NCBI NO: 21537241 NR Description: vegetative storage protein Vsp2 [Arabidopsis
  misc_feature (1)..(270): Homolog of NCBI NO: 2373399 NR Description: vegetative storage protein [Arabidopsis thaliana]
MKILSLSLLLLLAATVSHVQSSASVPGLIELLESNTIFGNEAELLEKEGLSINYPNCRSWHLGVETSNIINFDTVPANCKAYVEDYLITSKQYQYDSKTVNKEAYFYAKGLALKNDTVNVWIFDLDDTLLSSIPYYAKYGYGTENTAPGAYWSWLESGESTPGLPETLHLYENLLELGIEPIIISDRWKKLSEVTVENLKAVGVTKWKHLILKPNGSKLTQVVYKSKVRNSLVKKGYNIVGNIGDQWADLVEDTPGRVFKLPNPLYYVPS

SEQ ID NO: 86363 - DNA, 951 bp, Arabidopsis thaliana
  misc_feature (1)..(951): Ceres Seq. ID no. 12689273
  misc_feature: MA Experiment ID: 108462 Result: Down-regulated in Transcription
  misc_feature: MA Experiment 108462 PARAMETER Experiment Name: At_Germinating_Seeds_cDNA_P Parameter: Age (day) Value: 2 vs. 0
  misc_feature: MA Experiment 108462 PARAMETER Experiment Name: At_Germinating_Seeds_cDNA_P Parameter: Tissue Value: Germinating Seeds
  misc_feature: MA Experiment ID: 108463 Result: Down-regulated in Transcription
  misc_feature: MA Experiment 108463 PARAMETER Experiment Name: At_Germinating_Seeds_cDNA_P Parameter: Age (day) Value: 3 vs. 0
  misc_feature: MA Experiment 108463 PARAMETER Experiment Name: At_Germinating_Seeds_cDNA_P Parameter: Tissue Value: Germinating Seeds
  misc_feature: MA Experiment ID: 108464 Result: Down-regulated in Transcription
  misc_feature: MA Experiment 108464 PARAMETER Experiment Name: At_Germinating_Seeds_cDNA_P Parameter: Age (day) Value: 4 vs. 0
  misc_feature: MA Experiment 108464 PARAMETER Experiment Name: At_Germinating_Seeds_cDNA_P Parameter: Tissue Value: Germinating Seeds
  misc_feature: MA Experiment ID: 108595 Result: Down-regulated in Transcription
  misc_feature: MA Experiment 108595 PARAMETER Experiment Name: At_Ler-pi_Ovule_cDNA_P Parameter: Plant Line Value: null
  misc_feature: MA Experiment ID: 20001911 Result: Up-regulated in Transcription
  misc_feature: MA Experiment 20001911 PARAMETER Experiment Name: At_Drought_Reproduction_P Parameter: Age (day) Value: 40
  misc_feature: MA Experiment 20001911 PARAMETER Experiment Name: At_Drought_Reproduction_P Parameter: Organism Value: A. thaliana
  misc_feature: MA Experiment 20001911 PARAMETER Experiment Name: At_Drought_Reproduction_P Parameter: Plant Line Value: WS
  misc_feature: MA Experiment 20001911 PARAMETER Experiment Name: At_Drought_Reproduction_P Parameter: Timepoint (day) Value: 10
  misc_feature: MA Experiment 20001911 PARAMETER Experiment Name: At_Drought_Reproduction_P Parameter: Tissue Value: Flowers
  misc_feature: MA Experiment 20001911 PARAMETER Experiment Name: At_Drought_Reproduction_P Parameter: Treatment Value: Drought vs. No Drought
gcgaaagaataaaagtgtgacaaattaagaagagagaaatggggaaagacggagaaggagacaagaagcgagaaacaatggcggtgatgagcttaatgaaggatcaacagaatccaattcaacagtttcaagtcaaattcaaggagattgagactggtttcaagtcgtggttatcaaaacagaagttaccggtggaagccgccgttgtcacggccatgggtggtgttcagggagcttttatcggtggtttaatgggaactttatctcctgaaatgcctcaggctggtattgaccctcaagctatggcttcgctaaagcaaactcaggctcttgttggtgggcctttggttcaagctcggaactttgctgctataactggtgttaatgctggtattgcttgtgttatgaaacggattagaggcaaggaggatttagaatctgctgtggtcgcagcattcggatctggagttgcatattctcttgtgagcgcaggattacaaggacagcctatgaatgcaatcaccactgctgctggtttcgctgtttttcaaggagtgtttttcaagttgggtgaaaggttctctaaaccaagtgttgaagatccatattacacccggggaagatctatgttgttgaaactgggtctagagaagtatgagaagaacttcaagaaaggtttattagctgacccaactctgccattgctcactgatagcgcgctaagagacgtgagcatcccgcctggaccaaggctactgatacttgatcacatccaaagggaccctgagctaaagggcaagcggggaagtcgtggttgagacttgagagcctctctccttcttctgcagaatctttgttgttgtaagatgttataaggatctcaagcacctattattcttaaatattattggttgatgttgctagcaagaaaaattgaatacaaccttaaaa

SEQ ID NO: 86364 - protein, 259 aa, Arabidopsis thaliana; identical to SEQ ID NO: 27175
  peptide (1)..(259): Ceres Seq. ID no. 12689274
  misc_feature (43)..(181): Pfam Name: Tim17/Tim22/Tim23 family Pfam Description: Tim17/Tim22/Tim23 family
  misc_feature (1)..(259): Homolog of NCBI NO: 15238598 NR Description: putative protein; protein id: At5g24650.1, by cDNA: 5684., supported by cDNA: gi_17979478 [Arabidopsis >gi|10177865|dbj|BAB11217.1|
  misc_feature (14)..(259): Homolog of NCBI NO: 21593899 NR Description: unknown [Arabidopsis thaliana]
  misc_feature (1)..(255): Homolog of NCBI NO: 15229167 NR Description: putative protein; protein id: At3g49560.1, by cDNA: 15698., supported by cDNA: gi_13430557 [Arabidopsis
  misc_feature (25)..(247): Homolog of NCBI NO: 32487911 NR Description: OJ000315_02.15 [Oryza sativa (japonica

SEQ ID NO: 86365 - protein, 246 aa, Arabidopsis thaliana; identical to SEQ ID NO: 27176
  peptide (1)..(246): Ceres Seq. ID no. 12689275
  misc_feature (30)..(168): Pfam Name: Tim17/Tim22/Tim23 family Pfam Description: Tim17/Tim22/Tim23 family
  misc_feature (1)..(246): Homolog of NCBI NO: 15238598 NR Description: putative protein; protein id: At5g24650.1, by cDNA: 5684., supported by cDNA: gi_17979478 [Arabidopsis >gi|10177865|dbj|BAB11217.1|
  misc_feature (1)..(246): Homolog of NCBI NO: 21593899 NR Description: unknown [Arabidopsis thaliana]
  misc_feature (1)..(242): Homolog of NCBI NO: 15229167 NR Description: putative protein; protein id: At3g49560.1, by cDNA: 15698., supported by cDNA: gi_13430557 [Arabidopsis
  misc_feature (12)..(234): Homolog of NCBI NO: 32487911 NR Description: OJ000315_02.15 [Oryza sativa (japonica

SEQ ID NO: 86366 - protein, 243 aa, Arabidopsis thaliana; identical to SEQ ID NO: 27177
  peptide (1)..(243): Ceres Seq. ID no. 12689276
  misc_feature (27)..(165): Pfam Name: Tim17/Tim22/Tim23 family Pfam Description: Tim17/Tim22/Tim23 family
  misc_feature (1)..(243): Homolog of NCBI NO: 15238598 NR Description: putative protein; protein id: At5g24650.1, by cDNA: 5684., supported by cDNA: gi_17979478 [Arabidopsis >gi|10177865|dbj|BAB11217.1|
  misc_feature (1)..(243): Homolog of NCBI NO: 21593899 NR Description: unknown [Arabidopsis thaliana]
  misc_feature (1)..(239): Homolog of NCBI NO: 15229167 NR Description: putative protein; protein id: At3g49560.1, by cDNA: 15698., supported by cDNA: gi_13430557 [Arabidopsis
  misc_feature (9)..(231): Homolog of NCBI NO: 32487911 NR Description: OJ000315_02.15 [Oryza sativa (japonica

SEQ ID NO: 86367 - DNA, 937 bp, Arabidopsis thaliana
  misc_feature (1)..(937): Ceres Seq. ID no. 12689277
  misc_feature: MA Experiment ID: 108433 Result: Up-regulated in Transcription
  misc_feature: MA Experiment 108433 PARAMETER Experiment Name: At_rhl_Mutant2_cDNA_P Parameter: Age (day) Value: 7
  misc_feature: MA Experiment 108433 PARAMETER Experiment Name: At_rhl_Mutant2_cDNA_P Parameter: Organism Value: A. thaliana
  misc_feature: MA Experiment 108433 PARAMETER Experiment Name: At_rhl_Mutant2_cDNA_P Parameter: Plant Line Value: rhl Mutant vs. wt landsburg
  misc_feature: MA Experiment 108433 PARAMETER Experiment Name: At_rhl_Mutant2_cDNA_P Parameter: Tissue Value: Roots
  misc_feature: MA Experiment ID: 108434 Result: Down-regulated in Transcription
  misc_feature: MA Experiment 108434 PARAMETER Experiment Name: At_Root_Tips_cDNA_P Parameter: Tissue Value: Root Tips
  misc_feature: MA Experiment ID: 108462 Result: Up-regulated in Transcription
  misc_feature: MA Experiment 108462 PARAMETER Experiment Name: At_Germinating_Seeds_cDNA_P Parameter: Age (day) Value: 2 vs. 0
  misc_feature: MA Experiment 108462 PARAMETER Experiment Name: At_Germinating_Seeds_cDNA_P Parameter: Tissue Value: Germinating Seeds
  misc_feature: MA Experiment ID: 108463 Result: Up-regulated in Transcription
  misc_feature: MA Experiment 108463 PARAMETER Experiment Name: At_Germinating_Seeds_cDNA_P Parameter: Age (day) Value: 3 vs. 0
  misc_feature: MA Experiment 108463 PARAMETER Experiment Name: At_Germinating_Seeds_cDNA_P Parameter: Tissue Value: Germinating Seeds
  misc_feature: MA Experiment ID: 108464 Result: Up-regulated in Transcription
  misc_feature: MA Experiment 108464 PARAMETER Experiment Name: At_Germinating_Seeds_cDNA_P Parameter: Age (day) Value: 4 vs. 0
  misc_feature: MA Experiment 108464 PARAMETER Experiment Name: At_Germinating_Seeds_cDNA_P Parameter: Tissue Value: Germinating Seeds
  misc_feature: MA Experiment ID: 108488 Result: Up-regulated in Transcription
  misc_feature: MA Experiment ID: 108569 Result: Up-regulated in Transcription
  misc_feature: MA Experiment 108569 PARAMETER Experiment Name: At_0.001%_MeJA__cDNA_P Parameter: Timepoint (hr) Value: 6
  misc_feature: MA Experiment 108569 PARAMETER Experiment Name: At_0.001%_MeJA__cDNA_P Parameter: Tissue Value: Aerial
  misc_feature: MA Experiment 108569 PARAMETER Experiment Name: At_0.001%_MeJA__cDNA_P Parameter: Treatment Value: 0.001% MeJA vs. No Treatment
  misc_feature: MA Experiment ID: 108572 Result: Up-regulated in Transcription
  misc_feature: MA Experiment 108572 PARAMETER Experiment Name: At_Drought_cDNA_P Parameter: Timepoint (hr) Value: 1
  misc_feature: MA Experiment 108572 PARAMETER Experiment Name: At_Drought_cDNA_P Parameter: Tissue Value: Aerial
  misc_feature: MA Experiment 108572 PARAMETER Experiment Name: At_Drought_cDNA_P Parameter: Treatment Value: Drought vs. No Drought
  misc_feature: MA Experiment ID: 108573 Result: Up-regulated in Transcription
  misc_feature: MA Experiment 108573 PARAMETER Experiment Name: At_Drought_cDNA_P Parameter: Timepoint (hr) Value: 6
  misc_feature: MA Experiment 108573 PARAMETER Experiment Name: At_Drought_cDNA_P Parameter: Tissue Value: Aerial
  misc_feature: MA Experiment 108573 PARAMETER Experiment Name: At_Drought_cDNA_P Parameter: Treatment Value: Drought vs. No Drought
  misc_feature: MA Experiment ID: 108574 Result: Up-regulated in Transcription
  misc_feature: MA Experiment 108574 PARAMETER Experiment Name: At_Wounding__cDNA_P Parameter: Timepoint (hr) Value: 1
  misc_feature: MA Experiment 108574 PARAMETER Experiment Name: At_Wounding__cDNA_P Parameter: Tissue Value: Aerial
  misc_feature: MA Experiment 108574 PARAMETER Experiment Name: At_Wounding__cDNA_P Parameter: Treatment Value: Wounding vs. No Wounding
  misc_feature: MA Experiment ID: 108594 Result: Down-regulated in Transcription
  misc_feature: MA Experiment 108594 PARAMETER Experiment Name: At_Ler-rhl_Root_cDNA_P Parameter: Plant Line Value: null
  misc_feature: MA Experiment ID: 108595 Result: Up-regulated in Transcription
  misc_feature: MA Experiment 108595 PARAMETER Experiment Name: At_Ler-pi_Ovule_cDNA_P Parameter: Plant Line Value: null
  misc_feature: MA Experiment ID: 108605 Result: Up-regulated in Transcription
  misc_feature: MA Experiment 108605 PARAMETER Experiment Name: At_100uM_ABA_cDNA_P Parameter: Timepoint (hr) Value: 6
  misc_feature: MA Experiment 108605 PARAMETER Experiment Name: At_100uM_ABA_cDNA_P Parameter: Tissue Value: Aerial
  misc_feature: MA Experiment 108605 PARAMETER Experiment Name: At_100uM_ABA_cDNA_P Parameter: Treatment Value: 100uM ABA vs. No Treatment
  misc_feature: MA Experiment ID: 108607 Result: Up-regulated in Transcription
  misc_feature: MA Experiment 108607 PARAMETER Experiment Name: At_100uM_ABA_cDNA_P Parameter: Timepoint (hr) Value: 4
  misc_feature: MA Experiment 108607 PARAMETER Experiment Name: At_100uM_ABA_cDNA_P Parameter: Tissue Value: Aerial
  misc_feature: MA Experiment 108607 PARAMETER Experiment Name: At_100uM_ABA_cDNA_P Parameter: Treatment Value: 100uM ABA vs. No Treatment
  misc_feature: MA Experiment ID: 108608 Result: Up-regulated in Transcription
  misc_feature: MA Experiment 108608 PARAMETER Experiment Name: At_100uM_ABA_cDNA_P Parameter: Timepoint (hr) Value: 1
  misc_feature: MA Experiment 108608 PARAMETER Experiment Name: At_100uM_ABA_cDNA_P Parameter: Tissue Value: Aerial
  misc_feature: MA Experiment 108608 PARAMETER Experiment Name: At_100uM_ABA_cDNA_P Parameter: Treatment Value: 100uM ABA vs. No Treatment
  misc_feature: MA Experiment ID: 108609 Result: Up-regulated in Transcription
  misc_feature: MA Experiment 108609 PARAMETER Experiment Name: At_100uM_ABA_cDNA_P Parameter: Timepoint (hr) Value: 24
  misc_feature: MA Experiment 108609 PARAMETER Experiment Name: At_100uM_ABA_cDNA_P Parameter: Tissue Value: Aerial
  misc_feature: MA Experiment 108609 PARAMETER Experiment Name: At_100uM_ABA_cDNA_P Parameter: Treatment Value: 100uM ABA vs. No Treatment
  misc_feature: MA Experiment ID: 20000030 Result: Down-regulated in Transcription
  misc_feature: MA Experiment 20000030 PARAMETER Experiment Name: At_CS6630_Roots_cDNA_P Parameter: Plant Line Value: CS6630 vs. WS
  misc_feature: MA Experiment 20000030 PARAMETER Experiment Name: At_CS6630_Roots_cDNA_P Parameter: Tissue Value: Roots
  misc_feature: MA Experiment ID: 20000068 Result: Up-regulated in Transcription
  misc_feature: MA Experiment ID: 20000069 Result: Up-regulated in Transcription
  misc_feature: MA Experiment 20000069 PARAMETER Experiment Name: At_100uM_ABA_Mutants_cDNA_P Parameter: Plant Line Value: CS23
  misc_feature: MA Experiment 20000069 PARAMETER Experiment Name: At_100uM_ABA_Mutants_cDNA_P Parameter: Timepoint (hr) Value: 6
  misc_feature: MA Experiment 20000069 PARAMETER Experiment Name: At_100uM_ABA_Mutants_cDNA_P Parameter: Tissue Value: Aerial
  misc_feature: MA Experiment 20000069 PARAMETER Experiment Name: At_100uM_ABA_Mutants_cDNA_P Parameter: Treatment Value: 100uM ABA vs. No Treatment
  misc_feature: MA Experiment ID: 20000070 Result: Up-regulated in Transcription
  misc_feature: MA Experiment 20000070 PARAMETER Experiment Name: At_100uM_ABA_Mutants_cDNA_P Parameter: Plant Line Value: CS24
  misc_feature: MA Experiment 20000070 PARAMETER Experiment Name: At_100uM_ABA_Mutants_cDNA_P Parameter: Timepoint (hr) Value: 6
  misc_feature: MA Experiment 20000070 PARAMETER Experiment Name: At_100uM_ABA_Mutants_cDNA_P Parameter: Tissue Value: Aerial
  misc_feature: MA Experiment 20000070 PARAMETER Experiment Name: At_100uM_ABA_Mutants_cDNA_P Parameter: Treatment Value: 100uM ABA vs. No Treatment
  misc_feature: MA Experiment ID: 20000071 Result: Up-regulated in Transcription
  misc_feature: MA Experiment 20000071 PARAMETER Experiment Name: At_100uM_ABA_Mutants_cDNA_P Parameter: Plant Line Value: CS8104
  misc_feature: MA Experiment 20000071 PARAMETER Experiment Name: At_100uM_ABA_Mutants_cDNA_P Parameter: Timepoint (hr) Value: 6
  misc_feature: MA Experiment 20000071 PARAMETER Experiment Name: At_100uM_ABA_Mutants_cDNA_P Parameter: Tissue Value: Aerial
  misc_feature: MA Experiment 20000071 PARAMETER Experiment Name: At_100uM_ABA_Mutants_cDNA_P Parameter: Treatment Value: 100uM ABA vs. No Treatment
  misc_feature: MA Experiment ID: 20000072 Result: Up-regulated in Transcription
  misc_feature: MA Experiment 20000072 PARAMETER Experiment Name: At_100uM_ABA_Mutants_cDNA_P Parameter: Plant Line Value: CS8105
  misc_feature: MA Experiment 20000072 PARAMETER Experiment Name: At_100uM_ABA_Mutants_cDNA_P Parameter: Timepoint (hr) Value: 6
  misc_feature: MA Experiment 20000072 PARAMETER Experiment Name: At_100uM_ABA_Mutants_cDNA_P Parameter: Tissue Value: Aerial
  misc_feature: MA Experiment 20000072 PARAMETER Experiment Name: At_100uM_ABA_Mutants_cDNA_P Parameter: Treatment Value: 100uM ABA vs. No Treatment
  misc_feature: MA Experiment ID: 20000086 Result: Up-regulated in Transcription
  misc_feature: MA Experiment 20000086 PARAMETER Experiment Name: At_100uM_ABA_Mutants_cDNA_P Parameter: Plant Line Value: CS22
  misc_feature: MA Experiment 20000086 PARAMETER Experiment Name: At_100uM_ABA_Mutants_cDNA_P Parameter: Timepoint (hr) Value: 6
  misc_feature: MA Experiment 20000086 PARAMETER Experiment Name: At_100uM_ABA_Mutants_cDNA_P Parameter: Tissue Value: Aerial
  misc_feature: MA Experiment 20000086 PARAMETER Experiment Name: At_100uM_ABA_Mutants_cDNA_P Parameter: Treatment Value: 100uM ABA vs. No Treatment
  misc_feature: MA Experiment ID: 20000087 Result: Up-regulated in Transcription
  misc_feature: MA Experiment 20000087 PARAMETER Experiment Name: At_100uM_ABA_Mutants_cDNA_P Parameter: Plant Line Value: WS
  misc_feature: MA Experiment 20000087 PARAMETER Experiment Name: At_100uM_ABA_Mutants_cDNA_P Parameter: Timepoint (hr) Value: 6
  misc_feature: MA Experiment 20000087 PARAMETER Experiment Name: At_100uM_ABA_Mutants_cDNA_P Parameter: Tissue Value: Aerial
  misc_feature: MA Experiment 20000087 PARAMETER Experiment Name: At_100uM_ABA_Mutants_cDNA_P Parameter: Treatment Value: 100uM ABA vs. No Treatment
  misc_feature: MA Experiment ID: 20000088 Result: Up-regulated in Transcription
  misc_feature: MA Experiment 20000088 PARAMETER Experiment Name: At_100uM_ABA_Mutants_cDNA_P Parameter: Plant Line Value: Landsberg
  misc_feature: MA Experiment 20000088 PARAMETER Experiment Name: At_100uM_ABA_Mutants_cDNA_P Parameter: Timepoint (hr) Value: 6
  misc_feature: MA Experiment 20000088 PARAMETER Experiment Name: At_100uM_ABA_Mutants_cDNA_P Parameter: Tissue Value: Aerial
  misc_feature: MA Experiment 20000088 PARAMETER Experiment Name: At_100uM_ABA_Mutants_cDNA_P Parameter: Treatment Value: 100uM ABA vs. No Treatment
  misc_feature: MA Experiment ID: 20000089 Result: Up-regulated in Transcription
  misc_feature: MA Experiment ID: 20000112 Result: Down-regulated in Transcription
  misc_feature: MA Experiment 20000112 PARAMETER Experiment Name: At_42deg_Heat_cDNA_P Parameter: Temperature (deg C) Value: 42 vs. 22
  misc_feature: MA Experiment 20000112 PARAMETER Experiment Name: At_42deg_Heat_cDNA_P Parameter: Timepoint (hr) Value: 2
  misc_feature: MA Experiment 20000112 PARAMETER Experiment Name: At_42deg_Heat_cDNA_P Parameter: Tissue Value: Aerial
  misc_feature: MA Experiment ID: 20000117 Result: Up-regulated in Transcription
  misc_feature: MA Experiment 20000117 PARAMETER Experiment Name: At_100uM_ABA_Mutants_cDNA_P Parameter: Plant Line Value: Columbia
  misc_feature: MA Experiment 20000117 PARAMETER Experiment Name: At_100uM_ABA_Mutants_cDNA_P Parameter: Timepoint (hr) Value: 6
  misc_feature: MA Experiment 20000117 PARAMETER Experiment Name: At_100uM_ABA_Mutants_cDNA_P Parameter: Tissue Value: Aerial
  misc_feature: MA Experiment 20000117 PARAMETER Experiment Name: At_100uM_ABA_Mutants_cDNA_P Parameter: Treatment Value: 100uM ABA vs. No Treatment
  misc_feature: MA Experiment ID: 20000144 Result: Down-regulated in Transcription
  misc_feature: MA Experiment 20000144 PARAMETER Experiment Name: At_42deg_Heat_cDNA_P Parameter: Temperature (deg C) Value: 42 vs. 22
  misc_feature: MA Experiment 20000144 PARAMETER Experiment Name: At_42deg_Heat_cDNA_P Parameter: Timepoint (hr) Value: 1
  misc_feature: MA Experiment 20000144 PARAMETER Experiment Name: At_42deg_Heat_cDNA_P Parameter: Tissue Value: Aerial
  misc_feature: MA Experiment ID: 20000224 Result: Up-regulated in Transcription
  misc_feature: MA Experiment ID: 20000314 Result: Down-regulated in Transcription
  misc_feature: MA Experiment 20000314 PARAMETER Experiment Name: At_14day_Shoots-Roots_Sub_P Parameter: Age (day) Value: 14
  misc_feature: MA Experiment 20000314 PARAMETER Experiment Name: At_14day_Shoots-Roots_Sub_P Parameter: Organism Value: A. thaliana
  misc_feature: MA Experiment 20000314 PARAMETER Experiment Name: At_14day_Shoots-Roots_Sub_P Parameter: Plant Line Value: WS
  misc_feature: MA Experiment 20000314 PARAMETER Experiment Name: At_14day_Shoots-Roots_Sub_P Parameter: Tissue Value: Roots vs. Whole Plant
  misc_feature: MA Experiment ID: 20000315 Result: Down-regulated in Transcription
  misc_feature: MA Experiment 20000315 PARAMETER Experiment Name: At_14day_Shoots-Roots_Sub_P Parameter: Age (day) Value: 14
  misc_feature: MA Experiment 20000315 PARAMETER Experiment Name: At_14day_Shoots-Roots_Sub_P Parameter: Organism Value: A. thaliana
  misc_feature: MA Experiment 20000315 PARAMETER Experiment Name: At_14day_Shoots-Roots_Sub_P Parameter: Plant Line Value: WS
  misc_feature: MA Experiment 20000315 PARAMETER Experiment Name: At_14day_Shoots-Roots_Sub_P Parameter: Tissue Value: Shoots vs. Whole Plant
  misc_feature: MA Experiment ID: 20000348 Result: Up-regulated in Transcription
  misc_feature: MA Experiment 20000348 PARAMETER Experiment Name: At_100uM_ABA_Sub_P Parameter: Age (day) Value: 14
  misc_feature: MA Experiment 20000348 PARAMETER Experiment Name: At_100uM_ABA_Sub_P Parameter: Organism Value: A. thaliana
  misc_feature: MA Experiment 20000348 PARAMETER Experiment Name: At_100uM_ABA_Sub_P Parameter: Plant Line Value: WS
  misc_feature: MA Experiment 20000348 PARAMETER Experiment Name: At_100uM_ABA_Sub_P Parameter: Timepoint (hr) Value: 1
  misc_feature: MA Experiment 20000348 PARAMETER Experiment Name: At_100uM_ABA_Sub_P Parameter: Tissue Value: Aerial
  misc_feature: MA Experiment 20000348 PARAMETER Experiment Name: At_100uM_ABA_Sub_P Parameter: Treatment Value: 100uM ABA vs. No Treatment
  misc_feature: MA Experiment ID: 20000349 Result: Up-regulated in Transcription
  misc_feature: MA Experiment 20000349 PARAMETER Experiment Name: At_100uM_ABA_Sub_P Parameter: Age (day) Value: 14
  misc_feature: MA Experiment 20000349 PARAMETER Experiment Name: At_100uM_ABA_Sub_P Parameter: Organism Value: A. thaliana
  misc_feature: MA Experiment 20000349 PARAMETER Experiment Name: At_100uM_ABA_Sub_P Parameter: Plant Line Value: WS
  misc_feature: MA Experiment 20000349 PARAMETER Experiment Name: At_100uM_ABA_Sub_P Parameter: Timepoint (hr) Value: 6
  misc_feature: MA Experiment 20000349 PARAMETER Experiment Name: At_100uM_ABA_Sub_P Parameter: Tissue Value: Aerial
  misc_feature: MA Experiment 20000349 PARAMETER Experiment Name: At_100uM_ABA_Sub_P Parameter: Treatment Value: 100uM ABA vs. No Treatment
  misc_feature: Pfam Name: Acid_phosphat_B Pfam Description: HAD superfamily, subfamily IIIB (Acid phosphatase)
aaacaccataaactaaacaataaaccatacaaaaaaatatgaaaatcctctcactttcactactcttgctcttggccgctacggtctcccacgtccagtcttcggcatccgttccagggctcatcgaactcctcgaccgaactcttagagaaagagggactgtccatcaactaccccaactgcagaagctggcaccttggtgttgagacctctaacatcataaacttcgacacggtgcccgcaaattgcaaagcctatgttgaagactacttgatcacttccaaacagtaccaatacgactccaaaactgtaaacaaagaggcatatttttacgccaaaggacttgccctaaagaacgataccgtcaatgtttggatctttgacctagacgacactctcctctctagtattccctactacgctaaatatggatatgggaccgagaacacagccccgggggcgtactggtcgtggttagagtccggagaatcaactccaggactcccggagaccttgcatctatacgaaaacctcttggaactcgggattgaacccatcataatctctgacagatggaaaaaattgtcagaagtcactgtcgagaatctcaaggctgttggtgtaacaaaatggaagcatctcatactcaagccaaacggatcgaagttgacgcaagtggtgtacaagtcaaaggttaggaatagccttgtgaagaaagggtacaacatcgttgggaatattggagaccaatgggctgatttggttgaggatactcctggaagggtttttaagctcccaaatccactctactacgtaccttcttaattaagcatctatcttcatggcattgtccccttgtatccatttcatatctatgtcgtttcgtttatctttgtagccgttttggcaccactgcttaaataaaatgccaatccta

SEQ ID NO: 86368 - protein, 55 aa, Arabidopsis thaliana; identical to SEQ ID NO: 42043
  peptide (1)..(55): Ceres Seq. ID no. 12689278
  misc_feature: Pfam Name: Acid_phosphat_B Pfam Description: HAD superfamily, subfamily IIIB (Acid phosphatase)
  misc_feature (1)..(33): Homolog of NCBI NO: 18420838 NR Description: vegetative storage protein Vsp1; protein id: supported by cDNA: 32606., supported by cDNA: gi_14423385, by cDNA: gi_14994268, supported by cDNA: gi_18377509, supported
  misc_feature (1)..(33): Homolog of NCBI NO: 18206363 NR Description: Vegetative storage protein 1 precursor putative vegetative storage protein [Arabidopsis thaliana]
  misc_feature (1)..(33): Homolog of NCBI NO: 2373397 NR Description: vegetative storage protein [Arabidopsis thaliana]
  misc_feature (3)..(33): Homolog of NCBI NO: 629583 NR Description: vegetative storage protein, 30K - Arabidopsis >gi|512404|emb|CAA56036.1| vegetative storage product

SEQ ID NO: 86369 - protein, 41 aa, Arabidopsis thaliana
  peptide (1)..(41): Ceres Seq. ID no. 12689279
  misc_feature: Pfam Name: Acid_phosphat_B Pfam Description: HAD superfamily, subfamily IIIB (Acid phosphatase)
MEKIVRSHCRESQGCWCNKMEASHTQAKRIEVDASGVQVKG

SEQ ID NO: 86370 - DNA, 849 bp, Arabidopsis thaliana
  misc_feature (1)..(849): Ceres Seq. ID no. 12689307
  misc_feature: MA Experiment ID: 20000306 Result: Down-regulated in Transcription
  misc_feature: MA Experiment 20000306 PARAMETER Experiment Name: At_Germinating_Seeds_Sub_P Parameter: Age (hr) Value: 6 vs. 0
  misc_feature: MA Experiment 20000306 PARAMETER Experiment Name: At_Germinating_Seeds_Sub_P Parameter: Organism Value: A. thaliana
  misc_feature: MA Experiment 20000306 PARAMETER Experiment Name: At_Germinating_Seeds_Sub_P Parameter: Plant Line Value: WS
  misc_feature: MA Experiment 20000306 PARAMETER Experiment Name: At_Germinating_Seeds_Sub_P Parameter: Tissue Value: Germinating Seeds
  misc_feature: MA Experiment ID: 20000307 Result: Down-regulated in Transcription
  misc_feature: MA Experiment 20000307 PARAMETER Experiment Name: At_Germinating_Seeds_Sub_P Parameter: Age (hr) Value: 24 vs. 0
  misc_feature: MA Experiment 20000307 PARAMETER Experiment Name: At_Germinating_Seeds_Sub_P Parameter: Organism Value: A. thaliana
  misc_feature: MA Experiment 20000307 PARAMETER Experiment Name: At_Germinating_Seeds_Sub_P Parameter: Plant Line Value: WS
  misc_feature: MA Experiment 20000307 PARAMETER Experiment Name: At_Germinating_Seeds_Sub_P Parameter: Tissue Value: Germinating Seeds
  misc_feature: MA Experiment ID: 20000314 Result: Up-regulated in Transcription
  misc_feature: MA Experiment 20000314 PARAMETER Experiment Name: At_14day_Shoots-Roots_Sub_P Parameter: Age (day) Value: 14
  misc_feature: MA Experiment 20000314 PARAMETER Experiment Name: At_14day_Shoots-Roots_Sub_P Parameter: Organism Value: A. thaliana
  misc_feature: MA Experiment 20000314 PARAMETER Experiment Name: At_14day_Shoots-Roots_Sub_P Parameter: Plant Line Value: WS
  misc_feature: MA Experiment 20000314 PARAMETER Experiment Name: At_14day_Shoots-Roots_Sub_P Parameter: Tissue Value: Roots vs. Whole Plant
  misc_feature: MA Experiment ID: 20000328 Result: Down-regulated in Transcription
  misc_feature: MA Experiment 20000328 PARAMETER Experiment Name: At_42deg_Heat_Sub_P Parameter: Age (day) Value: 14
  misc_feature: MA Experiment 20000328 PARAMETER Experiment Name: At_42deg_Heat_Sub_P Parameter: Organism Value: A. thaliana
  misc_feature: MA Experiment 20000328 PARAMETER Experiment Name: At_42deg_Heat_Sub_P Parameter: Plant Line Value: WS
  misc_feature: MA Experiment 20000328 PARAMETER Experiment Name: At_42deg_Heat_Sub_P Parameter: Temperature (deg C) Value: 42 vs. 22
  misc_feature: MA Experiment 20000328 PARAMETER Experiment Name: At_42deg_Heat_Sub_P Parameter: Timepoint (hr) Value: 6
  misc_feature: MA Experiment 20000328 PARAMETER Experiment Name: At_42deg_Heat_Sub_P Parameter: Tissue Value: Aerial
  misc_feature: MA Experiment ID: 20000332 Result: Up-regulated in Transcription
  misc_feature: MA Experiment 20000332 PARAMETER Experiment Name: At_4deg_Cold_Sub_P Parameter: Age (day) Value: 14
  misc_feature: MA Experiment 20000332 PARAMETER Experiment Name: At_4deg_Cold_Sub_P Parameter: Organism Value: A. thaliana
  misc_feature: MA Experiment 20000332 PARAMETER Experiment Name: At_4deg_Cold_Sub_P Parameter: Plant Line Value: WS
  misc_feature: MA Experiment 20000332 PARAMETER Experiment Name: At_4deg_Cold_Sub_P Parameter: Temperature (deg C) Value: 4 vs. 22
  misc_feature: MA Experiment 20000332 PARAMETER Experiment Name: At_4deg_Cold_Sub_P Parameter: Timepoint (hr) Value: 2
  misc_feature: MA Experiment 20000332 PARAMETER Experiment Name: At_4deg_Cold_Sub_P Parameter: Tissue Value: Aerial
  misc_feature: MA Experiment ID: 20000346 Result: Up-regulated in Transcription
  misc_feature: MA Experiment 20000346 PARAMETER Experiment Name: At_2mM_SA_Sub_P Parameter: Age (day) Value: 14
  misc_feature: MA Experiment 20000346 PARAMETER Experiment Name: At_2mM_SA_Sub_P Parameter: Organism Value: A. thaliana
  misc_feature: MA Experiment 20000346 PARAMETER Experiment Name: At_2mM_SA_Sub_P Parameter: Plant Line Value: WS
  misc_feature: MA Experiment 20000346 PARAMETER Experiment Name: At_2mM_SA_Sub_P Parameter: Timepoint (hr) Value: 1
  misc_feature: MA Experiment 20000346 PARAMETER Experiment Name: At_2mM_SA_Sub_P Parameter: Tissue Value: Aerial
  misc_feature: MA Experiment 20000346 PARAMETER Experiment Name: At_2mM_SA_Sub_P Parameter: Treatment Value: 2mM SA vs. No Treatment
  misc_feature: MA Experiment ID: 20000347 Result: Up-regulated in Transcription
  misc_feature: MA Experiment 20000347 PARAMETER Experiment Name: At_2mM_SA_Sub_P Parameter: Age (day) Value: 14
  misc_feature: MA Experiment 20000347 PARAMETER Experiment Name: At_2mM_SA_Sub_P Parameter: Organism Value: A. thaliana
  misc_feature: MA Experiment 20000347 PARAMETER Experiment Name: At_2mM_SA_Sub_P Parameter: Plant Line Value: WS
  misc_feature: MA Experiment 20000347 PARAMETER Experiment Name: At_2mM_SA_Sub_P Parameter: Timepoint (hr) Value: 6
  misc_feature: MA Experiment 20000347 PARAMETER Experiment Name: At_2mM_SA_Sub_P Parameter: Tissue Value: Aerial
  misc_feature: MA Experiment 20000347 PARAMETER Experiment Name: At_2mM_SA_Sub_P Parameter: Treatment Value: 2mM SA vs. No Treatment
  misc_feature: MA Experiment ID: 20000355 Result: Down-regulated in Transcription
  misc_feature: MA Experiment 20000355 PARAMETER Experiment Name: At_Siliques_Sub_P Parameter: Age (day) Value: 21
  misc_feature: MA Experiment 20000355 PARAMETER Experiment Name: At_Siliques_Sub_P Parameter: Organism Value: A. thaliana
  misc_feature: MA Experiment 20000355 PARAMETER Experiment Name: At_Siliques_Sub_P Parameter: Plant Line Value: WS
  misc_feature: MA Experiment 20000355 PARAMETER Experiment Name: At_Siliques_Sub_P Parameter: Tissue Value: Less Than 5mm Siliques vs. Whole Plant
  misc_feature: MA Experiment ID: 20000440 Result: Down-regulated in Transcription
  misc_feature: MA Experiment 20000440 PARAMETER Experiment Name: At_Closed-Flower__Sub_P Parameter: Tissue Value: Closed Flower vs. Whole Plant
  misc_feature: MA Experiment ID: 20000634 Result: Up-regulated in Transcription
  misc_feature: MA Experiment 20000634 PARAMETER Experiment Name: At_10percent_PEG_Sub_P Parameter: Age (day) Value: 12
  misc_feature: MA Experiment 20000634 PARAMETER Experiment Name: At_10percent_PEG_Sub_P Parameter: Organism Value: A. thaliana
  misc_feature: MA Experiment 20000634 PARAMETER Experiment Name: At_10percent_PEG_Sub_P Parameter: Plant Line Value: WS
  misc_feature: MA Experiment 20000634 PARAMETER Experiment Name: At_10percent_PEG_Sub_P Parameter: Timepoint (day) Value: 12
  misc_feature: MA Experiment 20000634 PARAMETER Experiment Name: At_10percent_PEG_Sub_P Parameter: Tissue Value: Whole Plant
  misc_feature: MA Experiment 20000634 PARAMETER Experiment Name: At_10percent_PEG_Sub_P Parameter: Treatment Value: 10% PEG vs. No Treatment
atgaagctttcttgtggtacaagctttgcgttcttacttctgtttcttcttgcggcacaatctgtgcatgtctatgcgggtagcttccacaaagacgttcagatacattggggtgatggccgcggaaagattcacgacagagatggaaaacttctttctctctcgctcgacaaatcctctggatccggttttcagtctaaccaggagtttctctatggcaaagccgaggttcaaatgaaacttgttcctggtaattcagctggaacagtgacaacattctatctaaaatctccgggaactacgtgggatgagatcgatttcgagttcttgggaaacataagtggtcatccatatactctccatactaatgtttacacaaaaggcacaggagacaaagaacaacaatttcatctatggttcgacccaaccgttaactttcacacttattgcatcacatggaatcctcaaaggattatttttacggttgatggaattcctattagagagttcaagaaccccgaggcgattggagtcccgttcccaactagacaaccaatgagactctacgcgagtctttgggaagccgagcattgggcaacaagaggaggattagagaaaacagattggtcaaaagctccttttactgctttttatagaaactacaatgtcgatggatgtgtatgggctaatggaaaatcatcttgttccgcgaattccccatggttcactcaaaaactcgattcgaacggccagacaagaatgaaaggtgtgcaaagtaaatacatgatctacaactattgcaccgataaaagaaggtttcctcgaggagttcctgccgagtgcacttaa

SEQ ID NO: 86371 - protein, 282 aa, Arabidopsis thaliana [sequence omitted]

SEQ ID NO: 86372 - protein, 204 aa, Arabidopsis thaliana; identical to SEQ ID NO: 81386
  peptide (1)..(204): Ceres Seq. ID no. 12689309
  misc_feature (1)..(133): Pfam Name: Glycosyl hydrolases family 16 Pfam Description: Glycosyl hydrolases family 16
  misc_feature (1)..(204): Homolog of NCBI NO: 15218642 NR Description: xyloglucan endotransglycosylase, putative; id: At1g65310.1, supported by cDNA: gi_13877724 [Arabidopsis
  misc_feature (1)..(204): Homolog of NCBI NO: 15234681 NR Description: xyloglucan endotransglycosylase, putative; id: At4g30280.1, supported by cDNA: 142204., supported by cDNA:
  misc_feature (1)..(204): Homolog of NCBI NO: 15234701 NR Description: xyloglucan endotransglycosylase, putative; id: At4g30290.1, supported by cDNA: gi_15215689 [Arabidopsis >gi|25313544|pir||B85354 hypothetical protein AT4g30290
  misc_feature (1)..(204): Homolog of NCBI NO: 15215690 NR Description: AT4g30290/F17I23_370 [Arabidopsis thaliana]
  misc_feature (1)..(204): Homolog of NCBI NO: 15238891 NR Description: xyloglucan endotransglycosylase, putative;
  misc_feature (1)..(203): Homolog of NCBI NO: 15242781 NR Description: xyloglucan endotransglycosylase (TCH4); protein At5g57560.1, supported by cDNA: gi_14194112, supported by cDNA:
  misc_feature (1)..(203): Homolog of NCBI NO: 3901012 NR Description: xyloglucan endotransglycosylase 1 [Fagus
  misc_feature (1)..(203): Homolog of NCBI NO: 15235997 NR Description: xyloglucan endotransglycosylase (XTR-6); protein At4g25810.1, supported by cDNA: gi_1244757, supported by cDNA:
  misc_feature (1)..(203): Homolog of NCBI NO: 22327914 NR Description: xyloglucan endotransglycosylase (XTR3); protein At5g57550.1 [Arabidopsis thaliana] endoxyloglucan transferase [Arabidopsis thaliana]
  misc_feature (1)..(203): Homolog of NCBI NO: 29500891 NR Description: putative xyloglucan endotransglycosylase [Cucumis >gi|29500899|emb|CAD87533.1| putative xyloglucan

SEQ ID NO: 86373 - DNA, 1116 bp, Arabidopsis thaliana
  misc_feature (1)..(1116): Ceres Seq. ID no. 12689324
  misc_feature: MA Experiment ID: 20000327 Result: Up-regulated in Transcription
  misc_feature: MA Experiment 20000327 PARAMETER Experiment Name: At_42deg_Heat_Sub_P Parameter: Age (day) Value: 14
  misc_feature: MA Experiment 20000327 PARAMETER Experiment Name: At_42deg_Heat_Sub_P Parameter: Organism Value: A. thaliana
  misc_feature: MA Experiment 20000327 PARAMETER Experiment Name: At_42deg_Heat_Sub_P Parameter: Plant Line Value: WS
  misc_feature: MA Experiment 20000327 PARAMETER Experiment Name: At_42deg_Heat_Sub_P Parameter: Temperature (deg C) Value: 42 vs. 22
  misc_feature: MA Experiment 20000327 PARAMETER Experiment Name: At_42deg_Heat_Sub_P Parameter: Timepoint (hr) Value: 1
  misc_feature: MA Experiment 20000327 PARAMETER Experiment Name: At_42deg_Heat_Sub_P Parameter: Tissue Value: Aerial
atgaatgtgaaaaaggctatgaagaagcaaaacgacgtcgcgatgatccttgggaggcacgtcttatcttctgagtcggaatctaacgtcatcttctcgccggcgtcaataaactctgcgatcaccatgcacgccgctggttccggaggtggcttagtcgccggtgaaatcctctccttcctcagatcttcttcaatcgatgagctcaaatccgtcttccgagaactatcatccatcgtctacgccgacagcagcgctagtggcggcccaaagatgagggcggtgaatggcctctggattgagaaatcactaccgattgatcccaaatacaaggctctcttcgagaacttcttcaaggctgtttacgttcccgtagatttccgatcaaaggctgaagaagtgcgtaaggaggtgaattcatgggttgaagatcacaccaataatctcatcaaagatcttcttcctcgtgaatctgtgacaagccgaaccaacaagatttacgcaaacgcattgtatttcaagggagcttggaagagaccatttgaaaagtactatacaaaagacagagacttccacatggtcaatggcactacagtctctgtgccattcatgaccagctacgagacacaaaaagtaagagcttataacggtccttaccgacgaggccgtgatgataccaaccgcaaattctcaatgtatttctatctccctgacaagaaagatggattggattatctcttgaagaaaatagcatctacacctggattcttggatagtcacattccgagatacaaagttgaacttgaggaatttagaattccaaagtttaagatcgaattcggtttttctgctacaagcgttttgaatcaagtgggagtactgcattcagtgtcaatgtaccataaagcttgtgtcgagatcgatgaagaaggtgctgaagctgcggctgcaactgctgatgtagaagatgacggttgtgctcttgatatggggccacctcctaagaagatagattttgtggctgatcatccatttattttccttatccgagaagacaaaaccgggaccgttttgttctttggtcagctcttcaaaccttcggaattcttgttctga

SEQ ID NO: 86374 - protein, 371 aa, Arabidopsis thaliana
  peptide (1)..(371): Ceres Seq. ID no. 12689325
  misc_feature (1)..(371): Homolog of NCBI NO: 7438226 NR Description: hypothetical protein T8F5.17 - Arabidopsis >gi|3335344|gb|AAC27146.1|AAC27146 Similar to serpin gene homolog
  misc_feature (1)..(367): Homolog of NCBI NO: 15222606 NR Description: hypothetical protein; protein id: At1g64030.1
  misc_feature (1)..(359): Homolog of NCBI NO: 25404920 NR Description: protein F22C12.22 [imported] - Arabidopsis >gi|6692103|gb|AAF24568.1|AC007764_10 F22C12.22 [Arabidopsis
  misc_feature (1)..(368): Homolog of NCBI NO: 15225956 NR Description: putative serpin; protein id: At2g14540.1, by cDNA: gi_18175862 [Arabidopsis thaliana]
  misc_feature (4)..(367): Homolog of NCBI NO: 6692102 NR Description: F22C12.21 [Arabidopsis thaliana]
  misc_feature (1)..(367): Homolog of NCBI NO: 15220721 NR Description: phloem serpin-1, putative; protein id:
  misc_feature (1)..(367): Homolog of NCBI NO: 25404364 NR Description: hypothetical protein F19K23.10 [imported] - thaliana >gi|2160141|gb|AAB60763.1| Strong similarity to Triticum
  misc_feature (36)..(211): Homolog of NCBI NO: 28436635 NR Description: putative serpin [Arabidopsis thaliana]
  misc_feature (1)..(293): Homolog of NCBI NO: 15220298 NR Description: serpin, putative; protein id: At1g47710.1
  misc_feature (298)..(366): Homolog of NCBI NO: 15220298 NR Description: serpin, putative; protein id: At1g47710.1
MNVKKAMKKQNDVAMILGRHVLSSESESNVIFSPASINSAITMHAAGSGGGLVAGEILSFLRSSSIDELKSVFRELSSIVYADSSASGGPKMRAVNGLWIEKSLPIDPKYKALFENFFKAVYVPVDFRSKAEEVRKEVNSWVEDHTNNLIKDLLPRESVTSRTNKIYANALYFKGAWKRPFEKYYTKDRDFHMVNGTTVSVPFMTSYETQKVRAYNGPYRRGRDDTNRKFSMYFYLPDKKDGLDYLLKKIASTPGFLDSHIPRYKVELEEFRIPKFKIEFGFSATSVLNQVGVLHSVSMYHKACVEIDEEGAEAAAATADVEDDGCALDMGPPPKKIDFVADHPFIFLIREDKTGTVLFFGQLFKPSEFLF

SEQ ID NO: 86375 - protein, 365 aa, Arabidopsis thaliana
  peptide (1)..(365): Ceres Seq. ID no. 12689326
  misc_feature (1)..(365): Homolog of NCBI NO: 7438226 NR Description: hypothetical protein T8F5.17 - Arabidopsis >gi|3335344|gb|AAC27146.1|AAC27146 Similar to serpin gene homolog
  misc_feature (1)..(361): Homolog of NCBI NO: 15222606 NR Description: hypothetical protein; protein id: At1g64030.1
  misc_feature (1)..(353): Homolog of NCBI NO: 25404920 NR Description: protein F22C12.22 [imported] - Arabidopsis >gi|6692103|gb|AAF24568.1|AC007764_10 F22C12.22 [Arabidopsis
  misc_feature (1)..(362): Homolog of NCBI NO: 15225956 NR Description: putative serpin; protein id: At2g14540.1, by cDNA: gi_18175862 [Arabidopsis thaliana]
  misc_feature (1)..(361): Homolog of NCBI NO: 6692102 NR Description: F22C12.21 [Arabidopsis thaliana]
  misc_feature (1)..(361): Homolog of NCBI NO: 15220721 NR Description: phloem serpin-1, putative; protein id:
  misc_feature (1)..(361): Homolog of NCBI NO: 25404364 NR Description: hypothetical protein F19K23.10 [imported] - thaliana >gi|2160141|gb|AAB60763.1| Strong similarity to Triticum
  misc_feature (30)..(205): Homolog of NCBI NO: 28436635 NR Description: putative serpin [Arabidopsis thaliana]
  misc_feature (1)..(287): Homolog of NCBI NO: 15220298 NR Description: serpin, putative; protein id: At1g47710.1
  misc_feature (292)..(360): Homolog of NCBI NO: 15220298 NR Description: serpin, putative; protein id: At1g47710.1
MKKQNDVAMILGRHVLSSESESNVIFSPASINSAITMHAAGSGGGLVAGEILSFLRSSSIDELKSVFRELSSIVYADSSASGGPKMRAVNGLWIEKSLPIDPKYKALFENFFKAVYVPVDFRSKAEEVRKEVNSWVEDHTNNLIKDLLPRESVTSRTNKIYANALYFKGAWKRPFEKYYTKDRDFHMVNGTTVSVPFMTSYETQKVRAYNGPYRRGRDDTNRKFSMYFYLPDKKDGLDYLLKKIASTPGFLDSHIPRYKVELEEFRIPKFKIEFGFSATSVLNQVGVLHSVSMYHKACVEIDEEGAEAAAATADVEDDGCALDMGPPPKKIDFVADHPFIFLIREDKTGTVLFFGQLFKPSEFLF

SEQ ID NO: 86376 - protein, 357 aa, Arabidopsis thaliana
  peptide (1)..(357): Ceres Seq. ID no. 12689327
  misc_feature (1)..(357): Homolog of NCBI NO: 7438226 NR Description: hypothetical protein T8F5.17 - Arabidopsis >gi|3335344|gb|AAC27146.1|AAC27146 Similar to serpin gene homolog
  misc_feature (1)..(353): Homolog of NCBI NO: 15222606 NR Description: hypothetical protein; protein id: At1g64030.1
  misc_feature (1)..(345): Homolog of NCBI NO: 25404920 NR Description: protein F22C12.22 [imported] - Arabidopsis >gi|6692103|gb|AAF24568.1|AC007764_10 F22C12.22 [Arabidopsis
  misc_feature (1)..(354): Homolog of NCBI NO: 15225956 NR Description: putative serpin; protein id: At2g14540.1, by cDNA: gi_18175862 [Arabidopsis thaliana]
  misc_feature (1)..(353): Homolog of NCBI NO: 6692102 NR Description: F22C12.21 [Arabidopsis thaliana]
  misc_feature (1)..(353): Homolog of NCBI NO: 15220721 NR Description: phloem serpin-1, putative; protein id:
  misc_feature (1)..(353): Homolog of NCBI NO: 25404364 NR Description: hypothetical protein F19K23.10 [imported] - thaliana >gi|2160141|gb|AAB60763.1| Strong similarity to Triticum
  misc_feature (22)..(197): Homolog of NCBI NO: 28436635 NR Description: putative serpin [Arabidopsis thaliana]
  misc_feature (1)..(279): Homolog of NCBI NO: 15220298 NR Description: serpin, putative; protein id: At1g47710.1
  misc_feature (284)..(352): Homolog of NCBI NO: 15220298 NR Description: serpin, putative; protein id: At1g47710.1
MILGRHVLSSESESNVIFSPASINSAITMHAAGSGGGLVAGEILSFLRSSSIDELKSVFRELSSIVYADSSASGGPKMRAVNGLWIEKSLPIDPKYKALFENFFKAVYVPVDFRSKAEEVRKEVNSWVEDHTNNLIKDLLPRESVTSRTNKIYANALYFKGAWKRPFEKYYTKDRDFHMVNGTTVSVPFMTSYETQKVRAYNGPYRRGRDDTNRKFSMYFYLPDKKDGLDYLLKKIASTPGFLDSHIPRYKVELEEFRIPKFKIEFGFSATSVLNQVGVLHSVSMYHKACVEIDEEGAEAAAATADVEDDGCALDMGPPPKKIDFVADHPFIFLIREDKTGTVLFFGQLFKPSEFLF

SEQ ID NO: 86377 - DNA, 823 bp, Arabidopsis thaliana
  misc_feature (1)..(823): Ceres Seq. ID no. 12689347
  misc_feature: MA Experiment ID: 108501 Result: Up-regulated in Transcription
  misc_feature: MA Experiment 108501 PARAMETER Experiment Name: At_ap2_floral_buds_cDNA_P Parameter: Plant Line Value: ap2 (Ler.)
  misc_feature: MA Experiment 108501 PARAMETER Experiment Name: At_ap2_floral_buds_cDNA_P Parameter: Tissue Value: Closed Flower
  misc_feature: MA Experiment ID: 108579 Result: Up-regulated in Transcription
  misc_feature: MA Experiment 108579 PARAMETER Experiment Name: At_4deg_Cold_cDNA_P Parameter: Temperature (deg C) Value: 4 vs. 22
  misc_feature: MA Experiment 108579 PARAMETER Experiment Name: At_4deg_Cold_cDNA_P Parameter: Timepoint (hr) Value: 6
  misc_feature: MA Experiment 108579 PARAMETER Experiment Name: At_4deg_Cold_cDNA_P Parameter: Tissue Value: Aerial
  misc_feature: MA Experiment ID: 20000171 Result: Up-regulated in Transcription
  misc_feature: MA Experiment 20000171 PARAMETER Experiment Name: At_42deg_Heat_P Parameter: Age (day) Value: 14
  misc_feature: MA Experiment 20000171 PARAMETER Experiment Name: At_42deg_Heat_P Parameter: Organism Value: A. thaliana
  misc_feature: MA Experiment 20000171 PARAMETER Experiment Name: At_42deg_Heat_P Parameter: Plant Line Value: WS
  misc_feature: MA Experiment 20000171 PARAMETER Experiment Name: At_42deg_Heat_P Parameter: Temperature (deg C) Value: 42 vs. 22
  misc_feature: MA Experiment 20000171 PARAMETER Experiment Name: At_42deg_Heat_P Parameter: Timepoint (hr) Value: 1
  misc_feature: MA Experiment 20000171 PARAMETER Experiment Name: At_42deg_Heat_P Parameter: Tissue Value: Aerial
  misc_feature: MA Experiment ID: 20000173 Result: Up-regulated in Transcription
  misc_feature: MA Experiment 20000173 PARAMETER Experiment Name: At_42deg_Heat_P Parameter: Age (day) Value: 14
  misc_feature: MA Experiment 20000173 PARAMETER Experiment Name: At_42deg_Heat_P Parameter: Organism Value: A. thaliana
  misc_feature: MA Experiment 20000173 PARAMETER Experiment Name: At_42deg_Heat_P Parameter: Plant Line Value: WS
  misc_feature: MA Experiment 20000173 PARAMETER Experiment Name: At_42deg_Heat_P Parameter: Temperature (deg C) Value: 42 vs. 22
  misc_feature: MA Experiment 20000173 PARAMETER Experiment Name: At_42deg_Heat_P Parameter: Timepoint (hr) Value: 6
  misc_feature: MA Experiment 20000173 PARAMETER Experiment Name: At_42deg_Heat_P Parameter: Tissue Value: Aerial
acaaacttcactcaaaacctaattaacttagagagaaagagagagagagaagggttgcaaaatgggttcttcgtaccaagaatctccaccgttgcttcttgaagatcttaaggttacgatcaaagaatcaacactcattttcccatctgaagaaaccagcgagagaaaatccatgttcttatccaacgtcgaccaaattctcaactttgacgttcaaacagttcatttcttccgacctaacaaggagtttccaccggagatggtctcggagaagctgagaaaggcgttggtgaaactcatggacgcttatgagttcttggccgggagactccgcgtggatcctagctctggacggcttgatgttgactgtaacggtgctggagctggctttgtgacggcggcgagtgactacacgttggaggaacttggagatttggtttatccaaatccagcttttgctcaattggttacaagtcagcttcagagtttgcccaaagatgatcaacccttgtttgtctttcaggaagaaagaaaaaaaaaatcaaaagttttgagtgtataaacacaaagaagcttccttagaatcaaaaaaatttcgaacatgttcacaataaattttgtgaacttttagctattttgcaacctcgagggagggatctcaaggatctaagtaccatcatgatatttatagaaatctagtttatataggtcattagtcgaggaccatgtgggtaaaatagaataaaaacttgtttcttctatagagtccaagtattaatcggagttttgtgtgagatcctccgtattcaaaatataaatgttt

SEQ ID NO: 86378 - protein, 166 aa, Arabidopsis thaliana
  peptide (1)..(166): Ceres Seq. ID no. 12689348
  misc_feature (16)..(154): Pfam Name: Transferase family Pfam Description: Transferase family
  misc_feature (1)..(166): Homolog of NCBI NO: 18408285 NR Description: Expressed protein; protein id: At1g65445.1,
  misc_feature (1)..(166): Homolog of NCBI NO: 21593740 NR Description: unknown [Arabidopsis thaliana]
  misc_feature (1)..(154): Homolog of NCBI NO: 7487802 NR Description: hypothetical protein T8F5.23 - Arabidopsis
  misc_feature (16)..(154): Homolog of NCBI NO: 15239747 NR Description: anthranilate N-benzoyltransferase; protein id: supported by cDNA: 114130. [Arabidopsis thaliana]
  misc_feature (16)..(154): Homolog of NCBI NO: 21536883 NR Description: anthranilate N-benzoyltransferase [Arabidopsis
  misc_feature (14)..(159): Homolog of NCBI NO: 6469032 NR Description: N-hydroxycinnamoyl/benzoyltransferase [Ipomoea
  misc_feature (16)..(159): Homolog of NCBI NO: 40644084 NR Description: hydroxycinnamoyl CoA quinate transferase
  misc_feature (16)..(154): Homolog of NCBI NO: 27475616 NR Description: hydroxycinnamoyl transferase [Nicotiana tabacum]
  misc_feature (16)..(159): Homolog of NCBI NO: 40644899 NR Description: hydroxycinnamoyl CoA quinate transferase
  misc_feature (16)..(130): Homolog of NCBI NO: 30693725 NR Description: transferase family [Arabidopsis thaliana]
MGSSYQESPPLLLEDLKVTIKESTLIFPSEETSERKSMFLSNVDQILNFDVQTVHFFRPNKEFPPEMVSEKLRKALVKLMDAYEFLAGRLRVDPSSGRLDVDCNGAGAGFVTAASDYTLEELGDLVYPNPAFAQLVTSQLQSLPKDDQPLFVFQEERKKKSKVLSV

SEQ ID NO: 86379 - protein, 129 aa, Arabidopsis thaliana
  peptide (1)..(129): Ceres Seq. ID no. 12689349
  misc_feature (1)..(117): Pfam Name: Transferase family Pfam Description: Transferase family
  misc_feature (1)..(129): Homolog of NCBI NO: 18408285 NR Description: Expressed protein; protein id: At1g65445.1,
  misc_feature (1)..(129): Homolog of NCBI NO: 21593740 NR Description: unknown [Arabidopsis thaliana]
  misc_feature (1)..(117): Homolog of NCBI NO: 7487802 NR Description: hypothetical protein T8F5.23 - Arabidopsis
  misc_feature (1)..(117): Homolog of NCBI NO: 15239747 NR Description: anthranilate N-benzoyltransferase; protein id: supported by cDNA: 114130. [Arabidopsis thaliana]
  misc_feature (1)..(117): Homolog of NCBI NO: 21536883 NR Description: anthranilate N-benzoyltransferase [Arabidopsis
  misc_feature (1)..(122): Homolog of NCBI NO: 6469032 NR Description: N-hydroxycinnamoyl/benzoyltransferase [Ipomoea
  misc_feature (1)..(122): Homolog of NCBI NO: 40644084 NR Description: hydroxycinnamoyl CoA quinate transferase
  misc_feature (1)..(117): Homolog of NCBI NO: 27475616 NR Description: hydroxycinnamoyl transferase [Nicotiana tabacum]
  misc_feature (1)..(122): Homolog of NCBI NO: 40644899 NR Description: hydroxycinnamoyl CoA quinate transferase
  misc_feature (1)..(93): Homolog of NCBI NO: 30693725 NR Description: transferase family [Arabidopsis thaliana]
MFLSNVDQILNFDVQTVHFFRPNKEFPPEMVSEKLRKALVKLMDAYEFLAGRLRVDPSSGRLDVDCNGAGAGFVTAASDYTLEELGDLVYPNPAFAQLVTSQLQSLPKDDQPLFVFQEERKKKSKVLSV

SEQ ID NO: 86380 - protein, 100 aa, Arabidopsis thaliana
  peptide (1)..(100): Ceres Seq. ID no. 12689350
  misc_feature (1)..(88): Pfam Name: Transferase family Pfam Description: Transferase family
  misc_feature (1)..(100): Homolog of NCBI NO: 18408285 NR Description: Expressed protein; protein id: At1g65445.1,
  misc_feature (1)..(100): Homolog of NCBI NO: 21593740 NR Description: unknown [Arabidopsis thaliana]
  misc_feature (1)..(88): Homolog of NCBI NO: 7487802 NR Description: hypothetical protein T8F5.23 - Arabidopsis
  misc_feature (1)..(88): Homolog of NCBI NO: 15239747 NR Description: anthranilate N-benzoyltransferase; protein id: supported by cDNA: 114130. [Arabidopsis thaliana]
  misc_feature (1)..(88): Homolog of NCBI NO: 21536883 NR Description: anthranilate N-benzoyltransferase [Arabidopsis
  misc_feature (1)..(93): Homolog of NCBI NO: 6469032 NR Description: N-hydroxycinnamoyl/benzoyltransferase [Ipomoea
  misc_feature (1)..(93): Homolog of NCBI NO: 40644084 NR Description: hydroxycinnamoyl CoA quinate transferase
  misc_feature (1)..(88): Homolog of NCBI NO: 27475616 NR Description: hydroxycinnamoyl transferase [Nicotiana tabacum]
  misc_feature (1)..(93): Homolog of NCBI NO: 40644899 NR Description: hydroxycinnamoyl CoA quinate transferase
  misc_feature (1)..(64): Homolog of NCBI NO: 30693725 NR Description: transferase family [Arabidopsis thaliana]
MVSEKLRKALVKLMDAYEFLAGRLRVDPSSGRLDVDCNGAGAGFVTAASDYTLEELGDLVYPNPAFAQLVTSQLQSLPKDDQPLFVFQEERKKKSKVLSV

SEQ ID NO: 86381 - DNA, 1201 bp, Arabidopsis thaliana
  misc_feature (1)..(1201): Ceres Seq. ID no. 12689351
  misc_feature: MA Experiment ID: 108501 Result: Up-regulated in Transcription
  misc_feature: MA Experiment 108501 PARAMETER Experiment Name: At_ap2_floral_buds_cDNA_P Parameter: Plant Line Value: ap2 (Ler.)
  misc_feature: MA Experiment 108501 PARAMETER Experiment Name: At_ap2_floral_buds_cDNA_P Parameter: Tissue Value: Closed Flower
  misc_feature: MA Experiment ID: 108579 Result: Up-regulated in Transcription
  misc_feature: MA Experiment 108579 PARAMETER Experiment Name: At_4deg_Cold_cDNA_P Parameter: Temperature (deg C) Value: 4 vs. 22
  misc_feature: MA Experiment 108579 PARAMETER Experiment Name: At_4deg_Cold_cDNA_P Parameter: Timepoint (hr) Value: 6
  misc_feature: MA Experiment 108579 PARAMETER Experiment Name: At_4deg_Cold_cDNA_P Parameter: Tissue Value: Aerial
  misc_feature: MA Experiment ID: 108609 Result: Up-regulated in Transcription
  misc_feature: MA Experiment 108609 PARAMETER Experiment Name: At_100uM_ABA_cDNA_P Parameter: Timepoint (hr) Value: 24
  misc_feature: MA Experiment 108609 PARAMETER Experiment Name: At_100uM_ABA_cDNA_P Parameter: Tissue Value: Aerial
  misc_feature: MA Experiment 108609 PARAMETER Experiment Name: At_100uM_ABA_cDNA_P Parameter: Treatment Value: 100uM ABA vs. No Treatment
  misc_feature: MA Experiment ID: 20000111 Result: Down-regulated in Transcription
  misc_feature: MA Experiment 20000111 PARAMETER Experiment Name: At_42deg_Heat_cDNA_P Parameter: Temperature (deg C) Value: 42 vs. 22
  misc_feature: MA Experiment 20000111 PARAMETER Experiment Name: At_42deg_Heat_cDNA_P Parameter: Timepoint (hr) Value: 6
  misc_feature: MA Experiment 20000111 PARAMETER Experiment Name: At_42deg_Heat_cDNA_P Parameter: Tissue Value: Aerial
  misc_feature: MA Experiment ID: 20000113 Result: Down-regulated in Transcription
  misc_feature: MA Experiment 20000113 PARAMETER Experiment Name: At_42deg_Heat_cDNA_P Parameter: Temperature (deg C) Value: 42 vs. 22
  misc_feature: MA Experiment 20000113 PARAMETER Experiment Name: At_42deg_Heat_cDNA_P Parameter: Timepoint (hr) Value: 8
  misc_feature: MA Experiment 20000113 PARAMETER Experiment Name: At_42deg_Heat_cDNA_P Parameter: Tissue Value: Aerial
  misc_feature: MA Experiment ID: 20000144 Result: Down-regulated in Transcription
  misc_feature: MA Experiment 20000144 PARAMETER Experiment Name: At_42deg_Heat_cDNA_P Parameter: Temperature (deg C) Value: 42 vs. 22
  misc_feature: MA Experiment 20000144 PARAMETER Experiment Name: At_42deg_Heat_cDNA_P Parameter: Timepoint (hr) Value: 1
  misc_feature: MA Experiment 20000144 PARAMETER Experiment Name: At_42deg_Heat_cDNA_P Parameter: Tissue Value: Aerial
  misc_feature: MA Experiment ID: 20000171 Result: Down-regulated in Transcription
  misc_feature: MA Experiment 20000171 PARAMETER Experiment Name: At_42deg_Heat_P Parameter: Age (day) Value: 14
  misc_feature: MA Experiment 20000171 PARAMETER Experiment Name: At_42deg_Heat_P Parameter: Organism Value: A. thaliana
  misc_feature: MA Experiment 20000171 PARAMETER Experiment Name: At_42deg_Heat_P Parameter: Plant Line Value: WS
  misc_feature: MA Experiment 20000171 PARAMETER Experiment Name: At_42deg_Heat_P Parameter: Temperature (deg C) Value: 42 vs. 22
  misc_feature: MA Experiment 20000171 PARAMETER Experiment Name: At_42deg_Heat_P Parameter: Timepoint (hr) Value: 1
  misc_feature: MA Experiment 20000171 PARAMETER Experiment Name: At_42deg_Heat_P Parameter: Tissue Value: Aerial
  misc_feature: MA Experiment ID: 20000173 Result: Down-regulated in Transcription
  misc_feature: MA Experiment 20000173 PARAMETER Experiment Name: At_42deg_Heat_P Parameter: Age (day) Value: 14
  misc_feature: MA Experiment 20000173 PARAMETER Experiment Name: At_42deg_Heat_P Parameter: Organism Value: A. thaliana
  misc_feature: MA Experiment 20000173 PARAMETER Experiment Name: At_42deg_Heat_P Parameter: Plant Line Value: WS
  misc_feature: MA Experiment 20000173 PARAMETER Experiment Name: At_42deg_Heat_P Parameter: Temperature (deg C) Value: 42 vs. 22
  misc_feature: MA Experiment 20000173 PARAMETER Experiment Name: At_42deg_Heat_P Parameter: Timepoint (hr) Value: 6
  misc_feature: MA Experiment 20000173 PARAMETER Experiment Name: At_42deg_Heat_P Parameter: Tissue Value: Aerial
  misc_feature: MA Experiment ID: 20000180 Result: Up-regulated in Transcription
  misc_feature: MA Experiment 20000180 PARAMETER Experiment Name: At_Germinating_Seeds_P Parameter: Age (hr) Value: 24 vs. 0
  misc_feature: MA Experiment 20000180 PARAMETER Experiment Name: At_Germinating_Seeds_P Parameter: Tissue Value: Germinating Seeds
  misc_feature: MA Experiment ID: 20000184 Result: Down-regulated in Transcription
  misc_feature: MA Experiment 20000184 PARAMETER Experiment Name: At_Shoots__P Parameter: Age (day) Value: 7
  misc_feature: MA Experiment 20000184 PARAMETER Experiment Name: At_Shoots__P Parameter: Tissue Value: Shoots vs. Whole Plant
  misc_feature: MA Experiment ID: 20000185 Result: Down-regulated in Transcription
  misc_feature: MA Experiment 20000185 PARAMETER Experiment Name: At_Roots__P Parameter: Age (day) Value: 7 vs. 21
  misc_feature: MA Experiment 20000185 PARAMETER Experiment Name: At_Roots__P Parameter: Organism Value: A. thaliana
  misc_feature: MA Experiment 20000185 PARAMETER Experiment Name: At_Roots__P Parameter: Tissue Value: Roots vs. Whole Plant
  misc_feature: MA Experiment ID: 20000234 Result: Up-regulated in Transcription
  misc_feature: MA Experiment 20000234 PARAMETER Experiment Name: At_Siliques_P Parameter: Age (day) Value: 21
  misc_feature: MA Experiment 20000234 PARAMETER Experiment Name: At_Siliques_P Parameter: Organism Value: A. thaliana
  misc_feature: MA Experiment 20000234 PARAMETER Experiment Name: At_Siliques_P Parameter: Plant Line Value: WS
  misc_feature: MA Experiment 20000234 PARAMETER Experiment Name: At_Siliques_P Parameter: Tissue Value: Less Than 5mm Siliques vs. Whole Plant
  misc_feature: MA Experiment ID: 20000235 Result: Up-regulated in Transcription
  misc_feature: MA Experiment 20000235 PARAMETER Experiment Name: At_Siliques_P Parameter: Age (day) Value: 21
  misc_feature: MA Experiment 20000235 PARAMETER Experiment Name: At_Siliques_P Parameter: Organism Value: A. thaliana
  misc_feature: MA Experiment 20000235 PARAMETER Experiment Name: At_Siliques_P Parameter: Plant Line Value: WS
  misc_feature: MA Experiment 20000235 PARAMETER Experiment Name: At_Siliques_P Parameter: Tissue Value: 5-10mm Siliques vs. Whole Plant
  misc_feature: MA Experiment ID: 20000286 Result: Up-regulated in Transcription
  misc_feature: MA Experiment 20000286 PARAMETER Experiment Name: At_Open_Flower_P Parameter: Age (day) Value: 21
  misc_feature: MA Experiment 20000286 PARAMETER Experiment Name: At_Open_Flower_P Parameter: Plant Line Value: WS
  misc_feature: MA Experiment 20000286 PARAMETER Experiment Name: At_Open_Flower_P Parameter: Tissue Value: Half Open vs. Whole Plant
  misc_feature: MA Experiment ID: 20000437 Result: Down-regulated in Transcription
  misc_feature: MA Experiment 20000437 PARAMETER Experiment Name: At_Drought_P Parameter: Age (day) Value: 8
  misc_feature: MA Experiment 20000437 PARAMETER Experiment Name: At_Drought_P Parameter: Organism Value: A. thaliana
  misc_feature: MA Experiment 20000437 PARAMETER Experiment Name: At_Drought_P Parameter: Plant Line Value: WS
  misc_feature: MA Experiment 20000437 PARAMETER Experiment Name: At_Drought_P Parameter: Timepoint (hr) Value: 24
  misc_feature: MA Experiment 20000437 PARAMETER Experiment Name: At_Drought_P Parameter: Tissue Value: Whole Plant
  misc_feature: MA Experiment 20000437 PARAMETER Experiment Name: At_Drought_P Parameter: Treatment Value: Drought vs. No Drought
  misc_feature: MA Experiment ID: 20000438 Result: Down-regulated in Transcription
  misc_feature: MA Experiment 20000438 PARAMETER Experiment Name: At_Shoots__P Parameter: Age (day) Value: 14
  misc_feature: MA Experiment 20000438 PARAMETER Experiment Name: At_Shoots__P Parameter: Tissue Value: Shoots vs. Whole Plant
  misc_feature: MA Experiment ID: 20000439 Result: Down-regulated in Transcription
  misc_feature: MA Experiment 20000439 PARAMETER Experiment Name: At_Roots__P Parameter: Age (day) Value: 14 vs. 21
  misc_feature: MA Experiment 20000439 PARAMETER Experiment Name: At_Roots__P Parameter: Organism Value: A. thaliana
  misc_feature: MA Experiment 20000439 PARAMETER Experiment Name: At_Roots__P Parameter: Tissue Value: Roots vs. Whole Plant
  misc_feature: MA Experiment ID: 20000573 Result: Down-regulated in Transcription
  misc_feature: MA Experiment 20000573 PARAMETER Experiment Name: At_100uM_ABA_Mutants__P Parameter: Organism Value: A. thaliana
  misc_feature: MA Experiment 20000573 PARAMETER Experiment Name: At_100uM_ABA_Mutants__P Parameter: Plant Line Value: CS22 vs. Ler wt
  misc_feature: MA Experiment 20000573 PARAMETER Experiment Name: At_100uM_ABA_Mutants__P Parameter: Timepoint (hr) Value: N/A
  misc_feature: MA Experiment 20000573 PARAMETER Experiment Name: At_100uM_ABA_Mutants__P Parameter: Tissue Value: Whole Plant
  misc_feature: MA Experiment 20000573 PARAMETER Experiment Name: At_100uM_ABA_Mutants__P Parameter: Treatment Value: None
  misc_feature: MA Experiment ID: 20000574 Result: Down-regulated in Transcription
  misc_feature: MA Experiment 20000574 PARAMETER Experiment Name: At_100uM_ABA_Mutants__P Parameter: Organism Value: A. thaliana
  misc_feature: MA Experiment 20000574 PARAMETER Experiment Name: At_100uM_ABA_Mutants__P Parameter: Plant Line Value: CS23 vs. Ler wt
  misc_feature: MA Experiment 20000574 PARAMETER Experiment Name: At_100uM_ABA_Mutants__P Parameter: Timepoint (hr) Value: N/A
  misc_feature: MA Experiment 20000574 PARAMETER Experiment Name: At_100uM_ABA_Mutants__P Parameter: Tissue Value: Whole Plant
  misc_feature: MA Experiment 20000574 PARAMETER Experiment Name: At_100uM_ABA_Mutants__P Parameter: Treatment Value: None
  misc_feature: MA Experiment ID: 20001248 Result: Down-regulated in Transcription
  misc_feature: MA Experiment 20001248 PARAMETER Experiment Name: At_Far-red-induction_P Parameter: Age (day) Value: 7
  misc_feature: MA Experiment 20001248 PARAMETER Experiment Name: At_Far-red-induction_P Parameter: Light Value: Far-red vs. White
  misc_feature: MA Experiment 20001248 PARAMETER Experiment Name: At_Far-red-induction_P Parameter: Organism Value: A. thaliana
  misc_feature: MA Experiment 20001248 PARAMETER Experiment Name: At_Far-red-induction_P Parameter: Plant Line Value: Columbia
  misc_feature: MA Experiment 20001248 PARAMETER Experiment Name: At_Far-red-induction_P Parameter: Timepoint (hr) Value: 4
  misc_feature: MA Experiment 20001248 PARAMETER Experiment Name: At_Far-red-induction_P Parameter: Tissue Value: Whole Plant
  misc_feature: MA Experiment ID: 20001450 Result: Down-regulated in Transcription
  misc_feature: MA Experiment 20001450 PARAMETER Experiment Name: At_Far-red-induction_P Parameter: Age (day) Value: 7
  misc_feature: MA Experiment 20001450 PARAMETER Experiment Name: At_Far-red-induction_P Parameter: Light Value: Far-red vs. White
  misc_feature: MA Experiment 20001450 PARAMETER Experiment Name: At_Far-red-induction_P Parameter: Organism Value: A. thaliana
  misc_feature: MA Experiment 20001450 PARAMETER Experiment Name: At_Far-red-induction_P Parameter: Plant Line Value: Columbia
  misc_feature: MA Experiment 20001450 PARAMETER Experiment Name: At_Far-red-induction_P Parameter: Timepoint (hr) Value: 8
  misc_feature: MA Experiment 20001450 PARAMETER Experiment Name: At_Far-red-induction_P Parameter: Tissue Value: Whole Plant
  misc_feature: MA Experiment ID: 20001560 Result: Up-regulated in Transcription
  misc_feature: MA Experiment 20001560 PARAMETER Experiment Name: At_Drought_Soil_Dry_P Parameter: Age (day) Value: 28
  misc_feature: MA Experiment 20001560 PARAMETER Experiment Name: At_Drought_Soil_Dry_P Parameter: Organism Value: A. thaliana
  misc_feature: MA Experiment 20001560 PARAMETER Experiment Name: At_Drought_Soil_Dry_P Parameter: Plant Line Value: WS
  misc_feature: MA Experiment 20001560 PARAMETER Experiment Name: At_Drought_Soil_Dry_P Parameter: Post Timepoint (hr) Value: None
  misc_feature: MA Experiment 20001560 PARAMETER Experiment Name: At_Drought_Soil_Dry_P Parameter: Post-Treatment Value: None
  misc_feature: MA Experiment 20001560 PARAMETER Experiment Name: At_Drought_Soil_Dry_P Parameter: Timepoint (day) Value: 14
  misc_feature: MA Experiment 20001560 PARAMETER Experiment Name: At_Drought_Soil_Dry_P Parameter: Treatment Value: Drought vs. No Drought
  misc_feature: MA Experiment ID: 20001906 Result: Down-regulated in Transcription
  misc_feature: MA Experiment 20001906 PARAMETER Experiment Name: At_Drought_Reproduction_P Parameter: Age (day) Value: 35
  misc_feature: MA Experiment 20001906 PARAMETER Experiment Name: At_Drought_Reproduction_P Parameter: Organism Value: A. thaliana
  misc_feature: MA Experiment 20001906 PARAMETER Experiment Name: At_Drought_Reproduction_P Parameter: Plant Line Value: WS
  misc_feature: MA Experiment 20001906 PARAMETER Experiment Name: At_Drought_Reproduction_P Parameter: Timepoint (day) Value: 5
  misc_feature: MA Experiment 20001906 PARAMETER Experiment Name: At_Drought_Reproduction_P Parameter: Tissue Value: Siliques
  misc_feature: MA Experiment 20001906 PARAMETER Experiment Name: At_Drought_Reproduction_P Parameter: Treatment Value: Drought vs. No Drought
  misc_feature: MA Experiment ID: 20001907 Result: Down-regulated in Transcription
  misc_feature: MA Experiment 20001907 PARAMETER Experiment Name: At_Drought_Reproduction_P Parameter: Age (day) Value: 37
  misc_feature: MA Experiment 20001907 PARAMETER Experiment Name: At_Drought_Reproduction_P Parameter: Organism Value: A. thaliana
  misc_feature: MA Experiment 20001907 PARAMETER Experiment Name: At_Drought_Reproduction_P Parameter: Plant Line Value: WS
  misc_feature: MA Experiment 20001907 PARAMETER Experiment Name: At_Drought_Reproduction_P Parameter: Timepoint (day) Value: 7
  misc_feature: MA Experiment 20001907 PARAMETER Experiment Name: At_Drought_Reproduction_P Parameter: Tissue Value: Siliques
  misc_feature: MA Experiment 20001907 PARAMETER Experiment Name: At_Drought_Reproduction_P Parameter: Treatment Value: Drought vs. No Drought
  misc_feature: MA Experiment ID: 20001908 Result: Down-regulated in Transcription
  misc_feature: MA Experiment 20001908 PARAMETER Experiment Name: At_Drought_Reproduction_P Parameter: Age (day) Value: 40
  misc_feature: MA Experiment 20001908 PARAMETER Experiment Name: At_Drought_Reproduction_P Parameter: Organism Value: A. thaliana
  misc_feature: MA Experiment 20001908 PARAMETER Experiment Name: At_Drought_Reproduction_P Parameter: Plant Line Value: WS
  misc_feature: MA Experiment 20001908 PARAMETER Experiment Name: At_Drought_Reproduction_P Parameter: Timepoint (day) Value: 10
  misc_feature: MA Experiment 20001908 PARAMETER Experiment Name: At_Drought_Reproduction_P Parameter: Tissue Value: Siliques
  misc_feature: MA Experiment 20001908 PARAMETER Experiment Name: At_Drought_Reproduction_P Parameter: Treatment Value: Drought vs. No Drought
  misc_feature: MA Experiment ID: 20001911 Result: Down-regulated in Transcription
  misc_feature: MA Experiment 20001911 PARAMETER Experiment Name: At_Drought_Reproduction_P Parameter: Age (day) Value: 40
  misc_feature: MA Experiment 20001911 PARAMETER Experiment Name: At_Drought_Reproduction_P Parameter: Organism Value: A. thaliana
  misc_feature: MA Experiment 20001911 PARAMETER Experiment Name: At_Drought_Reproduction_P Parameter: Plant Line Value: WS
  misc_feature: MA Experiment 20001911 PARAMETER Experiment Name: At_Drought_Reproduction_P Parameter: Timepoint (day) Value: 10
  misc_feature: MA Experiment 20001911 PARAMETER Experiment Name: At_Drought_Reproduction_P Parameter: Tissue Value: Flowers
  misc_feature: MA Experiment 20001911 PARAMETER Experiment Name: At_Drought_Reproduction_P Parameter: Treatment Value: Drought vs. No Drought
aatgaacgtataaagtaggatttcataatgcaacgtctaatagctagaacataagtgattcaaaataagttttctcaagtttggcgcatgtagttgagtttcatggagatgtatgtactttaaatttttaaattttggcagataacatcattcaagtgcggtggatttgcaatgggaatctcaacaaaccataccacgttcgatggacttagtttcaaaacattcctcgaaaacttagcttctctacttcacgagaagcccttatcaacacctccatgcaacgaccgtactcttctcaaagctcgtgatccaccaagtgttgcattcccacaccacgagcttgtcaagttccaagactgtgagacaacaacagtcttcgaagctacttcagagcacttagacttcaagatcttcaagctatcctctgaacaaatcaagaagctcaaggagagagcctcagagactagtaacggtaatgttcgcgtgacgggtttcaacgttgtaaccgctttggtctggaggtgcaaggcactctctgtagcagcagaggaaggagaagaaaccaatcttgaaagagaatcaacgattctttatgctgtggacattagagggaggctgaatcctgagcttccaccgtcttacactggaaacgcggttttaacggcatacgcaaaggagaaatgcaaggcattgcttgaagagccgtttgggaggattgtagaaatggtaggagaagggtcaaagaggataacggatgagtatgcgcggtctgctatagattggggagagttatacaaagggtttccccatggggaagttttggtttcttcttggtggaaactcggattcgcagaggttgagtatccttggggaaagcctaagtatagctgtcccgttgtctatcatcgaaaagacattgttttgctgtttccggacatcgatggagatagtaaaggtgtttatgtcttggctgctttgccttctaaggagatgtccaagtttcagcactggtttgaagacactctgtgctgatttcgtgatggcttcactttgcattgctattgctttattttacttctttgacgattataaacacattatggtattttatatttgtatacggttgaaaagtgaacgttataaaacatctattttctgctactttctctaagtataaacaagcacaaaagatttaaaggtg

SEQ ID NO: 86382 - protein, 286 aa, Arabidopsis thaliana; identical to SEQ ID NO: 30273
  peptide (1)..(286): Ceres Seq. ID no. 12689352
  misc_feature (1)..(284): Pfam Name: Transferase family Pfam Description: Transferase family
  misc_feature (1)..(286): Homolog of NCBI NO: 7487802 NR Description: hypothetical protein T8F5.23 - Arabidopsis
  misc_feature (1)..(286): Homolog of NCBI NO: 18408287 NR Description: expressed protein; protein id: At1g65450.1, by cDNA: 17230. [Arabidopsis thaliana]
  misc_feature (1)..(281): Homolog of NCBI NO: 30693723 NR Description: transferase family [Arabidopsis thaliana]
  misc_feature (1)..(281): Homolog of NCBI NO: 30693725 NR Description: transferase family [Arabidopsis thaliana]
  misc_feature (1)..(278): Homolog of NCBI NO: 15242820 NR Description: acyltransferase-like protein; protein id: supported by cDNA: 157547., supported by cDNA: gi_14334863
  misc_feature (1)..(278): Homolog of NCBI NO: 15229017 NR Description: putative protein; protein id: At3g48720.1
  misc_feature (1)..(278): Homolog of NCBI NO: 34222064 NR Description: At3g48720 [Arabidopsis thaliana]
  misc_feature (1)..(278): Homolog of NCBI NO: 21553692 NR Description: acyltransferase-like protein [Arabidopsis
  misc_feature (1)..(285): Homolog of NCBI NO: 20161743 NR Description: N-hydroxycinnamoyl/benzoyltransferase-like
  misc_feature (1)..(283): Homolog of NCBI NO: 27475616 NR Description: hydroxycinnamoyl transferase [Nicotiana tabacum]

SEQ ID NO: 86383 - DNA, 492 bp, Arabidopsis thaliana
  misc_feature (1)..(492): Ceres Seq. ID no. 12689609
  misc_feature: MA Experiment ID: 20000307 Result: Up-regulated in Transcription
  misc_feature: MA Experiment 20000307 PARAMETER Experiment Name: At_Germinating_Seeds_Sub_P Parameter: Age (hr) Value: 24 vs. 0
  misc_feature: MA Experiment 20000307 PARAMETER Experiment Name: At_Germinating_Seeds_Sub_P Parameter: Organism Value: A. thaliana
  misc_feature: MA Experiment 20000307 PARAMETER Experiment Name: At_Germinating_Seeds_Sub_P Parameter: Plant Line Value: WS
  misc_feature: MA Experiment 20000307 PARAMETER Experiment Name: At_Germinating_Seeds_Sub_P Parameter: Tissue Value: Germinating Seeds
atggggacagctctgggaaagccatttgccggttttttccaccaagaagaatcgaggatagtgttgttcggtctcgacgctgccggaaaatcatcaataatgcacaaactcaaaaccggagaaacccttaccacaaccatgcctactattggaacggatgtggaaagtgtaaaatacaaggattcaaacttacgcttttgggaaatgggcggccaacaatgttacaagtggtttccaatgacgaaacatgacttccaagaaatagcggggcttgtgcttgtagtcgatagcacagacagagatcgaatagaagatgcgaaagattttcttaatgcggtgattgatgagatacaagggagtgtaccggacaatgtggctgttcttgtatttggaaacaagcatgaagttcctggtgctatgtctgcttctgagatcagtaacaagcttgatctcacttctcttcgtcaaaaaaactggcagagaaactggtaa

SEQ ID NO: 86384 - protein, 163 aa, Arabidopsis thaliana
  peptide (1)..(163): Ceres Seq. ID no. 12689610
  misc_feature (4)..(159): Pfam Name: ADP-ribosylation factor family Pfam Description: ADP-ribosylation factor family
  misc_feature (1)..(163): Homolog of NCBI NO: 15217757 NR Description: ADP-ribosylation factor, putative; protein id:
  misc_feature (1)..(159): Homolog of NCBI NO: 25294175 NR Description: hypothetical protein T6A9.12 - Arabidopsis
  misc_feature (1)..(163): Homolog of NCBI NO: 18378965 NR Description: ADP-ribosylation factor, putative; protein id:
  misc_feature (34)..(157): Homolog of NCBI NO: 28466895 NR Description: At1g02430 [Arabidopsis thaliana]
  misc_feature (1)..(163): Homolog of NCBI NO: 25294176 NR Description: hypothetical protein T14P4.20 [imported] -
  misc_feature (1)..(159): Homolog of NCBI NO: 34900342 NR Description: ADP-ribosylation factor 1 [Oryza sativa (japonica
  misc_feature (1)..(159): Homolog of NCBI NO: 15226521 NR Description: ADP-ribosylation factor 1; protein id: supported by cDNA: 34414., supported by cDNA: gi_18650621, by cDNA: gi_553037 [Arabidopsis thaliana]
  misc_feature (1)..(159): Homolog of NCBI NO: 15228723 NR Description: ADP-ribosylation factor-like protein; protein id: supported by cDNA: 14909., supported by cDNA: gi_13926301, by cDNA: gi_16323247 [Arabidopsis thaliana]
  misc_feature (1)..(159): Homolog of NCBI NO: 25294169 NR Description: ADP-ribosylation factor [imported] - pepper
  misc_feature (1)..(159): Homolog of NCBI NO: 8778579 NR Description: F28C11.12 [Arabidopsis thaliana]
MGTALGKPFAGFFHQEESRIVLFGLDAAGKSSIMHKLKTGETLTTTMPTIGTDVESVKYKDSNLRFWEMGGQQCYKWFPMTKHDFQEIAGLVLVVDSTDRDRIEDAKDFLNAVIDEIQGSVPDNVAVLVFGNKHEVPGAMSASEISNKLDLTSLRQKNWQRNW

SEQ ID NO: 86385 - protein, 130 aa, Arabidopsis thaliana
  peptide (1)..(130): Ceres Seq. ID no. 12689611
  misc_feature (1)..(126): Pfam Name: ADP-ribosylation factor family Pfam Description: ADP-ribosylation factor family
  misc_feature (1)..(130): Homolog of NCBI NO: 15217757 NR Description: ADP-ribosylation factor, putative; protein id:
  misc_feature (1)..(126): Homolog of NCBI NO: 25294175 NR Description: hypothetical protein T6A9.12 - Arabidopsis
  misc_feature (1)..(130): Homolog of NCBI NO: 18378965 NR Description: ADP-ribosylation factor, putative; protein id:
  misc_feature (1)..(124): Homolog of NCBI NO: 28466895 NR Description: At1g02430 [Arabidopsis thaliana]
  misc_feature (1)..(130): Homolog of NCBI NO: 25294176 NR Description: hypothetical protein T14P4.20 [imported] -
  misc_feature (1)..(126): Homolog of NCBI NO: 34900342 NR Description: ADP-ribosylation factor 1 [Oryza sativa (japonica
  misc_feature (1)..(126): Homolog of NCBI NO: 15226521 NR Description: ADP-ribosylation factor 1; protein id: supported by cDNA: 34414., supported by cDNA: gi_18650621, by cDNA: gi_553037 [Arabidopsis thaliana]
  misc_feature (1)..(126): Homolog of NCBI NO: 15228723 NR Description: ADP-ribosylation factor-like protein; protein id: supported by cDNA: 14909., supported by cDNA: gi_13926301, by cDNA: gi_16323247 [Arabidopsis thaliana]
  misc_feature (1)..(126): Homolog of NCBI NO: 25294169 NR Description: ADP-ribosylation factor [imported] - pepper
  misc_feature (1)..(126): Homolog of NCBI NO: 8778579 NR Description: F28C11.12 [Arabidopsis thaliana]
MHKLKTGETLTTTMPTIGTDVESVKYKDSNLRFWEMGGQQCYKWFPMTKHDFQEIAGLVLVVDSTDRDRIEDAKDFLNAVIDEIQGSVPDNVAVLVFGNKHEVPGAMSASEISNKLDLTSLRQKNWQRNW

SEQ ID NO: 86386 - protein, 117 aa, Arabidopsis thaliana
  peptide (1)..(117): Ceres Seq. ID no. 12689612
  misc_feature (1)..(113): Pfam Name: ADP-ribosylation factor family Pfam Description: ADP-ribosylation factor family
  misc_feature (1)..(117): Homolog of NCBI NO: 15217757 NR Description: ADP-ribosylation factor, putative; protein id:
  misc_feature (1)..(113): Homolog of NCBI NO: 25294175 NR Description: hypothetical protein T6A9.12 - Arabidopsis
  misc_feature (1)..(117): Homolog of NCBI NO: 18378965 NR Description: ADP-ribosylation factor, putative; protein id:
  misc_feature (1)..(111): Homolog of NCBI NO: 28466895 NR Description: At1g02430 [Arabidopsis thaliana]
  misc_feature (1)..(117): Homolog of NCBI NO: 25294176 NR Description: hypothetical protein T14P4.20 [imported] -
  misc_feature (1)..(113): Homolog of NCBI NO: 34900342 NR Description: ADP-ribosylation factor 1 [Oryza sativa (japonica
  misc_feature (1)..(113): Homolog of NCBI NO: 15226521 NR Description: ADP-ribosylation factor 1; protein id: supported by cDNA: 34414., supported by cDNA: gi_18650621, by cDNA: gi_553037 [Arabidopsis thaliana]
  misc_feature (1)..(113): Homolog of NCBI NO: 25294169 NR Description: ADP-ribosylation factor [imported] - pepper
  misc_feature (1)..(113): Homolog of NCBI NO: 15228723 NR Description: ADP-ribosylation factor-like protein; protein id: supported by cDNA: 14909., supported by cDNA: gi_13926301, by cDNA: gi_16323247 [Arabidopsis thaliana]
  misc_feature (1)..(113): Homolog of NCBI NO: 8778579 NR Description: F28C11.12 [Arabidopsis thaliana]
MPTIGTDVESVKYKDSNLRFWEMGGQQCYKWFPMTKHDFQEIAGLVLVVDSTDRDRIEDAKDFLNAVIDEIQGSVPDNVAVLVFGNKHEVPGAMSASEISNKLDLTSLRQKNWQRNW

SEQ ID NO: 86387 - DNA, 896 bp, Arabidopsis thaliana
  misc_feature (1)..(896): Ceres Seq. ID no. 12689652
  misc_feature: MA Experiment ID: 108434 Result: Up-regulated in Transcription
  misc_feature: MA Experiment 108434 PARAMETER Experiment Name: At_Root_Tips_cDNA_P Parameter: Tissue Value: Root Tips
  misc_feature: MA Experiment ID: 108462 Result: Down-regulated in Transcription
  misc_feature: MA Experiment 108462 PARAMETER Experiment Name: At_Germinating_Seeds_cDNA_P Parameter: Age (day) Value: 2 vs. 0
  misc_feature: MA Experiment 108462 PARAMETER Experiment Name: At_Germinating_Seeds_cDNA_P Parameter: Tissue Value: Germinating Seeds
  misc_feature: MA Experiment ID: 108463 Result: Down-regulated in Transcription
  misc_feature: MA Experiment 108463 PARAMETER Experiment Name: At_Germinating_Seeds_cDNA_P Parameter: Age (day) Value: 3 vs. 0
  misc_feature: MA Experiment 108463 PARAMETER Experiment Name: At_Germinating_Seeds_cDNA_P Parameter: Tissue Value: Germinating Seeds
  misc_feature: MA Experiment ID: 108573 Result: Down-regulated in Transcription
  misc_feature: MA Experiment 108573 PARAMETER Experiment Name: At_Drought_cDNA_P Parameter: Timepoint (hr) Value: 6
  misc_feature: MA Experiment 108573 PARAMETER Experiment Name: At_Drought_cDNA_P Parameter: Tissue Value: Aerial
  misc_feature: MA Experiment 108573 PARAMETER Experiment Name: At_Drought_cDNA_P Parameter: Treatment Value: Drought vs. No Drought
  misc_feature: MA Experiment ID: 20000224 Result: Down-regulated in Transcription
  misc_feature: MA Experiment ID: 20000227 Result: Up-regulated in Transcription
  misc_feature: MA Experiment 20000227 PARAMETER Experiment Name: At_Root-Tips-vs-Tops_P Parameter: Tissue Value: Root Tips vs. Root Tops
  misc_feature: MA Experiment ID: 20000328 Result: Up-regulated in Transcription
  misc_feature: MA Experiment 20000328 PARAMETER Experiment Name: At_42deg_Heat_Sub_P Parameter: Age (day) Value: 14
  misc_feature: MA Experiment 20000328 PARAMETER Experiment Name: At_42deg_Heat_Sub_P Parameter: Organism Value: A. thaliana
  misc_feature: MA Experiment 20000328 PARAMETER Experiment Name: At_42deg_Heat_Sub_P Parameter: Plant Line Value: WS
  misc_feature: MA Experiment 20000328 PARAMETER Experiment Name: At_42deg_Heat_Sub_P Parameter: Temperature (deg C) Value: 42 vs. 22
  misc_feature: MA Experiment 20000328 PARAMETER Experiment Name: At_42deg_Heat_Sub_P Parameter: Timepoint (hr) Value: 6
  misc_feature: MA Experiment 20000328 PARAMETER Experiment Name: At_42deg_Heat_Sub_P Parameter: Tissue Value: Aerial
  misc_feature: MA Experiment ID: 20001557 Result: Up-regulated in Transcription
  misc_feature: MA Experiment 20001557 PARAMETER Experiment Name: At_Drought_Soil_Dry_P Parameter: Age (day) Value: 27
  misc_feature: MA Experiment 20001557 PARAMETER Experiment Name: At_Drought_Soil_Dry_P Parameter: Organism Value: A. thaliana
  misc_feature: MA Experiment 20001557 PARAMETER Experiment Name: At_Drought_Soil_Dry_P Parameter: Plant Line Value: WS
  misc_feature: MA Experiment 20001557 PARAMETER Experiment Name: At_Drought_Soil_Dry_P Parameter: Post Timepoint (hr) Value: 3
  misc_feature: MA Experiment 20001557 PARAMETER Experiment Name: At_Drought_Soil_Dry_P Parameter: Post-Treatment Value: Re-Water vs. No Drought
  misc_feature: MA Experiment 20001557 PARAMETER Experiment Name: At_Drought_Soil_Dry_P Parameter: Timepoint (day) Value: 13
  misc_feature: MA Experiment 20001557 PARAMETER Experiment Name: At_Drought_Soil_Dry_P Parameter: Treatment Value: Drought vs. No Drought
  misc_feature: MA Experiment ID: 20001558 Result: Up-regulated in Transcription
  misc_feature: MA Experiment 20001558 PARAMETER Experiment Name: At_Drought_Soil_Dry_P Parameter: Age (day) Value: 27
  misc_feature: MA Experiment 20001558 PARAMETER Experiment Name: At_Drought_Soil_Dry_P Parameter: Organism Value: A. thaliana
  misc_feature: MA Experiment 20001558 PARAMETER Experiment Name: At_Drought_Soil_Dry_P Parameter: Plant Line Value: WS
  misc_feature: MA Experiment 20001558 PARAMETER Experiment Name: At_Drought_Soil_Dry_P Parameter: Post Timepoint (hr) Value: 6
  misc_feature: MA Experiment 20001558 PARAMETER Experiment Name: At_Drought_Soil_Dry_P Parameter: Post-Treatment Value: Re-Water vs. No Drought
  misc_feature: MA Experiment 20001558 PARAMETER Experiment Name: At_Drought_Soil_Dry_P Parameter: Timepoint (day) Value: 13
  misc_feature: MA Experiment 20001558 PARAMETER Experiment Name: At_Drought_Soil_Dry_P Parameter: Treatment Value: Drought vs. No Drought
  misc_feature: MA Experiment ID: 20001560 Result: Up-regulated in Transcription
  misc_feature: MA Experiment 20001560 PARAMETER Experiment Name: At_Drought_Soil_Dry_P Parameter: Age (day) Value: 28
  misc_feature: MA Experiment 20001560 PARAMETER Experiment Name: At_Drought_Soil_Dry_P Parameter: Organism Value: A. thaliana
  misc_feature: MA Experiment 20001560 PARAMETER Experiment Name: At_Drought_Soil_Dry_P Parameter: Plant Line Value: WS
  misc_feature: MA Experiment 20001560 PARAMETER Experiment Name: At_Drought_Soil_Dry_P Parameter: Post Timepoint (hr) Value: None
  misc_feature: MA Experiment 20001560 PARAMETER Experiment Name: At_Drought_Soil_Dry_P Parameter: Post-Treatment Value: None
  misc_feature: MA Experiment 20001560 PARAMETER Experiment Name: At_Drought_Soil_Dry_P Parameter: Timepoint (day) Value: 14
  misc_feature: MA Experiment 20001560 PARAMETER Experiment Name: At_Drought_Soil_Dry_P Parameter: Treatment Value: Drought vs. No Drought
agttctccgccacaccaatctccagaaaaggggagaagcaaaaatggtttctctgaagctccagaagcggctcgccgcatcagtgatgaagtgcgggaagggcaaagtttggctcgatcccaacgaaagctccgacatctccatggccaattcccgccaaaacatcaggaagcttgtgaaggatggtttcatcatcaggaagccaaccaagattcactctcgttccagagctcgcaaaatgaagattgccaagatgaagggtcgtcactctggatacggtaagaggaagggtacccgtgaagctaggttgccaacaaaggtactgtggatgcgtaggatgcgtgttcttaggcgtctgttgaagaaatacagagagacgaagaagattgacaagcacatgtaccatgacatgtacatgcgtgttaagggtaatgtgttcaagaacaagcgtgtcttgatggagagtatccacaagtcaaaggctgagaaggctagggagaagactctgtctgatcagtttgaggctaagagggcgaagaacaaggctagccgagaaaggaagcatgctaggagagaggagcgtttagctaagggtcccggtggagatgttgcgcctgtagctgctccagcacctgctgctacacctgctccaactgcagctgtaccgaagaagaagtctaagaagtgaagaggatatatagtgtgaagctatatcgatcatcagttcacggattagactctgaagaaggttttgaatgttttatcgaatgcgtttgtggaataacttttattttcgcaaagaacataacttatgtcagttaatctttatgctttcagatttttagcttacagtgtttcaacagacctactttgcaagttgttctttttttggtttc

SEQ ID NO: 86388 - protein, 228 aa, Arabidopsis thaliana; identical to SEQ ID NO: 26502
  peptide (1)..(228): Ceres Seq. ID no. 12689653
  misc_feature (16)..(163): Pfam Name: Ribosomal protein L19e Pfam Description: Ribosomal protein L19e
  misc_feature (15)..(228): Homolog of NCBI NO: 15218602 NR Description: ribosomal protein L19, putative; protein id: supported by cDNA: 2906., supported by cDNA: gi_15983411, by cDNA: gi_18087584 [Arabidopsis thaliana]
  misc_feature (15)..(228): Homolog of NCBI NO: 18087585 NR Description: At1g02780/T14P4_3 [Arabidopsis thaliana]
  misc_feature (15)..(228): Homolog of NCBI NO: 15235290 NR Description: putative ribosomal protein L19; protein id: supported by cDNA: gi_14423511, supported by cDNA: gi_18377485
  misc_feature (15)..(214): Homolog of NCBI NO: 7440943 NR Description: ribosomal protein L19.T2H3.3 - Arabidopsis >gi|3377797|gb|AAC28170.1| Similar to 60S ribosome protein L19; for by A. thaliana cDNA T04719; coded for by A. thaliana cDNA
  misc_feature (15)..(225): Homolog of NCBI NO: 40287526 NR Description: 60S ribosomal protein L19 [Capsicum annuum]
  misc_feature (15)..(228): Homolog of NCBI NO: 15228314 NR Description: putative ribosomal protein; protein id: supported by cDNA: 27978., supported by cDNA: gi_15010617, by cDNA: gi_19699259 [Arabidopsis thaliana]
  misc_feature (15)..(227): Homolog of NCBI NO: 29837764 NR Description: putative ribosomal protein L19 [Oryza sativa
  misc_feature (15)..(196): Homolog of NCBI NO: 28200276 NR Description: ribosomal protein L19 [Branchiostoma belcheri
  misc_feature (15)..(196): Homolog of NCBI NO: 28630352 NR Description: ribosomal protein L19 [Branchiostoma lanceolatum]
  misc_feature (13)..(194): Homolog of NCBI NO: 22758856 NR Description: ribosomal protein L19 [Argopecten irradians]

SEQ ID NO: 86389 - protein, 214 aa, Arabidopsis thaliana [sequence omitted]

SEQ ID NO: 86390 - protein, 200 aa, Arabidopsis thaliana; identical to SEQ ID NO: 26504
  peptide (1)..(200): Ceres Seq. ID no. 12689655
  misc_feature (1)..(135): Pfam Name: Ribosomal protein L19e Pfam Description: Ribosomal protein L19e
  misc_feature (1)..(200): Homolog of NCBI NO: 15218602 NR Description: ribosomal protein L19, putative; protein id: supported by cDNA: 2906., supported by cDNA: gi_15983411, by cDNA: gi_18087584 [Arabidopsis thaliana]
  misc_feature (1)..(200): Homolog of NCBI NO: 18087585 NR Description: At1g02780/T14P4_3 [Arabidopsis thaliana]
  misc_feature (1)..(200): Homolog of NCBI NO: 15235290 NR Description: putative ribosomal protein L19; protein id: supported by cDNA: gi_14423511, supported by cDNA: gi_18377485
  misc_feature (1)..(186): Homolog of NCBI NO: 7440943 NR Description: ribosomal protein L19.T2H3.3 - Arabidopsis >gi|3377797|gb|AAC28170.1| Similar to 60S ribosome protein L19; for by A. thaliana cDNA T04719; coded for by A. thaliana cDNA
  misc_feature (1)..(197): Homolog of NCBI NO: 40287526 NR Description: 60S ribosomal protein L19 [Capsicum annuum]
  misc_feature (1)..(200): Homolog of NCBI NO: 15228314 NR Description: putative ribosomal protein; protein id: supported by cDNA: 27978., supported by cDNA: gi_15010617, by cDNA: gi_19699259 [Arabidopsis thaliana]
  misc_feature (1)..(199): Homolog of NCBI NO: 29837764 NR Description: putative ribosomal protein L19 [Oryza sativa
  misc_feature (1)..(168): Homolog of NCBI NO: 28200276 NR Description: ribosomal protein L19 [Branchiostoma belcheri
  misc_feature (1)..(168): Homolog of NCBI NO: 28630352 NR Description: ribosomal protein L19 [Branchiostoma lanceolatum]
  misc_feature (1)..(166): Homolog of NCBI NO: 22758856 NR Description: ribosomal protein L19 [Argopecten irradians]

SEQ ID NO: 86391 - DNA, 695 bp, Arabidopsis thaliana
  misc_feature (1)..(695): Ceres Seq. ID no. 12689673
  misc_feature: MA Experiment ID: 20000306 Result: Down-regulated in Transcription
  misc_feature: MA Experiment 20000306 PARAMETER Experiment Name: At_Germinating_Seeds_Sub_P Parameter: Age (hr) Value: 6 vs. 0
  misc_feature: MA Experiment 20000306 PARAMETER Experiment Name: At_Germinating_Seeds_Sub_P Parameter: Organism Value: A. thaliana
  misc_feature: MA Experiment 20000306 PARAMETER Experiment Name: At_Germinating_Seeds_Sub_P Parameter: Plant Line Value: WS
  misc_feature: MA Experiment 20000306 PARAMETER Experiment Name: At_Germinating_Seeds_Sub_P Parameter: Tissue Value: Germinating Seeds
  misc_feature: MA Experiment ID: 20000307 Result: Down-regulated in Transcription
  misc_feature: MA Experiment 20000307 PARAMETER Experiment Name: At_Germinating_Seeds_Sub_P Parameter: Age (hr) Value: 24 vs. 0
  misc_feature: MA Experiment 20000307 PARAMETER Experiment Name: At_Germinating_Seeds_Sub_P Parameter: Organism Value: A. thaliana
  misc_feature: MA Experiment 20000307 PARAMETER Experiment Name: At_Germinating_Seeds_Sub_P Parameter: Plant Line Value: WS
  misc_feature: MA Experiment 20000307 PARAMETER Experiment Name: At_Germinating_Seeds_Sub_P Parameter: Tissue Value: Germinating Seeds
  misc_feature: MA Experiment ID: 20000314 Result: Down-regulated in Transcription
  misc_feature: MA Experiment 20000314 PARAMETER Experiment Name: At_14day_Shoots-Roots_Sub_P Parameter: Age (day) Value: 14
  misc_feature: MA Experiment 20000314 PARAMETER Experiment Name: At_14day_Shoots-Roots_Sub_P Parameter: Organism Value: A. thaliana
  misc_feature: MA Experiment 20000314 PARAMETER Experiment Name: At_14day_Shoots-Roots_Sub_P Parameter: Plant Line Value: WS
  misc_feature: MA Experiment 20000314 PARAMETER Experiment Name: At_14day_Shoots-Roots_Sub_P Parameter: Tissue Value: Roots vs. Whole Plant
  misc_feature: MA Experiment ID: 20000315 Result: Down-regulated in Transcription
  misc_feature: MA Experiment 20000315 PARAMETER Experiment Name: At_14day_Shoots-Roots_Sub_P Parameter: Age (day) Value: 14
  misc_feature: MA Experiment 20000315 PARAMETER Experiment Name: At_14day_Shoots-Roots_Sub_P Parameter: Organism Value: A. thaliana
  misc_feature: MA Experiment 20000315 PARAMETER Experiment Name: At_14day_Shoots-Roots_Sub_P Parameter: Plant Line Value: WS
  misc_feature: MA Experiment 20000315 PARAMETER Experiment Name: At_14day_Shoots-Roots_Sub_P Parameter: Tissue Value: Shoots vs. Whole Plant
  misc_feature: MA Experiment ID: 20000328 Result: Down-regulated in Transcription
  misc_feature: MA Experiment 20000328 PARAMETER Experiment Name: At_42deg_Heat_Sub_P Parameter: Age (day) Value: 14
  misc_feature: MA Experiment 20000328 PARAMETER Experiment Name: At_42deg_Heat_Sub_P Parameter: Organism Value: A. thaliana
  misc_feature: MA Experiment 20000328 PARAMETER Experiment Name: At_42deg_Heat_Sub_P Parameter: Plant Line Value: WS
  misc_feature: MA Experiment 20000328 PARAMETER Experiment Name: At_42deg_Heat_Sub_P Parameter: Temperature (deg C) Value: 42 vs. 22
  misc_feature: MA Experiment 20000328 PARAMETER Experiment Name: At_42deg_Heat_Sub_P Parameter: Timepoint (hr) Value: 6
  misc_feature: MA Experiment 20000328 PARAMETER Experiment Name: At_42deg_Heat_Sub_P Parameter: Tissue Value: Aerial
  misc_feature: MA Experiment ID: 20000347 Result: Up-regulated in Transcription
  misc_feature: MA Experiment 20000347 PARAMETER Experiment Name: At_2mM_SA_Sub_P Parameter: Age (day) Value: 14
  misc_feature: MA Experiment 20000347 PARAMETER Experiment Name: At_2mM_SA_Sub_P Parameter: Organism Value: A. thaliana
  misc_feature: MA Experiment 20000347 PARAMETER Experiment Name: At_2mM_SA_Sub_P Parameter: Plant Line Value: WS
  misc_feature: MA Experiment 20000347 PARAMETER Experiment Name: At_2mM_SA_Sub_P Parameter: Timepoint (hr) Value: 6
  misc_feature: MA Experiment 20000347 PARAMETER Experiment Name: At_2mM_SA_Sub_P Parameter: Tissue Value: Aerial
  misc_feature: MA Experiment 20000347 PARAMETER Experiment Name: At_2mM_SA_Sub_P Parameter: Treatment Value: 2mM SA vs. No Treatment
  misc_feature: MA Experiment ID: 20000355 Result: Down-regulated in Transcription
  misc_feature: MA Experiment 20000355 PARAMETER Experiment Name: At_Siliques_Sub_P Parameter: Age (day) Value: 21
  misc_feature: MA Experiment 20000355 PARAMETER Experiment Name: At_Siliques_Sub_P Parameter: Organism Value: A. thaliana
  misc_feature: MA Experiment 20000355 PARAMETER Experiment Name: At_Siliques_Sub_P Parameter: Plant Line Value: WS
  misc_feature: MA Experiment 20000355 PARAMETER Experiment Name: At_Siliques_Sub_P Parameter: Tissue Value: Less Than 5mm Siliques vs. Whole Plant
  misc_feature: MA Experiment ID: 20000440 Result: Down-regulated in Transcription
  misc_feature: MA Experiment 20000440 PARAMETER Experiment Name: At_Closed-Flower__Sub_P Parameter: Tissue Value: Closed Flower vs. Whole Plant
  misc_feature: MA Experiment ID: 20001807 Result: Up-regulated in Transcription
  misc_feature: MA Experiment 20001807 PARAMETER Experiment Name: At_50mM_NH4NO3_L-to-H_Sub_P Parameter: Timepoint (hr) Value: 6
  misc_feature: MA Experiment 20001807 PARAMETER Experiment Name: At_50mM_NH4NO3_L-to-H_Sub_P Parameter: Tissue Value: Leaf
  misc_feature: MA Experiment 20001807 PARAMETER Experiment Name: At_50mM_NH4NO3_L-to-H_Sub_P Parameter: Treatment Value: 50mM NH4NO3 vs 100mM Mannitol
atggcaggaatcaaagttttcggtcacccagcttccacagccactagaagagttctcatcgctcttcacgagaagaatctcgactttgaattcgttcatatcgagctcaaagatggtgaacacaagaaagagcctttcatcttccgcaacccttttggtaaagttccagcctttgaagatggagacttcaagcttttcgaatcaagagcaatcactcaatacatagctcatttttactcagacaaaggaaaccaacttgtctcccttggctccaaggacattgcgggcatagccatgggcattgaaattgaatcgcatgagtttgacccagttggttcaaagcttgtttgggagcaagtcttaaagcctttgtatggtatgaccacagacaaaaccgttgttgaagaagaagaggctaagctagccaaggtcctcgatgtttacgaacacaggcttggtgagtccaagtatttggcttctgataaattcactttggtcgatcttcacactatccctgtgattcagtacttgcttggtacaccaactaagaaactctttgacgagcgtccacatgtcagtgcttgggttgctgacatcacttctaggccttctgctaagaaggttctttaagtgactcacaaactgttaatcagaagattgaataaagtggcgatgacctcattgccctaattctc

SEQ ID NO: 86392 - protein, 209 aa, Arabidopsis thaliana; identical to SEQ ID NO: 34803
  peptide (1)..(209): Ceres Seq. ID no. 12689674
  misc_feature (1)..(209): Homolog of NCBI NO: 15218639 NR Description: glutathione transferase, putative; protein id: supported by cDNA: gi_11095987, supported by cDNA: gi_17065131,
  misc_feature (1)..(209): Homolog of NCBI NO: 17377644 NR Description: Glutathione S-transferase 11 (GST class-phi)
  misc_feature (1)..(209): Homolog of NCBI NO: 15218640 NR Description: glutathione transferase, putative; protein id: supported by cDNA: gi_15215607, supported by cDNA: gi_20453338, by cDNA: gi_443697 [Arabidopsis thaliana]
  misc_feature (1)..(209): Homolog of NCBI NO: 481821 NR Description: probable glutathione transferase (EC 2.5.1.18)
  misc_feature (1)..(209): Homolog of NCBI NO: 15227063 NR Description: glutathione transferase, putative; protein id:
  misc_feature (1)..(208): Homolog of NCBI NO: 15235401 NR Description: glutathione transferase, putative; protein id: supported by cDNA: 27915., supported by cDNA: gi_11908111, by cDNA: gi_13194823, supported by cDNA: gi_13265466, supported
  misc_feature (2)..(208): Homolog of NCBI NO: 2554769 NR Description: Chain A, Structure Of Glutathione S-Transferase
  misc_feature (1)..(208): Homolog of NCBI NO: 21555418 NR Description: Atpm24.1 glutathione S transferase [Arabidopsis
  misc_feature (1)..(206): Homolog of NCBI NO: 30678437 NR Description: glutathione transferase, putative [Arabidopsis >gi|28973615|gb|AAO64132.1| putative glutathione transferase

SEQ ID NO: 86393 - protein, 111 aa, Arabidopsis thaliana; identical to SEQ ID NO: 34804
  peptide (1)..(111): Ceres Seq. ID no. 12689675
  misc_feature (1)..(111): Homolog of NCBI NO: 15218639 NR Description: glutathione transferase, putative; protein id: supported by cDNA: gi_11095987, supported by cDNA: gi_17065131,
  misc_feature (1)..(111): Homolog of NCBI NO: 17377644 NR Description: Glutathione S-transferase 11 (GST class-phi)
  misc_feature (1)..(111): Homolog of NCBI NO: 15218640 NR Description: glutathione transferase, putative; protein id: supported by cDNA: gi_15215607, supported by cDNA: gi_20453338, by cDNA: gi_443697 [Arabidopsis thaliana]
  misc_feature (1)..(111): Homolog of NCBI NO: 481821 NR Description: probable glutathione transferase (EC 2.5.1.18)
  misc_feature (1)..(111): Homolog of NCBI NO: 15227063 NR Description: glutathione transferase, putative; protein id:
  misc_feature (1)..(110): Homolog of NCBI NO: 15235401 NR Description: glutathione transferase, putative; protein id: supported by cDNA: 27915., supported by cDNA: gi_11908111, by cDNA: gi_13194823, supported by cDNA: gi_13265466, supported
  misc_feature (1)..(110): Homolog of NCBI NO: 2554769 NR Description: Chain A, Structure Of Glutathione S-Transferase
  misc_feature (1)..(110): Homolog of NCBI NO: 21555418 NR Description: Atpm24.1 glutathione S transferase [Arabidopsis
  misc_feature (1)..(108): Homolog of NCBI NO: 30678437 NR Description: glutathione transferase, putative [Arabidopsis >gi|28973615|gb|AAO64132.1| putative glutathione transferase

SEQ ID NO: 86394 - DNA, 2401 bp, Arabidopsis thaliana
  misc_feature (1)..(2401): Ceres Seq. ID no. 12689689
  misc_feature: MA Experiment ID: 20000171 Result: Down-regulated in Transcription
  misc_feature: MA Experiment 20000171 PARAMETER Experiment Name: At_42deg_Heat_P Parameter: Age (day) Value: 14
  misc_feature: MA Experiment 20000171 PARAMETER Experiment Name: At_42deg_Heat_P Parameter: Organism Value: A. thaliana
  misc_feature: MA Experiment 20000171 PARAMETER Experiment Name: At_42deg_Heat_P Parameter: Plant Line Value: WS
  misc_feature: MA Experiment 20000171 PARAMETER Experiment Name: At_42deg_Heat_P Parameter: Temperature (deg C) Value: 42 vs. 22
  misc_feature: MA Experiment 20000171 PARAMETER Experiment Name: At_42deg_Heat_P Parameter: Timepoint (hr) Value: 1
  misc_feature: MA Experiment 20000171 PARAMETER Experiment Name: At_42deg_Heat_P Parameter: Tissue Value: Aerial
  misc_feature: MA Experiment ID: 20000173 Result: Down-regulated in Transcription
  misc_feature: MA Experiment 20000173 PARAMETER Experiment Name: At_42deg_Heat_P Parameter: Age (day) Value: 14
  misc_feature: MA Experiment 20000173 PARAMETER Experiment Name: At_42deg_Heat_P Parameter: Organism Value: A. thaliana
  misc_feature: MA Experiment 20000173 PARAMETER Experiment Name: At_42deg_Heat_P Parameter: Plant Line Value: WS
  misc_feature: MA Experiment 20000173 PARAMETER Experiment Name: At_42deg_Heat_P Parameter: Temperature (deg C) Value: 42 vs. 22
  misc_feature: MA Experiment 20000173 PARAMETER Experiment Name: At_42deg_Heat_P Parameter: Timepoint (hr) Value: 6
  misc_feature: MA Experiment 20000173 PARAMETER Experiment Name: At_42deg_Heat_P Parameter: Tissue Value: Aerial
  misc_feature: MA Experiment ID: 20000184 Result: Up-regulated in Transcription
  misc_feature: MA Experiment 20000184 PARAMETER Experiment Name: At_Shoots__P Parameter: Age (day) Value: 7
  misc_feature: MA Experiment 20000184 PARAMETER Experiment Name: At_Shoots__P Parameter: Tissue Value: Shoots vs. Whole Plant
  misc_feature: MA Experiment ID: 20000234 Result: Up-regulated in Transcription
  misc_feature: MA Experiment 20000234 PARAMETER Experiment Name: At_Siliques_P Parameter: Age (day) Value: 21
  misc_feature: MA Experiment 20000234 PARAMETER Experiment Name: At_Siliques_P Parameter: Organism Value: A. thaliana
  misc_feature: MA Experiment 20000234 PARAMETER Experiment Name: At_Siliques_P Parameter: Plant Line Value: WS
  misc_feature: MA Experiment 20000234 PARAMETER Experiment Name: At_Siliques_P Parameter: Tissue Value: Less Than 5mm Siliques vs. Whole Plant
  misc_feature: MA Experiment ID: 20000264 Result: Up-regulated in Transcription
  misc_feature: MA Experiment 20000264 PARAMETER Experiment Name: At_Open_Flower_P Parameter: Age (day) Value: 21
  misc_feature: MA Experiment 20000264 PARAMETER Experiment Name: At_Open_Flower_P Parameter: Plant Line Value: WS
  misc_feature: MA Experiment 20000264 PARAMETER Experiment Name: At_Open_Flower_P Parameter: Tissue Value: Open Flower vs. Whole Plant
  misc_feature: MA Experiment ID: 20000265 Result: Up-regulated in Transcription
  misc_feature: MA Experiment 20000265 PARAMETER Experiment Name: At_Open_Flower_P Parameter: Age (day) Value: 21
  misc_feature: MA Experiment 20000265 PARAMETER Experiment Name: At_Open_Flower_P Parameter: Plant Line Value: WS
  misc_feature: MA Experiment 20000265 PARAMETER Experiment Name: At_Open_Flower_P Parameter: Tissue Value: Closed Flower vs. Whole Plant
  misc_feature: MA Experiment ID: 20000286 Result: Up-regulated in Transcription
  misc_feature: MA Experiment 20000286 PARAMETER Experiment Name: At_Open_Flower_P Parameter: Age (day) Value: 21
  misc_feature: MA Experiment 20000286 PARAMETER Experiment Name: At_Open_Flower_P Parameter: Plant Line Value: WS
  misc_feature: MA Experiment 20000286 PARAMETER Experiment Name: At_Open_Flower_P Parameter: Tissue Value: Half Open vs. Whole Plant
  misc_feature: MA Experiment ID: 20000437 Result: Down-regulated in Transcription
  misc_feature: MA Experiment 20000437 PARAMETER Experiment Name: At_Drought_P Parameter: Age (day) Value: 8
  misc_feature: MA Experiment 20000437 PARAMETER Experiment Name: At_Drought_P Parameter: Organism Value: A. thaliana
  misc_feature: MA Experiment 20000437 PARAMETER Experiment Name: At_Drought_P Parameter: Plant Line Value: WS
  misc_feature: MA Experiment 20000437 PARAMETER Experiment Name: At_Drought_P Parameter: Timepoint (hr) Value: 24
  misc_feature: MA Experiment 20000437 PARAMETER Experiment Name: At_Drought_P Parameter: Tissue Value: Whole Plant
  misc_feature: MA Experiment 20000437 PARAMETER Experiment Name: At_Drought_P Parameter: Treatment Value: Drought vs. No Drought
  misc_feature: MA Experiment ID: 20000438 Result: Up-regulated in Transcription
  misc_feature: MA Experiment 20000438 PARAMETER Experiment Name: At_Shoots__P Parameter: Age (day) Value: 14
  misc_feature: MA Experiment 20000438 PARAMETER Experiment Name: At_Shoots__P Parameter: Tissue Value: Shoots vs. Whole Plant
  misc_feature: MA Experiment ID: 20000794 Result: Up-regulated in Transcription
  misc_feature: MA Experiment 20000794 PARAMETER Experiment Name: At_Petals_P Parameter: Age (day) Value: 23-25 days
  misc_feature: MA Experiment 20000794 PARAMETER Experiment Name: At_Petals_P Parameter: Plant Line Value: WS
  misc_feature: MA Experiment 20000794 PARAMETER Experiment Name: At_Petals_P Parameter: Tissue Value: Petals vs. Whole plant
  misc_feature: MA Experiment ID: 20001247 Result: Down-regulated in Transcription
  misc_feature: MA Experiment 20001247 PARAMETER Experiment Name: At_Far-red-induction_P Parameter: Age (day) Value: 7
  misc_feature: MA Experiment 20001247 PARAMETER Experiment Name: At_Far-red-induction_P Parameter: Light Value: Far-red vs. White
  misc_feature: MA Experiment 20001247 PARAMETER Experiment Name: At_Far-red-induction_P Parameter: Organism Value: A. thaliana
  misc_feature: MA Experiment 20001247 PARAMETER Experiment Name: At_Far-red-induction_P Parameter: Plant Line Value: Columbia
  misc_feature: MA Experiment 20001247 PARAMETER Experiment Name: At_Far-red-induction_P Parameter: Timepoint (hr) Value: 1
  misc_feature: MA Experiment 20001247 PARAMETER Experiment Name: At_Far-red-induction_P Parameter: Tissue Value: Whole Plant
  misc_feature: MA Experiment ID: 20001248 Result: Down-regulated in Transcription
  misc_feature: MA Experiment 20001248 PARAMETER Experiment Name: At_Far-red-induction_P Parameter: Age (day) Value: 7
  misc_feature: MA Experiment 20001248 PARAMETER Experiment Name: At_Far-red-induction_P Parameter: Light Value: Far-red vs. White
  misc_feature: MA Experiment 20001248 PARAMETER Experiment Name: At_Far-red-induction_P Parameter: Organism Value: A. thaliana
  misc_feature: MA Experiment 20001248 PARAMETER Experiment Name: At_Far-red-induction_P Parameter: Plant Line Value: Columbia
  misc_feature: MA Experiment 20001248 PARAMETER Experiment Name: At_Far-red-induction_P Parameter: Timepoint (hr) Value: 4
  misc_feature: MA Experiment 20001248 PARAMETER Experiment Name: At_Far-red-induction_P Parameter: Tissue Value: Whole Plant
  misc_feature: MA Experiment ID: 20001450 Result: Down-regulated in Transcription
  misc_feature: MA Experiment 20001450 PARAMETER Experiment Name: At_Far-red-induction_P Parameter: Age (day) Value: 7
  misc_feature: MA Experiment 20001450 PARAMETER Experiment Name: At_Far-red-induction_P Parameter: Light Value: Far-red vs. White
  misc_feature: MA Experiment 20001450 PARAMETER Experiment Name: At_Far-red-induction_P Parameter: Organism Value: A. thaliana
  misc_feature: MA Experiment 20001450 PARAMETER Experiment Name: At_Far-red-induction_P Parameter: Plant Line Value: Columbia
  misc_feature: MA Experiment 20001450 PARAMETER Experiment Name: At_Far-red-induction_P Parameter: Timepoint (hr) Value: 8
  misc_feature: MA Experiment 20001450 PARAMETER Experiment Name: At_Far-red-induction_P Parameter: Tissue Value: Whole Plant
  misc_feature: MA Experiment ID: 20001451 Result: Down-regulated in Transcription
  misc_feature: MA Experiment 20001451 PARAMETER Experiment Name: At_Far-red-induction_P Parameter: Age (day) Value: 7
  misc_feature: MA Experiment 20001451 PARAMETER Experiment Name: At_Far-red-induction_P Parameter: Light Value: Far-red vs. White
  misc_feature: MA Experiment 20001451 PARAMETER Experiment Name: At_Far-red-induction_P Parameter: Organism Value: A. thaliana
  misc_feature: MA Experiment 20001451 PARAMETER Experiment Name: At_Far-red-induction_P Parameter: Plant Line Value: Columbia
  misc_feature: MA Experiment 20001451 PARAMETER Experiment Name: At_Far-red-induction_P Parameter: Timepoint (hr) Value: 24
  misc_feature: MA Experiment 20001451 PARAMETER Experiment Name: At_Far-red-induction_P Parameter: Tissue Value: Whole Plant
  misc_feature: MA Experiment ID: 20001911 Result: Down-regulated in Transcription
  misc_feature: MA Experiment 20001911 PARAMETER Experiment Name: At_Drought_Reproduction_P Parameter: Age (day) Value: 40
  misc_feature: MA Experiment 20001911 PARAMETER Experiment Name: At_Drought_Reproduction_P Parameter: Organism Value: A. thaliana
  misc_feature: MA Experiment 20001911 PARAMETER Experiment Name: At_Drought_Reproduction_P Parameter: Plant Line Value: WS
  misc_feature: MA Experiment 20001911 PARAMETER Experiment Name: At_Drought_Reproduction_P Parameter: Timepoint (day) Value: 10
  misc_feature: MA Experiment 20001911 PARAMETER Experiment Name: At_Drought_Reproduction_P Parameter: Tissue Value: Flowers
  misc_feature: MA Experiment 20001911 PARAMETER Experiment Name: At_Drought_Reproduction_P Parameter: Treatment Value: Drought vs. No Drought
acaatcacatggccttttcaaaaaatcaatcttttagttctctatcgatgcgtaggcttgaagcatgatgacgacagtcgccgccgatctccaccgttatcttttcctgattaccgtttttcttttcttcctctgcgacaaaacctctcttgctctgaccacagacggtgttcttcttctctctttccgttactcaatcgttgacgatcctctttacgtttttcggagctggagattcgacgacgagactccttgctcttggcgtggtgtcacgtgcgatgcatcttcccggcacgtgactgttctgtcacttccaagctcgaaccttaccggcacactaccttcaaatttgggttcactcaattcacttcaaagacttgatctttccaacaattccatcaatgggtctttcccggtttcgcttctcaacgcgacggagcttcgatttcttgatctgtccgataatcacatctccggtgcactaccggcgagttttggcgcgctttcgaacctccaagtgttgaatctctccgataattccttcgtcggcgaattaccgaacacattaggatggaaccggaacttaacggagatttcacttcagaaaaactatttatccggcgggattccgggaggttttaagtcgacggagtatcttgatctctcgtcaaatttgatcaaaggctcgttgccgtcacatttcagagggaatcgtctacgctatttcaacgcttcgtacaacagaatctccggcgagattccgtcaggtttcgccgacgaaatcccggaagacgccaccgttgatctctcattcaaccaacttacaggtcaaatcccgggttttcgggttctcgataaccaagaatccaactctttctccggtaacccgggtctctgcggatccgaccatgcaaaacacccttgtcgtgacggtgaagcaacctctccacctccatcgccgactccaaattctcctcctgcattagctgctataccaaatactattggcttaaccaatcacccaattagctccaaaaccggtccgaaatcaaaatgggatcataaaccggtgcttatcattggcattgttgtcggtgacttagccggtttagcaatcctcgggattgtgtttttctacatttaccagtcgagaaaacggaagaccgtaacggctacgtcaaaatggtccacgtcatcaacagattccaaggtctcaaaatggtactgtttacgcaaatccgtttacgttgacggtgactgcgaagaagaagaagaggaatctgagacatcggaatccgaatccgacgaagagaacccggtcggaccaaatcgacggtcaggattagacgatcaagaaaaaaagggaacgttagtgaatctcgattcagagaaagagcttgaaatcgaaacgcttctcaaagcatcagcttatattttgggagccaccggttcgagcataatgtataaagcggtgcttcaagacggaacagctgtggcggttcgacgaatagctgaatgcggtttagaccggtttagagatttcgaagctcaggttcgagccgtggctaagttaatacatccaaacctggtacgaattcgcggtttctattggggatccgacgagaaacttgtcatttacgattttgtccctaacggcagcctcgctaacgcccgttaccggaaagtgggctcctctccttgtcatttaccttgggacgctcggctcaagatagcaaaaggcatagctcgcgggctaacatacgtacacgacaagaagtacgtgcatggtaacctcaagcctagcaatatccttttgggcttagatatggagcctaaagttgcggatttcggtcttgagaagcttttgattggggacatgagttatagaaccggtggatcggctccaatattcggaagcaagagatccacaacgtctcttgagtttgggccgagtccaagcccaagtccaagttcagtcgggttaccctacaatgctccagaatctcttcggagtattaagccgaattcgaaatgggatgtgtactcgttcggagttattctgcttgagctactaacgggaaagatcgtggtggtcgacgagcttggacaggttaatgggcttgtgattgatgacggtgagcgggcaattcggatggcggactctgctatacgggctgagttagaaggcaaagaagaagctgtgttggcatgtttgaaaatgggcctagcttgtgcgtctccaataccacagagaaggcccaatatcaaagaggctttgcaagttctcgagagattccctgttcattctagtcaacagtaatgataataattaagaccaagaaagagttaaataacttgactgtgtgtacttagagttagattgataggcaagtttgatctt

SEQ ID NO: 86395 - protein, 751 aa, Arabidopsis thaliana
  peptide (1)..(751): Ceres Seq. ID no. 12689690
  misc_feature (14)..(749): Homolog of NCBI NO: 15227808 NR Description: leucine-rich repeat transmembrane protein kinase, protein id: At2g23300.1 [Arabidopsis thaliana]
  misc_feature (15)..(639): Homolog of NCBI NO: 18086496 NR Description: AT4g37250/C7A10_110 [Arabidopsis thaliana]
  misc_feature (15)..(639): Homolog of NCBI NO: 25387059 NR Description: receptor kinase-like protein [imported] -
  misc_feature (15)..(639): Homolog of NCBI NO: 30690913 NR Description: leucine rich repeat protein family [Arabidopsis
  misc_feature (81)..(749): Homolog of NCBI NO: 18086496 NR Description: AT4g37250/C7A10_110 [Arabidopsis thaliana]
  misc_feature (81)..(749): Homolog of NCBI NO: 25387059 NR Description: receptor kinase-like protein [imported] -
  misc_feature (81)..(749): Homolog of NCBI NO: 30690913 NR Description: leucine rich repeat protein family [Arabidopsis
  misc_feature (13)..(482): Homolog of NCBI NO: 18418404 NR Description: leucine-rich repeat transmembrane protein kinase, protein id: At4g34220.1, supported by cDNA: gi_14334871, by cDNA: gi_21281266 [Arabidopsis thaliana]
  misc_feature (617)..(746): Homolog of NCBI NO: 18418404 NR Description: leucine-rich repeat transmembrane protein kinase, protein id: At4g34220.1, supported by cDNA: gi_14334871, by cDNA: gi_21281266 [Arabidopsis thaliana]
  misc_feature (13)..(482): Homolog of NCBI NO: 7488258 NR Description: protein kinase homolog F28A23.20 - Arabidopsis
MMTTVAADLHRYLFLITVFLFFLCDKTSLALTTDGVLLLSFRYSIVDDPLYVFRSWRFDDETPCSWRGVTCDASSRHVTVLSLPSSNLTGTLPSNLGSLNSLQRLDLSNNSINGSFPVSLLNATELRFLDLSDNHISGALPASFGALSNLQVLNLSDNSFVGELPNTLGWNRNLTEISLQKNYLSGGIPGGFKSTEYLDLSSNLIKGSLPSHFRGNRLRYFNASYNRISGEIPSGFADEIPEDATVDLSFNQLTGQIPGFRVLDNQESNSFSGNPGLCGSDHAKHPCRDGEATSPPPSPTPNSPPALAAIPNTIGLTNHPISSKTGPKSKWDHKPVLIIGIVVGDLAGLAILGIVFFYIYQSRKRKTVTATSKWSTSSTDSKVSKWYCLRKSVYVDGDCEEEEEESETSESESDEENPVGPNRRSGLDDQEKKGTLVNLDSEKELEIETLLKASAYILGATGSSIMYKAVLQDGTAVAVRRIAECGLDRFRDFEAQVRAVAKLIHPNLVRIRGFYWGSDEKLVIYDFVPNGSLANARYRKVGSSPCHLPWDARLKIAKGIARGLTYVHDKKYVHGNLKPSNILLGLDMEPKVADFGLEKLLIGDMSYRTGGSAPIFGSKRSTTSLEFGPSPSPSPSSVGLPYNAPESLRSIKPNSKWDVYSFGVILLELLTGKIVVVDELGQVNGLVIDDGERAIRMADSAIRAELEGKEEAVLACLKMGLACASPIPQRRPNIKEALQVLERFPVHSSQQ

SEQ ID NO: 86396 - protein, 750 aa, Arabidopsis thaliana
  peptide (1)..(750): Ceres Seq. ID no. 12689691
  misc_feature (13)..(748): Homolog of NCBI NO: 15227808 NR Description: leucine-rich repeat transmembrane protein kinase, protein id: At2g23300.1 [Arabidopsis thaliana]
  misc_feature (14)..(638): Homolog of NCBI NO: 18086496 NR Description: AT4g37250/C7A10_110 [Arabidopsis thaliana]
  misc_feature (14)..(638): Homolog of NCBI NO: 25387059 NR Description: receptor kinase-like protein [imported] -
  misc_feature (14)..(638): Homolog of NCBI NO: 30690913 NR Description: leucine rich repeat protein family [Arabidopsis
  misc_feature (80)..(748): Homolog of NCBI NO: 18086496 NR Description: AT4g37250/C7A10_110 [Arabidopsis thaliana]
  misc_feature (80)..(748): Homolog of NCBI NO: 25387059 NR Description: receptor kinase-like protein [imported] -
  misc_feature (80)..(748): Homolog of NCBI NO: 30690913 NR Description: leucine rich repeat protein family [Arabidopsis
  misc_feature (12)..(481): Homolog of NCBI NO: 18418404 NR Description: leucine-rich repeat transmembrane protein kinase, protein id: At4g34220.1, supported by cDNA: gi_14334871, by cDNA: gi_21281266 [Arabidopsis thaliana]
  misc_feature (616)..(745): Homolog of NCBI NO: 18418404 NR Description: leucine-rich repeat transmembrane protein kinase, protein id: At4g34220.1, supported by cDNA: gi_14334871, by cDNA: gi_21281266 [Arabidopsis thaliana]
  misc_feature (12)..(481): Homolog of NCBI NO: 7488258 NR Description: protein kinase homolog F28A23.20 - Arabidopsis
MTTVAADLHRYLFLITVFLFFLCDKTSLALTTDGVLLLSFRYSIVDDPLYVFRSWRFDDETPCSWRGVTCDASSRHVTVLSLPSSNLTGTLPSNLGSLNSLQRLDLSNNSINGSFPVSLLNATELRFLDLSDNHISGALPASFGALSNLQVLNLSDNSFVGELPNTLGWNRNLTEISLQKNYLSGGIPGGFKSTEYLDLSSNLIKGSLPSHFRGNRLRYFNASYNRISGEIPSGFADEIPEDATVDLSFNQLTGQIPGFRVLDNQESNSFSGNPGLCGSDHAKHPCRDGEATSPPPSPTPNSPPALAAIPNTIGLTNHPISSKTGPKSKWDHKPVLIIGIVVGDLAGLAILGIVFFYIYQSRKRKTVTATSKWSTSSTDSKVSKWYCLRKSVYVDGDCEEEEEESETSESESDEENPVGPNRRSGLDDQEKKGTLVNLDSEKELEIETLLKASAYILGATGSSIMYKAVLQDGTAVAVRRIAECGLDRFRDFEAQVRAVAKLIHPNLVRIRGFYWGSDEKLVIYDFVPNGSLANARYRKVGSSPCHLPWDARLKIAKGIARGLTYVHDKKYVHGNLKPSNILLGLDMEPKVADFGLEKLLIGDMSYRTGGSAPIFGSKRSTTSLEFGPSPSPSPSSVGLPYNAPESLRSIKPNSKWDVYSFGVILLELLTGKIVVVDELGQVNGLVIDDGERAIRMADSAIRAELEGKEEAVLACLKMGLACASPIPQRRPNIKEALQVLERFPVHSSQQ

SEQ ID NO: 86397 - DNA, 1563 bp, Arabidopsis thaliana
  misc_feature (1)..(1563): Ceres Seq. ID no. 12690197
  misc_feature: MA Experiment ID: 20000234 Result: Up-regulated in Transcription
  misc_feature: MA Experiment 20000234 PARAMETER Experiment Name: At_Siliques_P Parameter: Age (day) Value: 21
  misc_feature: MA Experiment 20000234 PARAMETER Experiment Name: At_Siliques_P Parameter: Organism Value: A. thaliana
  misc_feature: MA Experiment 20000234 PARAMETER Experiment Name: At_Siliques_P Parameter: Plant Line Value: WS
  misc_feature: MA Experiment 20000234 PARAMETER Experiment Name: At_Siliques_P Parameter: Tissue Value: Less Than 5mm Siliques vs. Whole Plant
  misc_feature: MA Experiment ID: 20000264 Result: Up-regulated in Transcription
  misc_feature: MA Experiment 20000264 PARAMETER Experiment Name: At_Open_Flower_P Parameter: Age (day) Value: 21
  misc_feature: MA Experiment 20000264 PARAMETER Experiment Name: At_Open_Flower_P Parameter: Plant Line Value: WS
  misc_feature: MA Experiment 20000264 PARAMETER Experiment Name: At_Open_Flower_P Parameter: Tissue Value: Open Flower vs. Whole Plant
  misc_feature: MA Experiment ID: 20000265 Result: Up-regulated in Transcription
  misc_feature: MA Experiment 20000265 PARAMETER Experiment Name: At_Open_Flower_P Parameter: Age (day) Value: 21
  misc_feature: MA Experiment 20000265 PARAMETER Experiment Name: At_Open_Flower_P Parameter: Plant Line Value: WS
  misc_feature: MA Experiment 20000265 PARAMETER Experiment Name: At_Open_Flower_P Parameter: Tissue Value: Closed Flower vs. Whole Plant
  misc_feature: MA Experiment ID: 20000574 Result: Up-regulated in Transcription
  misc_feature: MA Experiment 20000574 PARAMETER Experiment Name: At_100uM_ABA_Mutants__P Parameter: Organism Value: A. thaliana
  misc_feature: MA Experiment 20000574 PARAMETER Experiment Name: At_100uM_ABA_Mutants__P Parameter: Plant Line Value: CS23 vs. Ler wt
  misc_feature: MA Experiment 20000574 PARAMETER Experiment Name: At_100uM_ABA_Mutants__P Parameter: Timepoint (hr) Value: N/A
  misc_feature: MA Experiment 20000574 PARAMETER Experiment Name: At_100uM_ABA_Mutants__P Parameter: Tissue Value: Whole Plant
  misc_feature: MA Experiment 20000574 PARAMETER Experiment Name: At_100uM_ABA_Mutants__P Parameter: Treatment Value: None
  misc_feature: MA Experiment ID: 20000794 Result: Up-regulated in Transcription
  misc_feature: MA Experiment 20000794 PARAMETER Experiment Name: At_Petals_P Parameter: Age (day) Value: 23-25 days
  misc_feature: MA Experiment 20000794 PARAMETER Experiment Name: At_Petals_P Parameter: Plant Line Value: WS
  misc_feature: MA Experiment 20000794 PARAMETER Experiment Name: At_Petals_P Parameter: Tissue Value: Petals vs. Whole plant
atgactgatgcaatgttctcttcttcggccaagccacacttcatcaagcctatgcttccaggcttcgaaacctatattgttattcctaaagctttttactcgaactacttagagggaagacaagagggaaacgctgcagaactgagatcagacgccacggagatcacttggaaaataaagatagacggccgaagaatgaccaaagggtgggaagaatttgcggtggctcacaatcttcaggtcgacgacattcttgttttcagacacgaaggaaatctcttgtttcatgtcacaccttttggactgagtttttgtgagatactttactcacagagagacgagaaagatgtcaaagacacgacgggaaaggttacaagatctagaacggtgaagaaaaacggaaaaaatgagtgttcatcagtggacactgattttgtggtccctgttacagcctcaaaccaacgagttgattcattttatcttccaagaggttttaccacatcaagtggttcgagtaaactgtgcaatgagataattctaatagatgaaaaagacaggccatcgacgctaaaactgcgttacaataaatcaagtaatcggttttgtgttagccgaggttggagagctttctgctgcaggaatggttatagaactggttgtttcttgagaatcatattggtccgaaaaggaaaaacacccgtgctccggatttttcctttggagagggatgaggacaacattggaacggtttctataccagaaaaacactcaaagaaggttaagcaagaagtagagcatgaggagtctgtgaaagaagagacgaatgtggaatcaggaaagcttaaaagagatagattactgcagaaagatcccaaaaatttgtgttctacatcacaagacactaattttgtggtccctgtcacagcttcaaaccaacgacatgattcatttcatcttccaaaaggtttaaccacctcaagtggtctgagtaaactgtgcaagaagattatttttatggatcaaaaaggtaggtcatcgatactagacttgagctacagtatatcagatgatcggtttactgtcaggcgaggctggaaagctttctgctgcaggaatgagcataaaactggttgtttcttgaggctcatattggtccaaaatggaaaaacacccgtactccggatttttcctttggagagatatgagaacagcattgcgaagaactctaagaagattaagcaagaagtagaatatgagtctgcgaaagaagagaagaacctggaatcattgtctttgtcagataattctagctttgtggtatctgtcacagtttctaatctaagtgaagatatactgcatcttccaataaggctttcaagatcaaacttactggacaaaaaaattcacgagatagttttgatgaacaaagagggaagaacatggatattaagtttaaaatacagcaagtactccggtaggtttagaatcacacgcggctggaaaagtttctgcgaggcgaacggtcaaaaacctggatgtaccttcttactcaagctgttctag

SEQ ID NO: 86398 - protein, 520 aa, Arabidopsis thaliana
  peptide (1)..(520): Ceres Seq. ID no. 12690198
  misc_feature (13)..(105): Pfam Name: B3 DNA binding domain Pfam Description: B3 DNA binding domain
  misc_feature (1)..(267): Homolog of NCBI NO: 15242700 NR Description: meristem protein - like; protein id: At5g32460.1
  misc_feature (210)..(519): Homolog of NCBI NO: 15242700 NR Description: meristem protein - like; protein id: At5g32460.1
  misc_feature (291)..(519): Homolog of NCBI NO: 26450115 NR Description: unknown protein [Arabidopsis thaliana]
  misc_feature (10)..(239): Homolog of NCBI NO: 26450115 NR Description: unknown protein [Arabidopsis thaliana]
  misc_feature (243)..(519): Homolog of NCBI NO: 15224604 NR Description: hypothetical protein; protein id: At2g24700.1
  misc_feature (1)..(111): Homolog of NCBI NO: 15224604 NR Description: hypothetical protein; protein id: At2g24700.1
  misc_feature (162)..(519): Homolog of NCBI NO: 18411270 NR Description: hypothetical protein; protein id: At4g00260.1
  misc_feature (261)..(510): Homolog of NCBI NO: 15224604 NR Description: hypothetical protein; protein id: At2g24700.1
  misc_feature (91)..(286): Homolog of NCBI NO: 15224604 NR Description: hypothetical protein; protein id: At2g24700.1
  misc_feature (28)..(109): Homolog of NCBI NO: 18411270 NR Description: hypothetical protein; protein id: At4g00260.1
MTDAMFSSSAKPHFIKPMLPGFETYIVIPKAFYSNYLEGRQEGNAAELRSDATEITWKIKIDGRRMTKGWEEFAVAHNLQVDDILVFRHEGNLLFHVTPFGLSFCEILYSQRDEKDVKDTTGKVTRSRTVKKNGKNECSSVDTDFVVPVTASNQRVDSFYLPRGFTTSSGSSKLCNEIILIDEKDRPSTLKLRYNKSSNRFCVSRGWRAFCCRNGYRTGCFLRIILVRKGKTPVLRIFPLERDEDNIGTVSIPEKHSKKVKQEVEHEESVKEETNVESGKLKRDRLLQKDPKNLCSTSQDTNFVVPVTASNQRHDSFHLPKGLTTSSGLSKLCKKIIFMDQKGRSSILDLSYSISDDRFTVRRGWKAFCCRNEHKTGCFLRLILVQNGKTPVLRIFPLERYENSIAKNSKKIKQEVEYESAKEEKNLESLSLSDNSSFVVSVTVSNLSEDILHLPIRLSRSNLLDKKIHEIVLMNKEGRTWILSLKYSKYSGRFRITRGWKSFCEANGQKPGCTFLLKLF

SEQ ID NO: 86399 - protein, 516 aa, Arabidopsis thaliana
  peptide (1)..(516): Ceres Seq. ID no. 12690199
  misc_feature (9)..(101): Pfam Name: B3 DNA binding domain Pfam Description: B3 DNA binding domain
  misc_feature (1)..(263): Homolog of NCBI NO: 15242700 NR Description: meristem protein - like; protein id: At5g32460.1
  misc_feature (206)..(515): Homolog of NCBI NO: 15242700 NR Description: meristem protein - like; protein id: At5g32460.1
  misc_feature (287)..(515): Homolog of NCBI NO: 26450115 NR Description: unknown protein [Arabidopsis thaliana]
  misc_feature (6)..(235): Homolog of NCBI NO: 26450115 NR Description: unknown protein [Arabidopsis thaliana]
  misc_feature (239)..(515): Homolog of NCBI NO: 15224604 NR Description: hypothetical protein; protein id: At2g24700.1
  misc_feature (1)..(107): Homolog of NCBI NO: 15224604 NR Description: hypothetical protein; protein id: At2g24700.1
  misc_feature (158)..(515): Homolog of NCBI NO: 18411270 NR Description: hypothetical protein; protein id: At4g00260.1
  misc_feature (257)..(506): Homolog of NCBI NO: 15224604 NR Description: hypothetical protein; protein id: At2g24700.1
  misc_feature (87)..(282): Homolog of NCBI NO: 15224604 NR Description: hypothetical protein; protein id: At2g24700.1
  misc_feature (24)..(105): Homolog of NCBI NO: 18411270 NR Description: hypothetical protein; protein id: At4g00260.1
MFSSSAKPHFIKPMLPGFETYIVIPKAFYSNYLEGRQEGNAAELRSDATEITWKIKIDGRRMTKGWEEFAVAHNLQVDDILVFRHEGNLLFHVTPFGLSFCEILYSQRDEKDVKDTTGKVTRSRTVKKNGKNECSSVDTDFVVPVTASNQRVDSFYLPRGFTTSSGSSKLCNEIILIDEKDRPSTLKLRYNKSSNRFCVSRGWRAFCCRNGYRTGCFLRIILVRKGKTPVLRIFPLERDEDNIGTVSIPEKHSKKVKQEVEHEESVKEETNVESGKLKRDRLLQKDPKNLCSTSQDTNFVVPVTASNQRHDSFHLPKGLTTSSGLSKLCKKIIFMDQKGRSSILDLSYSISDDRFTVRRGWKAFCCRNEHKTGCFLRLILVQNGKTPVLRIFPLERYENSIAKNSKKIKQEVEYESAKEEKNLESLSLSDNSSFVVSVTVSNLSEDILHLPIRLSRSNLLDKKIHEIVLMNKEGRTWILSLKYSKYSGRFRITRGWKSFCEANGQKPGCTFLLKLF

SEQ ID NO: 86400 - protein, 503 aa, Arabidopsis thaliana
  peptide (1)..(503): Ceres Seq. ID no. 12690200
  misc_feature (1)..(88): Pfam Name: B3 DNA binding domain Pfam Description: B3 DNA binding domain
  misc_feature (1)..(250): Homolog of NCBI NO: 15242700 NR Description: meristem protein - like; protein id: At5g32460.1
  misc_feature (193)..(502): Homolog of NCBI NO: 15242700 NR Description: meristem protein - like; protein id: At5g32460.1
  misc_feature (274)..(502): Homolog of NCBI NO: 26450115 NR Description: unknown protein [Arabidopsis thaliana]
  misc_feature (1)..(222): Homolog of NCBI NO: 26450115 NR Description: unknown protein [Arabidopsis thaliana]
  misc_feature (226)..(502): Homolog of NCBI NO: 15224604 NR Description: hypothetical protein; protein id: At2g24700.1
  misc_feature (1)..(94): Homolog of NCBI NO: 15224604 NR Description: hypothetical protein; protein id: At2g24700.1
  misc_feature (145)..(502): Homolog of NCBI NO: 18411270 NR Description: hypothetical protein; protein id: At4g00260.1
  misc_feature (244)..(493): Homolog of NCBI NO: 15224604 NR Description: hypothetical protein; protein id: At2g24700.1
  misc_feature (74)..(269): Homolog of NCBI NO: 15224604 NR Description: hypothetical protein; protein id: At2g24700.1
  misc_feature (11)..(92): Homolog of NCBI NO: 18411270 NR Description: hypothetical protein; protein id: At4g00260.1
MLPGFETYIVIPKAFYSNYLEGRQEGNAAELRSDATEITWKIKIDGRRMTKGWEEFAVAHNLQVDDILVFRHEGNLLFHVTPFGLSFCEILYSQRDEKDVKDTTGKVTRSRTVKKNGKNECSSVDTDFVVPVTASNQRVDSFYLPRGFTTSSGSSKLCNEIILIDEKDRPSTLKLRYNKSSNRFCVSRGWRAFCCRNGYRTGCFLRIILVRKGKTPVLRIFPLERDEDNIGTVSIPEKHSKKVKQEVEHEESVKEETNVESGKLKRDRLLQKDPKNLCSTSQDTNFVVPVTASNQRHDSFHLPKGLTTSSGLSKLCKKIIFMDQKGRSSILDLSYSISDDRFTVRRGWKAFCCRNEHKTGCFLRLILVQNGKTPVLRIFPLERYENSIAKNSKKIKQEVEYESAKEEKNLESLSLSDNSSFVVSVTVSNLSEDILHLPIRLSRSNLLDKKIHEIVLMNKEGRTWILSLKYSKYSGRFRITRGWKSFCEANGQKPGCTFLLKLF

SEQ ID NO: 86401 - DNA, 336 bp, Arabidopsis thaliana
  misc_feature (1)..(336): Ceres Seq. ID no. 12690259
  misc_feature: MA Experiment ID: 20000451 Result: Up-regulated in Transcription
  misc_feature: MA Experiment 20000451 PARAMETER Experiment Name: At_CS6879_Shoots-Roots_P Parameter: Age (day) Value: 14
  misc_feature: MA Experiment 20000451 PARAMETER Experiment Name: At_CS6879_Shoots-Roots_P Parameter: Organism Value: A. thaliana
  misc_feature: MA Experiment 20000451 PARAMETER Experiment Name: At_CS6879_Shoots-Roots_P Parameter: Plant Line Value: CS6879 vs. WS
  misc_feature: MA Experiment 20000451 PARAMETER Experiment Name: At_CS6879_Shoots-Roots_P Parameter: Tissue Value: Roots
  misc_feature: MA Experiment ID: 20001558 Result: Up-regulated in Transcription
  misc_feature: MA Experiment 20001558 PARAMETER Experiment Name: At_Drought_Soil_Dry_P Parameter: Age (day) Value: 27
  misc_feature: MA Experiment 20001558 PARAMETER Experiment Name: At_Drought_Soil_Dry_P Parameter: Organism Value: A. thaliana
  misc_feature: MA Experiment 20001558 PARAMETER Experiment Name: At_Drought_Soil_Dry_P Parameter: Plant Line Value: WS
  misc_feature: MA Experiment 20001558 PARAMETER Experiment Name: At_Drought_Soil_Dry_P Parameter: Post Timepoint (hr) Value: 6
  misc_feature: MA Experiment 20001558 PARAMETER Experiment Name: At_Drought_Soil_Dry_P Parameter: Post-Treatment Value: Re-Water vs. No Drought
  misc_feature: MA Experiment 20001558 PARAMETER Experiment Name: At_Drought_Soil_Dry_P Parameter: Timepoint (day) Value: 13
  misc_feature: MA Experiment 20001558 PARAMETER Experiment Name: At_Drought_Soil_Dry_P Parameter: Treatment Value: Drought vs. No Drought
  misc_feature: MA Experiment ID: 20001560 Result: Up-regulated in Transcription
  misc_feature: MA Experiment 20001560 PARAMETER Experiment Name: At_Drought_Soil_Dry_P Parameter: Age (day) Value: 28
  misc_feature: MA Experiment 20001560 PARAMETER Experiment Name: At_Drought_Soil_Dry_P Parameter: Organism Value: A. thaliana
  misc_feature: MA Experiment 20001560 PARAMETER Experiment Name: At_Drought_Soil_Dry_P Parameter: Plant Line Value: WS
  misc_feature: MA Experiment 20001560 PARAMETER Experiment Name: At_Drought_Soil_Dry_P Parameter: Post Timepoint (hr) Value: None
  misc_feature: MA Experiment 20001560 PARAMETER Experiment Name: At_Drought_Soil_Dry_P Parameter: Post-Treatment Value: None
  misc_feature: MA Experiment 20001560 PARAMETER Experiment Name: At_Drought_Soil_Dry_P Parameter: Timepoint (day) Value: 14
  misc_feature: MA Experiment 20001560 PARAMETER Experiment Name: At_Drought_Soil_Dry_P Parameter: Treatment Value: Drought vs. No Drought
  misc_feature: MA Experiment ID: 20001757 Result: Up-regulated in Transcription
  misc_feature: MA Experiment 20001757 PARAMETER Experiment Name: At_50mM_NH4NO3_L-to-H_P Parameter: Timepoint (hr) Value: 6
  misc_feature: MA Experiment 20001757 PARAMETER Experiment Name: At_50mM_NH4NO3_L-to-H_P Parameter: Tissue Value: Leaf
  misc_feature: MA Experiment 20001757 PARAMETER Experiment Name: At_50mM_NH4NO3_L-to-H_P Parameter: Treatment Value: 50mM NH4NO3 vs 100mM Mannitol
atgaaggttgccgctgctttcctcctcgccgttttgggcggaaacgctaatccttctgctgataatatcaaagatatcatcggagctgttggtgctgatgttgatggagagagcattgagcttctattgaaagaagtgagtggtaaagacattgctgagctgattgcttctggtagggagaagttagcgtctgtgccatctggtggtggtgtggctgtttcagctgctccatcaagcggtggtggtggtgctgctgcccctgcggagaagaaagaagccaagaaggaagagaaagaagagtctgatgatgacatgggattcagtctcttcgagtaa

SEQ ID NO: 86402 - protein, 111 aa, Arabidopsis thaliana
  peptide (1)..(111): Ceres Seq. ID no. 12690260
  misc_feature (17)..(110): Pfam Name: 60s Acidic ribosomal protein Pfam Description: 60s Acidic ribosomal protein
  misc_feature (1)..(111): Homolog of NCBI NO: 15230454 NR Description: acidic ribosomal protein P2 -like; protein id:
  misc_feature (1)..(111): Homolog of NCBI NO: 15226231 NR Description: 60S acidic ribosomal protein P2; protein id: supported by cDNA: 19986., supported by cDNA: gi_15294207, by cDNA: gi_20147254 [Arabidopsis thaliana]
  misc_feature (1)..(111): Homolog of NCBI NO: 21593095 NR Description: 60S acidic ribosomal protein P2 [Arabidopsis
  misc_feature (1)..(111): Homolog of NCBI NO: 24473796 NR Description: 60s acidic ribosomal protein [Prunus dulcis]
  misc_feature (1)..(111): Homolog of NCBI NO: 15226230 NR Description: 60S acidic ribosomal protein P2; protein id: supported by cDNA: 36076., supported by cDNA: gi_16226550, by cDNA: gi_17065555 [Arabidopsis thaliana]
  misc_feature (1)..(111): Homolog of NCBI NO: 730583 NR Description: 60S acidic ribosomal protein P2
  misc_feature (1)..(111): Homolog of NCBI NO: 1173073 NR Description: 60S ACIDIC RIBOSOMAL PROTEIN P2A (P2)
  misc_feature (1)..(111): Homolog of NCBI NO: 899610 NR Description: acidic ribosomal protein P2
  misc_feature (1)..(111): Homolog of NCBI NO: 6225913 NR Description: 60S ACIDIC RIBOSOMAL PROTEIN P2B
  misc_feature (1)..(111): Homolog of NCBI NO: 4204372 NR Description: acidic ribosomal protein P2a-2 [Zea mays]
MKVAAAFLLAVLGGNANPSADNIKDIIGAVGADVDGESIELLLKEVSGKDIAELIASGREKLASVPSGGGVAVSAAPSSGGGGAAAPAEKKEAKKEEKEESDDDMGFSLFE

SEQ ID NO: 86403 - DNA, 2781 bp, Arabidopsis thaliana
  misc_feature (1)..(2781): Ceres Seq. ID no. 12690352
  misc_feature: MA Experiment ID: 108462 Result: Up-regulated in Transcription
  misc_feature: MA Experiment 108462 PARAMETER Experiment Name: At_Germinating_Seeds_cDNA_P Parameter: Age (day) Value: 2 vs. 0
  misc_feature: MA Experiment 108462 PARAMETER Experiment Name: At_Germinating_Seeds_cDNA_P Parameter: Tissue Value: Germinating Seeds
  misc_feature: MA Experiment ID: 108463 Result: Up-regulated in Transcription
  misc_feature: MA Experiment 108463 PARAMETER Experiment Name: At_Germinating_Seeds_cDNA_P Parameter: Age (day) Value: 3 vs. 0
  misc_feature: MA Experiment 108463 PARAMETER Experiment Name: At_Germinating_Seeds_cDNA_P Parameter: Tissue Value: Germinating Seeds
  misc_feature: MA Experiment ID: 108464 Result: Up-regulated in Transcription
  misc_feature: MA Experiment 108464 PARAMETER Experiment Name: At_Germinating_Seeds_cDNA_P Parameter: Age (day) Value: 4 vs. 0
  misc_feature: MA Experiment 108464 PARAMETER Experiment Name: At_Germinating_Seeds_cDNA_P Parameter: Tissue Value: Germinating Seeds
  misc_feature: MA Experiment ID: 108561 Result: Up-regulated in Transcription
  misc_feature: MA Experiment 108561 PARAMETER Experiment Name: At_100uM_ABA_cDNA_P Parameter: Timepoint (hr) Value: 6
  misc_feature: MA Experiment 108561 PARAMETER Experiment Name: At_100uM_ABA_cDNA_P Parameter: Tissue Value: Aerial
  misc_feature: MA Experiment 108561 PARAMETER Experiment Name: At_100uM_ABA_cDNA_P Parameter: Treatment Value: 100uM ABA vs. No Treatment
  misc_feature: MA Experiment ID: 108572 Result: Up-regulated in Transcription
  misc_feature: MA Experiment 108572 PARAMETER Experiment Name: At_Drought_cDNA_P Parameter: Timepoint (hr) Value: 1
  misc_feature: MA Experiment 108572 PARAMETER Experiment Name: At_Drought_cDNA_P Parameter: Tissue Value: Aerial
  misc_feature: MA Experiment 108572 PARAMETER Experiment Name: At_Drought_cDNA_P Parameter: Treatment Value: Drought vs. No Drought
  misc_feature: MA Experiment ID: 108573 Result: Up-regulated in Transcription
  misc_feature: MA Experiment 108573 PARAMETER Experiment Name: At_Drought_cDNA_P Parameter: Timepoint (hr) Value: 6
  misc_feature: MA Experiment 108573 PARAMETER Experiment Name: At_Drought_cDNA_P Parameter: Tissue Value: Aerial
  misc_feature: MA Experiment 108573 PARAMETER Experiment Name: At_Drought_cDNA_P Parameter: Treatment Value: Drought vs. No Drought
  misc_feature: MA Experiment ID: 108595 Result: Down-regulated in Transcription
  misc_feature: MA Experiment 108595 PARAMETER Experiment Name: At_Ler-pi_Ovule_cDNA_P Parameter: Plant Line Value: null
  misc_feature: MA Experiment ID: 108605 Result: Up-regulated in Transcription
  misc_feature: MA Experiment 108605 PARAMETER Experiment Name: At_100uM_ABA_cDNA_P Parameter: Timepoint (hr) Value: 6
  misc_feature: MA Experiment 108605 PARAMETER Experiment Name: At_100uM_ABA_cDNA_P Parameter: Tissue Value: Aerial
  misc_feature: MA Experiment 108605 PARAMETER Experiment Name: At_100uM_ABA_cDNA_P Parameter: Treatment Value: 100uM ABA vs. No Treatment
  misc_feature: MA Experiment ID: 108607 Result: Up-regulated in Transcription
  misc_feature: MA Experiment 108607 PARAMETER Experiment Name: At_100uM_ABA_cDNA_P Parameter: Timepoint (hr) Value: 4
  misc_feature: MA Experiment 108607 PARAMETER Experiment Name: At_100uM_ABA_cDNA_P Parameter: Tissue Value: Aerial
  misc_feature: MA Experiment 108607 PARAMETER Experiment Name: At_100uM_ABA_cDNA_P Parameter: Treatment Value: 100uM ABA vs. No Treatment
  misc_feature: MA Experiment ID: 108609 Result: Up-regulated in Transcription
  misc_feature: MA Experiment 108609 PARAMETER Experiment Name: At_100uM_ABA_cDNA_P Parameter: Timepoint (hr) Value: 24
  misc_feature: MA Experiment 108609 PARAMETER Experiment Name: At_100uM_ABA_cDNA_P Parameter: Tissue Value: Aerial
  misc_feature: MA Experiment 108609 PARAMETER Experiment Name: At_100uM_ABA_cDNA_P Parameter: Treatment Value: 100uM ABA vs. No Treatment
  misc_feature: MA Experiment ID: 20000069 Result: Up-regulated in Transcription
  misc_feature: MA Experiment 20000069 PARAMETER Experiment Name: At_100uM_ABA_Mutants_cDNA_P Parameter: Plant Line Value: CS23
  misc_feature: MA Experiment 20000069 PARAMETER Experiment Name: At_100uM_ABA_Mutants_cDNA_P Parameter: Timepoint (hr) Value: 6
  misc_feature: MA Experiment 20000069 PARAMETER Experiment Name: At_100uM_ABA_Mutants_cDNA_P Parameter: Tissue Value: Aerial
  misc_feature: MA Experiment 20000069 PARAMETER Experiment Name: At_100uM_ABA_Mutants_cDNA_P Parameter: Treatment Value: 100uM ABA vs. No Treatment
  misc_feature: MA Experiment ID: 20000070 Result: Up-regulated in Transcription
  misc_feature: MA Experiment 20000070 PARAMETER Experiment Name: At_100uM_ABA_Mutants_cDNA_P Parameter: Plant Line Value: CS24
  misc_feature: MA Experiment 20000070 PARAMETER Experiment Name: At_100uM_ABA_Mutants_cDNA_P Parameter: Timepoint (hr) Value: 6
  misc_feature: MA Experiment 20000070 PARAMETER Experiment Name: At_100uM_ABA_Mutants_cDNA_P Parameter: Tissue Value: Aerial
  misc_feature: MA Experiment 20000070 PARAMETER Experiment Name: At_100uM_ABA_Mutants_cDNA_P Parameter: Treatment Value: 100uM ABA vs. No Treatment
  misc_feature: MA Experiment ID: 20000071 Result: Up-regulated in Transcription
  misc_feature: MA Experiment 20000071 PARAMETER Experiment Name: At_100uM_ABA_Mutants_cDNA_P Parameter: Plant Line Value: CS8104
  misc_feature: MA Experiment 20000071 PARAMETER Experiment Name: At_100uM_ABA_Mutants_cDNA_P Parameter: Timepoint (hr) Value: 6
  misc_feature: MA Experiment 20000071 PARAMETER Experiment Name: At_100uM_ABA_Mutants_cDNA_P Parameter: Tissue Value: Aerial
  misc_feature: MA Experiment 20000071 PARAMETER Experiment Name: At_100uM_ABA_Mutants_cDNA_P Parameter: Treatment Value: 100uM ABA vs. No Treatment
  misc_feature: MA Experiment ID: 20000072 Result: Up-regulated in Transcription
  misc_feature: MA Experiment 20000072 PARAMETER Experiment Name: At_100uM_ABA_Mutants_cDNA_P Parameter: Plant Line Value: CS8105
  misc_feature: MA Experiment 20000072 PARAMETER Experiment Name: At_100uM_ABA_Mutants_cDNA_P Parameter: Timepoint (hr) Value: 6
  misc_feature: MA Experiment 20000072 PARAMETER Experiment Name: At_100uM_ABA_Mutants_cDNA_P Parameter: Tissue Value: Aerial
  misc_feature: MA Experiment 20000072 PARAMETER Experiment Name: At_100uM_ABA_Mutants_cDNA_P Parameter: Treatment Value: 100uM ABA vs. No Treatment
  misc_feature: MA Experiment ID: 20000086 Result: Up-regulated in Transcription
  misc_feature: MA Experiment 20000086 PARAMETER Experiment Name: At_100uM_ABA_Mutants_cDNA_P Parameter: Plant Line Value: CS22
  misc_feature: MA Experiment 20000086 PARAMETER Experiment Name: At_100uM_ABA_Mutants_cDNA_P Parameter: Timepoint (hr) Value: 6
  misc_feature: MA Experiment 20000086 PARAMETER Experiment Name: At_100uM_ABA_Mutants_cDNA_P Parameter: Tissue Value: Aerial
  misc_feature: MA Experiment 20000086 PARAMETER Experiment Name: At_100uM_ABA_Mutants_cDNA_P Parameter: Treatment Value: 100uM ABA vs. No Treatment
  misc_feature: MA Experiment ID: 20000087 Result: Up-regulated in Transcription
  misc_feature: MA Experiment 20000087 PARAMETER Experiment Name: At_100uM_ABA_Mutants_cDNA_P Parameter: Plant Line Value: WS
  misc_feature: MA Experiment 20000087 PARAMETER Experiment Name: At_100uM_ABA_Mutants_cDNA_P Parameter: Timepoint (hr) Value: 6
  misc_feature: MA Experiment 20000087 PARAMETER Experiment Name: At_100uM_ABA_Mutants_cDNA_P Parameter: Tissue Value: Aerial
  misc_feature: MA Experiment 20000087 PARAMETER Experiment Name: At_100uM_ABA_Mutants_cDNA_P Parameter: Treatment Value: 100uM ABA vs. No Treatment
  misc_feature: MA Experiment ID: 20000088 Result: Up-regulated in Transcription
  misc_feature: MA Experiment 20000088 PARAMETER Experiment Name: At_100uM_ABA_Mutants_cDNA_P Parameter: Plant Line Value: Landsberg
  misc_feature: MA Experiment 20000088 PARAMETER Experiment Name: At_100uM_ABA_Mutants_cDNA_P Parameter: Timepoint (hr) Value: 6
  misc_feature: MA Experiment 20000088 PARAMETER Experiment Name: At_100uM_ABA_Mutants_cDNA_P Parameter: Tissue Value: Aerial
  misc_feature: MA Experiment 20000088 PARAMETER Experiment Name: At_100uM_ABA_Mutants_cDNA_P Parameter: Treatment Value: 100uM ABA vs. No Treatment
  misc_feature: MA Experiment ID: 20000113 Result: Down-regulated in Transcription
  misc_feature: MA Experiment 20000113 PARAMETER Experiment Name: At_42deg_Heat_cDNA_P Parameter: Temperature (deg C) Value: 42 vs. 22
  misc_feature: MA Experiment 20000113 PARAMETER Experiment Name: At_42deg_Heat_cDNA_P Parameter: Timepoint (hr) Value: 8
  misc_feature: MA Experiment 20000113 PARAMETER Experiment Name: At_42deg_Heat_cDNA_P Parameter: Tissue Value: Aerial
  misc_feature: MA Experiment ID: 20000117 Result: Up-regulated in Transcription
  misc_feature: MA Experiment 20000117 PARAMETER Experiment Name: At_100uM_ABA_Mutants_cDNA_P Parameter: Plant Line Value: Columbia
  misc_feature: MA Experiment 20000117 PARAMETER Experiment Name: At_100uM_ABA_Mutants_cDNA_P Parameter: Timepoint (hr) Value: 6
  misc_feature: MA Experiment 20000117 PARAMETER Experiment Name: At_100uM_ABA_Mutants_cDNA_P Parameter: Tissue Value: Aerial
  misc_feature: MA Experiment 20000117 PARAMETER Experiment Name: At_100uM_ABA_Mutants_cDNA_P Parameter: Treatment Value: 100uM ABA vs. No Treatment
  misc_feature: MA Experiment ID: 20000169 Result: Up-regulated in Transcription
  misc_feature: MA Experiment 20000169 PARAMETER Experiment Name: At_100uM_ABA_P Parameter: Age (day) Value: 14
  misc_feature: MA Experiment 20000169 PARAMETER Experiment Name: At_100uM_ABA_P Parameter: Organism Value: A. thaliana
  misc_feature: MA Experiment 20000169 PARAMETER Experiment Name: At_100uM_ABA_P Parameter: Plant Line Value: WS
  misc_feature: MA Experiment 20000169 PARAMETER Experiment Name: At_100uM_ABA_P Parameter: Timepoint (hr) Value: 6
  misc_feature: MA Experiment 20000169 PARAMETER Experiment Name: At_100uM_ABA_P Parameter: Tissue Value: Aerial
  misc_feature: MA Experiment 20000169 PARAMETER Experiment Name: At_100uM_ABA_P Parameter: Treatment Value: 100uM ABA vs. No Treatment
  misc_feature: MA Experiment ID: 20000180 Result: Up-regulated in Transcription
  misc_feature: MA Experiment 20000180 PARAMETER Experiment Name: At_Germinating_Seeds_P Parameter: Age (hr) Value: 24 vs. 0
  misc_feature: MA Experiment 20000180 PARAMETER Experiment Name: At_Germinating_Seeds_P Parameter: Tissue Value: Germinating Seeds
  misc_feature: MA Experiment ID: 20000184 Result: Down-regulated in Transcription
  misc_feature: MA Experiment 20000184 PARAMETER Experiment Name: At_Shoots__P Parameter: Age (day) Value: 7
  misc_feature: MA Experiment 20000184 PARAMETER Experiment Name: At_Shoots__P Parameter: Tissue Value: Shoots vs. Whole Plant
  misc_feature: MA Experiment ID: 20000224 Result: Up-regulated in Transcription
  misc_feature: MA Experiment ID: 20000234 Result: Down-regulated in Transcription
  misc_feature: MA Experiment 20000234 PARAMETER Experiment Name: At_Siliques_P Parameter: Age (day) Value: 21
  misc_feature: MA Experiment 20000234 PARAMETER Experiment Name: At_Siliques_P Parameter: Organism Value: A. thaliana
  misc_feature: MA Experiment 20000234 PARAMETER Experiment Name: At_Siliques_P Parameter: Plant Line Value: WS
  misc_feature: MA Experiment 20000234 PARAMETER Experiment Name: At_Siliques_P Parameter: Tissue Value: Less Than 5mm Siliques vs. Whole Plant
  misc_feature: MA Experiment ID: 20000267 Result: Up-regulated in Transcription
  misc_feature: MA Experiment 20000267 PARAMETER Experiment Name: At_Drought_P Parameter: Age (day) Value: 7
  misc_feature: MA Experiment 20000267 PARAMETER Experiment Name: At_Drought_P Parameter: Organism Value: A. thaliana
  misc_feature: MA Experiment 20000267 PARAMETER Experiment Name: At_Drought_P Parameter: Plant Line Value: WS
  misc_feature: MA Experiment 20000267 PARAMETER Experiment Name: At_Drought_P Parameter: Timepoint (hr) Value: 6
  misc_feature: MA Experiment 20000267 PARAMETER Experiment Name: At_Drought_P Parameter: Tissue Value: Whole Plant
  misc_feature: MA Experiment 20000267 PARAMETER Experiment Name: At_Drought_P Parameter: Treatment Value: Drought vs. No Drought
  misc_feature: MA Experiment ID: 20000268 Result: Up-regulated in Transcription
  misc_feature: MA Experiment 20000268 PARAMETER Experiment Name: At_100mM_NaCl__P Parameter: Age (day) Value: 14
  misc_feature: MA Experiment 20000268 PARAMETER Experiment Name: At_100mM_NaCl__P Parameter: Organism Value: A. thaliana
  misc_feature: MA Experiment 20000268 PARAMETER Experiment Name: At_100mM_NaCl__P Parameter: Plant Line Value: WS
  misc_feature: MA Experiment 20000268 PARAMETER Experiment Name: At_100mM_NaCl__P Parameter: Timepoint (hr) Value: 6
  misc_feature: MA Experiment 20000268 PARAMETER Experiment Name: At_100mM_NaCl__P Parameter: Tissue Value: Whole Plant
  misc_feature: MA Experiment 20000268 PARAMETER Experiment Name: At_100mM_NaCl__P Parameter: Treatment Value: 100mM NaCl vs. No Treatment
  misc_feature: MA Experiment ID: 20000436 Result: Up-regulated in Transcription
  misc_feature: MA Experiment 20000436 PARAMETER Experiment Name: At_Drought_P Parameter: Age (day) Value: 7
  misc_feature: MA Experiment 20000436 PARAMETER Experiment Name: At_Drought_P Parameter: Organism Value: A. thaliana
  misc_feature: MA Experiment 20000436 PARAMETER Experiment Name: At_Drought_P Parameter: Plant Line Value: WS
  misc_feature: MA Experiment 20000436 PARAMETER Experiment Name: At_Drought_P Parameter: Timepoint (hr) Value: 12
  misc_feature: MA Experiment 20000436 PARAMETER Experiment Name: At_Drought_P Parameter: Tissue Value: Whole Plant
  misc_feature: MA Experiment 20000436 PARAMETER Experiment Name: At_Drought_P Parameter: Treatment Value: Drought vs. No Drought
  misc_feature: MA Experiment ID: 20000437 Result: Up-regulated in Transcription
  misc_feature: MA Experiment 20000437 PARAMETER Experiment Name: At_Drought_P Parameter: Age (day) Value: 8
  misc_feature: MA Experiment 20000437 PARAMETER Experiment Name: At_Drought_P Parameter: Organism Value: A. thaliana
  misc_feature: MA Experiment 20000437 PARAMETER Experiment Name: At_Drought_P Parameter: Plant Line Value: WS
  misc_feature: MA Experiment 20000437 PARAMETER Experiment Name: At_Drought_P Parameter: Timepoint (hr) Value: 24
  misc_feature: MA Experiment 20000437 PARAMETER Experiment Name: At_Drought_P Parameter: Tissue Value: Whole Plant
  misc_feature: MA Experiment 20000437 PARAMETER Experiment Name: At_Drought_P Parameter: Treatment Value: Drought vs. No Drought
  misc_feature: MA Experiment ID: 20000439 Result: Down-regulated in Transcription
  misc_feature: MA Experiment 20000439 PARAMETER Experiment Name: At_Roots__P Parameter: Age (day) Value: 14 vs. 21
  misc_feature: MA Experiment 20000439 PARAMETER Experiment Name: At_Roots__P Parameter: Organism Value: A. thaliana
  misc_feature: MA Experiment 20000439 PARAMETER Experiment Name: At_Roots__P Parameter: Tissue Value: Roots vs. Whole Plant
  misc_feature: MA Experiment ID: 20000453 Result: Up-regulated in Transcription
  misc_feature: MA Experiment 20000453 PARAMETER Experiment Name: At_100uM_ABA_P Parameter: Age (day) Value: 15
  misc_feature: MA Experiment 20000453 PARAMETER Experiment Name: At_100uM_ABA_P Parameter: Organism Value: A. thaliana
  misc_feature: MA Experiment 20000453 PARAMETER Experiment Name: At_100uM_ABA_P Parameter: Plant Line Value: WS
  misc_feature: MA Experiment 20000453 PARAMETER Experiment Name: At_100uM_ABA_P Parameter: Timepoint (hr) Value: 24
  misc_feature: MA Experiment 20000453 PARAMETER Experiment Name: At_100uM_ABA_P Parameter: Tissue Value: Aerial
  misc_feature: MA Experiment 20000453 PARAMETER Experiment Name: At_100uM_ABA_P Parameter: Treatment Value: 100uM ABA vs. No Treatment
  misc_feature: MA Experiment ID: 20000495 Result: Down-regulated in Transcription
  misc_feature: MA Experiment 20000495 PARAMETER Experiment Name: At_Guard_Cells_P Parameter: Harvest Date Value: 8/2/2002
  misc_feature: MA Experiment 20000495 PARAMETER Experiment Name: At_Guard_Cells_P Parameter: Organism Value: A. thaliana
  misc_feature: MA Experiment 20000495 PARAMETER Experiment Name: At_Guard_Cells_P Parameter: Tissue Value: Guard Cells vs. Leaves
  misc_feature: MA Experiment ID: 20001451 Result: Down-regulated in Transcription
  misc_feature: MA Experiment 20001451 PARAMETER Experiment Name: At_Far-red-induction_P Parameter: Age (day) Value: 7
  misc_feature: MA Experiment 20001451 PARAMETER Experiment Name: At_Far-red-induction_P Parameter: Light Value: Far-red vs. White
  misc_feature: MA Experiment 20001451 PARAMETER Experiment Name: At_Far-red-induction_P Parameter: Organism Value: A. thaliana
  misc_feature: MA Experiment 20001451 PARAMETER Experiment Name: At_Far-red-induction_P Parameter: Plant Line Value: Columbia
  misc_feature: MA Experiment 20001451 PARAMETER Experiment Name: At_Far-red-induction_P Parameter: Timepoint (hr) Value: 24
  misc_feature: MA Experiment 20001451 PARAMETER Experiment Name: At_Far-red-induction_P Parameter: Tissue Value: Whole Plant
  misc_feature: MA Experiment ID: 20001554 Result: Up-regulated in Transcription
  misc_feature: MA Experiment 20001554 PARAMETER Experiment Name: At_Drought_Soil_Dry_P Parameter: Age (day) Value: 21
  misc_feature: MA Experiment 20001554 PARAMETER Experiment Name: At_Drought_Soil_Dry_P Parameter: Organism Value: A. thaliana
  misc_feature: MA Experiment 20001554 PARAMETER Experiment Name: At_Drought_Soil_Dry_P Parameter: Plant Line Value: WS
  misc_feature: MA Experiment 20001554 PARAMETER Experiment Name: At_Drought_Soil_Dry_P Parameter: Post Timepoint (hr) Value: None
  misc_feature: MA Experiment 20001554 PARAMETER Experiment Name: At_Drought_Soil_Dry_P Parameter: Post-Treatment Value: None
  misc_feature: MA Experiment 20001554 PARAMETER Experiment Name: At_Drought_Soil_Dry_P Parameter: Timepoint (day) Value: 7
  misc_feature: MA Experiment 20001554 PARAMETER Experiment Name: At_Drought_Soil_Dry_P Parameter: Treatment Value: Drought vs. No Drought
  misc_feature: MA Experiment ID: 20001555 Result: Up-regulated in Transcription
  misc_feature: MA Experiment 20001555 PARAMETER Experiment Name: At_Drought_Soil_Dry_P Parameter: Age (day) Value: 24
  misc_feature: MA Experiment 20001555 PARAMETER Experiment Name: At_Drought_Soil_Dry_P Parameter: Organism Value: A. thaliana
  misc_feature: MA Experiment 20001555 PARAMETER Experiment Name: At_Drought_Soil_Dry_P Parameter: Plant Line Value: WS
  misc_feature: MA Experiment 20001555 PARAMETER Experiment Name: At_Drought_Soil_Dry_P Parameter: Post Timepoint (hr) Value: None
  misc_feature: MA Experiment 20001555 PARAMETER Experiment Name: At_Drought_Soil_Dry_P Parameter: Post-Treatment Value: None
  misc_feature: MA Experiment 20001555 PARAMETER Experiment Name: At_Drought_Soil_Dry_P Parameter: Timepoint (day) Value: 10
  misc_feature: MA Experiment 20001555 PARAMETER Experiment Name: At_Drought_Soil_Dry_P Parameter: Treatment Value: Drought vs. No Drought
  misc_feature: MA Experiment ID: 20001558 Result: Down-regulated in Transcription
  misc_feature: MA Experiment 20001558 PARAMETER Experiment Name: At_Drought_Soil_Dry_P Parameter: Age (day) Value: 27
  misc_feature: MA Experiment 20001558 PARAMETER Experiment Name: At_Drought_Soil_Dry_P Parameter: Organism Value: A. thaliana
  misc_feature: MA Experiment 20001558 PARAMETER Experiment Name: At_Drought_Soil_Dry_P Parameter: Plant Line Value: WS
  misc_feature: MA Experiment 20001558 PARAMETER Experiment Name: At_Drought_Soil_Dry_P Parameter: Post Timepoint (hr) Value: 6
  misc_feature: MA Experiment 20001558 PARAMETER Experiment Name: At_Drought_Soil_Dry_P Parameter: Post-Treatment Value: Re-Water vs. No Drought
  misc_feature: MA Experiment 20001558 PARAMETER Experiment Name: At_Drought_Soil_Dry_P Parameter: Timepoint (day) Value: 13
  misc_feature: MA Experiment 20001558 PARAMETER Experiment Name: At_Drought_Soil_Dry_P Parameter: Treatment Value: Drought vs. No Drought
  misc_feature: MA Experiment ID: 20001559 Result: Up-regulated in Transcription
  misc_feature: MA Experiment 20001559 PARAMETER Experiment Name: At_Drought_Soil_Dry_P Parameter: Age (day) Value: 28
  misc_feature: MA Experiment 20001559 PARAMETER Experiment Name: At_Drought_Soil_Dry_P Parameter: Organism Value: A. thaliana
  misc_feature: MA Experiment 20001559 PARAMETER Experiment Name: At_Drought_Soil_Dry_P Parameter: Plant Line Value: WS
  misc_feature: MA Experiment 20001559 PARAMETER Experiment Name: At_Drought_Soil_Dry_P Parameter: Post Timepoint (hr) Value: 29
  misc_feature: MA Experiment 20001559 PARAMETER Experiment Name: At_Drought_Soil_Dry_P Parameter: Post-Treatment Value: Re-Water vs. No Drought
  misc_feature: MA Experiment 20001559 PARAMETER Experiment Name: At_Drought_Soil_Dry_P Parameter: Timepoint (day) Value: 14
  misc_feature: MA Experiment 20001559 PARAMETER Experiment Name: At_Drought_Soil_Dry_P Parameter: Treatment Value: Drought vs. No Drought
  misc_feature: MA Experiment ID: 20001904 Result: Up-regulated in Transcription
  misc_feature: MA Experiment 20001904 PARAMETER Experiment Name: At_Drought_Reproduction_P Parameter: Age (day) Value: 37
  misc_feature: MA Experiment 20001904 PARAMETER Experiment Name: At_Drought_Reproduction_P Parameter: Organism Value: A. thaliana
  misc_feature: MA Experiment 20001904 PARAMETER Experiment Name: At_Drought_Reproduction_P Parameter: Plant Line Value: WS
  misc_feature: MA Experiment 20001904 PARAMETER Experiment Name: At_Drought_Reproduction_P Parameter: Timepoint (day) Value: 7
  misc_feature: MA Experiment 20001904 PARAMETER Experiment Name: At_Drought_Reproduction_P Parameter: Tissue Value: Rosettes
  misc_feature: MA Experiment 20001904 PARAMETER Experiment Name: At_Drought_Reproduction_P Parameter: Treatment Value: Drought vs. No Drought
  misc_feature: MA Experiment ID: 20001905 Result: Up-regulated in Transcription
  misc_feature: MA Experiment 20001905 PARAMETER Experiment Name: At_Drought_Reproduction_P Parameter: Age (day) Value: 40
  misc_feature: MA Experiment 20001905 PARAMETER Experiment Name: At_Drought_Reproduction_P Parameter: Organism Value: A. thaliana
  misc_feature: MA Experiment 20001905 PARAMETER Experiment Name: At_Drought_Reproduction_P Parameter: Plant Line Value: WS
  misc_feature: MA Experiment 20001905 PARAMETER Experiment Name: At_Drought_Reproduction_P Parameter: Timepoint (day) Value: 10
  misc_feature: MA Experiment 20001905 PARAMETER Experiment Name: At_Drought_Reproduction_P Parameter: Tissue Value: Rosettes
  misc_feature: MA Experiment 20001905 PARAMETER Experiment Name: At_Drought_Reproduction_P Parameter: Treatment Value: Drought vs. No Drought
atgtcgacttcattcacaatgatcggtggtgaaggtcccaacagttaccgagaccattcgaaataccagggagcattggttgaagctgcaaaggaaaagatcaatgaagccatctctacgaaactcgatatcgactttacttcaaatcttgttaacatagcagattttggttgctcttctggaccaaacactttcacagcggtgcaaaccttaatcgatgctgtggaaaacaagtataagaaagaaagtaatatcgagttccaagttttcttcaatgattcttcgaacaatgatttcaacactcttttcaaaacacttcctccggctagactgtatttcgcaagtggagtaccgggttctttctttggtcgtgttcttcctagaaatagtctccatttgggagtttctgcttactcactccatttcatatccaagattcccaaagaagttaaagatcgtgattctcctgtgtggaacaaggacatacattgctctggatcttcaaaagaggtagcaaaattgtatcttggtcaatacaagatcgatgtggggagtttcttgaacgcgagagcgcaagagcttgtgtccggtggattgctattgcttcttggttcatgtcgtccaaatggagttcaaatgtttgaaacggttgaaggcatgatgattgattttattggagcttctcttaatgaaattgctaaccagggtctaatagatcaacaaaagcttgacacttttaagttgcctatctatgctccacaagcggatgaattgaagcaaatcatcgaggataacgggtgtttcacgattgaggtattcgaaaatattatacacgccaagggagagtatccgttagaccccgagtttttaacagtctcctttaaggtcacggttggaggatcagtagcttcactatttgggcaagatggtatggagaaaacctttgagcttgtgaaagagaagacacaagaaatgcttcctcagatagccaaagccaaacccggaatgcaatacctcattgtgcttcgaagaaactgttttcatgatctatttagatctttgaaacgagacttaaataatgtaattgcaatgatgtgtgtttgtgtgtgtatgtgttgtattcttgaaataagattcatcagaagagtaaataaacatcaaaatccaacaaaccaaactagaaaaatgtcagtagttttactctcttctacttctgcaacaatcaccaaatcccaatccaaaaagattccctttttatctcccaccacaaaattcccattaaaggtctcaatttctccatcaagatcgaaacttttccacaaccctttacgcgtggcggcgccgccgtctgtacccacttcggattcgacggaggagaagcggatcgaagaagaatacggcggagataaggaagaagaagggtctgagtttaagtggagagatcattggtatccagtttctttggttgaggatttggatccgaatgtgccaaccccgttccagctcttgggtcgagaccttgtactctggtttgatcggaatgatcagaaatgggcagcctttgatgatctctgccctcaccggctcgctcctttatctgaaggaaggttggatgagaatggacacttgcaatgttcgtatcatggatggtcatttggtgggtgtggatcttgcactaggattcctcaggctgctacttcaggtcctgaagctcgtgctgttaaatccccgagagcttgtgctattaagttcccgacaatggtgtctcaaggtcttctctttgtgtggcctgatgaaaatggttgggatagagccaattcaattgaaccccctaggttgccggatgatttcgataaaccggaattttcgacggtgacaattcaaagggatcttttctatggatatgatactctcatggaaaatgtatctgatccttcccatatagattttgctcatcacaaggttacaggaagaagagacagagccaaaccattgccgttcaaggtggagtcaagtgggccttggggtttccaaggtgcgaatgatgacagtccaaggataaccgcaaaatttgttgctccgtgctattctatgaacaaaattgagttagatgcgaaactaccaatcgtcggtaatcaaaaatgggtcatttggatttgctcattcaatataccaatggctccaggaaagacccgttccatcgtttgcagcgcccgtaacttctttcagttctctgtaccaggaccagcttggtggcaggttgtaccaagatggtatgaacactggacttcgaacttagtctatgacggagacatgatcgtacttcaaggacaagagaaagtattcctcgctaaatcaatggagtcaccagactacgacgtgaacaaacagtacacaaagctcacattcactccaacccaggcagaccgttttgttctagcattcagaaactggctcagacggcatggtaagagtcagcctgaatggttcggctccaccccgtctaaccaacctctcccttccactgtcttaaccaagcgtcagatgctagatagatttgatcagcatacacaagtatgctcttcctgcaaaggagcttacaacagtttccaaatcctcaagaagtttctcgttggcgcgacggttttctgggccgccacggctggtgttccttctgatgttcagattcgactggttcttgctggtttatcactgatatcagctgcttctgcatatgctttacatgaacaagagaagaactttagattatgtacattctga

SEQ ID NO: 86404 - protein, 926 aa, Arabidopsis thaliana
  peptide (1)..(926): Ceres Seq. ID no. 12690353
  misc_feature (34)..(345): Pfam Name: SAM dependent carboxyl methyltransferase Pfam Description: SAM dependent carboxyl methyltransferase
  misc_feature (396)..(921): Homolog of NCBI NO: 15230543 NR Description: lethal leaf-spot 1 homolog Lls1; protein id: supported by cDNA: gi_20260385 [Arabidopsis thaliana]
  misc_feature (424)..(921): Homolog of NCBI NO: 1935914 NR Description: lethal leaf-spot 1 homolog [Arabidopsis thaliana]
  misc_feature (397)..(921): Homolog of NCBI NO: 16973465 NR Description: lethal leaf spot 1-like protein [Lycopersicon
  misc_feature (397)..(926): Homolog of NCBI NO: 30088964 NR Description: lethal leaf spot 1-like protein [Vigna
  misc_feature (1)..(375): Homolog of NCBI NO: 15230542 NR Description: methyltransferase-related; protein id: At3g44870.1
  misc_feature (416)..(921): Homolog of NCBI NO: 7489721 NR Description: cell death suppressor protein lls1 - maize
  misc_feature (472)..(921): Homolog of NCBI NO: 1935909 NR Description: lethal leaf-spot 1 [Zea mays]
  misc_feature (443)..(921): Homolog of NCBI NO: 15451611 NR Description: Putative cell death suppressor protein [Oryza
  misc_feature (416)..(916): Homolog of NCBI NO: 1935912 NR Description: lethal leaf-spot 1 [Zea mays]
  misc_feature (1)..(345): Homolog of NCBI NO: 15230529 NR Description: methyltransferase-related; protein id: supported by cDNA: gi_15293070 [Arabidopsis thaliana]
MSTSFTMIGGEGPNSYRDHSKYQGALVEAAKEKINEAISTKLDIDFTSNLVNIADFGCSSGPNTFTAVQTLIDAVENKYKKESNIEFQVFFNDSSNNDFNTLFKTLPPARLYFASGVPGSFFGRVLPRNSLHLGVSAYSLHFISKIPKEVKDRDSPVWNKDIHCSGSSKEVAKLYLGQYKIDVGSFLNARAQELVSGGLLLLLGSCRPNGVQMFETVEGMMIDFIGASLNEIANQGLIDQQKLDTFKLPIYAPQADELKQIIEDNGCFTIEVFENIIHAKGEYPLDPEFLTVSFKVTVGGSVASLFGQDGMEKTFELVKEKTQEMLPQIAKAKPGMQYLIVLRRNCFHDLFRSLKRDLNNVIAMMCVCVCMCCILEIRFIRRVNKHQNPTNQTRKMSVVLLSSTSATITKSQSKKIPFLSPTTKFPLKVSISPSRSKLFHNPLRVAAPPSVPTSDSTEEKRIEEEYGGDKEEEGSEFKWRDHWYPVSLVEDLDPNVPTPFQLLGRDLVLWFDRNDQKWAAFDDLCPHRLAPLSEGRLDENGHLQCSYHGWSFGGCGSCTRIPQAATSGPEARAVKSPRACAIKFPTMVSQGLLFVWPDENGWDRANSIEPPRLPDDFDKPEFSTVTIQRDLFYGYDTLMENVSDPSHIDFAHHKVTGRRDRAKPLPFKVESSGPWGFQGANDDSPRITAKFVAPCYSMNKIELDAKLPIVGNQKWVIWICSFNIPMAPGKTRSIVCSARNFFQFSVPGPAWWQVVPRWYEHWTSNLVYDGDMIVLQGQEKVFLAKSMESPDYDVNKQYTKLTFTPTQADRFVLAFRNWLRRHGKSQPEWFGSTPSNQPLPSTVLTKRQMLDRFDQHTQVCSSCKGAYNSFQILKKFLVGATVFWAATAGVPSDVQIRLVLAGLSLISAASAYALHEQEKNFRLCTF

SEQ ID NO: 86405 - protein, 920 aa, Arabidopsis thaliana
  peptide (1)..(920): Ceres Seq. ID no. 12690354
  misc_feature (28)..(339): Pfam Name: SAM dependent carboxyl methyltransferase Pfam Description: SAM dependent carboxyl methyltransferase
  misc_feature (390)..(915): Homolog of NCBI NO: 15230543 NR Description: lethal leaf-spot 1 homolog Lls1; protein id: supported by cDNA: gi_20260385 [Arabidopsis thaliana]
  misc_feature (418)..(915): Homolog of NCBI NO: 1935914 NR Description: lethal leaf-spot 1 homolog [Arabidopsis thaliana]
  misc_feature (391)..(915): Homolog of NCBI NO: 16973465 NR Description: lethal leaf spot 1-like protein [Lycopersicon
  misc_feature (391)..(920): Homolog of NCBI NO: 30088964 NR Description: lethal leaf spot 1-like protein [Vigna
  misc_feature (1)..(369): Homolog of NCBI NO: 15230542 NR Description: methyltransferase-related; protein id: At3g44870.1
  misc_feature (410)..(915): Homolog of NCBI NO: 7489721 NR Description: cell death suppressor protein lls1 - maize
  misc_feature (466)..(915): Homolog of NCBI NO: 1935909 NR Description: lethal leaf-spot 1 [Zea mays]
  misc_feature (437)..(915): Homolog of NCBI NO: 15451611 NR Description: Putative cell death suppressor protein [Oryza
  misc_feature (410)..(910): Homolog of NCBI NO: 1935912 NR Description: lethal leaf-spot 1 [Zea mays]
  misc_feature (1)..(339): Homolog of NCBI NO: 15230529 NR Description: methyltransferase-related; protein id: supported by cDNA: gi_15293070 [Arabidopsis thaliana]
MIGGEGPNSYRDHSKYQGALVEAAKEKINEAISTKLDIDFTSNLVNIADFGCSSGPNTFTAVQTLIDAVENKYKKESNIEFQVFFNDSSNNDFNTLFKTLPPARLYFASGVPGSFFGRVLPRNSLHLGVSAYSLHFISKIPKEVKDRDSPVWNKDIHCSGSSKEVAKLYLGQYKIDVGSFLNARAQELVSGGLLLLLGSCRPNGVQMFETVEGMMIDFIGASLNEIANQGLIDQQKLDTFKLPIYAPQADELKQIIEDNGCFTIEVFENIIHAKGEYPLDPEFLTVSFKVTVGGSVASLFGQDGMEKTFELVKEKTQEMLPQIAKAKPGMQYLIVLRRNCFHDLFRSLKRDLNNVIAMMCVCVCMCCILEIRFIRRVNKHQNPTNQTRKMSVVLLSSTSATITKSQSKKIPFLSPTTKFPLKVSISPSRSKLFHNPLRVAAPPSVPTSDSTEEKRIEEEYGGDKEEEGSEFKWRDHWYPVSLVEDLDPNVPTPFQLLGRDLVLWFDRNDQKWAAFDDLCPHRLAPLSEGRLDENGHLQCSYHGWSFGGCGSCTRIPQAATSGPEARAVKSPRACAIKFPTMVSQGLLFVWPDENGWDRANSIEPPRLPDDFDKPEFSTVTIQRDLFYGYDTLMENVSDPSHIDFAHHKVTGRRDRAKPLPFKVESSGPWGFQGANDDSPRITAKFVAPCYSMNKIELDAKLPIVGNQKWVIWICSFNIPMAPGKTRSIVCSARNFFQFSVPGPAWWQVVPRWYEHWTSNLVYDGDMIVLQGQEKVFLAKSMESPDYDVNKQYTKLTFTPTQADRFVLAFRNWLRRHGKSQPEWFGSTPSNQPLPSTVLTKRQMLDRFDQHTQVCSSCKGAYNSFQILKKFLVGATVFWAATAGVPSDVQIRLVLAGLSLISAASAYALHEQEKNFRLCTF

SEQ ID NO: 86406 - protein, 714 aa, Arabidopsis thaliana
  peptide (1)..(714): Ceres Seq. ID no. 12690355
  misc_feature (1)..(133): Pfam Name: SAM dependent carboxyl methyltransferase Pfam Description: SAM dependent carboxyl methyltransferase
  misc_feature (184)..(709): Homolog of NCBI NO: 15230543 NR Description: lethal leaf-spot 1 homolog Lls1; protein id: supported by cDNA: gi_20260385 [Arabidopsis thaliana]
  misc_feature (212)..(709): Homolog of NCBI NO: 1935914 NR Description: lethal leaf-spot 1 homolog [Arabidopsis thaliana]
  misc_feature (185)..(709): Homolog of NCBI NO: 16973465 NR Description: lethal leaf spot 1-like protein [Lycopersicon
  misc_feature (185)..(714): Homolog of NCBI NO: 30088964 NR Description: lethal leaf spot 1-like protein [Vigna
  misc_feature (1)..(163): Homolog of NCBI NO: 15230542 NR Description: methyltransferase-related; protein id: At3g44870.1
  misc_feature (204)..(709): Homolog of NCBI NO: 7489721 NR Description: cell death suppressor protein lls1 - maize
  misc_feature (260)..(709): Homolog of NCBI NO: 1935909 NR Description: lethal leaf-spot 1 [Zea mays]
  misc_feature (231)..(709): Homolog of NCBI NO: 15451611 NR Description: Putative cell death suppressor protein [Oryza
  misc_feature (204)..(704): Homolog of NCBI NO: 1935912 NR Description: lethal leaf-spot 1 [Zea mays]
  misc_feature (1)..(133): Homolog of NCBI NO: 15230529 NR Description: methyltransferase-related; protein id: supported by cDNA: gi_15293070 [Arabidopsis thaliana]
MFETVEGMMIDFIGASLNEIANQGLIDQQKLDTFKLPIYAPQADELKQIIEDNGCFTIEVFENIIHAKGEYPLDPEFLTVSFKVTVGGSVASLFGQDGMEKTFELVKEKTQEMLPQIAKAKPGMQYLIVLRRNCFHDLFRSLKRDLNNVIAMMCVCVCMCCILEIRFIRRVNKHQNPTNQTRKMSVVLLSSTSATITKSQSKKIPFLSPTTKFPLKVSISPSRSKLFHNPLRVAAPPSVPTSDSTEEKRIEEEYGGDKEEEGSEFKWRDHWYPVSLVEDLDPNVPTPFQLLGRDLVLWFDRNDQKWAAFDDLCPHRLAPLSEGRLDENGHLQCSYHGWSFGGCGSCTRIPQAATSGPEARAVKSPRACAIKFPTMVSQGLLFVWPDENGWDRANSIEPPRLPDDFDKPEFSTVTIQRDLFYGYDTLMENVSDPSHIDFAHHKVTGRRDRAKPLPFKVESSGPWGFQGANDDSPRITAKFVAPCYSMNKIELDAKLPIVGNQKWVIWICSFNIPMAPGKTRSIVCSARNFFQFSVPGPAWWQVVPRWYEHWTSNLVYDGDMIVLQGQEKVFLAKSMESPDYDVNKQYTKLTFTPTQADRFVLAFRNWLRRHGKSQPEWFGSTPSNQPLPSTVLTKRQMLDRFDQHTQVCSSCKGAYNSFQILKKFLVGATVFWAATAGVPSDVQIRLVLAGLSLISAASAYALHEQEKNFRLCTF

SEQ ID NO: 86407 - DNA, 1368 bp, Arabidopsis thaliana
  misc_feature (1)..(1368): Ceres Seq. ID no. 12690379
  misc_feature: MA Experiment ID: 20000184 Result: Up-regulated in Transcription
  misc_feature: MA Experiment 20000184 PARAMETER Experiment Name: At_Shoots__P Parameter: Age (day) Value: 7
  misc_feature: MA Experiment 20000184 PARAMETER Experiment Name: At_Shoots__P Parameter: Tissue Value: Shoots vs. Whole Plant
  misc_feature: MA Experiment ID: 20000437 Result: Down-regulated in Transcription
  misc_feature: MA Experiment 20000437 PARAMETER Experiment Name: At_Drought_P Parameter: Age (day) Value: 8
  misc_feature: MA Experiment 20000437 PARAMETER Experiment Name: At_Drought_P Parameter: Organism Value: A. thaliana
  misc_feature: MA Experiment 20000437 PARAMETER Experiment Name: At_Drought_P Parameter: Plant Line Value: WS
  misc_feature: MA Experiment 20000437 PARAMETER Experiment Name: At_Drought_P Parameter: Timepoint (hr) Value: 24
  misc_feature: MA Experiment 20000437 PARAMETER Experiment Name: At_Drought_P Parameter: Tissue Value: Whole Plant
  misc_feature: MA Experiment 20000437 PARAMETER Experiment Name: At_Drought_P Parameter: Treatment Value: Drought vs. No Drought
  misc_feature: MA Experiment ID: 20000438 Result: Up-regulated in Transcription
  misc_feature: MA Experiment 20000438 PARAMETER Experiment Name: At_Shoots__P Parameter: Age (day) Value: 14
  misc_feature: MA Experiment 20000438 PARAMETER Experiment Name: At_Shoots__P Parameter: Tissue Value: Shoots vs. Whole Plant
  misc_feature: MA Experiment ID: 20000527 Result: Up-regulated in Transcription
  misc_feature: MA Experiment 20000527 PARAMETER Experiment Name: At_10percent_PEG_P Parameter: Age (day) Value: 20
  misc_feature: MA Experiment 20000527 PARAMETER Experiment Name: At_10percent_PEG_P Parameter: Organism Value: A. thaliana
  misc_feature: MA Experiment 20000527 PARAMETER Experiment Name: At_10percent_PEG_P Parameter: Plant Line Value: WS
  misc_feature: MA Experiment 20000527 PARAMETER Experiment Name: At_10percent_PEG_P Parameter: Timepoint (day) Value: 20
  misc_feature: MA Experiment 20000527 PARAMETER Experiment Name: At_10percent_PEG_P Parameter: Tissue Value: Whole Plant
  misc_feature: MA Experiment 20000527 PARAMETER Experiment Name: At_10percent_PEG_P Parameter: Treatment Value: 10percent PEG vs. No Treatment
  misc_feature: MA Experiment ID: 20001248 Result: Down-regulated in Transcription
  misc_feature: MA Experiment 20001248 PARAMETER Experiment Name: At_Far-red-induction_P Parameter: Age (day) Value: 7
  misc_feature: MA Experiment 20001248 PARAMETER Experiment Name: At_Far-red-induction_P Parameter: Light Value: Far-red vs. White
  misc_feature: MA Experiment 20001248 PARAMETER Experiment Name: At_Far-red-induction_P Parameter: Organism Value: A. thaliana
  misc_feature: MA Experiment 20001248 PARAMETER Experiment Name: At_Far-red-induction_P Parameter: Plant Line Value: Columbia
  misc_feature: MA Experiment 20001248 PARAMETER Experiment Name: At_Far-red-induction_P Parameter: Timepoint (hr) Value: 4
  misc_feature: MA Experiment 20001248 PARAMETER Experiment Name: At_Far-red-induction_P Parameter: Tissue Value: Whole Plant
  misc_feature: MA Experiment ID: 20001450 Result: Down-regulated in Transcription
  misc_feature: MA Experiment 20001450 PARAMETER Experiment Name: At_Far-red-induction_P Parameter: Age (day) Value: 7
  misc_feature: MA Experiment 20001450 PARAMETER Experiment Name: At_Far-red-induction_P Parameter: Light Value: Far-red vs. White
  misc_feature: MA Experiment 20001450 PARAMETER Experiment Name: At_Far-red-induction_P Parameter: Organism Value: A. thaliana
  misc_feature: MA Experiment 20001450 PARAMETER Experiment Name: At_Far-red-induction_P Parameter: Plant Line Value: Columbia
  misc_feature: MA Experiment 20001450 PARAMETER Experiment Name: At_Far-red-induction_P Parameter: Timepoint (hr) Value: 8
  misc_feature: MA Experiment 20001450 PARAMETER Experiment Name: At_Far-red-induction_P Parameter: Tissue Value: Whole Plant
  misc_feature: MA Experiment ID: 20001451 Result: Down-regulated in Transcription
  misc_feature: MA Experiment 20001451 PARAMETER Experiment Name: At_Far-red-induction_P Parameter: Age (day) Value: 7
  misc_feature: MA Experiment 20001451 PARAMETER Experiment Name: At_Far-red-induction_P Parameter: Light Value: Far-red vs. White
  misc_feature: MA Experiment 20001451 PARAMETER Experiment Name: At_Far-red-induction_P Parameter: Organism Value: A. thaliana
  misc_feature: MA Experiment 20001451 PARAMETER Experiment Name: At_Far-red-induction_P Parameter: Plant Line Value: Columbia
  misc_feature: MA Experiment 20001451 PARAMETER Experiment Name: At_Far-red-induction_P Parameter: Timepoint (hr) Value: 24
  misc_feature: MA Experiment 20001451 PARAMETER Experiment Name: At_Far-red-induction_P Parameter: Tissue Value: Whole Plant
atgaacttgttttggaacacaggattttgtgttatagttttagtggttgcgagggttggtcattggtggtaccaatggtcaaaccctaagtctaacggcaagttacctccgggatcaatgggtttcccgatcatcggagagacattagatttctttaagccttatggattctacgagatctccccatatctcaagaaaaagatgttaaggtatgggccattatttcggacaaacattcttggagtaaaaaccgtggtatcgacggataaggatgttaacatggagattttaagacaagagaacaagtctttcattttaagttatccggatggtttaatgaagccattgggaaaagatagcttgttcttgaagattggaaacatccacaagcacatcaaacaaataactcttcatcttttgtcctccgagggtttaaaacggaaaatattaaaagatatggaccgtgtgacacgcgagcatcttagttcgaaagctaaaacaggaagattggatgttaaggacgcagtttcaaaattgataatagcccacttgacacctaagatgatgagtaatctcaaaccacagactcaagcaaagcttatgggaatttttaaggcatgccgagaggggatgcgagagataaaggatatatatacaatgaggaaaacgtctgaggagaagtacgatgacttcctcaacacggcaatagaagagtcagagaaagcaggagagttattgaacgaaaatgcaattataaccctcatctttaccctttcatgtgtcactcaagataccacctcaaaggcgatttgcttggctgtgaaattcctattggaaaacccaaaagttctcgcagagttaaagaaagaacatgaggtgatccttgaaagcagagaagacaaagaaggtggagttacttgggaagaatacagacacaagatgactttcaccaacatggttatcaatgagtctcttcgaataacaaacttggctcctatgttatttagaaaagcggtaaaggatgtggaaatcaaaggatacaccattccagcaggttggatagtgatgattataccttcagtggttcattttgatcctgaaatctatgaaaacccttttgagtttaatccatggagatgggaggggaaagagttgcgggctggatctaaaacgttcatggtgtttggaaccggacttagacaatgcgctggtgcagagtttgctaggcttcagatttcagtatttcttcatcatcttgttaccacttataatttctcgttgcaccaagactgcgaggtgcttcgtgtaccagctgctcacctccctaatggcatatctataaacatctccaagtgtcccaaaaaatga

SEQ ID NO: 86408 - protein, 455 aa, Arabidopsis thaliana
  peptide (1)..(455): Ceres Seq. ID no. 12690380
  misc_feature (1)..(206): Homolog of NCBI NO: 15230572 NR Description: cytochrome P450 - like protein; protein id:
  misc_feature (346)..(455): Homolog of NCBI NO: 15230572 NR Description: cytochrome P450 - like protein; protein id:
  misc_feature (1)..(205): Homolog of NCBI NO: 8778326 NR Description: F14J16.21 [Arabidopsis thaliana]
  misc_feature (205)..(346): Homolog of NCBI NO: 8778326 NR Description: F14J16.21 [Arabidopsis thaliana]
  misc_feature (342)..(453): Homolog of NCBI NO: 8778326 NR Description: F14J16.21 [Arabidopsis thaliana]
  misc_feature (128)..(319): Homolog of NCBI NO: 15230572 NR Description: cytochrome P450 - like protein; protein id:
  misc_feature (174)..(451): Homolog of NCBI NO: 30682922 NR Description: cytochrome P450, putative [Arabidopsis thaliana]
  misc_feature (12)..(211): Homolog of NCBI NO: 30682922 NR Description: cytochrome P450, putative [Arabidopsis thaliana]
  misc_feature (187)..(451): Homolog of NCBI NO: 15233767 NR Description: steroid 22-alpha-hydroxylase(cytochrome p450), protein id: At4g15300.1 [Arabidopsis thaliana]
  misc_feature (11)..(200): Homolog of NCBI NO: 15233767 NR Description: steroid 22-alpha-hydroxylase(cytochrome p450), protein id: At4g15300.1 [Arabidopsis thaliana]
MNLFWNTGFCVIVLVVARVGHWWYQWSNPKSNGKLPPGSMGFPIIGETLDFFKPYGFYEISPYLKKKMLRYGPLFRTNILGVKTVVSTDKDVNMEILRQENKSFILSYPDGLMKPLGKDSLFLKIGNIHKHIKQITLHLLSSEGLKRKILKDMDRVTREHLSSKAKTGRLDVKDAVSKLIIAHLTPKMMSNLKPQTQAKLMGIFKACREGMREIKDIYTMRKTSEEKYDDFLNTAIEESEKAGELLNENAIITLIFTLSCVTQDTTSKAICLAVKFLLENPKVLAELKKEHEVILESREDKEGGVTWEEYRHKMTFTNMVINESLRITNLAPMLFRKAVKDVEIKGYTIPAGWIVMIIPSVVHFDPEIYENPFEFNPWRWEGKELRAGSKTFMVFGTGLRQCAGAEFARLQISVFLHHLVTTYNFSLHQDCEVLRVPAAHLPNGISINISKCPKK

SEQ ID NO: 86409 - protein, 416 aa, Arabidopsis thaliana
  peptide (1)..(416): Ceres Seq. ID no. 12690381
  misc_feature (1)..(167): Homolog of NCBI NO: 15230572 NR Description: cytochrome P450 - like protein; protein id:
  misc_feature (307)..(416): Homolog of NCBI NO: 15230572 NR Description: cytochrome P450 - like protein; protein id:
  misc_feature (1)..(166): Homolog of NCBI NO: 8778326 NR Description: F14J16.21 [Arabidopsis thaliana]
  misc_feature (166)..(307): Homolog of NCBI NO: 8778326 NR Description: F14J16.21 [Arabidopsis thaliana]
  misc_feature (303)..(414): Homolog of NCBI NO: 8778326 NR Description: F14J16.21 [Arabidopsis thaliana]
  misc_feature (89)..(280): Homolog of NCBI NO: 15230572 NR Description: cytochrome P450 - like protein; protein id:
  misc_feature (135)..(412): Homolog of NCBI NO: 30682922 NR Description: cytochrome P450, putative [Arabidopsis thaliana]
  misc_feature (1)..(172): Homolog of NCBI NO: 30682922 NR Description: cytochrome P450, putative [Arabidopsis thaliana]
  misc_feature (148)..(412): Homolog of NCBI NO: 15233767 NR Description: steroid 22-alpha-hydroxylase(cytochrome p450), protein id: At4g15300.1 [Arabidopsis thaliana]
  misc_feature (1)..(161): Homolog of NCBI NO: 15233767 NR Description: steroid 22-alpha-hydroxylase(cytochrome p450), protein id: At4g15300.1 [Arabidopsis thaliana]
MGFPIIGETLDFFKPYGFYEISPYLKKKMLRYGPLFRTNILGVKTVVSTDKDVNMEILRQENKSFILSYPDGLMKPLGKDSLFLKIGNIHKHIKQITLHLLSSEGLKRKILKDMDRVTREHLSSKAKTGRLDVKDAVSKLIIAHLTPKMMSNLKPQTQAKLMGIFKACREGMREIKDIYTMRKTSEEKYDDFLNTAIEESEKAGELLNENAIITLIFTLSCVTQDTTSKAICLAVKFLLENPKVLAELKKEHEVILESREDKEGGVTWEEYRHKMTFTNMVINESLRITNLAPMLFRKAVKDVEIKGYTIPAGWIVMIIPSVVHFDPEIYENPFEFNPWRWEGKELRAGSKTFMVFGTGLRQCAGAEFARLQISVFLHHLVTTYNFSLHQDCEVLRVPAAHLPNGISINISKCPKK

SEQ ID NO: 86410 - protein, 388 aa, Arabidopsis thaliana
  peptide (1)..(388): Ceres Seq. ID no. 12690382
  misc_feature (1)..(139): Homolog of NCBI NO: 15230572 NR Description: cytochrome P450 - like protein; protein id:
  misc_feature (279)..(388): Homolog of NCBI NO: 15230572 NR Description: cytochrome P450 - like protein; protein id:
  misc_feature (1)..(138): Homolog of NCBI NO: 8778326 NR Description: F14J16.21 [Arabidopsis thaliana]
  misc_feature (138)..(279): Homolog of NCBI NO: 8778326 NR Description: F14J16.21 [Arabidopsis thaliana]
  misc_feature (275)..(386): Homolog of NCBI NO: 8778326 NR Description: F14J16.21 [Arabidopsis thaliana]
  misc_feature (61)..(252): Homolog of NCBI NO: 15230572 NR Description: cytochrome P450 - like protein; protein id:
  misc_feature (107)..(384): Homolog of NCBI NO: 30682922 NR Description: cytochrome P450, putative [Arabidopsis thaliana]
  misc_feature (1)..(144): Homolog of NCBI NO: 30682922 NR Description: cytochrome P450, putative [Arabidopsis thaliana]
  misc_feature (120)..(384): Homolog of NCBI NO: 15233767 NR Description: steroid 22-alpha-hydroxylase(cytochrome p450), protein id: At4g15300.1 [Arabidopsis thaliana]
  misc_feature (1)..(133): Homolog of NCBI NO: 15233767 NR Description: steroid 22-alpha-hydroxylase(cytochrome p450), protein id: At4g15300.1 [Arabidopsis thaliana]
MLRYGPLFRTNILGVKTVVSTDKDVNMEILRQENKSFILSYPDGLMKPLGKDSLFLKIGNIHKHIKQITLHLLSSEGLKRKILKDMDRVTREHLSSKAKTGRLDVKDAVSKLIIAHLTPKMMSNLKPQTQAKLMGIFKACREGMREIKDIYTMRKTSEEKYDDFLNTAIEESEKAGELLNENAIITLIFTLSCVTQDTTSKAICLAVKFLLENPKVLAELKKEHEVILESREDKEGGVTWEEYRHKMTFTNMVINESLRITNLAPMLFRKAVKDVEIKGYTIPAGWIVMIIPSVVHFDPEIYENPFEFNPWRWEGKELRAGSKTFMVFGTGLRQCAGAEFARLQISVFLHHLVTTYNFSLHQDCEVLRVPAAHLPNGISINISKCPKK

SEQ ID NO: 86411 - DNA, 1711 bp, Arabidopsis thaliana
  misc_feature (1)..(1711): Ceres Seq. ID no. 12690391
  misc_feature: MA Experiment ID: 108434 Result: Down-regulated in Transcription
  misc_feature: MA Experiment 108434 PARAMETER Experiment Name: At_Root_Tips_cDNA_P Parameter: Tissue Value: Root Tips
  misc_feature: MA Experiment ID: 108462 Result: Down-regulated in Transcription
  misc_feature: MA Experiment 108462 PARAMETER Experiment Name: At_Germinating_Seeds_cDNA_P Parameter: Age (day) Value: 2 vs. 0
  misc_feature: MA Experiment 108462 PARAMETER Experiment Name: At_Germinating_Seeds_cDNA_P Parameter: Tissue Value: Germinating Seeds
  misc_feature: MA Experiment ID: 108463 Result: Down-regulated in Transcription
  misc_feature: MA Experiment 108463 PARAMETER Experiment Name: At_Germinating_Seeds_cDNA_P Parameter: Age (day) Value: 3 vs. 0
  misc_feature: MA Experiment 108463 PARAMETER Experiment Name: At_Germinating_Seeds_cDNA_P Parameter: Tissue Value: Germinating Seeds
  misc_feature: MA Experiment ID: 108464 Result: Down-regulated in Transcription
  misc_feature: MA Experiment 108464 PARAMETER Experiment Name: At_Germinating_Seeds_cDNA_P Parameter: Age (day) Value: 4 vs. 0
  misc_feature: MA Experiment 108464 PARAMETER Experiment Name: At_Germinating_Seeds_cDNA_P Parameter: Tissue Value: Germinating Seeds
  misc_feature: MA Experiment ID: 108488 Result: Down-regulated in Transcription
  misc_feature: MA Experiment ID: 108501 Result: Down-regulated in Transcription
  misc_feature: MA Experiment 108501 PARAMETER Experiment Name: At_ap2_floral_buds_cDNA_P Parameter: Plant Line Value: ap2 (Ler.)
  misc_feature: MA Experiment 108501 PARAMETER Experiment Name: At_ap2_floral_buds_cDNA_P Parameter: Tissue Value: Closed Flower
  misc_feature: MA Experiment ID: 108573 Result: Up-regulated in Transcription
  misc_feature: MA Experiment 108573 PARAMETER Experiment Name: At_Drought_cDNA_P Parameter: Timepoint (hr) Value: 6
  misc_feature: MA Experiment 108573 PARAMETER Experiment Name: At_Drought_cDNA_P Parameter: Tissue Value: Aerial
  misc_feature: MA Experiment 108573 PARAMETER Experiment Name: At_Drought_cDNA_P Parameter: Treatment Value: Drought vs. No Drought
  misc_feature: MA Experiment ID: 108605 Result: Up-regulated in Transcription
  misc_feature: MA Experiment 108605 PARAMETER Experiment Name: At_100uM_ABA_cDNA_P Parameter: Timepoint (hr) Value: 6
  misc_feature: MA Experiment 108605 PARAMETER Experiment Name: At_100uM_ABA_cDNA_P Parameter: Tissue Value: Aerial
  misc_feature: MA Experiment 108605 PARAMETER Experiment Name: At_100uM_ABA_cDNA_P Parameter: Treatment Value: 100uM ABA vs. No Treatment
  misc_feature: MA Experiment ID: 20000088 Result: Up-regulated in Transcription
  misc_feature: MA Experiment 20000088 PARAMETER Experiment Name: At_100uM_ABA_Mutants_cDNA_P Parameter: Plant Line Value: Landsberg
  misc_feature: MA Experiment 20000088 PARAMETER Experiment Name: At_100uM_ABA_Mutants_cDNA_P Parameter: Timepoint (hr) Value: 6
  misc_feature: MA Experiment 20000088 PARAMETER Experiment Name: At_100uM_ABA_Mutants_cDNA_P Parameter: Tissue Value: Aerial
  misc_feature: MA Experiment 20000088 PARAMETER Experiment Name: At_100uM_ABA_Mutants_cDNA_P Parameter: Treatment Value: 100uM ABA vs. No Treatment
  misc_feature: MA Experiment ID: 20000184 Result: Down-regulated in Transcription
  misc_feature: MA Experiment 20000184 PARAMETER Experiment Name: At_Shoots__P Parameter: Age (day) Value: 7
  misc_feature: MA Experiment 20000184 PARAMETER Experiment Name: At_Shoots__P Parameter: Tissue Value: Shoots vs. Whole Plant
  misc_feature: MA Experiment ID: 20000264 Result: Up-regulated in Transcription
  misc_feature: MA Experiment 20000264 PARAMETER Experiment Name: At_Open_Flower_P Parameter: Age (day) Value: 21
  misc_feature: MA Experiment 20000264 PARAMETER Experiment Name: At_Open_Flower_P Parameter: Plant Line Value: WS
  misc_feature: MA Experiment 20000264 PARAMETER Experiment Name: At_Open_Flower_P Parameter: Tissue Value: Open Flower vs. Whole Plant
  misc_feature: MA Experiment ID: 20000265 Result: Up-regulated in Transcription
  misc_feature: MA Experiment 20000265 PARAMETER Experiment Name: At_Open_Flower_P Parameter: Age (day) Value: 21
  misc_feature: MA Experiment 20000265 PARAMETER Experiment Name: At_Open_Flower_P Parameter: Plant Line Value: WS
  misc_feature: MA Experiment 20000265 PARAMETER Experiment Name: At_Open_Flower_P Parameter: Tissue Value: Closed Flower vs. Whole Plant
  misc_feature: MA Experiment ID: 20000286 Result: Up-regulated in Transcription
  misc_feature: MA Experiment 20000286 PARAMETER Experiment Name: At_Open_Flower_P Parameter: Age (day) Value: 21
  misc_feature: MA Experiment 20000286 PARAMETER Experiment Name: At_Open_Flower_P Parameter: Plant Line Value: WS
  misc_feature: MA Experiment 20000286 PARAMETER Experiment Name: At_Open_Flower_P Parameter: Tissue Value: Half Open vs. Whole Plant
  misc_feature: MA Experiment ID: 20000438 Result: Down-regulated in Transcription
  misc_feature: MA Experiment 20000438 PARAMETER Experiment Name: At_Shoots__P Parameter: Age (day) Value: 14
  misc_feature: MA Experiment 20000438 PARAMETER Experiment Name: At_Shoots__P Parameter: Tissue Value: Shoots vs. Whole Plant
  misc_feature: MA Experiment ID: 20000794 Result: Up-regulated in Transcription
  misc_feature: MA Experiment 20000794 PARAMETER Experiment Name: At_Petals_P Parameter: Age (day) Value: 23-25 days
  misc_feature: MA Experiment 20000794 PARAMETER Experiment Name: At_Petals_P Parameter: Plant Line Value: WS
  misc_feature: MA Experiment 20000794 PARAMETER Experiment Name: At_Petals_P Parameter: Tissue Value: Petals vs. Whole plant
  misc_feature: MA Experiment ID: 20001248 Result: Down-regulated in Transcription
  misc_feature: MA Experiment 20001248 PARAMETER Experiment Name: At_Far-red-induction_P Parameter: Age (day) Value: 7
  misc_feature: MA Experiment 20001248 PARAMETER Experiment Name: At_Far-red-induction_P Parameter: Light Value: Far-red vs. White
  misc_feature: MA Experiment 20001248 PARAMETER Experiment Name: At_Far-red-induction_P Parameter: Organism Value: A. thaliana
  misc_feature: MA Experiment 20001248 PARAMETER Experiment Name: At_Far-red-induction_P Parameter: Plant Line Value: Columbia
  misc_feature: MA Experiment 20001248 PARAMETER Experiment Name: At_Far-red-induction_P Parameter: Timepoint (hr) Value: 4
  misc_feature: MA Experiment 20001248 PARAMETER Experiment Name: At_Far-red-induction_P Parameter: Tissue Value: Whole Plant
  misc_feature: MA Experiment ID: 20001559 Result: Up-regulated in Transcription
  misc_feature: MA Experiment 20001559 PARAMETER Experiment Name: At_Drought_Soil_Dry_P Parameter: Age (day) Value: 28
  misc_feature: MA Experiment 20001559 PARAMETER Experiment Name: At_Drought_Soil_Dry_P Parameter: Organism Value: A. thaliana
  misc_feature: MA Experiment 20001559 PARAMETER Experiment Name: At_Drought_Soil_Dry_P Parameter: Plant Line Value: WS
  misc_feature: MA Experiment 20001559 PARAMETER Experiment Name: At_Drought_Soil_Dry_P Parameter: Post Timepoint (hr) Value: 29
  misc_feature: MA Experiment 20001559 PARAMETER Experiment Name: At_Drought_Soil_Dry_P Parameter: Post-Treatment Value: Re-Water vs. No Drought
  misc_feature: MA Experiment 20001559 PARAMETER Experiment Name: At_Drought_Soil_Dry_P Parameter: Timepoint (day) Value: 14
  misc_feature: MA Experiment 20001559 PARAMETER Experiment Name: At_Drought_Soil_Dry_P Parameter: Treatment Value: Drought vs. No Drought
  misc_feature: MA Experiment ID: 20001904 Result: Up-regulated in Transcription
  misc_feature: MA Experiment 20001904 PARAMETER Experiment Name: At_Drought_Reproduction_P Parameter: Age (day) Value: 37
  misc_feature: MA Experiment 20001904 PARAMETER Experiment Name: At_Drought_Reproduction_P Parameter: Organism Value: A. thaliana
  misc_feature: MA Experiment 20001904 PARAMETER Experiment Name: At_Drought_Reproduction_P Parameter: Plant Line Value: WS
  misc_feature: MA Experiment 20001904 PARAMETER Experiment Name: At_Drought_Reproduction_P Parameter: Timepoint (day) Value: 7
  misc_feature: MA Experiment 20001904 PARAMETER Experiment Name: At_Drought_Reproduction_P Parameter: Tissue Value: Rosettes
  misc_feature: MA Experiment 20001904 PARAMETER Experiment Name: At_Drought_Reproduction_P Parameter: Treatment Value: Drought vs. No Drought
  misc_feature: MA Experiment ID: 20001905 Result: Up-regulated in Transcription
  misc_feature: MA Experiment 20001905 PARAMETER Experiment Name: At_Drought_Reproduction_P Parameter: Age (day) Value: 40
  misc_feature: MA Experiment 20001905 PARAMETER Experiment Name: At_Drought_Reproduction_P Parameter: Organism Value: A. thaliana
  misc_feature: MA Experiment 20001905 PARAMETER Experiment Name: At_Drought_Reproduction_P Parameter: Plant Line Value: WS
  misc_feature: MA Experiment 20001905 PARAMETER Experiment Name: At_Drought_Reproduction_P Parameter: Timepoint (day) Value: 10
  misc_feature: MA Experiment 20001905 PARAMETER Experiment Name: At_Drought_Reproduction_P Parameter: Tissue Value: Rosettes
  misc_feature: MA Experiment 20001905 PARAMETER Experiment Name: At_Drought_Reproduction_P Parameter: Treatment Value: Drought vs. No Drought
  misc_feature: MA Experiment ID: 20001906 Result: Up-regulated in Transcription
  misc_feature: MA Experiment 20001906 PARAMETER Experiment Name: At_Drought_Reproduction_P Parameter: Age (day) Value: 35
  misc_feature: MA Experiment 20001906 PARAMETER Experiment Name: At_Drought_Reproduction_P Parameter: Organism Value: A. thaliana
  misc_feature: MA Experiment 20001906 PARAMETER Experiment Name: At_Drought_Reproduction_P Parameter: Plant Line Value: WS
  misc_feature: MA Experiment 20001906 PARAMETER Experiment Name: At_Drought_Reproduction_P Parameter: Timepoint (day) Value: 5
  misc_feature: MA Experiment 20001906 PARAMETER Experiment Name: At_Drought_Reproduction_P Parameter: Tissue Value: Siliques
  misc_feature: MA Experiment 20001906 PARAMETER Experiment Name: At_Drought_Reproduction_P Parameter: Treatment Value: Drought vs. No Drought
  misc_feature: MA Experiment ID: 20001908 Result: Up-regulated in Transcription
  misc_feature: MA Experiment 20001908 PARAMETER Experiment Name: At_Drought_Reproduction_P Parameter: Age (day) Value: 40
  misc_feature: MA Experiment 20001908 PARAMETER Experiment Name: At_Drought_Reproduction_P Parameter: Organism Value: A. thaliana
  misc_feature: MA Experiment 20001908 PARAMETER Experiment Name: At_Drought_Reproduction_P Parameter: Plant Line Value: WS
  misc_feature: MA Experiment 20001908 PARAMETER Experiment Name: At_Drought_Reproduction_P Parameter: Timepoint (day) Value: 10
  misc_feature: MA Experiment 20001908 PARAMETER Experiment Name: At_Drought_Reproduction_P Parameter: Tissue Value: Siliques
  misc_feature: MA Experiment 20001908 PARAMETER Experiment Name: At_Drought_Reproduction_P Parameter: Treatment Value: Drought vs. No Drought
ataacccaaaaattctctcacagaaaaccaaaaaaaaaatggactccaaaacaacttttctcacatttctcctctgtattttcattttctctcatttttcaccctcaacttccaaatctctgacagaaaagcccttatctttctcaccgtcggcgagtttgccgactctcacggcggagagacttatcaaaggattcaatttgatgcctacacgcgacgtcaatgtcatcgatgaagaaggttctgaggctccgagactggtcgagagagcattcgatttgccggcggcggttgaccgtcgtggctccggtggttctccgtcggttcaagattttggtcaccatgctggttactacaaactccctaactcaaaagcagcaaggatgttctactttttcttcgagtcaaggacgaacaaagccgatccagtggtgatttggctaaccggtggaccaggttgcagtagtgaactggctctgttctacgagaacggaccgttcaccgtctctaacaactcatctctttcttggaacgaatttggttgggacaaggcatcaaatctaatctacgtggaccaaccggtaggaactggtttcagttacacatcggaccaaagcgatcttcgtcatgacgaggatggtgtcagtaatgacctttatgacttcttacaggcgtttttcaaagagcatccacaatttgtgaagaatgatttttacattaccggtgaatcctacgctggacattacattccggcattggcttcacgtgttcaccgtggaaacaagaacaaagaaggaactcacattaaccttaagggttttgcgatcggtaacggtttaaccaacccggagattcaatatggtgcgtatgcggattacgcgctagacatgaatttaatcacacagtctgatcatgataacctcaaccgttattacgcaacttgtcaacaatctatcaaagaatgcagcgcggatggtggtgaaggggatgcgtgtgcttcttcttacactgtctgcaacaacattttccaaaagataatggatattgctggaaacgtaaactattatgacgtgaggaaacaatgtgaaggaagcttatgctatgatttctcgaacatggagaatttcttgaaccagaaatcggtgcggaaggcattaggtgtgggagatatcgagtttgtgtcttgcagtacagcggtctacgaagcaatgcagatggactggatgcggaatcttgaggtcgggattccagctcttcttcaagatggaattaagctccttgtttatgccggagaatacgatctcatctgcaattggctcggaaactcaaagtgggttcacgaaatggaatggtcaggccagaaagagtttgtagcagcagcgacagttccattccacgtagacaacaaagaagcgggtttaatgaagaactacggttcactcactttcctaaaggtccatgatgctggacacatggttccgatggatcagccaaaggcagcattgcaaatgcttcagaactggatgcaaggaaagctcagtacacccactggtcggaccgctcatcagtaaatccaaattccgaaccggctgaattattatgtatttaggagatcaatattttacttttaagaaaagctaaataacatatacttgtgaattatttctatcaatacacaggaaacttcattgttaatttctaaccatcatat

SEQ ID NO: 86412 - protein, 522 aa, Arabidopsis thaliana
  peptide (1)..(522): Ceres Seq. ID no. 12690392
  misc_feature (13)..(522): Homolog of NCBI NO: 15230577 NR Description: carboxypeptidase precursor-like protein; protein At3g45010.1, supported by cDNA: gi_15215795, supported by cDNA: supported by cDNA: gi_20334785 [Arabidopsis thaliana] thaliana]
  misc_feature (13)..(522): Homolog of NCBI NO: 16323071 NR Description: AT3g45010/F14D17_80 [Arabidopsis thaliana]
  misc_feature (13)..(514): Homolog of NCBI NO: 15237178 NR Description: serine carboxypeptidase; protein id: At5g22980.1 thaliana] >gi|10177245|dbj|BAB10619.1| serine carboxypeptidase
  misc_feature (23)..(513): Homolog of NCBI NO: 18447763 NR Description: putative serine carboxypeptidase precursor
  misc_feature (16)..(512): Homolog of NCBI NO: 166674 NR Description: carboxypeptidase Y-like protein
  misc_feature (16)..(512): Homolog of NCBI NO: 15228281 NR Description: putative serine carboxypeptidase precursor; id: At3g10410.1, supported by cDNA: gi_20147198 [Arabidopsis >gi|20455475|sp|P32826|CBPX_ARATH Serine carboxypeptidase
  misc_feature (26)..(513): Homolog of NCBI NO: 21901929 NR Description: carboxypeptidase type III [Theobroma cacao]
  misc_feature (37)..(517): Homolog of NCBI NO: 6960455 NR Description: serine carboxypeptidase precursor [Matricaria
  misc_feature (45)..(512): Homolog of NCBI NO: 82620 NR Description: carboxypeptidase C (EC 3.4.16.5) precursor - wheat
  misc_feature (45)..(512): Homolog of NCBI NO: 115874 NR Description: Serine carboxypeptidase III precursor (CP-WIII)
NPKILSQKTKKKMDSKTTFLTFLLCIFIFSHFSPSTSKSLTEKPLSFSPSASLPTLTAERLIKGFNLMPTRDVNVIDEEGSEAPRLVERAFDLPAAVDRRGSGGSPSVQDFGHHAGYYKLPNSKAARMFYFFFESRTNKADPVVIWLTGGPGCSSELALFYENGPFTVSNNSSLSWNEFGWDKASNLIYVDQPVGTGFSYTSDQSDLRHDEDGVSNDLYDFLQAFFKEHPQFVKNDFYITGESYAGHYIPALASRVHRGNKNKEGTHINLKGFAIGNGLTNPEIQYGAYADYALDMNLITQSDHDNLNRYYATCQQSIKECSADGGEGDACASSYTVCNNIFQKIMDIAGNVNYYDVRKQCEGSLCYDFSNMENFLNQKSVRKALGVGDIEFVSCSTAVYEAMQMDWMRNLEVGIPALLQDGIKLLVYAGEYDLICNWLGNSKWVHEMEWSGQKEFVAAATVPFHVDNKEAGLMKNYGSLTFLKVHDAGHMVPMDQPKAALQMLQNWMQGKLSTPTGRTAHQ

SEQ ID NO: 86413 - protein, 510 aa, Arabidopsis thaliana; identical to SEQ ID NO: 30708
  peptide (1)..(510): Ceres Seq. ID no. 12690393
  misc_feature (1)..(510): Homolog of NCBI NO: 15230577 NR Description: carboxypeptidase precursor-like protein; protein At3g45010.1, supported by cDNA: gi_15215795, supported by cDNA: supported by cDNA: gi_20334785 [Arabidopsis thaliana] thaliana]
  misc_feature (1)..(510): Homolog of NCBI NO: 16323071 NR Description: AT3g45010/F14D17_80 [Arabidopsis thaliana]
  misc_feature (1)..(502): Homolog of NCBI NO: 15237178 NR Description: serine carboxypeptidase; protein id: At5g22980.1 thaliana] >gi|10177245|dbj|BAB10619.1| serine carboxypeptidase
  misc_feature (11)..(501): Homolog of NCBI NO: 18447763 NR Description: putative serine carboxypeptidase precursor
  misc_feature (4)..(500): Homolog of NCBI NO: 166674 NR Description: carboxypeptidase Y-like protein
  misc_feature (4)..(500): Homolog of NCBI NO: 15228281 NR Description: putative serine carboxypeptidase precursor; id: At3g10410.1, supported by cDNA: gi_20147198 [Arabidopsis >gi|20455475|sp|P32826|CBPX_ARATH Serine carboxypeptidase
  misc_feature (14)..(501): Homolog of NCBI NO: 21901929 NR Description: carboxypeptidase type III [Theobroma cacao]
  misc_feature (25)..(505): Homolog of NCBI NO: 6960455 NR Description: serine carboxypeptidase precursor [Matricaria
  misc_feature (33)..(500): Homolog of NCBI NO: 82620 NR Description: carboxypeptidase C (EC 3.4.16.5) precursor - wheat
  misc_feature (33)..(500): Homolog of NCBI NO: 115874 NR Description: Serine carboxypeptidase III precursor (CP-WIII)

SEQ ID NO: 86414 - protein, 455 aa, Arabidopsis thaliana; identical to SEQ ID NO: 30709
  peptide (1)..(455): Ceres Seq. ID no. 12690394
  misc_feature (1)..(455): Homolog of NCBI NO: 15230577 NR Description: carboxypeptidase precursor-like protein; protein At3g45010.1, supported by cDNA: gi_15215795, supported by cDNA: supported by cDNA: gi_20334785 [Arabidopsis thaliana] thaliana]
  misc_feature (1)..(455): Homolog of NCBI NO: 16323071 NR Description: AT3g45010/F14D17_80 [Arabidopsis thaliana]
  misc_feature (1)..(447): Homolog of NCBI NO: 15237178 NR Description: serine carboxypeptidase; protein id: At5g22980.1 thaliana] >gi|10177245|dbj|BAB10619.1| serine carboxypeptidase
  misc_feature (1)..(446): Homolog of NCBI NO: 18447763 NR Description: putative serine carboxypeptidase precursor
  misc_feature (1)..(445): Homolog of NCBI NO: 166674 NR Description: carboxypeptidase Y-like protein
  misc_feature (1)..(445): Homolog of NCBI NO: 15228281 NR Description: putative serine carboxypeptidase precursor; id: At3g10410.1, supported by cDNA: gi_20147198 [Arabidopsis >gi|20455475|sp|P32826|CBPX_ARATH Serine carboxypeptidase
  misc_feature (1)..(446): Homolog of NCBI NO: 21901929 NR Description: carboxypeptidase type III [Theobroma cacao]
  misc_feature (1)..(450): Homolog of NCBI NO: 6960455 NR Description: serine carboxypeptidase precursor [Matricaria
  misc_feature (1)..(445): Homolog of NCBI NO: 82620 NR Description: carboxypeptidase C (EC 3.4.16.5) precursor - wheat
  misc_feature (1)..(445): Homolog of NCBI NO: 115874 NR Description: Serine carboxypeptidase III precursor (CP-WIII)

SEQ ID NO: 86415 - DNA, 1593 bp, Arabidopsis thaliana
  misc_feature (1)..(1593): Ceres Seq. ID no. 12690399
  misc_feature: MA Experiment ID: 20000182 Result: Up-regulated in Transcription
  misc_feature: MA Experiment 20000182 PARAMETER Experiment Name: At_2mM_SA_P Parameter: Age (day) Value: 14
  misc_feature: MA Experiment 20000182 PARAMETER Experiment Name: At_2mM_SA_P Parameter: Organism Value: A. thaliana
  misc_feature: MA Experiment 20000182 PARAMETER Experiment Name: At_2mM_SA_P Parameter: Plant Line Value: WS
  misc_feature: MA Experiment 20000182 PARAMETER Experiment Name: At_2mM_SA_P Parameter: Timepoint (hr) Value: 6
  misc_feature: MA Experiment 20000182 PARAMETER Experiment Name: At_2mM_SA_P Parameter: Tissue Value: Aerial
  misc_feature: MA Experiment 20000182 PARAMETER Experiment Name: At_2mM_SA_P Parameter: Treatment Value: 2mM SA vs. No Treatment
  misc_feature: MA Experiment ID: 20000184 Result: Down-regulated in Transcription
  misc_feature: MA Experiment 20000184 PARAMETER Experiment Name: At_Shoots__P Parameter: Age (day) Value: 7
  misc_feature: MA Experiment 20000184 PARAMETER Experiment Name: At_Shoots__P Parameter: Tissue Value: Shoots vs. Whole Plant
  misc_feature: MA Experiment ID: 20000234 Result: Down-regulated in Transcription
  misc_feature: MA Experiment 20000234 PARAMETER Experiment Name: At_Siliques_P Parameter: Age (day) Value: 21
  misc_feature: MA Experiment 20000234 PARAMETER Experiment Name: At_Siliques_P Parameter: Organism Value: A. thaliana
  misc_feature: MA Experiment 20000234 PARAMETER Experiment Name: At_Siliques_P Parameter: Plant Line Value: WS
  misc_feature: MA Experiment 20000234 PARAMETER Experiment Name: At_Siliques_P Parameter: Tissue Value: Less Than 5mm Siliques vs. Whole Plant
  misc_feature: MA Experiment ID: 20000235 Result: Down-regulated in Transcription
  misc_feature: MA Experiment 20000235 PARAMETER Experiment Name: At_Siliques_P Parameter: Age (day) Value: 21
  misc_feature: MA Experiment 20000235 PARAMETER Experiment Name: At_Siliques_P Parameter: Organism Value: A. thaliana
  misc_feature: MA Experiment 20000235 PARAMETER Experiment Name: At_Siliques_P Parameter: Plant Line Value: WS
  misc_feature: MA Experiment 20000235 PARAMETER Experiment Name: At_Siliques_P Parameter: Tissue Value: 5-10mm Siliques vs. Whole Plant
  misc_feature: MA Experiment ID: 20000264 Result: Down-regulated in Transcription
  misc_feature: MA Experiment 20000264 PARAMETER Experiment Name: At_Open_Flower_P Parameter: Age (day) Value: 21
  misc_feature: MA Experiment 20000264 PARAMETER Experiment Name: At_Open_Flower_P Parameter: Plant Line Value: WS
  misc_feature: MA Experiment 20000264 PARAMETER Experiment Name: At_Open_Flower_P Parameter: Tissue Value: Open Flower vs. Whole Plant
  misc_feature: MA Experiment ID: 20000265 Result: Down-regulated in Transcription
  misc_feature: MA Experiment 20000265 PARAMETER Experiment Name: At_Open_Flower_P Parameter: Age (day) Value: 21
  misc_feature: MA Experiment 20000265 PARAMETER Experiment Name: At_Open_Flower_P Parameter: Plant Line Value: WS
  misc_feature: MA Experiment 20000265 PARAMETER Experiment Name: At_Open_Flower_P Parameter: Tissue Value: Closed Flower vs. Whole Plant
  misc_feature: MA Experiment ID: 20000286 Result: Down-regulated in Transcription
  misc_feature: MA Experiment 20000286 PARAMETER Experiment Name: At_Open_Flower_P Parameter: Age (day) Value: 21
  misc_feature: MA Experiment 20000286 PARAMETER Experiment Name: At_Open_Flower_P Parameter: Plant Line Value: WS
  misc_feature: MA Experiment 20000286 PARAMETER Experiment Name: At_Open_Flower_P Parameter: Tissue Value: Half Open vs. Whole Plant
  misc_feature: MA Experiment ID: 20000437 Result: Up-regulated in Transcription
  misc_feature: MA Experiment 20000437 PARAMETER Experiment Name: At_Drought_P Parameter: Age (day) Value: 8
  misc_feature: MA Experiment 20000437 PARAMETER Experiment Name: At_Drought_P Parameter: Organism Value: A. thaliana
  misc_feature: MA Experiment 20000437 PARAMETER Experiment Name: At_Drought_P Parameter: Plant Line Value: WS
  misc_feature: MA Experiment 20000437 PARAMETER Experiment Name: At_Drought_P Parameter: Timepoint (hr) Value: 24
  misc_feature: MA Experiment 20000437 PARAMETER Experiment Name: At_Drought_P Parameter: Tissue Value: Whole Plant
  misc_feature: MA Experiment 20000437 PARAMETER Experiment Name: At_Drought_P Parameter: Treatment Value: Drought vs. No Drought
  misc_feature: MA Experiment ID: 20000438 Result: Down-regulated in Transcription
  misc_feature: MA Experiment 20000438 PARAMETER Experiment Name: At_Shoots__P Parameter: Age (day) Value: 14
  misc_feature: MA Experiment 20000438 PARAMETER Experiment Name: At_Shoots__P Parameter: Tissue Value: Shoots vs. Whole Plant
  misc_feature: MA Experiment ID: 20001247 Result: Up-regulated in Transcription
  misc_feature: MA Experiment 20001247 PARAMETER Experiment Name: At_Far-red-induction_P Parameter: Age (day) Value: 7
  misc_feature: MA Experiment 20001247 PARAMETER Experiment Name: At_Far-red-induction_P Parameter: Light Value: Far-red vs. White
  misc_feature: MA Experiment 20001247 PARAMETER Experiment Name: At_Far-red-induction_P Parameter: Organism Value: A. thaliana
  misc_feature: MA Experiment 20001247 PARAMETER Experiment Name: At_Far-red-induction_P Parameter: Plant Line Value: Columbia
  misc_feature: MA Experiment 20001247 PARAMETER Experiment Name: At_Far-red-induction_P Parameter: Timepoint (hr) Value: 1
  misc_feature: MA Experiment 20001247 PARAMETER Experiment Name: At_Far-red-induction_P Parameter: Tissue Value: Whole Plant
  misc_feature: MA Experiment ID: 20001248 Result: Up-regulated in Transcription
  misc_feature: MA Experiment 20001248 PARAMETER Experiment Name: At_Far-red-induction_P Parameter: Age (day) Value: 7
  misc_feature: MA Experiment 20001248 PARAMETER Experiment Name: At_Far-red-induction_P Parameter: Light Value: Far-red vs. White
  misc_feature: MA Experiment 20001248 PARAMETER Experiment Name: At_Far-red-induction_P Parameter: Organism Value: A. thaliana
  misc_feature: MA Experiment 20001248 PARAMETER Experiment Name: At_Far-red-induction_P Parameter: Plant Line Value: Columbia
  misc_feature: MA Experiment 20001248 PARAMETER Experiment Name: At_Far-red-induction_P Parameter: Timepoint (hr) Value: 4
  misc_feature: MA Experiment 20001248 PARAMETER Experiment Name: At_Far-red-induction_P Parameter: Tissue Value: Whole Plant
  misc_feature: MA Experiment ID: 20001558 Result: Down-regulated in Transcription
  misc_feature: MA Experiment 20001558 PARAMETER Experiment Name: At_Drought_Soil_Dry_P Parameter: Age (day) Value: 27
  misc_feature: MA Experiment 20001558 PARAMETER Experiment Name: At_Drought_Soil_Dry_P Parameter: Organism Value: A. thaliana
  misc_feature: MA Experiment 20001558 PARAMETER Experiment Name: At_Drought_Soil_Dry_P Parameter: Plant Line Value: WS
  misc_feature: MA Experiment 20001558 PARAMETER Experiment Name: At_Drought_Soil_Dry_P Parameter: Post Timepoint (hr) Value: 6
  misc_feature: MA Experiment 20001558 PARAMETER Experiment Name: At_Drought_Soil_Dry_P Parameter: Post-Treatment Value: Re-Water vs. No Drought
  misc_feature: MA Experiment 20001558 PARAMETER Experiment Name: At_Drought_Soil_Dry_P Parameter: Timepoint (day) Value: 13
  misc_feature: MA Experiment 20001558 PARAMETER Experiment Name: At_Drought_Soil_Dry_P Parameter: Treatment Value: Drought vs. No Drought
atggcttctccctcttcctcctctctctctccgccttcctcgtcgagatccgcgtcgagacttctccgtttcttctctctcatttcagctccagggatattactaggagctgtgacacttccttctgttatgatatctaagttagttcagctttcaagagctatttcaatccatgaagctgaacaagatgagcttgcacatgtgacaatgcagtattgggcagcatcggctagttgttgtgctatacttatatatctatcagtgattatgtcacaagtgagaaaagatgaatctttgtcgtcatcgtctatttggcttacgagagttagcttgactgggacagtgttgtatggagtagcatgttttgtttcactttccatgatttcacacactggcttgaatacgtcattgaaaatgttgtggatgttatttcatggacttgcagctgtgaagttgattcgacatttgctttgcactttcccatcgtgtgcttcgataggggaagcacttcttgtgaccagtggtcttgttctctattttggcgactttttggcatgcacaattgcaaagatttttgagaaattgatacctgtggatcttgtctcaataagctatggaataaagagaacggaaaccggcataatcgttcagggtctactgttgggccttctacttttcccgatggtgtttagatttgttctgcatatatatgaaagctctttgagaaagagagatgctcgacaaagaaactgcagtgatgctgcaaaatctgtcttattctttgtttcacttctattttttatggtcgtggctgttccttcttggatgcagtttgtacacgatttcaaccagcatcccttcttatgggtgctcacatttgtcttttctgaacctctgaagagactttcattatgtatctactggattctgttgatcgttgtgtctgtctcacgattttataacatctcgaggagtagcaaggttgagagaatcttgcttcggaagtactaccatctgatggctgttttaatgttcttgccagctcttgtcttacagcctaaatttctcgatctagcatttggtgcagcattggcagtatttgttgcattggagatcattcgaatatggagaattcagcctcttggagagcctttacatcaattcatgaatgctttcactgaccatcgtgactcagagcatctgattgtcagccacttctcactcttgcttgggtgtgcgcttccgatttggatgtcatctgggttcaatgaccgagccttatctccatttgctggaattctcagcctaggaattggagatacaatggcatcgatggttggtcacaaatatggggtgttgagatggagcaagacaggaaagaaaacggttgaaggaacagcagcgggaataacatcgatgatggcagtgtgctttgttctggtcccaatattagcatcaatgggttatatactaagtcaaggatggtggtcgcttctggtggctgtgacagccaccgggatgttggaagcttacacggcgcagttagacaatgcctttatacctcttgtcttctactcactcctctgcttgtaa

SEQ ID NO: 86416 - protein, 530 aa, Arabidopsis thaliana
  peptide (1)..(530): Ceres Seq. ID no. 12690400
  misc_feature (29)..(530): Homolog of NCBI NO: 22331608 NR Description: putative protein; protein id: At3g45040.1,
  misc_feature (29)..(530): Homolog of NCBI NO: 18389248 NR Description: unknown protein [Arabidopsis thaliana]
  misc_feature (29)..(375): Homolog of NCBI NO: 11357412 NR Description: hypothetical protein F14D17.110 - Arabidopsis >gi|7671405|emb|CAB89319.1| putative protein [Arabidopsis
  misc_feature (374)..(530): Homolog of NCBI NO: 11357412 NR Description: hypothetical protein F14D17.110 - Arabidopsis >gi|7671405|emb|CAB89319.1| putative protein [Arabidopsis
  misc_feature (165)..(528): Homolog of NCBI NO: 7662482 NR Description: KIAA1094 protein [Homo sapiens] Hypothetical protein KIAA1094 >gi|5689525|dbj|BAA83046.1| protein [Homo sapiens] >gi|23272297|gb|AAH35556.1| KIAA1094
  misc_feature (165)..(528): Homolog of NCBI NO: 40789043 NR Description: KIAA1094 protein [Homo sapiens]
  misc_feature (89)..(528): Homolog of NCBI NO: 27706618 NR Description: similar to Hypothetical protein KIAA1094 [Rattus
  misc_feature (89)..(528): Homolog of NCBI NO: 29244058 NR Description: cDNA sequence BC026973 [Mus musculus]
  misc_feature (286)..(530): Homolog of NCBI NO: 24654201 NR Description: CG8311-PA [Drosophila melanogaster]
  misc_feature (258)..(527): Homolog of NCBI NO: 19075483 NR Description: putative dolichol kinase [Schizosaccharomyces
MASPSSSSLSPPSSSRSASRLLRFFSLISAPGILLGAVTLPSVMISKLVQLSRAISIHEAEQDELAHVTMQYWAASASCCAILIYLSVIMSQVRKDESLSSSSIWLTRVSLTGTVLYGVACFVSLSMISHTGLNTSLKMLWMLFHGLAAVKLIRHLLCTFPSCASIGEALLVTSGLVLYFGDFLACTIAKIFEKLIPVDLVSISYGIKRTETGIIVQGLLLGLLLFPMVFRFVLHIYESSLRKRDARQRNCSDAAKSVLFFVSLLFFMVVAVPSWMQFVHDFNQHPFLWVLTFVFSEPLKRLSLCIYWILLIVVSVSRFYNISRSSKVERILLRKYYHLMAVLMFLPALVLQPKFLDLAFGAALAVFVALEIIRIWRIQPLGEPLHQFMNAFTDHRDSEHLIVSHFSLLLGCALPIWMSSGFNDRALSPFAGILSLGIGDTMASMVGHKYGVLRWSKTGKKTVEGTAAGITSMMAVCFVLVPILASMGYILSQGWWSLLVAVTATGMLEAYTAQLDNAFIPLVFYSLLCL

SEQ ID NO: 86417 - protein, 487 aa, Arabidopsis thaliana
  peptide (1)..(487): Ceres Seq. ID no. 12690401
  misc_feature (1)..(487): Homolog of NCBI NO: 22331608 NR Description: putative protein; protein id: At3g45040.1,
  misc_feature (1)..(487): Homolog of NCBI NO: 18389248 NR Description: unknown protein [Arabidopsis thaliana]
  misc_feature (1)..(332): Homolog of NCBI NO: 11357412 NR Description: hypothetical protein F14D17.110 - Arabidopsis >gi|7671405|emb|CAB89319.1| putative protein [Arabidopsis
  misc_feature (331)..(487): Homolog of NCBI NO: 11357412 NR Description: hypothetical protein F14D17.110 - Arabidopsis >gi|7671405|emb|CAB89319.1| putative protein [Arabidopsis
  misc_feature (122)..(485): Homolog of NCBI NO: 7662482 NR Description: KIAA1094 protein [Homo sapiens] Hypothetical protein KIAA1094 >gi|5689525|dbj|BAA83046.1| protein [Homo sapiens] >gi|23272297|gb|AAH35556.1| KIAA1094
  misc_feature (122)..(485): Homolog of NCBI NO: 40789043 NR Description: KIAA1094 protein [Homo sapiens]
  misc_feature (46)..(485): Homolog of NCBI NO: 27706618 NR Description: similar to Hypothetical protein KIAA1094 [Rattus
  misc_feature (46)..(485): Homolog of NCBI NO: 29244058 NR Description: cDNA sequence BC026973 [Mus musculus]
  misc_feature (243)..(487): Homolog of NCBI NO: 24654201 NR Description: CG8311-PA [Drosophila melanogaster]
  misc_feature (215)..(484): Homolog of NCBI NO: 19075483 NR Description: putative dolichol kinase [Schizosaccharomyces
MISKLVQLSRAISIHEAEQDELAHVTMQYWAASASCCAILIYLSVIMSQVRKDESLSSSSIWLTRVSLTGTVLYGVACFVSLSMISHTGLNTSLKMLWMLFHGLAAVKLIRHLLCTFPSCASIGEALLVTSGLVLYFGDFLACTIAKIFEKLIPVDLVSISYGIKRTETGIIVQGLLLGLLLFPMVFRFVLHIYESSLRKRDARQRNCSDAAKSVLFFVSLLFFMVVAVPSWMQFVHDFNQHPFLWVLTFVFSEPLKRLSLCIYWILLIVVSVSRFYNISRSSKVERILLRKYYHLMAVLMFLPALVLQPKFLDLAFGAALAVFVALEIIRIWRIQPLGEPLHQFMNAFTDHRDSEHLIVSHFSLLLGCALPIWMSSGFNDRALSPFAGILSLGIGDTMASMVGHKYGVLRWSKTGKKTVEGTAAGITSMMAVCFVLVPILASMGYILSQGWWSLLVAVTATGMLEAYTAQLDNAFIPLVFYSLLCL

SEQ ID NO: 86418 - protein, 461 aa, Arabidopsis thaliana
  peptide (1)..(461): Ceres Seq. ID no. 12690402
  misc_feature (1)..(461): Homolog of NCBI NO: 22331608 NR Description: putative protein; protein id: At3g45040.1,
  misc_feature (1)..(461): Homolog of NCBI NO: 18389248 NR Description: unknown protein [Arabidopsis thaliana]
  misc_feature (1)..(306): Homolog of NCBI NO: 11357412 NR Description: hypothetical protein F14D17.110 - Arabidopsis >gi|7671405|emb|CAB89319.1| putative protein [Arabidopsis
  misc_feature (305)..(461): Homolog of NCBI NO: 11357412 NR Description: hypothetical protein F14D17.110 - Arabidopsis >gi|7671405|emb|CAB89319.1| putative protein [Arabidopsis
  misc_feature (96)..(459): Homolog of NCBI NO: 7662482 NR Description: KIAA1094 protein [Homo sapiens] Hypothetical protein KIAA1094 >gi|5689525|dbj|BAA83046.1| protein [Homo sapiens] >gi|23272297|gb|AAH35556.1| KIAA1094
  misc_feature (96)..(459): Homolog of NCBI NO: 40789043 NR Description: KIAA1094 protein [Homo sapiens]
  misc_feature (20)..(459): Homolog of NCBI NO: 27706618 NR Description: similar to Hypothetical protein KIAA1094 [Rattus
  misc_feature (20)..(459): Homolog of NCBI NO: 29244058 NR Description: cDNA sequence BC026973 [Mus musculus]
  misc_feature (217)..(461): Homolog of NCBI NO: 24654201 NR Description: CG8311-PA [Drosophila melanogaster]
  misc_feature (189)..(458): Homolog of NCBI NO: 19075483 NR Description: putative dolichol kinase [Schizosaccharomyces
MQYWAASASCCAILIYLSVIMSQVRKDESLSSSSIWLTRVSLTGTVLYGVACFVSLSMISHTGLNTSLKMLWMLFHGLAAVKLIRHLLCTFPSCASIGEALLVTSGLVLYFGDFLACTIAKIFEKLIPVDLVSISYGIKRTETGIIVQGLLLGLLLFPMVFRFVLHIYESSLRKRDARQRNCSDAAKSVLFFVSLLFFMVVAVPSWMQFVHDFNQHPFLWVLTFVFSEPLKRLSLCIYWILLIVVSVSRFYNISRSSKVERILLRKYYHLMAVLMFLPALVLQPKFLDLAFGAALAVFVALEIIRIWRIQPLGEPLHQFMNAFTDHRDSEHLIVSHFSLLLGCALPIWMSSGFNDRALSPFAGILSLGIGDTMASMVGHKYGVLRWSKTGKKTVEGTAAGITSMMAVCFVLVPILASMGYILSQGWWSLLVAVTATGMLEAYTAQLDNAFIPLVFYSLLCL

SEQ ID NO: 86419 - DNA, 1422 bp, Arabidopsis thaliana
  misc_feature (1)..(1422): Ceres Seq. ID no. 12690497
  misc_feature: MA Experiment ID: 20000185 Result: Up-regulated in Transcription
  misc_feature: MA Experiment 20000185 PARAMETER Experiment Name: At_Roots__P Parameter: Age (day) Value: 7 vs. 21
  misc_feature: MA Experiment 20000185 PARAMETER Experiment Name: At_Roots__P Parameter: Organism Value: A. thaliana
  misc_feature: MA Experiment 20000185 PARAMETER Experiment Name: At_Roots__P Parameter: Tissue Value: Roots vs. Whole Plant
  misc_feature: MA Experiment ID: 20000227 Result: Down-regulated in Transcription
  misc_feature: MA Experiment 20000227 PARAMETER Experiment Name: At_Root-Tips-vs-Tops_P Parameter: Tissue Value: Root Tips vs. Root Tops
  misc_feature: MA Experiment ID: 20000439 Result: Up-regulated in Transcription
  misc_feature: MA Experiment 20000439 PARAMETER Experiment Name: At_Roots__P Parameter: Age (day) Value: 14 vs. 21
  misc_feature: MA Experiment 20000439 PARAMETER Experiment Name: At_Roots__P Parameter: Organism Value: A. thaliana
  misc_feature: MA Experiment 20000439 PARAMETER Experiment Name: At_Roots__P Parameter: Tissue Value: Roots vs. Whole Plant
  misc_feature: MA Experiment ID: 20001248 Result: Down-regulated in Transcription
  misc_feature: MA Experiment 20001248 PARAMETER Experiment Name: At_Far-red-induction_P Parameter: Age (day) Value: 7
  misc_feature: MA Experiment 20001248 PARAMETER Experiment Name: At_Far-red-induction_P Parameter: Light Value: Far-red vs. White
  misc_feature: MA Experiment 20001248 PARAMETER Experiment Name: At_Far-red-induction_P Parameter: Organism Value: A. thaliana
  misc_feature: MA Experiment 20001248 PARAMETER Experiment Name: At_Far-red-induction_P Parameter: Plant Line Value: Columbia
  misc_feature: MA Experiment 20001248 PARAMETER Experiment Name: At_Far-red-induction_P Parameter: Timepoint (hr) Value: 4
  misc_feature: MA Experiment 20001248 PARAMETER Experiment Name: At_Far-red-induction_P Parameter: Tissue Value: Whole Plant
  misc_feature: MA Experiment ID: 20001451 Result: Down-regulated in Transcription
  misc_feature: MA Experiment 20001451 PARAMETER Experiment Name: At_Far-red-induction_P Parameter: Age (day) Value: 7
  misc_feature: MA Experiment 20001451 PARAMETER Experiment Name: At_Far-red-induction_P Parameter: Light Value: Far-red vs. White
  misc_feature: MA Experiment 20001451 PARAMETER Experiment Name: At_Far-red-induction_P Parameter: Organism Value: A. thaliana
  misc_feature: MA Experiment 20001451 PARAMETER Experiment Name: At_Far-red-induction_P Parameter: Plant Line Value: Columbia
  misc_feature: MA Experiment 20001451 PARAMETER Experiment Name: At_Far-red-induction_P Parameter: Timepoint (hr) Value: 24
  misc_feature: MA Experiment 20001451 PARAMETER Experiment Name: At_Far-red-induction_P Parameter: Tissue Value: Whole Plant
atggctcgttcagtcgacacagaagcaatgaccactcgcgatccaagcagcaagcgcggtggctggaaaacgtttccattcatgatcgctacattgttaggactttccatagcttcattcggatgggtgatgaacttggtcgtcttcctaattaaagaattcaacatcaagagcatcgctgctacgcagaattctaatattgttaatggatgtgtgagcatgttgcctgttgttgcagccattctagctgattcttttttcggaaacattcccgtcatctccgtctctgccttcatttctttgcttggcatcattctattgaccatgattacatctttggaccacttgagacctccaccgtgtgaaacagggtcaattctatgcgaatcgccatcaaaactccagctcgggatcttgtatatagccttagctctagtgatcattggatcagctggtacgcggtttaccttagcatccgcgggtgcaaaccaatatgagaaacctaaagaacaaggaagctttttcaactggtacttcctcacactctacactggagctattactggtgcaacagcaattgtatatacacaggaaaatgctagctggaaacttgggttcggtctttgcgccgtcgctaatttgatcagtttcatagttttcgtctctggcaagagatactacaagcatgacaaaccaatgggaagtcccttcacaaatctgatccgcgttgtagtcgctgctacaagaaaaaggaaagctgtgatttcatctagagaagaagactatcaccatgggcttggaagagaaggcaagacatcttctgcaatgccctccaagagctttaggttctttaaccgtgcagcattgaaaaccgaagatgactcagttaataacaactggaggctatgttctgttcaagaagtagaagattttaaagccgttttccgagttctccctctgttactagccatcatcttcgttagtactcccatggtgacgcaaacaagcttgattatattacaagctctagtcacagaccgcggtctcgggcctcacttcaaaatcccggccgggtccctccaagtcatagtaatcatcactgcatgtattgttatcttaatgaacaattgccttgtctatcccatgtaccagaagctagcccataagccattgacaccgcttcaaaaagtcggtataggccacgttttcatcattttaagcatggcgatatccgccattgtggaagcaaagaggctgaaaacagttactaatggccattccatgtcagtgctatggctggttcctccccttgtgatagtaggaataggagaaacgttccaatttccggcgaatattgaattattctatagagaattccccgagtctctgagtagcaccgcgacttcattgcctcagtggtga

SEQ ID NO: 86420 - protein, 473 aa, Arabidopsis thaliana
  peptide (1)..(473): Ceres Seq. ID no. 12690498
  misc_feature (90)..(446): Pfam Name: POT family Pfam Description: POT family
  misc_feature (1)..(446): Homolog of NCBI NO: 15231216 NR Description: putative transporter protein; protein id:
  misc_feature (4)..(470): Homolog of NCBI NO: 15231215 NR Description: putative transporter protein; protein id:
  misc_feature (4)..(470): Homolog of NCBI NO: 26450397 NR Description: putative transporter protein [Arabidopsis
  misc_feature (2)..(470): Homolog of NCBI NO: 30692629 NR Description: transporter protein -related [Arabidopsis
  misc_feature (2)..(470): Homolog of NCBI NO: 11358696 NR Description: probable transporter protein - Arabidopsis >gi|7019637|emb|CAB75784.1| putative transporter protein
  misc_feature (16)..(470): Homolog of NCBI NO: 15231217 NR Description: putative transporter protein; protein id:
  misc_feature (16)..(470): Homolog of NCBI NO: 26449486 NR Description: putative transporter protein [Arabidopsis
  misc_feature (4)..(470): Homolog of NCBI NO: 15231221 NR Description: putative transporter protein; protein id:
  misc_feature (1)..(470): Homolog of NCBI NO: 15231199 NR Description: putative protein; protein id: At3g45650.1
  misc_feature (4)..(470): Homolog of NCBI NO: 15231202 NR Description: putative protein; protein id: At3g45660.1
MARSVDTEAMTTRDPSSKRGGWKTFPFMIATLLGLSIASFGWVMNLVVFLIKEFNIKSIAATQNSNIVNGCVSMLPVVAAILADSFFGNIPVISVSAFISLLGIILLTMITSLDHLRPPPCETGSILCESPSKLQLGILYIALALVIIGSAGTRFTLASAGANQYEKPKEQGSFFNWYFLTLYTGAITGATAIVYTQENASWKLGFGLCAVANLISFIVFVSGKRYYKHDKPMGSPFTNLIRVVVAATRKRKAVISSREEDYHHGLGREGKTSSAMPSKSFRFFNRAALKTEDDSVNNNWRLCSVQEVEDFKAVFRVLPLLLAIIFVSTPMVTQTSLIILQALVTDRGLGPHFKIPAGSLQVIVIITACIVILMNNCLVYPMYQKLAHKPLTPLQKVGIGHVFIILSMAISAIVEAKRLKTVTNGHSMSVLWLVPPLVIVGIGETFQFPANIELFYREFPESLSSTATSLPQW

SEQ ID NO: 86421 - protein, 464 aa, Arabidopsis thaliana
  peptide (1)..(464): Ceres Seq. ID no. 12690499
  misc_feature (81)..(437): Pfam Name: POT family Pfam Description: POT family
  misc_feature (1)..(437): Homolog of NCBI NO: 15231216 NR Description: putative transporter protein; protein id:
  misc_feature (1)..(461): Homolog of NCBI NO: 15231215 NR Description: putative transporter protein; protein id:
  misc_feature (1)..(461): Homolog of NCBI NO: 26450397 NR Description: putative transporter protein [Arabidopsis
  misc_feature (1)..(461): Homolog of NCBI NO: 30692629 NR Description: transporter protein -related [Arabidopsis
  misc_feature (1)..(461): Homolog of NCBI NO: 11358696 NR Description: probable transporter protein - Arabidopsis >gi|7019637|emb|CAB75784.1| putative transporter protein
  misc_feature (7)..(461): Homolog of NCBI NO: 15231217 NR Description: putative transporter protein; protein id:
  misc_feature (7)..(461): Homolog of NCBI NO: 26449486 NR Description: putative transporter protein [Arabidopsis
  misc_feature (1)..(461): Homolog of NCBI NO: 15231221 NR Description: putative transporter protein; protein id:
  misc_feature (1)..(461): Homolog of NCBI NO: 15231199 NR Description: putative protein; protein id: At3g45650.1
  misc_feature (1)..(461): Homolog of NCBI NO: 15231202 NR Description: putative protein; protein id: At3g45660.1
MTTRDPSSKRGGWKTFPFMIATLLGLSIASFGWVMNLVVFLIKEFNIKSIAATQNSNIVNGCVSMLPVVAAILADSFFGNIPVISVSAFISLLGIILLTMITSLDHLRPPPCETGSILCESPSKLQLGILYIALALVIIGSAGTRFTLASAGANQYEKPKEQGSFFNWYFLTLYTGAITGATAIVYTQENASWKLGFGLCAVANLISFIVFVSGKRYYKHDKPMGSPFTNLIRVVVAATRKRKAVISSREEDYHHGLGREGKTSSAMPSKSFRFFNRAALKTEDDSVNNNWRLCSVQEVEDFKAVFRVLPLLLAIIFVSTPMVTQTSLIILQALVTDRGLGPHFKIPAGSLQVIVIITACIVILMNNCLVYPMYQKLAHKPLTPLQKVGIGHVFIILSMAISAIVEAKRLKTVTNGHSMSVLWLVPPLVIVGIGETFQFPANIELFYREFPESLSSTATSLPQW

SEQ ID NO: 86422 - protein, 446 aa, Arabidopsis thaliana
  peptide (1)..(446): Ceres Seq. ID no. 12690500
  misc_feature (63)..(419): Pfam Name: POT family Pfam Description: POT family
  misc_feature (1)..(419): Homolog of NCBI NO: 15231216 NR Description: putative transporter protein; protein id:
  misc_feature (1)..(443): Homolog of NCBI NO: 15231215 NR Description: putative transporter protein; protein id:
  misc_feature (1)..(443): Homolog of NCBI NO: 26450397 NR Description: putative transporter protein [Arabidopsis
  misc_feature (1)..(443): Homolog of NCBI NO: 30692629 NR Description: transporter protein -related [Arabidopsis
  misc_feature (1)..(443): Homolog of NCBI NO: 11358696 NR Description: probable transporter protein - Arabidopsis >gi|7019637|emb|CAB75784.1| putative transporter protein
  misc_feature (1)..(443): Homolog of NCBI NO: 15231217 NR Description: putative transporter protein; protein id:
  misc_feature (1)..(443): Homolog of NCBI NO: 26449486 NR Description: putative transporter protein [Arabidopsis
  misc_feature (1)..(443): Homolog of NCBI NO: 15231221 NR Description: putative transporter protein; protein id:
  misc_feature (1)..(443): Homolog of NCBI NO: 15231199 NR Description: putative protein; protein id: At3g45650.1
  misc_feature (1)..(443): Homolog of NCBI NO: 15231202 NR Description: putative protein; protein id: At3g45660.1
MIATLLGLSIASFGWVMNLVVFLIKEFNIKSIAATQNSNIVNGCVSMLPVVAAILADSFFGNIPVISVSAFISLLGIILLTMITSLDHLRPPPCETGSILCESPSKLQLGILYIALALVIIGSAGTRFTLASAGANQYEKPKEQGSFFNWYFLTLYTGAITGATAIVYTQENASWKLGFGLCAVANLISFIVFVSGKRYYKHDKPMGSPFTNLIRVVVAATRKRKAVISSREEDYHHGLGREGKTSSAMPSKSFRFFNRAALKTEDDSVNNNWRLCSVQEVEDFKAVFRVLPLLLAIIFVSTPMVTQTSLIILQALVTDRGLGPHFKIPAGSLQVIVIITACIVILMNNCLVYPMYQKLAHKPLTPLQKVGIGHVFIILSMAISAIVEAKRLKTVTNGHSMSVLWLVPPLVIVGIGETFQFPANIELFYREFPESLSSTATSLPQW

SEQ ID NO: 86423 - DNA, 1347 bp, Arabidopsis thaliana
  misc_feature (1)..(1347): Ceres Seq. ID no. 12690501
  misc_feature: MA Experiment ID: 20000184 Result: Up-regulated in Transcription
  misc_feature: MA Experiment 20000184 PARAMETER Experiment Name: At_Shoots__P Parameter: Age (day) Value: 7
  misc_feature: MA Experiment 20000184 PARAMETER Experiment Name: At_Shoots__P Parameter: Tissue Value: Shoots vs. Whole Plant
  misc_feature: MA Experiment ID: 20000185 Result: Up-regulated in Transcription
  misc_feature: MA Experiment 20000185 PARAMETER Experiment Name: At_Roots__P Parameter: Age (day) Value: 7 vs. 21
  misc_feature: MA Experiment 20000185 PARAMETER Experiment Name: At_Roots__P Parameter: Organism Value: A. thaliana
  misc_feature: MA Experiment 20000185 PARAMETER Experiment Name: At_Roots__P Parameter: Tissue Value: Roots vs. Whole Plant
  misc_feature: MA Experiment ID: 20000227 Result: Down-regulated in Transcription
  misc_feature: MA Experiment 20000227 PARAMETER Experiment Name: At_Root-Tips-vs-Tops_P Parameter: Tissue Value: Root Tips vs. Root Tops
  misc_feature: MA Experiment ID: 20000437 Result: Down-regulated in Transcription
  misc_feature: MA Experiment 20000437 PARAMETER Experiment Name: At_Drought_P Parameter: Age (day) Value: 8
  misc_feature: MA Experiment 20000437 PARAMETER Experiment Name: At_Drought_P Parameter: Organism Value: A. thaliana
  misc_feature: MA Experiment 20000437 PARAMETER Experiment Name: At_Drought_P Parameter: Plant Line Value: WS
  misc_feature: MA Experiment 20000437 PARAMETER Experiment Name: At_Drought_P Parameter: Timepoint (hr) Value: 24
  misc_feature: MA Experiment 20000437 PARAMETER Experiment Name: At_Drought_P Parameter: Tissue Value: Whole Plant
  misc_feature: MA Experiment 20000437 PARAMETER Experiment Name: At_Drought_P Parameter: Treatment Value: Drought vs. No Drought
  misc_feature: MA Experiment ID: 20000439 Result: Up-regulated in Transcription
  misc_feature: MA Experiment 20000439 PARAMETER Experiment Name: At_Roots__P Parameter: Age (day) Value: 14 vs. 21
  misc_feature: MA Experiment 20000439 PARAMETER Experiment Name: At_Roots__P Parameter: Organism Value: A. thaliana
  misc_feature: MA Experiment 20000439 PARAMETER Experiment Name: At_Roots__P Parameter: Tissue Value: Roots vs. Whole Plant
atggctgattcaaaatctggtgacacggaagtagcgcatcgctctagcgatccaagcgaaaagcgtggtggctggatcactttaccgttcatgctagccttagctctagtgatcattggatcagctgggacgcggttcaccttggcagccgcgggtgcgaaccaatataagaagcctaaagaacaaggaagattcttcaactggttcttccttgcactgtatattggagctattactggcacgacagcgattgtatatacacaagacaatgctagctggaaacttgggttcggtctatgtgccgttgctaacttgatcagtttcatcgttttcatcgccggggttagattctacaagcatgacaaacccttgggaagtccttatacaagcctgatccgtgttttagttgctgctacaatgaaaagaaaggcagtgatttcatcaaaagacgaagactatcatcaatatggtctcgggaaagaggccaagacttatactacaatgccctccaagagctttaggttcttgaaccgtgcagcattaaagaacaaagaagatttaaacacgagtggtgactcaagtaataacatgtggaggctatgctctgttcaggaagtagaagacttcaaagccattctccgacttgtacctctctgggcagccgtcatgttcctcagcactcccgtggcagtacaaatgagcatgacggttctccaagctttggtcatggaccgcaaacttagcccgcacttcgaagtctctgccgggtctctacaagtcatagtactcgtctttggttgtgtctttatcatgctcaacaactggatcatctatcccatgtaccaaaagctaatcggcaaaccactgacaccacttcaacaagttgggatcggtcacgttttcaccatcctaagcatggcgatatcagctgttgtggaagcaaagagactgaaaacagttgaaaatggaggccatcccatgtcagtgctatggctagttcctgctcttgtgatggttggaataggcgaggcgtttcattttcccgcgaatgttgcagtattctatggagaattccctgagtctctgaagaacaccgcaacttcattgacctcagtggtgattggaatctctttctatctgagcacagctgttatcgacgtgatccaaagaaccacctcgtggttaccaaatgacataaaccatggaagagttgacaatgtttactgggttgtagtcataggaggagtcttgaatctcggctatttccttgtctgctcttggttttacaaatacagaaacctcaaggatgatgatcatgaacaagatcctaaagatgttaaaacctag

SEQ ID NO: 86424 - protein, 448 aa, Arabidopsis thaliana
  peptide (1)..(448): Ceres Seq. ID no. 12690502
  misc_feature (32)..(374): Pfam Name: POT family Pfam Description: POT family
  misc_feature (32)..(448): Homolog of NCBI NO: 11358696 NR Description: probable transporter protein - Arabidopsis >gi|7019637|emb|CAB75784.1| putative transporter protein
  misc_feature (1)..(40): Homolog of NCBI NO: 11358696 NR Description: probable transporter protein - Arabidopsis >gi|7019637|emb|CAB75784.1| putative transporter protein
  misc_feature (32)..(448): Homolog of NCBI NO: 30692629 NR Description: transporter protein -related [Arabidopsis
  misc_feature (1)..(46): Homolog of NCBI NO: 30692629 NR Description: transporter protein -related [Arabidopsis
  misc_feature (33)..(446): Homolog of NCBI NO: 15231217 NR Description: putative transporter protein; protein id:
  misc_feature (33)..(446): Homolog of NCBI NO: 26449486 NR Description: putative transporter protein [Arabidopsis
  misc_feature (33)..(445): Homolog of NCBI NO: 15231215 NR Description: putative transporter protein; protein id:
  misc_feature (33)..(445): Homolog of NCBI NO: 26450397 NR Description: putative transporter protein [Arabidopsis
  misc_feature (1)..(46): Homolog of NCBI NO: 15231215 NR Description: putative transporter protein; protein id:
  misc_feature (1)..(46): Homolog of NCBI NO: 26450397 NR Description: putative transporter protein [Arabidopsis
MADSKSGDTEVAHRSSDPSEKRGGWITLPFMLALALVIIGSAGTRFTLAAAGANQYKKPKEQGRFFNWFFLALYIGAITGTTAIVYTQDNASWKLGFGLCAVANLISFIVFIAGVRFYKHDKPLGSPYTSLIRVLVAATMKRKAVISSKDEDYHQYGLGKEAKTYTTMPSKSFRFLNRAALKNKEDLNTSGDSSNNMWRLCSVQEVEDFKAILRLVPLWAAVMFLSTPVAVQMSMTVLQALVMDRKLSPHFEVSAGSLQVIVLVFGCVFIMLNNWIIYPMYQKLIGKPLTPLQQVGIGHVFTILSMAISAVVEAKRLKTVENGGHPMSVLWLVPALVMVGIGEAFHFPANVAVFYGEFPESLKNTATSLTSVVIGISFYLSTAVIDVIQRTTSWLPNDINHGRVDNVYWVVVIGGVLNLGYFLVCSWFYKYRNLKDDDHEQDPKDVKT

SEQ ID NO: 86425 - protein, 418 aa, Arabidopsis thaliana
  peptide (1)..(418): Ceres Seq. ID no. 12690503
  misc_feature (2)..(344): Pfam Name: POT family Pfam Description: POT family
  misc_feature (2)..(418): Homolog of NCBI NO: 11358696 NR Description: probable transporter protein - Arabidopsis >gi|7019637|emb|CAB75784.1| putative transporter protein
  misc_feature (2)..(418): Homolog of NCBI NO: 30692629 NR Description: transporter protein -related [Arabidopsis
  misc_feature (1)..(16): Homolog of NCBI NO: 30692629 NR Description: transporter protein -related [Arabidopsis
  misc_feature (3)..(416): Homolog of NCBI NO: 15231217 NR Description: putative transporter protein; protein id:
  misc_feature (3)..(416): Homolog of NCBI NO: 26449486 NR Description: putative transporter protein [Arabidopsis
  misc_feature (3)..(415): Homolog of NCBI NO: 15231215 NR Description: putative transporter protein; protein id:
  misc_feature (3)..(415): Homolog of NCBI NO: 26450397 NR Description: putative transporter protein [Arabidopsis
  misc_feature (1)..(16): Homolog of NCBI NO: 15231215 NR Description: putative transporter protein; protein id:
  misc_feature (1)..(16): Homolog of NCBI NO: 26450397 NR Description: putative transporter protein [Arabidopsis
  misc_feature (3)..(416): Homolog of NCBI NO: 15231221 NR Description: putative transporter protein; protein id:
MLALALVIIGSAGTRFTLAAAGANQYKKPKEQGRFFNWFFLALYIGAITGTTAIVYTQDNASWKLGFGLCAVANLISFIVFIAGVRFYKHDKPLGSPYTSLIRVLVAATMKRKAVISSKDEDYHQYGLGKEAKTYTTMPSKSFRFLNRAALKNKEDLNTSGDSSNNMWRLCSVQEVEDFKAILRLVPLWAAVMFLSTPVAVQMSMTVLQALVMDRKLSPHFEVSAGSLQVIVLVFGCVFIMLNNWIIYPMYQKLIGKPLTPLQQVGIGHVFTILSMAISAVVEAKRLKTVENGGHPMSVLWLVPALVMVGIGEAFHFPANVAVFYGEFPESLKNTATSLTSVVIGISFYLSTAVIDVIQRTTSWLPNDINHGRVDNVYWVVVIGGVLNLGYFLVCSWFYKYRNLKDDDHEQDPKDVKT

SEQ ID NO: 86426 - protein, 309 aa, Arabidopsis thaliana
  peptide (1)..(309): Ceres Seq. ID no. 12690504
  misc_feature (1)..(235): Pfam Name: POT family Pfam Description: POT family
  misc_feature (1)..(309): Homolog of NCBI NO: 11358696 NR Description: probable transporter protein - Arabidopsis >gi|7019637|emb|CAB75784.1| putative transporter protein
  misc_feature (1)..(309): Homolog of NCBI NO: 30692629 NR Description: transporter protein -related [Arabidopsis
  misc_feature (1)..(307): Homolog of NCBI NO: 15231217 NR Description: putative transporter protein; protein id:
  misc_feature (1)..(307): Homolog of NCBI NO: 26449486 NR Description: putative transporter protein [Arabidopsis
  misc_feature (1)..(306): Homolog of NCBI NO: 15231215 NR Description: putative transporter protein; protein id:
  misc_feature (1)..(306): Homolog of NCBI NO: 26450397 NR Description: putative transporter protein [Arabidopsis
  misc_feature (1)..(307): Homolog of NCBI NO: 15231221 NR Description: putative transporter protein; protein id:
  misc_feature (1)..(202): Homolog of NCBI NO: 15231216 NR Description: putative transporter protein; protein id:
  misc_feature (230)..(309): Homolog of NCBI NO: 15231216 NR Description: putative transporter protein; protein id:
  misc_feature (1)..(302): Homolog of NCBI NO: 15231199 NR Description: putative protein; protein id: At3g45650.1
MKRKAVISSKDEDYHQYGLGKEAKTYTTMPSKSFRFLNRAALKNKEDLNTSGDSSNNMWRLCSVQEVEDFKAILRLVPLWAAVMFLSTPVAVQMSMTVLQALVMDRKLSPHFEVSAGSLQVIVLVFGCVFIMLNNWIIYPMYQKLIGKPLTPLQQVGIGHVFTILSMAISAVVEAKRLKTVENGGHPMSVLWLVPALVMVGIGEAFHFPANVAVFYGEFPESLKNTATSLTSVVIGISFYLSTAVIDVIQRTTSWLPNDINHGRVDNVYWVVVIGGVLNLGYFLVCSWFYKYRNLKDDDHEQDPKDVKT

SEQ ID NO: 86427 - DNA, 990 bp, Arabidopsis thaliana
  misc_feature (1)..(990): Ceres Seq. ID no. 12690508
  misc_feature: MA Experiment ID: 108488 Result: Down-regulated in Transcription
  misc_feature: MA Experiment ID: 108569 Result: Down-regulated in Transcription
  misc_feature: MA Experiment 108569 PARAMETER Experiment Name: At_0.001%_MeJA__cDNA_P Parameter: Timepoint (hr) Value: 6
  misc_feature: MA Experiment 108569 PARAMETER Experiment Name: At_0.001%_MeJA__cDNA_P Parameter: Tissue Value: Aerial
  misc_feature: MA Experiment 108569 PARAMETER Experiment Name: At_0.001%_MeJA__cDNA_P Parameter: Treatment Value: 0.001% MeJA vs. No Treatment
  misc_feature: MA Experiment ID: 20000087 Result: Up-regulated in Transcription
  misc_feature: MA Experiment 20000087 PARAMETER Experiment Name: At_100uM_ABA_Mutants_cDNA_P Parameter: Plant Line Value: WS
  misc_feature: MA Experiment 20000087 PARAMETER Experiment Name: At_100uM_ABA_Mutants_cDNA_P Parameter: Timepoint (hr) Value: 6
  misc_feature: MA Experiment 20000087 PARAMETER Experiment Name: At_100uM_ABA_Mutants_cDNA_P Parameter: Tissue Value: Aerial
  misc_feature: MA Experiment 20000087 PARAMETER Experiment Name: At_100uM_ABA_Mutants_cDNA_P Parameter: Treatment Value: 100uM ABA vs. No Treatment
  misc_feature: MA Experiment ID: 20000111 Result: Up-regulated in Transcription
  misc_feature: MA Experiment 20000111 PARAMETER Experiment Name: At_42deg_Heat_cDNA_P Parameter: Temperature (deg C) Value: 42 vs. 22
  misc_feature: MA Experiment 20000111 PARAMETER Experiment Name: At_42deg_Heat_cDNA_P Parameter: Timepoint (hr) Value: 6
  misc_feature: MA Experiment 20000111 PARAMETER Experiment Name: At_42deg_Heat_cDNA_P Parameter: Tissue Value: Aerial
  misc_feature: MA Experiment ID: 20000112 Result: Up-regulated in Transcription
  misc_feature: MA Experiment 20000112 PARAMETER Experiment Name: At_42deg_Heat_cDNA_P Parameter: Temperature (deg C) Value: 42 vs. 22
  misc_feature: MA Experiment 20000112 PARAMETER Experiment Name: At_42deg_Heat_cDNA_P Parameter: Timepoint (hr) Value: 2
  misc_feature: MA Experiment 20000112 PARAMETER Experiment Name: At_42deg_Heat_cDNA_P Parameter: Tissue Value: Aerial
  misc_feature: MA Experiment ID: 20000113 Result: Up-regulated in Transcription
  misc_feature: MA Experiment 20000113 PARAMETER Experiment Name: At_42deg_Heat_cDNA_P Parameter: Temperature (deg C) Value: 42 vs. 22
  misc_feature: MA Experiment 20000113 PARAMETER Experiment Name: At_42deg_Heat_cDNA_P Parameter: Timepoint (hr) Value: 8
  misc_feature: MA Experiment 20000113 PARAMETER Experiment Name: At_42deg_Heat_cDNA_P Parameter: Tissue Value: Aerial
atggctcgcttcgatattgttctactcataggtctttgcctcataatctctgtctttcccgatacaaccaccgcacaactaagccgcggtttctactccaaaacttgccccaatgtcgaacaaatcgtgagaaatgctgtccaaaagaaaataaagaagacattcgtcgccgtccctgccactctccgtctcttcttccacgactgctttgtcaatggttgtgatgcatctgtcatgatccaatcaacgcctaagaacaaggcagagaaggatcatccagataacatttcgctagctggagatggatttgatgtggtgatccaagctaagaaagcccttgactctaaccctagttgccggaacaaggtctcatgtgccgatattcttactttggccacccgagatgttgttgttgcggctggaggaccgtcctatgaagttgaacttggtaggttcgatggtttggtatcaaccgcgtcaagtgtcgaagggaacttaccaggaccttcggacaatgtagacaaacttaatgctcttttcacgaaaaacaaacttacccaagaagatatgattgctctttcagcggctcacacccttggattcgcacattgtggcaaggtctttaaaagaatccacaaattcaacggcatcaactccgtggacccaactttaaacaaggcttacgctattgagcttcaaaaggcttgtcctaagaatgtggacccaagaattgcaatcaacatggacccagtcacgcccaagacgtttgacaacacttacttcaagaatcttcaacaaggcaaaggtctcttcacctccgatcaagttctcttcacggatggtcgctctaggcccaccgttaatgcttgggcctcaaactctacggcctttaaccgcgcttttgtgatagccatgaccaaacttggccgtgttggagttaagaatagcagcaatggaaacatccgtcgtgattgtggtgcgtttaactag

SEQ ID NO: 86428 - protein, 329 aa, Arabidopsis thaliana; identical to SEQ ID NO: 21898
  peptide (1)..(329): Ceres Seq. ID no. 12690509
  misc_feature (43)..(293): Pfam Name: Peroxidase Pfam Description: Peroxidase
  misc_feature (1)..(329): Homolog of NCBI NO: 15229646 NR Description: peroxidase, putative; protein id: At3g49960.1 thaliana] >gi|25453201|sp|Q96510|PE35_ARATH Peroxidase 35
  misc_feature (1)..(329): Homolog of NCBI NO: 15240737 NR Description: peroxidase, putative; protein id: At5g67400.1 thaliana] >gi|26397661|sp|Q43873|PE73_ARATH Peroxidase 73 (Atperox P73) (PRXR11) (ATP10a) >gi|1402902|emb|CAA66967.1|
  misc_feature (6)..(329): Homolog of NCBI NO: 15235597 NR Description: peroxidase, putative; protein id: At4g37520.1, by cDNA: 2583., supported by cDNA: gi_17065479, supported by gi_20148496 [Arabidopsis thaliana]
  misc_feature (6)..(329): Homolog of NCBI NO: 21554605 NR Description: peroxidase, prxr2 [Arabidopsis thaliana]
  misc_feature (21)..(329): Homolog of NCBI NO: 1546708 NR Description: peroxidase ATP9a [Arabidopsis thaliana]
  misc_feature (1)..(329): Homolog of NCBI NO: 28629828 NR Description: peroxidase 1 [Artemisia annua]
  misc_feature (1)..(329): Homolog of NCBI NO: 15235600 NR Description: peroxidase, putative; protein id: At4g37530.1, by cDNA: gi_18874553 [Arabidopsis thaliana] Peroxidase 51 precursor (Atperox P51) (ATP37)
  misc_feature (1)..(329): Homolog of NCBI NO: 17979440 NR Description: putative peroxidase [Arabidopsis thaliana]
  misc_feature (1)..(325): Homolog of NCBI NO: 2117624 NR Description: peroxidase (EC 1.11.1.7) 2 precursor - alfalfa
  misc_feature (1)..(325): Homolog of NCBI NO: 4138647 NR Description: peroxidase [Trifolium repens]

SEQ ID NO: 86429 - protein, 251 aa, Arabidopsis thaliana; identical to SEQ ID NO: 21899
  peptide (1)..(251): Ceres Seq. ID no. 12690510
  misc_feature (1)..(215): Pfam Name: Peroxidase Pfam Description: Peroxidase
  misc_feature (1)..(251): Homolog of NCBI NO: 15229646 NR Description: peroxidase, putative; protein id: At3g49960.1 thaliana] >gi|25453201|sp|Q96510|PE35_ARATH Peroxidase 35
  misc_feature (1)..(251): Homolog of NCBI NO: 15240737 NR Description: peroxidase, putative; protein id: At5g67400.1 thaliana] >gi|26397661|sp|Q43873|PE73_ARATH Peroxidase 73 (Atperox P73) (PRXR11) (ATP10a) >gi|1402902|emb|CAA66967.1|
  misc_feature (1)..(251): Homolog of NCBI NO: 15235597 NR Description: peroxidase, putative; protein id: At4g37520.1, by cDNA: 2583., supported by cDNA: gi_17065479, supported by gi_20148496 [Arabidopsis thaliana]
  misc_feature (1)..(251): Homolog of NCBI NO: 21554605 NR Description: peroxidase, prxr2 [Arabidopsis thaliana]
  misc_feature (1)..(251): Homolog of NCBI NO: 1546708 NR Description: peroxidase ATP9a [Arabidopsis thaliana]
  misc_feature (1)..(251): Homolog of NCBI NO: 28629828 NR Description: peroxidase 1 [Artemisia annua]
  misc_feature (1)..(251): Homolog of NCBI NO: 15235600 NR Description: peroxidase, putative; protein id: At4g37530.1, by cDNA: gi_18874553 [Arabidopsis thaliana] Peroxidase 51 precursor (Atperox P51) (ATP37)
  misc_feature (1)..(251): Homolog of NCBI NO: 17979440 NR Description: putative peroxidase [Arabidopsis thaliana]
  misc_feature (1)..(247): Homolog of NCBI NO: 2117624 NR Description: peroxidase (EC 1.11.1.7) 2 precursor - alfalfa
  misc_feature (1)..(247): Homolog of NCBI NO: 4138647 NR Description: peroxidase [Trifolium repens]

SEQ ID NO: 86430 - DNA, 1154 bp, Arabidopsis thaliana
  misc_feature (1)..(1154): Ceres Seq. ID no. 12690530
  misc_feature: MA Experiment ID: 108462 Result: Down-regulated in Transcription
  misc_feature: MA Experiment 108462 PARAMETER Experiment Name: At_Germinating_Seeds_cDNA_P Parameter: Age (day) Value: 2 vs. 0
  misc_feature: MA Experiment 108462 PARAMETER Experiment Name: At_Germinating_Seeds_cDNA_P Parameter: Tissue Value: Germinating Seeds
  misc_feature: MA Experiment ID: 108463 Result: Down-regulated in Transcription
  misc_feature: MA Experiment 108463 PARAMETER Experiment Name: At_Germinating_Seeds_cDNA_P Parameter: Age (day) Value: 3 vs. 0
  misc_feature: MA Experiment 108463 PARAMETER Experiment Name: At_Germinating_Seeds_cDNA_P Parameter: Tissue Value: Germinating Seeds
  misc_feature: MA Experiment ID: 108464 Result: Down-regulated in Transcription
  misc_feature: MA Experiment 108464 PARAMETER Experiment Name: At_Germinating_Seeds_cDNA_P Parameter: Age (day) Value: 4 vs. 0
  misc_feature: MA Experiment 108464 PARAMETER Experiment Name: At_Germinating_Seeds_cDNA_P Parameter: Tissue Value: Germinating Seeds
  misc_feature: MA Experiment ID: 108579 Result: Up-regulated in Transcription
  misc_feature: MA Experiment 108579 PARAMETER Experiment Name: At_4deg_Cold_cDNA_P Parameter: Temperature (deg C) Value: 4 vs. 22
  misc_feature: MA Experiment 108579 PARAMETER Experiment Name: At_4deg_Cold_cDNA_P Parameter: Timepoint (hr) Value: 6
  misc_feature: MA Experiment 108579 PARAMETER Experiment Name: At_4deg_Cold_cDNA_P Parameter: Tissue Value: Aerial
aaaaggaaacacacaaaagccctaaatctctttttaacctctgaagcaaaaaccaccacatcggagatttctaatccaacgaaaacgcttcaattttcttgcgatttctcttcctctgcgaaaaacccttttggattcagactttcctcggtttaccagttggactcagatagaagcttatatctgtacctgataatttgcagcaaatatggatgactgggaggacgagaaaattgcaccacttccagcaaaagttgagcttaaaagtaactgggatgatgaagatgtggatgagaatgaaattaaggattcatgggaggatgatgatgatgaacctgctcagccgcctgttataaatcctgctccggagaaggctcctaagaaagcagcccccaaaactgttgaaaagaagggtaaagcagtcgaagttccaaaggaagcaccaaaagaaaaacctctagatcctatagcggagaaacttcgccagcagaggcttgttgaggaagccgactaccgggcaactgctgagctctttggagtgaaggatgatgacaaaaaccttgatatgtttatccccaagtctgaaagcgattttttggaatatgctgaaatgatttctcataggattaaaccatatgagaaaagttatcactatatagcgctgctcaaaacaatcatgagactttcattgaccaacatgaaagcagctgatgttaaagatgttgcttcgtccattacaacgatagcaaatgaaaaactaaaggcagagaaagaagctgctgcgggaaaaaagaaaggtggaaagaagaaacaacttattgtagataaggccaatgacgatctagtggctggtccttatgatgccatggatgacttcgacttcatgtagattaaaagagctttttgagcaaatgcaaattggatttgtccagcgtctattttatcatttatctatcactcaaaagaaacacatttttcttaattttggtttgaatagagcaagaagagccaaatttctggttgcggaaatatatagttggaacatgggaagcttttgttttggtttggtctgggaattctctagagtcatgtttttggttctatttgttggttgaaaaagctatacttaaagtgtccgtataaatttattattg

SEQ ID NO: 86431 - protein, 226 aa, Arabidopsis thaliana; identical to SEQ ID NO: 34809
  peptide (1)..(226): Ceres Seq. ID no. 12690531
  misc_feature (1)..(226): Homolog of NCBI NO: 18408426 NR Description: expressed protein; protein id: At1g66070.1, by cDNA: 20812., supported by cDNA: gi_17380827, supported by gi_20259026 [Arabidopsis thaliana] >gi|25404579|pir||C96685
  misc_feature (1)..(226): Homolog of NCBI NO: 30693092 NR Description: expressed protein [Arabidopsis thaliana] Unknown protein [Arabidopsis thaliana] Unknown protein [Arabidopsis thaliana]
  misc_feature (2)..(226): Homolog of NCBI NO: 27374242 NR Description: CG12131-PA [Drosophila erecta]
  misc_feature (22)..(226): Homolog of NCBI NO: 10435304 NR Description: unnamed protein product [Homo sapiens]
  misc_feature (2)..(226): Homolog of NCBI NO: 19921950 NR Description: CG12131-PA [Drosophila melanogaster]
  misc_feature (22)..(226): Homolog of NCBI NO: 23503065 NR Description: Eukaryotic translation initiation factor 3 eukaryotic translation initiation factor 3, subunit 1 (alpha,
  misc_feature (22)..(226): Homolog of NCBI NO: 34856798 NR Description: similar to Eukaryotic translation initiation
  misc_feature (22)..(226): Homolog of NCBI NO: 26349519 NR Description: unnamed protein product [Mus musculus]
  misc_feature (22)..(226): Homolog of NCBI NO: 4503511 NR Description: eukaryotic translation initiation factor 3,
  misc_feature (2)..(226): Homolog of NCBI NO: 27374365 NR Description: Adam-PA [Drosophila willistoni]

SEQ ID NO: 86432 - DNA, 573 bp, Arabidopsis thaliana
  misc_feature (1)..(573): Ceres Seq. ID no. 12690532
  misc_feature: MA Experiment ID: 20000171 Result: Up-regulated in Transcription
  misc_feature: MA Experiment 20000171 PARAMETER Experiment Name: At_42deg_Heat_P Parameter: Age (day) Value: 14
  misc_feature: MA Experiment 20000171 PARAMETER Experiment Name: At_42deg_Heat_P Parameter: Organism Value: A. thaliana
  misc_feature: MA Experiment 20000171 PARAMETER Experiment Name: At_42deg_Heat_P Parameter: Plant Line Value: WS
  misc_feature: MA Experiment 20000171 PARAMETER Experiment Name: At_42deg_Heat_P Parameter: Temperature (deg C) Value: 42 vs. 22
  misc_feature: MA Experiment 20000171 PARAMETER Experiment Name: At_42deg_Heat_P Parameter: Timepoint (hr) Value: 1
  misc_feature: MA Experiment 20000171 PARAMETER Experiment Name: At_42deg_Heat_P Parameter: Tissue Value: Aerial
  misc_feature: MA Experiment ID: 20000173 Result: Up-regulated in Transcription
  misc_feature: MA Experiment 20000173 PARAMETER Experiment Name: At_42deg_Heat_P Parameter: Age (day) Value: 14
  misc_feature: MA Experiment 20000173 PARAMETER Experiment Name: At_42deg_Heat_P Parameter: Organism Value: A. thaliana
  misc_feature: MA Experiment 20000173 PARAMETER Experiment Name: At_42deg_Heat_P Parameter: Plant Line Value: WS
  misc_feature: MA Experiment 20000173 PARAMETER Experiment Name: At_42deg_Heat_P Parameter: Temperature (deg C) Value: 42 vs. 22
  misc_feature: MA Experiment 20000173 PARAMETER Experiment Name: At_42deg_Heat_P Parameter: Timepoint (hr) Value: 6
  misc_feature: MA Experiment 20000173 PARAMETER Experiment Name: At_42deg_Heat_P Parameter: Tissue Value: Aerial
  misc_feature: MA Experiment ID: 20000182 Result: Up-regulated in Transcription
  misc_feature: MA Experiment 20000182 PARAMETER Experiment Name: At_2mM_SA_P Parameter: Age (day) Value: 14
  misc_feature: MA Experiment 20000182 PARAMETER Experiment Name: At_2mM_SA_P Parameter: Organism Value: A. thaliana
  misc_feature: MA Experiment 20000182 PARAMETER Experiment Name: At_2mM_SA_P Parameter: Plant Line Value: WS
  misc_feature: MA Experiment 20000182 PARAMETER Experiment Name: At_2mM_SA_P Parameter: Timepoint (hr) Value: 6
  misc_feature: MA Experiment 20000182 PARAMETER Experiment Name: At_2mM_SA_P Parameter: Tissue Value: Aerial
  misc_feature: MA Experiment 20000182 PARAMETER Experiment Name: At_2mM_SA_P Parameter: Treatment Value: 2mM SA vs. No Treatment
  misc_feature: MA Experiment ID: 20001247 Result: Down-regulated in Transcription
  misc_feature: MA Experiment 20001247 PARAMETER Experiment Name: At_Far-red-induction_P Parameter: Age (day) Value: 7
  misc_feature: MA Experiment 20001247 PARAMETER Experiment Name: At_Far-red-induction_P Parameter: Light Value: Far-red vs. White
  misc_feature: MA Experiment 20001247 PARAMETER Experiment Name: At_Far-red-induction_P Parameter: Organism Value: A. thaliana
  misc_feature: MA Experiment 20001247 PARAMETER Experiment Name: At_Far-red-induction_P Parameter: Plant Line Value: Columbia
  misc_feature: MA Experiment 20001247 PARAMETER Experiment Name: At_Far-red-induction_P Parameter: Timepoint (hr) Value: 1
  misc_feature: MA Experiment 20001247 PARAMETER Experiment Name: At_Far-red-induction_P Parameter: Tissue Value: Whole Plant
  misc_feature: MA Experiment ID: 20001248 Result: Down-regulated in Transcription
  misc_feature: MA Experiment 20001248 PARAMETER Experiment Name: At_Far-red-induction_P Parameter: Age (day) Value: 7
  misc_feature: MA Experiment 20001248 PARAMETER Experiment Name: At_Far-red-induction_P Parameter: Light Value: Far-red vs. White
  misc_feature: MA Experiment 20001248 PARAMETER Experiment Name: At_Far-red-induction_P Parameter: Organism Value: A. thaliana
  misc_feature: MA Experiment 20001248 PARAMETER Experiment Name: At_Far-red-induction_P Parameter: Plant Line Value: Columbia
  misc_feature: MA Experiment 20001248 PARAMETER Experiment Name: At_Far-red-induction_P Parameter: Timepoint (hr) Value: 4
  misc_feature: MA Experiment 20001248 PARAMETER Experiment Name: At_Far-red-induction_P Parameter: Tissue Value: Whole Plant
  misc_feature: MA Experiment ID: 20001450 Result: Down-regulated in Transcription
  misc_feature: MA Experiment 20001450 PARAMETER Experiment Name: At_Far-red-induction_P Parameter: Age (day) Value: 7
  misc_feature: MA Experiment 20001450 PARAMETER Experiment Name: At_Far-red-induction_P Parameter: Light Value: Far-red vs. White
  misc_feature: MA Experiment 20001450 PARAMETER Experiment Name: At_Far-red-induction_P Parameter: Organism Value: A. thaliana
  misc_feature: MA Experiment 20001450 PARAMETER Experiment Name: At_Far-red-induction_P Parameter: Plant Line Value: Columbia
  misc_feature: MA Experiment 20001450 PARAMETER Experiment Name: At_Far-red-induction_P Parameter: Timepoint (hr) Value: 8
  misc_feature: MA Experiment 20001450 PARAMETER Experiment Name: At_Far-red-induction_P Parameter: Tissue Value: Whole Plant
  misc_feature: MA Experiment ID: 20001451 Result: Down-regulated in Transcription
  misc_feature: MA Experiment 20001451 PARAMETER Experiment Name: At_Far-red-induction_P Parameter: Age (day) Value: 7
  misc_feature: MA Experiment 20001451 PARAMETER Experiment Name: At_Far-red-induction_P Parameter: Light Value: Far-red vs. White
  misc_feature: MA Experiment 20001451 PARAMETER Experiment Name: At_Far-red-induction_P Parameter: Organism Value: A. thaliana
  misc_feature: MA Experiment 20001451 PARAMETER Experiment Name: At_Far-red-induction_P Parameter: Plant Line Value: Columbia
  misc_feature: MA Experiment 20001451 PARAMETER Experiment Name: At_Far-red-induction_P Parameter: Timepoint (hr) Value: 24
  misc_feature: MA Experiment 20001451 PARAMETER Experiment Name: At_Far-red-induction_P Parameter: Tissue Value: Whole Plant
atgttcggagtcgtcttccccaatcgaagtttcccaatagacatctcaaccttcactcaaatcgacacattccactgggttctcgacatgaaccacttcgtcggtgaagcttatgatcaaatctcagagatgtgtatcttcttgttaaacaatttcaatcttccaccagataaagctttagctgtttatgttcaatctccaggatcagcttttgtgttctgtggtgctgtaactttagctagaccttctgctgttttatcacttcaatggcctgaacctggtagtgcagcgaagatgcaactcacggcgggtgattcgagttccttatcggcgaagatcggtgtttcggtggaggatgtagcagcgttgaggtcgttggatgttgttgcggagaggaggattgagaaattggctatgaaagttggagagaatttgtttaactttatgcagtctttttgtggtgttgatggaagtaaattggttgttcctatggatattttggatcgttggtttaagaagtttcaggagaaagctaaacgtgatcctgatttcctcaaaagctttgctttgtaa

SEQ ID NO: 86433 - protein, 190 aa, Arabidopsis thaliana
  peptide (1)..(190): Ceres Seq. ID no. 12690533
  misc_feature (1)..(187): Pfam Name: Protein of unknown function (DUF775) Pfam Description: Protein of unknown function (DUF775)
  misc_feature (1)..(190): Homolog of NCBI NO: 15218916 NR Description: hypothetical protein; protein id: At1g66080.1
  misc_feature (1)..(188): Homolog of NCBI NO: 27357983 NR Description: Hypothetical protein [Oryza sativa (japonica
MFGVVFPNRSFPIDISTFTQIDTFHWVLDMNHFVGEAYDQISEMCIFLLNNFNLPPDKALAVYVQSPGSAFVFCGAVTLARPSAVLSLQWPEPGSAAKMQLTAGDSSSLSAKIGVSVEDVAALRSLDVVAERRIEKLAMKVGENLFNFMQSFCGVDGSKLVVPMDILDRWFKKFQEKAKRDPDFLKSFAL

SEQ ID NO: 86434 - protein, 161 aa, Arabidopsis thaliana
  peptide (1)..(161): Ceres Seq. ID no. 12690534
  misc_feature (1)..(158): Pfam Name: Protein of unknown function (DUF775) Pfam Description: Protein of unknown function (DUF775)
  misc_feature (1)..(161): Homolog of NCBI NO: 15218916 NR Description: hypothetical protein; protein id: At1g66080.1
  misc_feature (1)..(159): Homolog of NCBI NO: 27357983 NR Description: Hypothetical protein [Oryza sativa (japonica
MNHFVGEAYDQISEMCIFLLNNFNLPPDKALAVYVQSPGSAFVFCGAVTLARPSAVLSLQWPEPGSAAKMQLTAGDSSSLSAKIGVSVEDVAALRSLDVVAERRIEKLAMKVGENLFNFMQSFCGVDGSKLVVPMDILDRWFKKFQEKAKRDPDFLKSFAL

SEQ ID NO: 86435 - protein, 147 aa, Arabidopsis thaliana
  peptide (1)..(147): Ceres Seq. ID no. 12690535
  misc_feature (1)..(144): Pfam Name: Protein of unknown function (DUF775) Pfam Description: Protein of unknown function (DUF775)
  misc_feature (1)..(147): Homolog of NCBI NO: 15218916 NR Description: hypothetical protein; protein id: At1g66080.1
  misc_feature (1)..(145): Homolog of NCBI NO: 27357983 NR Description: Hypothetical protein [Oryza sativa (japonica
MCIFLLNNFNLPPDKALAVYVQSPGSAFVFCGAVTLARPSAVLSLQWPEPGSAAKMQLTAGDSSSLSAKIGVSVEDVAALRSLDVVAERRIEKLAMKVGENLFNFMQSFCGVDGSKLVVPMDILDRWFKKFQEKAKRDPDFLKSFAL

SEQ ID NO: 86436 - DNA, 1283 bp, Arabidopsis thaliana
  misc_feature (1)..(1283): Ceres Seq. ID no. 12690538
  misc_feature: MA Experiment ID: 108462 Result: Up-regulated in Transcription
  misc_feature: MA Experiment 108462 PARAMETER Experiment Name: At_Germinating_Seeds_cDNA_P Parameter: Age (day) Value: 2 vs. 0
  misc_feature: MA Experiment 108462 PARAMETER Experiment Name: At_Germinating_Seeds_cDNA_P Parameter: Tissue Value: Germinating Seeds
  misc_feature: MA Experiment ID: 108463 Result: Up-regulated in Transcription
  misc_feature: MA Experiment 108463 PARAMETER Experiment Name: At_Germinating_Seeds_cDNA_P Parameter: Age (day) Value: 3 vs. 0
  misc_feature: MA Experiment 108463 PARAMETER Experiment Name: At_Germinating_Seeds_cDNA_P Parameter: Tissue Value: Germinating Seeds
  misc_feature: MA Experiment ID: 108464 Result: Up-regulated in Transcription
  misc_feature: MA Experiment 108464 PARAMETER Experiment Name: At_Germinating_Seeds_cDNA_P Parameter: Age (day) Value: 4 vs. 0
  misc_feature: MA Experiment 108464 PARAMETER Experiment Name: At_Germinating_Seeds_cDNA_P Parameter: Tissue Value: Germinating Seeds
  misc_feature: MA Experiment ID: 108595 Result: Down-regulated in Transcription
  misc_feature: MA Experiment 108595 PARAMETER Experiment Name: At_Ler-pi_Ovule_cDNA_P Parameter: Plant Line Value: null
  misc_feature: MA Experiment ID: 108668 Result: Down-regulated in Transcription
  misc_feature: MA Experiment 108668 PARAMETER Experiment Name: At_2mM_SA_cDNA_P Parameter: Plant Line Value: WS
  misc_feature: MA Experiment 108668 PARAMETER Experiment Name: At_2mM_SA_cDNA_P Parameter: Timepoint (hr) Value: 6
  misc_feature: MA Experiment 108668 PARAMETER Experiment Name: At_2mM_SA_cDNA_P Parameter: Treatment Value: 2mM SA vs. No Treatment
  misc_feature: MA Experiment ID: 20000071 Result: Down-regulated in Transcription
  misc_feature: MA Experiment 20000071 PARAMETER Experiment Name: At_100uM_ABA_Mutants_cDNA_P Parameter: Plant Line Value: CS8104
  misc_feature: MA Experiment 20000071 PARAMETER Experiment Name: At_100uM_ABA_Mutants_cDNA_P Parameter: Timepoint (hr) Value: 6
  misc_feature: MA Experiment 20000071 PARAMETER Experiment Name: At_100uM_ABA_Mutants_cDNA_P Parameter: Tissue Value: Aerial
  misc_feature: MA Experiment 20000071 PARAMETER Experiment Name: At_100uM_ABA_Mutants_cDNA_P Parameter: Treatment Value: 100uM ABA vs. No Treatment
  misc_feature: MA Experiment ID: 20000086 Result: Down-regulated in Transcription
  misc_feature: MA Experiment 20000086 PARAMETER Experiment Name: At_100uM_ABA_Mutants_cDNA_P Parameter: Plant Line Value: CS22
  misc_feature: MA Experiment 20000086 PARAMETER Experiment Name: At_100uM_ABA_Mutants_cDNA_P Parameter: Timepoint (hr) Value: 6
  misc_feature: MA Experiment 20000086 PARAMETER Experiment Name: At_100uM_ABA_Mutants_cDNA_P Parameter: Tissue Value: Aerial
  misc_feature: MA Experiment 20000086 PARAMETER Experiment Name: At_100uM_ABA_Mutants_cDNA_P Parameter: Treatment Value: 100uM ABA vs. No Treatment
  misc_feature: MA Experiment ID: 20000089 Result: Down-regulated in Transcription
  misc_feature: MA Experiment ID: 20000090 Result: Down-regulated in Transcription
  misc_feature: MA Experiment ID: 20000113 Result: Down-regulated in Transcription
  misc_feature: MA Experiment 20000113 PARAMETER Experiment Name: At_42deg_Heat_cDNA_P Parameter: Temperature (deg C) Value: 42 vs. 22
  misc_feature: MA Experiment 20000113 PARAMETER Experiment Name: At_42deg_Heat_cDNA_P Parameter: Timepoint (hr) Value: 8
  misc_feature: MA Experiment 20000113 PARAMETER Experiment Name: At_42deg_Heat_cDNA_P Parameter: Tissue Value: Aerial
  misc_feature: MA Experiment ID: 20000117 Result: Down-regulated in Transcription
  misc_feature: MA Experiment 20000117 PARAMETER Experiment Name: At_100uM_ABA_Mutants_cDNA_P Parameter: Plant Line Value: Columbia
  misc_feature: MA Experiment 20000117 PARAMETER Experiment Name: At_100uM_ABA_Mutants_cDNA_P Parameter: Timepoint (hr) Value: 6
  misc_feature: MA Experiment 20000117 PARAMETER Experiment Name: At_100uM_ABA_Mutants_cDNA_P Parameter: Tissue Value: Aerial
  misc_feature: MA Experiment 20000117 PARAMETER Experiment Name: At_100uM_ABA_Mutants_cDNA_P Parameter: Treatment Value: 100uM ABA vs. No Treatment
  misc_feature: MA Experiment ID: 20000495 Result: Down-regulated in Transcription
  misc_feature: MA Experiment 20000495 PARAMETER Experiment Name: At_Guard_Cells_P Parameter: Harvest Date Value: 8/2/2002
  misc_feature: MA Experiment 20000495 PARAMETER Experiment Name: At_Guard_Cells_P Parameter: Organism Value: A. thaliana
  misc_feature: MA Experiment 20000495 PARAMETER Experiment Name: At_Guard_Cells_P Parameter: Tissue Value: Guard Cells vs. Leaves
atgagtgacactaaaacggtgcgttttggtcttcttggatgtatcagattcgcatcaaagttcgtcagaacagtaacagaatcctcaaacgccgtcattatcgccatcagcgatccatcactcgaaaccgcaaaaaccttcgccaccgggaacaatttatcgccggagaccgtcacgatatacggaagctacgaggagcttttaaacgatgcaaacgtcgacgccgtttacttgacgatgccggtgacgcaacgagcgagatgggctgtgacggcggcagagaagaagaagcatgttcttgttgagaaaccaccagctcaagacgcgacggagctggagaagattgtggaggcgtgtgaatataacggtgttcagtttatggacggtacgatttggttgcatcatcaacggacggttaagattagagatacgatgtttgattctggattgcttggagatgttcgccacatgtatagcacgatgaccactccggtaccggagcaagtattggaaagactgactaaagaagctatgggtttagccggagctatcggagagcttggatggtatcctataggcgcagctttgtgggctatgtcttaccaaatgccgatatcggtcagggctcttccctcctctgtctccacaaactcggttggcactatcttgtcctgcactgcctctcttcagttcggttcaactgcaaccacaaccgcaatcgttcattgctctttcctctctcaactttcaacggacttagctatctcaggctcaaaagggtcgattcaaatgaatgactatgtgataccctacaaggaggacaaagcttggttcgaatacacaagtggtgcgaagtttgtggacatgcacattggttggaatgtgacgccagagagagttacagtggactgtagcggaactccggagacgcaagaggcaatgatgctgagagagttcacgcggcttgtggaaggaatcaagcgtggcgacttagaggctgatcgtaggtggccggatataagtaagaagacgcagttgatcgttgatgctgtaaagaaatctgttgatattggttgtgaagtggttcatctgtgaaacttgttgaaatcttctgctaattagattatgatatttatgttagtgtcattgatacatgctttatggtaactaacttttataagtcgaagatgatatgtacttcatatttttatttggcactccatatgtactcaaaactgagatatgttaggtcagtagaagtaggtggagtttaagtttagttc

SEQ ID NO: 86437 - protein, 364 aa, Arabidopsis thaliana
  peptide (1)..(364): Ceres Seq. ID no. 12690539
  misc_feature (7)..(130): Pfam Name: Oxidoreductase family, NAD-binding Rossmann fold Pfam Description: Oxidoreductase family, NAD-binding Rossmann fold
  misc_feature (1)..(364): Homolog of NCBI NO: 15218937 NR Description: oxidoreductase, putative; protein id: At1g66130.1 thaliana] >gi|25404587|pir||A96686 probable oxidoreductase
  misc_feature (4)..(364): Homolog of NCBI NO: 15233990 NR Description: AX110P -like protein; protein id: At4g09670.1, by cDNA: 19582. [Arabidopsis thaliana] >gi|7485600|pir||T04014
  misc_feature (30)..(364): Homolog of NCBI NO: 21954073 NR Description: putative AX110P protein [Arabidopsis thaliana]
  misc_feature (1)..(364): Homolog of NCBI NO: 18399170 NR Description: expressed protein; protein id: At1g34200.1, by cDNA: gi_13605868 [Arabidopsis thaliana] F23M19.12/F23M19.12 [Arabidopsis thaliana]
  misc_feature (1)..(364): Homolog of NCBI NO: 25518452 NR Description: hypothetical protein F23M19.12 [imported] - thaliana >gi|5091625|gb|AAD39613.1|AC007454_12 Similar to
  misc_feature (7)..(355): Homolog of NCBI NO: 7488933 NR Description: protein AX110P - carrot
  misc_feature (7)..(320): Homolog of NCBI NO: 37534168 NR Description: putative oxidoreductase [Oryza sativa (japonica group)] >gi|21671919|gb|AAM74281.1| Putative oxidoreductase
  misc_feature (8)..(358): Homolog of NCBI NO: 17549134 NR Description: CONSERVED HYPOTHETICAL PROTEIN [Ralstonia >gi|17431385|emb|CAD18064.1| CONSERVED HYPOTHETICAL PROTEIN
  misc_feature (8)..(358): Homolog of NCBI NO: 5852136 NR Description: putative oxidoreductase [Leishmania major]
  misc_feature (7)..(275): Homolog of NCBI NO: 15616405 NR Description: oxidoreductase [Bacillus halodurans]
MSDTKTVRFGLLGCIRFASKFVRTVTESSNAVIIAISDPSLETAKTFATGNNLSPETVTIYGSYEELLNDANVDAVYLTMPVTQRARWAVTAAEKKKHVLVEKPPAQDATELEKIVEACEYNGVQFMDGTIWLHHQRTVKIRDTMFDSGLLGDVRHMYSTMTTPVPEQVLERLTKEAMGLAGAIGELGWYPIGAALWAMSYQMPISVRALPSSVSTNSVGTILSCTASLQFGSTATTTAIVHCSFLSQLSTDLAISGSKGSIQMNDYVIPYKEDKAWFEYTSGAKFVDMHIGWNVTPERVTVDCSGTPETQEAMMLREFTRLVEGIKRGDLEADRRWPDISKKTQLIVDAVKKSVDIGCEVVHL

SEQ ID NO: 86438 - protein, 285 aa, Arabidopsis thaliana
  peptide (1)..(285): Ceres Seq. ID no. 12690540
  misc_feature (1)..(51): Pfam Name: Oxidoreductase family, NAD-binding Rossmann fold Pfam Description: Oxidoreductase family, NAD-binding Rossmann fold
  misc_feature (1)..(285): Homolog of NCBI NO: 15218937 NR Description: oxidoreductase, putative; protein id: At1g66130.1 thaliana] >gi|25404587|pir||A96686 probable oxidoreductase
  misc_feature (1)..(285): Homolog of NCBI NO: 15233990 NR Description: AX110P -like protein; protein id: At4g09670.1, by cDNA: 19582. [Arabidopsis thaliana] >gi|7485600|pir||T04014
  misc_feature (1)..(285): Homolog of NCBI NO: 21954073 NR Description: putative AX110P protein [Arabidopsis thaliana]
  misc_feature (1)..(285): Homolog of NCBI NO: 18399170 NR Description: expressed protein; protein id: At1g34200.1, by cDNA: gi_13605868 [Arabidopsis thaliana] F23M19.12/F23M19.12 [Arabidopsis thaliana]
  misc_feature (1)..(285): Homolog of NCBI NO: 25518452 NR Description: hypothetical protein F23M19.12 [imported] - thaliana >gi|5091625|gb|AAD39613.1|AC007454_12 Similar to
  misc_feature (1)..(276): Homolog of NCBI NO: 7488933 NR Description: protein AX110P - carrot
  misc_feature (1)..(241): Homolog of NCBI NO: 37534168 NR Description: putative oxidoreductase [Oryza sativa (japonica group)] >gi|21671919|gb|AAM74281.1| Putative oxidoreductase
  misc_feature (1)..(279): Homolog of NCBI NO: 17549134 NR Description: CONSERVED HYPOTHETICAL PROTEIN [Ralstonia >gi|17431385|emb|CAD18064.1| CONSERVED HYPOTHETICAL PROTEIN
  misc_feature (1)..(279): Homolog of NCBI NO: 5852136 NR Description: putative oxidoreductase [Leishmania major]
  misc_feature (1)..(196): Homolog of NCBI NO: 15616405 NR Description: oxidoreductase [Bacillus halodurans]
MPVTQRARWAVTAAEKKKHVLVEKPPAQDATELEKIVEACEYNGVQFMDGTIWLHHQRTVKIRDTMFDSGLLGDVRHMYSTMTTPVPEQVLERLTKEAMGLAGAIGELGWYPIGAALWAMSYQMPISVRALPSSVSTNSVGTILSCTASLQFGSTATTTAIVHCSFLSQLSTDLAISGSKGSIQMNDYVIPYKEDKAWFEYTSGAKFVDMHIGWNVTPERVTVDCSGTPETQEAMMLREFTRLVEGIKRGDLEADRRWPDISKKTQLIVDAVKKSVDIGCEVVHL

SEQ ID NO: 86439 - protein, 238 aa, Arabidopsis thaliana
  peptide (1)..(238): Ceres Seq. ID no. 12690541
  misc_feature (16)..(129): Pfam Name: Oxidoreductase family, C-terminal alpha/beta domain Pfam Description: Oxidoreductase family, C-terminal alpha/beta
  misc_feature (1)..(238): Homolog of NCBI NO: 15218937 NR Description: oxidoreductase, putative; protein id: At1g66130.1 thaliana] >gi|25404587|pir||A96686 probable oxidoreductase
  misc_feature (1)..(238): Homolog of NCBI NO: 15233990 NR Description: AX110P -like protein; protein id: At4g09670.1, by cDNA: 19582. [Arabidopsis thaliana] >gi|7485600|pir||T04014
  misc_feature (1)..(238): Homolog of NCBI NO: 21954073 NR Description: putative AX110P protein [Arabidopsis thaliana]
  misc_feature (1)..(238): Homolog of NCBI NO: 18399170 NR Description: expressed protein; protein id: At1g34200.1, by cDNA: gi_13605868 [Arabidopsis thaliana] F23M19.12/F23M19.12 [Arabidopsis thaliana]
  misc_feature (1)..(238): Homolog of NCBI NO: 25518452 NR Description: hypothetical protein F23M19.12 [imported] - thaliana >gi|5091625|gb|AAD39613.1|AC007454_12 Similar to
  misc_feature (1)..(229): Homolog of NCBI NO: 7488933 NR Description: protein AX110P - carrot
  misc_feature (1)..(194): Homolog of NCBI NO: 37534168 NR Description: putative oxidoreductase [Oryza sativa (japonica group)] >gi|21671919|gb|AAM74281.1| Putative oxidoreductase
  misc_feature (1)..(232): Homolog of NCBI NO: 17549134 NR Description: CONSERVED HYPOTHETICAL PROTEIN [Ralstonia >gi|17431385|emb|CAD18064.1| CONSERVED HYPOTHETICAL PROTEIN
  misc_feature (1)..(232): Homolog of NCBI NO: 5852136 NR Description: putative oxidoreductase [Leishmania major]
  misc_feature (1)..(149): Homolog of NCBI NO: 15616405 NR Description: oxidoreductase [Bacillus halodurans]
MDGTIWLHHQRTVKIRDTMFDSGLLGDVRHMYSTMTTPVPEQVLERLTKEAMGLAGAIGELGWYPIGAALWAMSYQMPISVRALPSSVSTNSVGTILSCTASLQFGSTATTTAIVHCSFLSQLSTDLAISGSKGSIQMNDYVIPYKEDKAWFEYTSGAKFVDMHIGWNVTPERVTVDCSGTPETQEAMMLREFTRLVEGIKRGDLEADRRWPDISKKTQLIVDAVKKSVDIGCEVVHL

SEQ ID NO: 86440 - DNA, 1427 bp, Arabidopsis thaliana
  misc_feature (1)..(1427): Ceres Seq. ID no. 12690553
  misc_feature: MA Experiment ID: 108434 Result: Down-regulated in Transcription
  misc_feature: MA Experiment 108434 PARAMETER Experiment Name: At_Root_Tips_cDNA_P Parameter: Tissue Value: Root Tips
  misc_feature: MA Experiment ID: 108461 Result: Up-regulated in Transcription
  misc_feature: MA Experiment 108461 PARAMETER Experiment Name: At_Germinating_Seeds_cDNA_P Parameter: Age (day) Value: 1 vs. 0
  misc_feature: MA Experiment 108461 PARAMETER Experiment Name: At_Germinating_Seeds_cDNA_P Parameter: Tissue Value: Germinating Seeds
  misc_feature: MA Experiment ID: 108462 Result: Up-regulated in Transcription
  misc_feature: MA Experiment 108462 PARAMETER Experiment Name: At_Germinating_Seeds_cDNA_P Parameter: Age (day) Value: 2 vs. 0
  misc_feature: MA Experiment 108462 PARAMETER Experiment Name: At_Germinating_Seeds_cDNA_P Parameter: Tissue Value: Germinating Seeds
  misc_feature: MA Experiment ID: 108464 Result: Up-regulated in Transcription
  misc_feature: MA Experiment 108464 PARAMETER Experiment Name: At_Germinating_Seeds_cDNA_P Parameter: Age (day) Value: 4 vs. 0
  misc_feature: MA Experiment 108464 PARAMETER Experiment Name: At_Germinating_Seeds_cDNA_P Parameter: Tissue Value: Germinating Seeds
  misc_feature: MA Experiment ID: 108569 Result: Up-regulated in Transcription
  misc_feature: MA Experiment 108569 PARAMETER Experiment Name: At_0.001%_MeJA__cDNA_P Parameter: Timepoint (hr) Value: 6
  misc_feature: MA Experiment 108569 PARAMETER Experiment Name: At_0.001%_MeJA__cDNA_P Parameter: Tissue Value: Aerial
  misc_feature: MA Experiment 108569 PARAMETER Experiment Name: At_0.001%_MeJA__cDNA_P Parameter: Treatment Value: 0.001% MeJA vs. No Treatment
  misc_feature: MA Experiment ID: 108573 Result: Up-regulated in Transcription
  misc_feature: MA Experiment 108573 PARAMETER Experiment Name: At_Drought_cDNA_P Parameter: Timepoint (hr) Value: 6
  misc_feature: MA Experiment 108573 PARAMETER Experiment Name: At_Drought_cDNA_P Parameter: Tissue Value: Aerial
  misc_feature: MA Experiment 108573 PARAMETER Experiment Name: At_Drought_cDNA_P Parameter: Treatment Value: Drought vs. No Drought
  misc_feature: MA Experiment ID: 20000069 Result: Down-regulated in Transcription
  misc_feature: MA Experiment 20000069 PARAMETER Experiment Name: At_100uM_ABA_Mutants_cDNA_P Parameter: Plant Line Value: CS23
  misc_feature: MA Experiment 20000069 PARAMETER Experiment Name: At_100uM_ABA_Mutants_cDNA_P Parameter: Timepoint (hr) Value: 6
  misc_feature: MA Experiment 20000069 PARAMETER Experiment Name: At_100uM_ABA_Mutants_cDNA_P Parameter: Tissue Value: Aerial
  misc_feature: MA Experiment 20000069 PARAMETER Experiment Name: At_100uM_ABA_Mutants_cDNA_P Parameter: Treatment Value: 100uM ABA vs. No Treatment
  misc_feature: MA Experiment ID: 20000071 Result: Down-regulated in Transcription
  misc_feature: MA Experiment 20000071 PARAMETER Experiment Name: At_100uM_ABA_Mutants_cDNA_P Parameter: Plant Line Value: CS8104
  misc_feature: MA Experiment 20000071 PARAMETER Experiment Name: At_100uM_ABA_Mutants_cDNA_P Parameter: Timepoint (hr) Value: 6
  misc_feature: MA Experiment 20000071 PARAMETER Experiment Name: At_100uM_ABA_Mutants_cDNA_P Parameter: Tissue Value: Aerial
  misc_feature: MA Experiment 20000071 PARAMETER Experiment Name: At_100uM_ABA_Mutants_cDNA_P Parameter: Treatment Value: 100uM ABA vs. No Treatment
  misc_feature: MA Experiment ID: 20000072 Result: Down-regulated in Transcription
  misc_feature: MA Experiment 20000072 PARAMETER Experiment Name: At_100uM_ABA_Mutants_cDNA_P Parameter: Plant Line Value: CS8105
  misc_feature: MA Experiment 20000072 PARAMETER Experiment Name: At_100uM_ABA_Mutants_cDNA_P Parameter: Timepoint (hr) Value: 6
  misc_feature: MA Experiment 20000072 PARAMETER Experiment Name: At_100uM_ABA_Mutants_cDNA_P Parameter: Tissue Value: Aerial
  misc_feature: MA Experiment 20000072 PARAMETER Experiment Name: At_100uM_ABA_Mutants_cDNA_P Parameter: Treatment Value: 100uM ABA vs. No Treatment
  misc_feature: MA Experiment ID: 20000087 Result: Down-regulated in Transcription
  misc_feature: MA Experiment 20000087 PARAMETER Experiment Name: At_100uM_ABA_Mutants_cDNA_P Parameter: Plant Line Value: WS
  misc_feature: MA Experiment 20000087 PARAMETER Experiment Name: At_100uM_ABA_Mutants_cDNA_P Parameter: Timepoint (hr) Value: 6
  misc_feature: MA Experiment 20000087 PARAMETER Experiment Name: At_100uM_ABA_Mutants_cDNA_P Parameter: Tissue Value: Aerial
  misc_feature: MA Experiment 20000087 PARAMETER Experiment Name: At_100uM_ABA_Mutants_cDNA_P Parameter: Treatment Value: 100uM ABA vs. No Treatment
  misc_feature: MA Experiment ID: 20000089 Result: Down-regulated in Transcription
  misc_feature: MA Experiment ID: 20000117 Result: Down-regulated in Transcription
  misc_feature: MA Experiment 20000117 PARAMETER Experiment Name: At_100uM_ABA_Mutants_cDNA_P Parameter: Plant Line Value: Columbia
  misc_feature: MA Experiment 20000117 PARAMETER Experiment Name: At_100uM_ABA_Mutants_cDNA_P Parameter: Timepoint (hr) Value: 6
  misc_feature: MA Experiment 20000117 PARAMETER Experiment Name: At_100uM_ABA_Mutants_cDNA_P Parameter: Tissue Value: Aerial
  misc_feature: MA Experiment 20000117 PARAMETER Experiment Name: At_100uM_ABA_Mutants_cDNA_P Parameter: Treatment Value: 100uM ABA vs. No Treatment
  misc_feature: MA Experiment ID: 20000180 Result: Up-regulated in Transcription
  misc_feature: MA Experiment 20000180 PARAMETER Experiment Name: At_Germinating_Seeds_P Parameter: Age (hr) Value: 24 vs. 0
  misc_feature: MA Experiment 20000180 PARAMETER Experiment Name: At_Germinating_Seeds_P Parameter: Tissue Value: Germinating Seeds
  misc_feature: MA Experiment ID: 20000185 Result: Up-regulated in Transcription
  misc_feature: MA Experiment 20000185 PARAMETER Experiment Name: At_Roots__P Parameter: Age (day) Value: 7 vs. 21
  misc_feature: MA Experiment 20000185 PARAMETER Experiment Name: At_Roots__P Parameter: Organism Value: A. thaliana
  misc_feature: MA Experiment 20000185 PARAMETER Experiment Name: At_Roots__P Parameter: Tissue Value: Roots vs. Whole Plant
  misc_feature: MA Experiment ID: 20000267 Result: Down-regulated in Transcription
  misc_feature: MA Experiment 20000267 PARAMETER Experiment Name: At_Drought_P Parameter: Age (day) Value: 7
  misc_feature: MA Experiment 20000267 PARAMETER Experiment Name: At_Drought_P Parameter: Organism Value: A. thaliana
  misc_feature: MA Experiment 20000267 PARAMETER Experiment Name: At_Drought_P Parameter: Plant Line Value: WS
  misc_feature: MA Experiment 20000267 PARAMETER Experiment Name: At_Drought_P Parameter: Timepoint (hr) Value: 6
  misc_feature: MA Experiment 20000267 PARAMETER Experiment Name: At_Drought_P Parameter: Tissue Value: Whole Plant
  misc_feature: MA Experiment 20000267 PARAMETER Experiment Name: At_Drought_P Parameter: Treatment Value: Drought vs. No Drought
  misc_feature: MA Experiment ID: 20000436 Result: Down-regulated in Transcription
  misc_feature: MA Experiment 20000436 PARAMETER Experiment Name: At_Drought_P Parameter: Age (day) Value: 7
  misc_feature: MA Experiment 20000436 PARAMETER Experiment Name: At_Drought_P Parameter: Organism Value: A. thaliana
  misc_feature: MA Experiment 20000436 PARAMETER Experiment Name: At_Drought_P Parameter: Plant Line Value: WS
  misc_feature: MA Experiment 20000436 PARAMETER Experiment Name: At_Drought_P Parameter: Timepoint (hr) Value: 12
  misc_feature: MA Experiment 20000436 PARAMETER Experiment Name: At_Drought_P Parameter: Tissue Value: Whole Plant
  misc_feature: MA Experiment 20000436 PARAMETER Experiment Name: At_Drought_P Parameter: Treatment Value: Drought vs. No Drought
  misc_feature: MA Experiment ID: 20000437 Result: Down-regulated in Transcription
  misc_feature: MA Experiment 20000437 PARAMETER Experiment Name: At_Drought_P Parameter: Age (day) Value: 8
  misc_feature: MA Experiment 20000437 PARAMETER Experiment Name: At_Drought_P Parameter: Organism Value: A. thaliana
  misc_feature: MA Experiment 20000437 PARAMETER Experiment Name: At_Drought_P Parameter: Plant Line Value: WS
  misc_feature: MA Experiment 20000437 PARAMETER Experiment Name: At_Drought_P Parameter: Timepoint (hr) Value: 24
  misc_feature: MA Experiment 20000437 PARAMETER Experiment Name: At_Drought_P Parameter: Tissue Value: Whole Plant
  misc_feature: MA Experiment 20000437 PARAMETER Experiment Name: At_Drought_P Parameter: Treatment Value: Drought vs. No Drought
  misc_feature: MA Experiment ID: 20000794 Result: Up-regulated in Transcription
  misc_feature: MA Experiment 20000794 PARAMETER Experiment Name: At_Petals_P Parameter: Age (day) Value: 23-25 days
  misc_feature: MA Experiment 20000794 PARAMETER Experiment Name: At_Petals_P Parameter: Plant Line Value: WS
  misc_feature: MA Experiment 20000794 PARAMETER Experiment Name: At_Petals_P Parameter: Tissue Value: Petals vs. Whole plant
  misc_feature: MA Experiment ID: 20001248 Result: Down-regulated in Transcription
  misc_feature: MA Experiment 20001248 PARAMETER Experiment Name: At_Far-red-induction_P Parameter: Age (day) Value: 7
  misc_feature: MA Experiment 20001248 PARAMETER Experiment Name: At_Far-red-induction_P Parameter: Light Value: Far-red vs. White
  misc_feature: MA Experiment 20001248 PARAMETER Experiment Name: At_Far-red-induction_P Parameter: Organism Value: A. thaliana
  misc_feature: MA Experiment 20001248 PARAMETER Experiment Name: At_Far-red-induction_P Parameter: Plant Line Value: Columbia
  misc_feature: MA Experiment 20001248 PARAMETER Experiment Name: At_Far-red-induction_P Parameter: Timepoint (hr) Value: 4
  misc_feature: MA Experiment 20001248 PARAMETER Experiment Name: At_Far-red-induction_P Parameter: Tissue Value: Whole Plant
  misc_feature: MA Experiment ID: 20001555 Result: Down-regulated in Transcription
  misc_feature: MA Experiment 20001555 PARAMETER Experiment Name: At_Drought_Soil_Dry_P Parameter: Age (day) Value: 24
  misc_feature: MA Experiment 20001555 PARAMETER Experiment Name: At_Drought_Soil_Dry_P Parameter: Organism Value: A. thaliana
  misc_feature: MA Experiment 20001555 PARAMETER Experiment Name: At_Drought_Soil_Dry_P Parameter: Plant Line Value: WS
  misc_feature: MA Experiment 20001555 PARAMETER Experiment Name: At_Drought_Soil_Dry_P Parameter: Post Timepoint (hr) Value: None
  misc_feature: MA Experiment 20001555 PARAMETER Experiment Name: At_Drought_Soil_Dry_P Parameter: Post-Treatment Value: None
  misc_feature: MA Experiment 20001555 PARAMETER Experiment Name: At_Drought_Soil_Dry_P Parameter: Timepoint (day) Value: 10
  misc_feature: MA Experiment 20001555 PARAMETER Experiment Name: At_Drought_Soil_Dry_P Parameter: Treatment Value: Drought vs. No Drought
atcatctcattaacaaaaataaaacacacaatctcaagattttctacttcttattacaaagattcaatcttcttgtttcttcttgcaaccatgagtcttcttgcagatcttgttaaccttgacatctcagacaacagtgaaaagatcatcgctgaatacatatgggttggtggttctggtatggacatgagaagcaaagccaggactctccctggacctgtgaccgatccatcaaaacttccaaagtggaactatgatggttcaagcactggtcaagctcctggtcaagacagtgaagtgatcttataccctcaagcaattttcaaagatccattccgtagaggcaacaacatccttgttatgtgtgatgcttacactccagcgggagagccaatccctactaacaagcgacatgctgcggctgagatctttgctaaccctgatgttattgctgaagtgccatggtatggaatcgaacaagaatacactttgttgcagaaggatgtgaactggcctcttggatggcccattggtggcttccctggccctcagggaccatactactgcagtattggagctgacaaatcttttggaagagacattgttgatgctcactacaaagcctctttgtatgctggaatcaacatcagtgggatcaatggagaagtcatgccgggacaatgggagttccaagtcggcccatcggtcggtatctcagctgctgatgaaatatggatcgctcgttacattttggagaggatcacagagattgctggtgtggttgtatcttttgacccaaaacctattcctggtgactggaatggagctggtgctcacaccaattacagtactaaatcaatgagggaagaaggaggatacgagataatcaagaaggcgatcgagaagcttggcttgagacacaaggaacacatttccgcttacggtgaaggaaacgagcgtcgtctcacgggacaccatgaaactgctgacatcaacactttcctttggggtgttgcgaaccgtggtgcatcgatccgagtaggacgtgacaccgagaaagaagggaagggatactttgaggataggaggccagcttcaaacatggacccttacgttgttacttccatgattgcagagactacactcctctggaacccttgaaaggatgatccgtaactcttgaagttgcttctgattgggttttttggaagttccaagcttgtcttttctctacagtgtgtattaagcaattgtaccggttgacactgccggagtttgtgatttggggcctttctttctttttcttctttttataatcttttgggttctgtggttagagcaaattcggtttgctctgtttgtttgacctttattgaaacctttggtattggtactaataatacaatctgaaaaggcctcttcatgtt

SEQ ID NO: 86441 - protein, 386 aa, Arabidopsis thaliana; identical to SEQ ID NO: 26399
  peptide (1)..(386): Ceres Seq. ID no. 12690554
  misc_feature (133)..(385): Pfam Name: Glutamine synthetase, catalytic domain Pfam Description: Glutamine synthetase, catalytic domain
  misc_feature (31)..(386): Homolog of NCBI NO: 15219598 NR Description: glutamine synthetase, putative; protein id: supported by cDNA: 2662., supported by cDNA: gi_20268695
  misc_feature (31)..(386): Homolog of NCBI NO: 21554857 NR Description: glutamine synthetase, putative [Arabidopsis
  misc_feature (31)..(386): Homolog of NCBI NO: 99697 NR Description: glutamate-ammonia ligase (EC 6.3.1.2), cytosolic
  misc_feature (31)..(386): Homolog of NCBI NO: 228455 NR Description: Gln synthetase
  misc_feature (31)..(386): Homolog of NCBI NO: 481914 NR Description: glutamate-ammonia ligase (EC 6.3.1.2) - rape
  misc_feature (31)..(386): Homolog of NCBI NO: 1934756 NR Description: cytosolic glutamine synthetase [Brassica napus]
  misc_feature (31)..(386): Homolog of NCBI NO: 1076474 NR Description: Gln 1.2 protein - radish
  misc_feature (31)..(386): Homolog of NCBI NO: 15240288 NR Description: glutamate--ammonia ligase; protein id: supported by cDNA: gi_16226386, supported by cDNA: gi_16930508, by cDNA: gi_19310526 [Arabidopsis thaliana]
  misc_feature (31)..(386): Homolog of NCBI NO: 1084350 NR Description: glutamate-ammonia ligase (EC 6.3.1.2) - rape
  misc_feature (31)..(386): Homolog of NCBI NO: 1076475 NR Description: Gln 1.3 protein - radish

SEQ ID NO: 86442 - protein, 356 aa, Arabidopsis thaliana; identical to SEQ ID NO: 26400
  peptide (1)..(356): Ceres Seq. ID no. 12690555
  misc_feature (103)..(355): Pfam Name: Glutamine synthetase, catalytic domain Pfam Description: Glutamine synthetase, catalytic domain
  misc_feature (1)..(356): Homolog of NCBI NO: 15219598 NR Description: glutamine synthetase, putative; protein id: supported by cDNA: 2662., supported by cDNA: gi_20268695
  misc_feature (1)..(356): Homolog of NCBI NO: 21554857 NR Description: glutamine synthetase, putative [Arabidopsis
  misc_feature (1)..(356): Homolog of NCBI NO: 99697 NR Description: glutamate-ammonia ligase (EC 6.3.1.2), cytosolic
  misc_feature (1)..(356): Homolog of NCBI NO: 228455 NR Description: Gln synthetase
  misc_feature (1)..(356): Homolog of NCBI NO: 481914 NR Description: glutamate-ammonia ligase (EC 6.3.1.2) - rape
  misc_feature (1)..(356): Homolog of NCBI NO: 1934756 NR Description: cytosolic glutamine synthetase [Brassica napus]
  misc_feature (1)..(356): Homolog of NCBI NO: 1076474 NR Description: Gln 1.2 protein - radish
  misc_feature (1)..(356): Homolog of NCBI NO: 15240288 NR Description: glutamate--ammonia ligase; protein id: supported by cDNA: gi_16226386, supported by cDNA: gi_16930508, by cDNA: gi_19310526 [Arabidopsis thaliana]
  misc_feature (1)..(356): Homolog of NCBI NO: 1084350 NR Description: glutamate-ammonia ligase (EC 6.3.1.2) - rape
  misc_feature (1)..(356): Homolog of NCBI NO: 1076475 NR Description: Gln 1.3 protein - radish

SEQ ID NO: 86443 - protein, 326 aa, Arabidopsis thaliana; identical to SEQ ID NO: 26401
  peptide (1)..(326): Ceres Seq. ID no. 12690556
  misc_feature (73)..(325): Pfam Name: Glutamine synthetase, catalytic domain Pfam Description: Glutamine synthetase, catalytic domain
  misc_feature (1)..(326): Homolog of NCBI NO: 15219598 NR Description: glutamine synthetase, putative; protein id: supported by cDNA: 2662., supported by cDNA: gi_20268695
  misc_feature (1)..(326): Homolog of NCBI NO: 21554857 NR Description: glutamine synthetase, putative [Arabidopsis
  misc_feature (1)..(326): Homolog of NCBI NO: 99697 NR Description: glutamate-ammonia ligase (EC 6.3.1.2), cytosolic
  misc_feature (1)..(326): Homolog of NCBI NO: 228455 NR Description: Gln synthetase
  misc_feature (1)..(326): Homolog of NCBI NO: 481914 NR Description: glutamate-ammonia ligase (EC 6.3.1.2) - rape
  misc_feature (1)..(326): Homolog of NCBI NO: 1934756 NR Description: cytosolic glutamine synthetase [Brassica napus]
  misc_feature (1)..(326): Homolog of NCBI NO: 1076474 NR Description: Gln 1.2 protein - radish
  misc_feature (1)..(326): Homolog of NCBI NO: 15240288 NR Description: glutamate--ammonia ligase; protein id: supported by cDNA: gi_16226386, supported by cDNA: gi_16930508, by cDNA: gi_19310526 [Arabidopsis thaliana]
  misc_feature (1)..(326): Homolog of NCBI NO: 1084350 NR Description: glutamate-ammonia ligase (EC 6.3.1.2) - rape
  misc_feature (1)..(326): Homolog of NCBI NO: 1076475 NR Description: Gln 1.3 protein - radish

SEQ ID NO: 86444 - DNA, 1575 bp, Arabidopsis thaliana
  misc_feature (1)..(1575): Ceres Seq. ID no. 12690569
  misc_feature: MA Experiment ID: 20000171 Result: Up-regulated in Transcription
  misc_feature: MA Experiment 20000171 PARAMETER Experiment Name: At_42deg_Heat_P Parameter: Age (day) Value: 14
  misc_feature: MA Experiment 20000171 PARAMETER Experiment Name: At_42deg_Heat_P Parameter: Organism Value: A. thaliana
  misc_feature: MA Experiment 20000171 PARAMETER Experiment Name: At_42deg_Heat_P Parameter: Plant Line Value: WS
  misc_feature: MA Experiment 20000171 PARAMETER Experiment Name: At_42deg_Heat_P Parameter: Temperature (deg C) Value: 42 vs. 22
  misc_feature: MA Experiment 20000171 PARAMETER Experiment Name: At_42deg_Heat_P Parameter: Timepoint (hr) Value: 1
  misc_feature: MA Experiment 20000171 PARAMETER Experiment Name: At_42deg_Heat_P Parameter: Tissue Value: Aerial
  misc_feature: MA Experiment ID: 20000179 Result: Up-regulated in Transcription
  misc_feature: MA Experiment 20000179 PARAMETER Experiment Name: At_Germinating_Seeds_P Parameter: Age (hr) Value: 6 vs. 0
  misc_feature: MA Experiment 20000179 PARAMETER Experiment Name: At_Germinating_Seeds_P Parameter: Tissue Value: Germinating Seeds
  misc_feature: MA Experiment ID: 20000180 Result: Up-regulated in Transcription
  misc_feature: MA Experiment 20000180 PARAMETER Experiment Name: At_Germinating_Seeds_P Parameter: Age (hr) Value: 24 vs. 0
  misc_feature: MA Experiment 20000180 PARAMETER Experiment Name: At_Germinating_Seeds_P Parameter: Tissue Value: Germinating Seeds
  misc_feature: MA Experiment ID: 20000184 Result: Up-regulated in Transcription
  misc_feature: MA Experiment 20000184 PARAMETER Experiment Name: At_Shoots__P Parameter: Age (day) Value: 7
  misc_feature: MA Experiment 20000184 PARAMETER Experiment Name: At_Shoots__P Parameter: Tissue Value: Shoots vs. Whole Plant
  misc_feature: MA Experiment ID: 20000185 Result: Up-regulated in Transcription
  misc_feature: MA Experiment 20000185 PARAMETER Experiment Name: At_Roots__P Parameter: Age (day) Value: 7 vs. 21
  misc_feature: MA Experiment 20000185 PARAMETER Experiment Name: At_Roots__P Parameter: Organism Value: A. thaliana
  misc_feature: MA Experiment 20000185 PARAMETER Experiment Name: At_Roots__P Parameter: Tissue Value: Roots vs. Whole Plant
  misc_feature: MA Experiment ID: 20000227 Result: Up-regulated in Transcription
  misc_feature: MA Experiment 20000227 PARAMETER Experiment Name: At_Root-Tips-vs-Tops_P Parameter: Tissue Value: Root Tips vs. Root Tops
  misc_feature: MA Experiment ID: 20000438 Result: Up-regulated in Transcription
  misc_feature: MA Experiment 20000438 PARAMETER Experiment Name: At_Shoots__P Parameter: Age (day) Value: 14
  misc_feature: MA Experiment 20000438 PARAMETER Experiment Name: At_Shoots__P Parameter: Tissue Value: Shoots vs. Whole Plant
  misc_feature: MA Experiment ID: 20000439 Result: Up-regulated in Transcription
  misc_feature: MA Experiment 20000439 PARAMETER Experiment Name: At_Roots__P Parameter: Age (day) Value: 14 vs. 21
  misc_feature: MA Experiment 20000439 PARAMETER Experiment Name: At_Roots__P Parameter: Organism Value: A. thaliana
  misc_feature: MA Experiment 20000439 PARAMETER Experiment Name: At_Roots__P Parameter: Tissue Value: Roots vs. Whole Plant
  misc_feature: MA Experiment ID: 20000527 Result: Down-regulated in Transcription
  misc_feature: MA Experiment 20000527 PARAMETER Experiment Name: At_10percent_PEG_P Parameter: Age (day) Value: 20
  misc_feature: MA Experiment 20000527 PARAMETER Experiment Name: At_10percent_PEG_P Parameter: Organism Value: A. thaliana
  misc_feature: MA Experiment 20000527 PARAMETER Experiment Name: At_10percent_PEG_P Parameter: Plant Line Value: WS
  misc_feature: MA Experiment 20000527 PARAMETER Experiment Name: At_10percent_PEG_P Parameter: Timepoint (day) Value: 20
  misc_feature: MA Experiment 20000527 PARAMETER Experiment Name: At_10percent_PEG_P Parameter: Tissue Value: Whole Plant
  misc_feature: MA Experiment 20000527 PARAMETER Experiment Name: At_10percent_PEG_P Parameter: Treatment Value: 10percent PEG vs. No Treatment
atggcattgcaaaagtttcctctcatggggctgcttttgctcctaaccatcctcgtctctgtgacaacagcggttgatgatcctgtttgcccggcgacttccaagctaagccgagcaagtttccctaatgggtttttgtttggcacggctactgctgcgtttcaggtcgaaggtgcaattaatgaaacttgtcgtggaccggctctatgggatatctactgtagaagaaatccagagagatgtagtggcgaccacgccgatgtggccgttgatttcttccatcgttataaggaagatattcagctaatgaagaatctaaacacagatgcattcagactctcaatcgcatggtcaagaatatttcctcatgggagaaaggagaagggagtgagtcaagctggtgtgcaattctaccacgagctcatcgatgaactccttaaaaatggtatagttccgtttgtgactgttttccattgggacactccacaagatttggaagacgaatatggcggtttcttaagccaaaacattgtgaaagattttcgagaatatgcagattatgttttcactgaatacggtggaaaagtgaaaaactggatcactttcaacgagccatgggtctttgctcacgcaggttacgacttaggaaagaaagcaccaggacgttgttctcgctacgttccaggttgcgaagaccgagagggacaatctggtaaagaggcttatctagtcagtcacaatctcctcaacgctcacgcagaagctgttgaagttttccgccaaaaggttaaaggtgggaaaatcggaatcgcacatagtccggcttggttcgaaccacatgatcttaaagattcaaatgacgctccaactgttagccgtgtacttgactttatgttgggatggcatctggagccaactacttcgggagattatccacaaatcatgaaagaccttcttggttacagattgcctcaatttactgctgcacaaaaagcaaaattgaaagattcgaccgatttcgtagggcttaactactatacttcgacattttcaaattataatgagaagccagatccgtctaaaccaagttggaagcaagattctcttgtttcctgggaacctaagaatgtagatcacagcgccattggtagcatgcctcttactgctgcattgcccgtctacgctaaaggatttagaaagcttttaaagtacatcaaggacaaatacgcaaacccggagattatgataatggaaaatggatatggagataaacttgggaccacagattcggttgacgttggtactgctgatcataacaggaaatattatcttcagaggcatcttctggctatgaacgaggctatttgcatcgataaggtgagagttacgggatactttgtatggtcattgttggataacttcgaatggcaagatggttacaaaaacagattcggactctattacgtcgatttcaaaaataacctcacacgttatgagaaagaatcagccaagtattacaaagatttcctcgctcaaggtgttcgtccatccgcactcaagagggatgagctttaa

SEQ ID NO: 86445 - protein, 524 aa, Arabidopsis thaliana; identical to SEQ ID NO: 77129
  peptide (1)..(524): Ceres Seq. ID no. 12690570
  misc_feature (1)..(524): Homolog of NCBI NO: 15219605 NR Description: glycosyl hydrolase family 1, beta-glucosidase; id: At1g66270.1, supported by cDNA: gi_15010793 [Arabidopsis
  misc_feature (1)..(524): Homolog of NCBI NO: 2286069 NR Description: beta-glucosidase [Arabidopsis thaliana]
  misc_feature (1)..(524): Homolog of NCBI NO: 30697327 NR Description: glycosyl hydrolase family 1, beta-glucosidase
  misc_feature (1)..(524): Homolog of NCBI NO: 15219623 NR Description: glycosyl hydrolase family 1; protein id: supported by cDNA: gi_18389261 [Arabidopsis thaliana]
  misc_feature (1)..(524): Homolog of NCBI NO: 15232626 NR Description: glycosyl hydrolase family 1; protein id: supported by cDNA: gi_14423459, supported by cDNA: gi_1732569 thaliana] >gi|6478919|gb|AAF14024.1|AC011436_8 thioglucosidase 3D
  misc_feature (1)..(524): Homolog of NCBI NO: 1363489 NR Description: thioglucosidase (EC 3.2.1.147) 3D precursor - thaliana >gi|984052|emb|CAA61592.1| thioglucoside glucohydrolase thaliana] >gi|5524767|emb|CAB50792.1| thioglucoside
  misc_feature (1)..(524): Homolog of NCBI NO: 1732570 NR Description: beta-glucosidase [Arabidopsis thaliana]
  misc_feature (1)..(524): Homolog of NCBI NO: 15241841 NR Description: glycosyl hydrolase family 1; protein id:
  misc_feature (90)..(524): Homolog of NCBI NO: 1732572 NR Description: beta-glucosidase [Brassica nigra]
  misc_feature (5)..(517): Homolog of NCBI NO: 22331243 NR Description: glycosyl hydrolase family 1; protein id: supported by cDNA: gi_16604492, supported by cDNA: gi_17381179,

SEQ ID NO: 86446 - protein, 516 aa, Arabidopsis thaliana; identical to SEQ ID NO: 77130
  peptide (1)..(516): Ceres Seq. ID no. 12690571
  misc_feature (1)..(516): Homolog of NCBI NO: 15219605 NR Description: glycosyl hydrolase family 1, beta-glucosidase; id: At1g66270.1, supported by cDNA: gi_15010793 [Arabidopsis
  misc_feature (1)..(516): Homolog of NCBI NO: 2286069 NR Description: beta-glucosidase [Arabidopsis thaliana]
  misc_feature (1)..(516): Homolog of NCBI NO: 30697327 NR Description: glycosyl hydrolase family 1, beta-glucosidase
  misc_feature (1)..(516): Homolog of NCBI NO: 15219623 NR Description: glycosyl hydrolase family 1; protein id: supported by cDNA: gi_18389261 [Arabidopsis thaliana]
  misc_feature (1)..(516): Homolog of NCBI NO: 15232626 NR Description: glycosyl hydrolase family 1; protein id: supported by cDNA: gi_14423459, supported by cDNA: gi_1732569 thaliana] >gi|6478919|gb|AAF14024.1|AC011436_8 thioglucosidase 3D
  misc_feature (1)..(516): Homolog of NCBI NO: 1363489 NR Description: thioglucosidase (EC 3.2.1.147) 3D precursor - thaliana >gi|984052|emb|CAA61592.1| thioglucoside glucohydrolase thaliana] >gi|5524767|emb|CAB50792.1| thioglucoside
  misc_feature (1)..(516): Homolog of NCBI NO: 1732570 NR Description: beta-glucosidase [Arabidopsis thaliana]
  misc_feature (1)..(516): Homolog of NCBI NO: 15241841 NR Description: glycosyl hydrolase family 1; protein id:
  misc_feature (82)..(516): Homolog of NCBI NO: 1732572 NR Description: beta-glucosidase [Brassica nigra]
  misc_feature (1)..(509): Homolog of NCBI NO: 22331243 NR Description: glycosyl hydrolase family 1; protein id: supported by cDNA: gi_16604492, supported by cDNA: gi_17381179,

SEQ ID NO: 86447 - protein, 422 aa, Arabidopsis thaliana
  peptide (1)..(422): Ceres Seq. ID no. 12690572
  misc_feature (1)..(422): Homolog of NCBI NO: 15219605 NR Description: glycosyl hydrolase family 1, beta-glucosidase; id: At1g66270.1, supported by cDNA: gi_15010793 [Arabidopsis
  misc_feature (1)..(422): Homolog of NCBI NO: 2286069 NR Description: beta-glucosidase [Arabidopsis thaliana]
  misc_feature (1)..(422): Homolog of NCBI NO: 30697327 NR Description: glycosyl hydrolase family 1, beta-glucosidase
  misc_feature (1)..(422): Homolog of NCBI NO: 15219623 NR Description: glycosyl hydrolase family 1; protein id: supported by cDNA: gi_18389261 [Arabidopsis thaliana]
  misc_feature (1)..(422): Homolog of NCBI NO: 15232626 NR Description: glycosyl hydrolase family 1; protein id: supported by cDNA: gi_14423459, supported by cDNA: gi_1732569 thaliana] >gi|6478919|gb|AAF14024.1|AC011436_8 thioglucosidase 3D
  misc_feature (1)..(422): Homolog of NCBI NO: 1363489 NR Description: thioglucosidase (EC 3.2.1.147) 3D precursor - thaliana >gi|984052|emb|CAA61592.1| thioglucoside glucohydrolase thaliana] >gi|5524767|emb|CAB50792.1| thioglucoside
  misc_feature (1)..(422): Homolog of NCBI NO: 1732570 NR Description: beta-glucosidase [Arabidopsis thaliana]
  misc_feature (1)..(422): Homolog of NCBI NO: 15241841 NR Description: glycosyl hydrolase family 1; protein id:
  misc_feature (1)..(422): Homolog of NCBI NO: 1732572 NR Description: beta-glucosidase [Brassica nigra]
  misc_feature (1)..(415): Homolog of NCBI NO: 22331243 NR Description: glycosyl hydrolase family 1; protein id: supported by cDNA: gi_16604492, supported by cDNA: gi_17381179,
MKNLNTDAFRLSIAWSRIFPHGRKEKGVSQAGVQFYHELIDELLKNGIVPFVTVFHWDTPQDLEDEYGGFLSQNIVKDFREYADYVFTEYGGKVKNWITFNEPWVFAHAGYDLGKKAPGRCSRYVPGCEDREGQSGKEAYLVSHNLLNAHAEAVEVFRQKVKGGKIGIAHSPAWFEPHDLKDSNDAPTVSRVLDFMLGWHLEPTTSGDYPQIMKDLLGYRLPQFTAAQKAKLKDSTDFVGLNYYTSTFSNYNEKPDPSKPSWKQDSLVSWEPKNVDHSAIGSMPLTAALPVYAKGFRKLLKYIKDKYANPEIMIMENGYGDKLGTTDSVDVGTADHNRKYYLQRHLLAMNEAICIDKVRVTGYFVWSLLDNFEWQDGYKNRFGLYYVDFKNNLTRYEKESAKYYKDFLAQGVRPSALKRDEL

SEQ ID NO: 86448 - DNA, 4263 bp, Arabidopsis thaliana
  misc_feature (1)..(4263): Ceres Seq. ID no. 12690617
  misc_feature: MA Experiment ID: 20000438 Result: Up-regulated in Transcription
  misc_feature: MA Experiment 20000438 PARAMETER Experiment Name: At_Shoots__P Parameter: Age (day) Value: 14
  misc_feature: MA Experiment 20000438 PARAMETER Experiment Name: At_Shoots__P Parameter: Tissue Value: Shoots vs. Whole Plant
  misc_feature: MA Experiment ID: 20000439 Result: Up-regulated in Transcription
  misc_feature: MA Experiment 20000439 PARAMETER Experiment Name: At_Roots__P Parameter: Age (day) Value: 14 vs. 21
  misc_feature: MA Experiment 20000439 PARAMETER Experiment Name: At_Roots__P Parameter: Organism Value: A. thaliana
  misc_feature: MA Experiment 20000439 PARAMETER Experiment Name: At_Roots__P Parameter: Tissue Value: Roots vs. Whole Plant
  misc_feature: MA Experiment ID: 20000495 Result: Up-regulated in Transcription
  misc_feature: MA Experiment 20000495 PARAMETER Experiment Name: At_Guard_Cells_P Parameter: Harvest Date Value: 8/2/2002
  misc_feature: MA Experiment 20000495 PARAMETER Experiment Name: At_Guard_Cells_P Parameter: Organism Value: A. thaliana
  misc_feature: MA Experiment 20000495 PARAMETER Experiment Name: At_Guard_Cells_P Parameter: Tissue Value: Guard Cells vs. Leaves
atggcctctgattccgccggagccacaatctccggcaacttctcaaactccgacaactcagaaaccctaaatctcaacactacgaaactctactcatcagcaatttcctctatctctccacaattcccctcaccgaaaccaacatcttcatgtccttcaatccctaattcaaaacgaatccctaatactaacttcatcgtcgatctcttccgcctcccacaccaatcatcctccgtcgctttcttcctctcacatttccactccgatcactactccggtctctcctcttcctggtccaaaggaataatctactgctcacacaaaaccgctcgtctcgttgcagaaatccttcaagttccttcacaattcgttttcgctttacctatgaaccaaatggttaagatcgatggctctgaagttgtgttgattgaagctaatcattgtccaggagcggtacagtttttgtttaaagtcaaattagagagcagtggatttgaaaagtatgttcatactggagattttagattctgtgatgagatgagatttgatccgtttcttaatggttttgttggttgtgatggtgtttttctcgatactacttattgtaatcctaagtttgtttttccgagtcaagaagagtctgttggttatgttgttagtgtgatagataagattagtgaggagaaggttttgtttcttgtagctacttatgttgttggtaaagagaagattttggttgagattgctaggagatatgagaatgagagtgatgttcatgttgtggggtggaatgtgttgggtgagacttggccgtattttaggccgaattttgtgaagatgaatgagattatggttgagaaagggtatgataaggttgtaggttttgtgcctacagggtggacttatgaagtgaagcggaataagtttgcggttaggtttaaagattcgatggagattcatcttgtaccgtatagtgagcattcgaattatgatgaacttagagagtttataaagttcctgaaacctaaaagagttattcctactgttggagttgatattgagaagtttgattgcaaggaggttaataagatgcagaagcatttctctggattggttgatgagatggcaaacaagaaagattttttattgggtttctatcgtcagtcttaccagaagaatgagaaaagtgatgtagatgttgtgtcacacagtgctgaggtttacgaagaggaagagaaaaatgcatgtgaagacggtggagagaatgttccatcatctagaggacccatattgcatgatacaactccaagtagtgattcaagattgctgataaaactacgtgattctttgcctgcttgggtcactgaagagcagatgttagatctgattaagaagcatgctggtaatcccgtggatatagtaagtaacttttatgaatatgaagcagagctttacaagcaagcctctcttcccacgccttccttgaataatcaggctgttttgtttgatgacgatgtaaccgacctccaacctaatcctgtgaaaggcatttgtccagatgttcaagcaattcaaaaaggttttgacttaccaagaaaaatgaatttaacaaagggtactatttctcctgggaagagaggcaaaagctcgggcagtaagtcaaacaagaaggccaagaaagatccaaaatcaaaaccagttggtccagggcagccaacactttttaagtttttcaataaggtcttagatggtggatctaattctgttagtgttggttcagagactgaagaatgcaatacagataaaaagatggtccacattgatgcttcagaagcatacaaagaagtgacagatcaatttattgatattgttaacggttctgaatctttaagagattatgctgcttccatcattgatgaggctaaaggagatataagtagggcactgaacatctattatagcaaaccccgtgaaatacctggtgaccatgcaggtgagagaggactctctagcaaaacaattcagtatccgaaatgttcagaagcatgctcctctcaggaggacaaaaaggcttcagaaaattcaggacatgcagtcaacatatgcgtgcagacatcagcagaggaaagtgtagacaagaattatgtatctctacctcctgaaaaatatcaacctaaagagcacgcttgttggagggagggacagcctgctccatatatccaccttgtccgaacatttgcttctgttgaaagtgaaaagggaaagatcaaagctatgtctatgctttgcaacatgtttagaagcttgtttgctctctctccagaagatgttctgcccgctgtttatctttgcacaaataagattgccgctgaccatgagaatattgagcttaacattggtggaagtctaatctcttctgcattggaagaagcatgtggaataagtcggtctactgtgagagatatgtataatagcttgggggatcttggggatgttgctcagctatgtcgacaaacgcaaaagctactggttcctccacctccacttctagttagagatgtgttttcaactctacgaaagataagaaagctcctaacagtttttctcagtgtgcagacaggtactggaagtactaggctaaagaaaaatctcatcgtgaagctaatgcgctcttgtagagagaaagagatcaaatttcttgttagaacattgttccgtgttgtaagcagtgatgtccctgttcaggcccgtaatttaaggattggcgctatgttgagaactgttctacctgcacttgggcgagcaatcgttatgaattctttctggaatgaccataataaagaactatcagaaagctgtttcagggagaaacttgagggtgtttctgctgcagtagttgaggcttacaacattcttccatctctggacgtggttgttccttctctcatggacaaagacattgagttttcaacgtcaactctgtcaatggtcccagggatacctataaaacccatgcttgcaaaaattgctaagggggttcaagaattttttaacctctcccaagaaaaggcctttacttgtgaatacaaatatgatggccagcgcgcccagatccataagttacttgatggtactgtgtgtatcttttctcggaatggggacgaaacaacgtccagatttccggatctggttgatgtcataaaacagttttcttgccctgccgctgagacattcatgttggacgcagaggtggttgccactgatagaataaatggaaacaaactcatgtcattccaagagttatcaacaagagagagagggagcaaagatgctttgataactacagaaagtattaaggttgaagtctgcgtcttcgtgtttgatattatgtttgtcaatggagaacagctgttggctcttcccctccgtgagagacgaagacgtctaaaggaggtcttccctgagactaggccaggttatcttgagtatgctaaggaaataactgtgggagcagaagaagcgtctctgaataatcatgacacattgagtaggataaatgcttttcttgaagaagcatttcagtcatcttgtgaaggaatcatggtcaagtctttagatgtaaatgctggatactgccccacaaagcgctctgattcatggctcaaggttaagcgagattatgtagatggattgggcgatacattggatttagttcctattggtgcttggtatggcaatgggagaaaagcaggatggtatagtccattccttatggcctgcttcaaccctgagactgaagaattccagagtgtctgccgtgtcatgtctggtttttctgatgccttttacatcgaggtaatgaaaagctcaactctaacgttgttgtttaatgatgaaacagatggggtagtaaatacgttgggtttggtctatacttggactcctaattgtcacatgaaagaattctactcggaggataagatccttgcgaaaaagccgccttactacagaacaggggagacacctgacatgtggttttccgcagaggtagtttgggaaatcagaggtgctgatttcacagtctcgcctgttcacagtgccagtttaggtctcgtccatccatcgcgaggcatctctgttaggtttccgagatttatcagtaaagtgacagatagaaatcctgaagaatgtagtacggctacagatatcgcagagatgtttcatgctcaaaccagaaaaatgaacatcacttctcaacattaa

SEQ ID NO: 86449 - protein, 1420 aa, Arabidopsis thaliana
  peptide (1)..(1420): Ceres Seq. ID no. 12690618
  misc_feature (1001)..(1224): Pfam Name: ATP dependent DNA ligase domain Pfam Description: ATP dependent DNA ligase domain
  misc_feature (869)..(1285): Homolog of NCBI NO: 30680522 NR Description: ligase I -related [Arabidopsis thaliana] DNA ligase (Polydeoxyribonucleotide synthase [ATP])
  misc_feature (680)..(904): Homolog of NCBI NO: 30680522 NR Description: ligase I -related [Arabidopsis thaliana] DNA ligase (Polydeoxyribonucleotide synthase [ATP])
  misc_feature (1327)..(1410): Homolog of NCBI NO: 30680522 NR Description: ligase I -related [Arabidopsis thaliana] DNA ligase (Polydeoxyribonucleotide synthase [ATP])
  misc_feature (869)..(1285): Homolog of NCBI NO: 2129574 NR Description: DNA ligase (ATP) (EC 6.5.1.1) - Arabidopsis
  misc_feature (680)..(904): Homolog of NCBI NO: 2129574 NR Description: DNA ligase (ATP) (EC 6.5.1.1) - Arabidopsis
  misc_feature (1327)..(1410): Homolog of NCBI NO: 2129574 NR Description: DNA ligase (ATP) (EC 6.5.1.1) - Arabidopsis
  misc_feature (947)..(1280): Homolog of NCBI NO: 37535574 NR Description: putative DNA ligase [Oryza sativa (japonica >gi|16905197|gb|AAL31067.1| putative DNA ligase [Oryza sativa]
  misc_feature (682)..(904): Homolog of NCBI NO: 37535574 NR Description: putative DNA ligase [Oryza sativa (japonica >gi|16905197|gb|AAL31067.1| putative DNA ligase [Oryza sativa]
  misc_feature (1327)..(1410): Homolog of NCBI NO: 37535574 NR Description: putative DNA ligase [Oryza sativa (japonica >gi|16905197|gb|AAL31067.1| putative DNA ligase [Oryza sativa]
  misc_feature (919)..(1280): Homolog of NCBI NO: 24762424 NR Description: CG5602-PA [Drosophila melanogaster]
MASDSAGATISGNFSNSDNSETLNLNTTKLYSSAISSISPQFPSPKPTSSCPSIPNSKRIPNTNFIVDLFRLPHQSSSVAFFLSHFHSDHYSGLSSSWSKGIIYCSHKTARLVAEILQVPSQFVFALPMNQMVKIDGSEVVLIEANHCPGAVQFLFKVKLESSGFEKYVHTGDFRFCDEMRFDPFLNGFVGCDGVFLDTTYCNPKFVFPSQEESVGYVVSVIDKISEEKVLFLVATYVVGKEKILVEIARRYENESDVHVVGWNVLGETWPYFRPNFVKMNEIMVEKGYDKVVGFVPTGWTYEVKRNKFAVRFKDSMEIHLVPYSEHSNYDELREFIKFLKPKRVIPTVGVDIEKFDCKEVNKMQKHFSGLVDEMANKKDFLLGFYRQSYQKNEKSDVDVVSHSAEVYEEEEKNACEDGGENVPSSRGPILHDTTPSSDSRLLIKLRDSLPAWVTEEQMLDLIKKHAGNPVDIVSNFYEYEAELYKQASLPTPSLNNQAVLFDDDVTDLQPNPVKGICPDVQAIQKGFDLPRKMNLTKGTISPGKRGKSSGSKSNKKAKKDPKSKPVGPGQPTLFKFFNKVLDGGSNSVSVGSETEECNTDKKMVHIDASEAYKEVTDQFIDIVNGSESLRDYAASIIDEAKGDISRALNIYYSKPREIPGDHAGERGLSSKTIQYPKCSEACSSQEDKKASENSGHAVNICVQTSAEESVDKNYVSLPPEKYQPKEHACWREGQPAPYIHLVRTFASVESEKGKIKAMSMLCNMFRSLFALSPEDVLPAVYLCTNKIAADHENIELNIGGSLISSALEEACGISRSTVRDMYNSLGDLGDVAQLCRQTQKLLVPPPPLLVRDVFSTLRKIRKLLTVFLSVQTGTGSTRLKKNLIVKLMRSCREKEIKFLVRTLFRVVSSDVPVQARNLRIGAMLRTVLPALGRAIVMNSFWNDHNKELSESCFREKLEGVSAAVVEAYNILPSLDVVVPSLMDKDIEFSTSTLSMVPGIPIKPMLAKIAKGVQEFFNLSQEKAFTCEYKYDGQRAQIHKLLDGTVCIFSRNGDETTSRFPDLVDVIKQFSCPAAETFMLDAEVVATDRINGNKLMSFQELSTRERGSKDALITTESIKVEVCVFVFDIMFVNGEQLLALPLRERRRRLKEVFPETRPGYLEYAKEITVGAEEASLNNHDTLSRINAFLEEAFQSSCEGIMVKSLDVNAGYCPTKRSDSWLKVKRDYVDGLGDTLDLVPIGAWYGNGRKAGWYSPFLMACFNPETEEFQSVCRVMSGFSDAFYIEVMKSSTLTLLFNDETDGVVNTLGLVYTWTPNCHMKEFYSEDKILAKKPPYYRTGETPDMWFSAEVVWEIRGADFTVSPVHSASLGLVHPSRGISVRFPRFISKVTDRNPEECSTATDIAEMFHAQTRKMNITSQH

SEQ ID NO: 86450 - protein, 1292 aa, Arabidopsis thaliana
  peptide (1)..(1292): Ceres Seq. ID no. 12690619
  misc_feature (873)..(1096): Pfam Name: ATP dependent DNA ligase domain Pfam Description: ATP dependent DNA ligase domain
  misc_feature (741)..(1157): Homolog of NCBI NO: 30680522 NR Description: ligase I -related [Arabidopsis thaliana] DNA ligase (Polydeoxyribonucleotide synthase [ATP])
  misc_feature (552)..(776): Homolog of NCBI NO: 30680522 NR Description: ligase I -related [Arabidopsis thaliana] DNA ligase (Polydeoxyribonucleotide synthase [ATP])
  misc_feature (1199)..(1282): Homolog of NCBI NO: 30680522 NR Description: ligase I -related [Arabidopsis thaliana] DNA ligase (Polydeoxyribonucleotide synthase [ATP])
  misc_feature (741)..(1157): Homolog of NCBI NO: 2129574 NR Description: DNA ligase (ATP) (EC 6.5.1.1) - Arabidopsis
  misc_feature (552)..(776): Homolog of NCBI NO: 2129574 NR Description: DNA ligase (ATP) (EC 6.5.1.1) - Arabidopsis
  misc_feature (1199)..(1282): Homolog of NCBI NO: 2129574 NR Description: DNA ligase (ATP) (EC 6.5.1.1) - Arabidopsis
  misc_feature (819)..(1152): Homolog of NCBI NO: 37535574 NR Description: putative DNA ligase [Oryza sativa (japonica >gi|16905197|gb|AAL31067.1| putative DNA ligase [Oryza sativa]
  misc_feature (554)..(776): Homolog of NCBI NO: 37535574 NR Description: putative DNA ligase [Oryza sativa (japonica >gi|16905197|gb|AAL31067.1| putative DNA ligase [Oryza sativa]
  misc_feature (1199)..(1282): Homolog of NCBI NO: 37535574 NR Description: putative DNA ligase [Oryza sativa (japonica >gi|16905197|gb|AAL31067.1| putative DNA ligase [Oryza sativa]
  misc_feature (791)..(1152): Homolog of NCBI NO: 24762424 NR Description: CG5602-PA [Drosophila melanogaster]
MNQMVKIDGSEVVLIEANHCPGAVQFLFKVKLESSGFEKYVHTGDFRFCDEMRFDPFLNGFVGCDGVFLDTTYCNPKFVFPSQEESVGYVVSVIDKISEEKVLFLVATYVVGKEKILVEIARRYENESDVHVVGWNVLGETWPYFRPNFVKMNEIMVEKGYDKVVGFVPTGWTYEVKRNKFAVRFKDSMEIHLVPYSEHSNYDELREFIKFLKPKRVIPTVGVDIEKFDCKEVNKMQKHFSGLVDEMANKKDFLLGFYRQSYQKNEKSDVDVVSHSAEVYEEEEKNACEDGGENVPSSRGPILHDTTPSSDSRLLIKLRDSLPAWVTEEQMLDLIKKHAGNPVDIVSNFYEYEAELYKQASLPTPSLNNQAVLFDDDVTDLQPNPVKGICPDVQAIQKGFDLPRKMNLTKGTISPGKRGKSSGSKSNKKAKKDPKSKPVGPGQPTLFKFFNKVLDGGSNSVSVGSETEECNTDKKMVHIDASEAYKEVTDQFIDIVNGSESLRDYAASIIDEAKGDISRALNIYYSKPREIPGDHAGERGLSSKTIQYPKCSEACSSQEDKKASENSGHAVNICVQTSAEESVDKNYVSLPPEKYQPKEHACWREGQPAPYIHLVRTFASVESEKGKIKAMSMLCNMFRSLFALSPEDVLPAVYLCTNKIAADHENIELNIGGSLISSALEEACGISRSTVRDMYNSLGDLGDVAQLCRQTQKLLVPPPPLLVRDVFSTLRKIRKLLTVFLSVQTGTGSTRLKKNLIVKLMRSCREKEIKFLVRTLFRVVSSDVPVQARNLRIGAMLRTVLPALGRAIVMNSFWNDHNKELSESCFREKLEGVSAAVVEAYNILPSLDVVVPSLMDKDIEFSTSTLSMVPGIPIKPMLAKIAKGVQEFFNLSQEKAFTCEYKYDGQRAQIHKLLDGTVCIFSRNGDETTSRFPDLVDVIKQFSCPAAETFMLDAEVVATDRINGNKLMSFQELSTRERGSKDALITTESIKVEVCVFVFDIMFVNGEQLLALPLRERRRRLKEVFPETRPGYLEYAKEITVGAEEASLNNHDTLSRINAFLEEAFQSSCEGIMVKSLDVNAGYCPTKRSDSWLKVKRDYVDGLGDTLDLVPIGAWYGNGRKAGWYSPFLMACFNPETEEFQSVCRVMSGFSDAFYIEVMKSSTLTLLFNDETDGVVNTLGLVYTWTPNCHMKEFYSEDKILAKKPPYYRTGETPDMWFSAEVVWEIRGADFTVSPVHSASLGLVHPSRGISVRFPRFISKVTDRNPEECSTATDIAEMFHAQTRKMNITSQH

SEQ ID NO: 86451 - protein, 1289 aa, Arabidopsis thaliana
  peptide (1)..(1289): Ceres Seq. ID no. 12690620
  misc_feature (870)..(1093): Pfam Name: ATP dependent DNA ligase domain Pfam Description: ATP dependent DNA ligase domain
  misc_feature (738)..(1154): Homolog of NCBI NO: 30680522 NR Description: ligase I -related [Arabidopsis thaliana] DNA ligase (Polydeoxyribonucleotide synthase [ATP])
  misc_feature (549)..(773): Homolog of NCBI NO: 30680522 NR Description: ligase I -related [Arabidopsis thaliana] DNA ligase (Polydeoxyribonucleotide synthase [ATP])
  misc_feature (1196)..(1279): Homolog of NCBI NO: 30680522 NR Description: ligase I -related [Arabidopsis thaliana] DNA ligase (Polydeoxyribonucleotide synthase [ATP])
  misc_feature (738)..(1154): Homolog of NCBI NO: 2129574 NR Description: DNA ligase (ATP) (EC 6.5.1.1) - Arabidopsis
  misc_feature (549)..(773): Homolog of NCBI NO: 2129574 NR Description: DNA ligase (ATP) (EC 6.5.1.1) - Arabidopsis
  misc_feature (1196)..(1279): Homolog of NCBI NO: 2129574 NR Description: DNA ligase (ATP) (EC 6.5.1.1) - Arabidopsis
  misc_feature (816)..(1149): Homolog of NCBI NO: 37535574 NR Description: putative DNA ligase [Oryza sativa (japonica >gi|16905197|gb|AAL31067.1| putative DNA ligase [Oryza sativa]
  misc_feature (551)..(773): Homolog of NCBI NO: 37535574 NR Description: putative DNA ligase [Oryza sativa (japonica >gi|16905197|gb|AAL31067.1| putative DNA ligase [Oryza sativa]
  misc_feature (1196)..(1279): Homolog of NCBI NO: 37535574 NR Description: putative DNA ligase [Oryza sativa (japonica >gi|16905197|gb|AAL31067.1| putative DNA ligase [Oryza sativa]
  misc_feature (788)..(1149): Homolog of NCBI NO: 24762424 NR Description: CG5602-PA [Drosophila melanogaster]
MVKIDGSEVVLIEANHCPGAVQFLFKVKLESSGFEKYVHTGDFRFCDEMRFDPFLNGFVGCDGVFLDTTYCNPKFVFPSQEESVGYVVSVIDKISEEKVLFLVATYVVGKEKILVEIARRYENESDVHVVGWNVLGETWPYFRPNFVKMNEIMVEKGYDKVVGFVPTGWTYEVKRNKFAVRFKDSMEIHLVPYSEHSNYDELREFIKFLKPKRVIPTVGVDIEKFDCKEVNKMQKHFSGLVDEMANKKDFLLGFYRQSYQKNEKSDVDVVSHSAEVYEEEEKNACEDGGENVPSSRGPILHDTTPSSDSRLLIKLRDSLPAWVTEEQMLDLIKKHAGNPVDIVSNFYEYEAELYKQASLPTPSLNNQAVLFDDDVTDLQPNPVKGICPDVQAIQKGFDLPRKMNLTKGTISPGKRGKSSGSKSNKKAKKDPKSKPVGPGQPTLFKFFNKVLDGGSNSVSVGSETEECNTDKKMVHIDASEAYKEVTDQFIDIVNGSESLRDYAASIIDEAKGDISRALNIYYSKPREIPGDHAGERGLSSKTIQYPKCSEACSSQEDKKASENSGHAVNICVQTSAEESVDKNYVSLPPEKYQPKEHACWREGQPAPYIHLVRTFASVESEKGKIKAMSMLCNMFRSLFALSPEDVLPAVYLCTNKIAADHENIELNIGGSLISSALEEACGISRSTVRDMYNSLGDLGDVAQLCRQTQKLLVPPPPLLVRDVFSTLRKIRKLLTVFLSVQTGTGSTRLKKNLIVKLMRSCREKEIKFLVRTLFRVVSSDVPVQARNLRIGAMLRTVLPALGRAIVMNSFWNDHNKELSESCFREKLEGVSAAVVEAYNILPSLDVVVPSLMDKDIEFSTSTLSMVPGIPIKPMLAKIAKGVQEFFNLSQEKAFTCEYKYDGQRAQIHKLLDGTVCIFSRNGDETTSRFPDLVDVIKQFSCPAAETFMLDAEVVATDRINGNKLMSFQELSTRERGSKDALITTESIKVEVCVFVFDIMFVNGEQLLALPLRERRRRLKEVFPETRPGYLEYAKEITVGAEEASLNNHDTLSRINAFLEEAFQSSCEGIMVKSLDVNAGYCPTKRSDSWLKVKRDYVDGLGDTLDLVPIGAWYGNGRKAGWYSPFLMACFNPETEEFQSVCRVMSGFSDAFYIEVMKSSTLTLLFNDETDGVVNTLGLVYTWTPNCHMKEFYSEDKILAKKPPYYRTGETPDMWFSAEVVWEIRGADFTVSPVHSASLGLVHPSRGISVRFPRFISKVTDRNPEECSTATDIAEMFHAQTRKMNITSQH

SEQ ID NO: 86452 - DNA, 2088 bp, Arabidopsis thaliana
  misc_feature (1)..(2088): Ceres Seq. ID no. 12690658
  misc_feature: MA Experiment ID: 20000307 Result: Down-regulated in Transcription
  misc_feature: MA Experiment 20000307 PARAMETER Experiment Name: At_Germinating_Seeds_Sub_P Parameter: Age (hr) Value: 24 vs. 0
  misc_feature: MA Experiment 20000307 PARAMETER Experiment Name: At_Germinating_Seeds_Sub_P Parameter: Organism Value: A. thaliana
  misc_feature: MA Experiment 20000307 PARAMETER Experiment Name: At_Germinating_Seeds_Sub_P Parameter: Plant Line Value: WS
  misc_feature: MA Experiment 20000307 PARAMETER Experiment Name: At_Germinating_Seeds_Sub_P Parameter: Tissue Value: Germinating Seeds
  misc_feature: MA Experiment ID: 20000314 Result: Down-regulated in Transcription
  misc_feature: MA Experiment 20000314 PARAMETER Experiment Name: At_14day_Shoots-Roots_Sub_P Parameter: Age (day) Value: 14
  misc_feature: MA Experiment 20000314 PARAMETER Experiment Name: At_14day_Shoots-Roots_Sub_P Parameter: Organism Value: A. thaliana
  misc_feature: MA Experiment 20000314 PARAMETER Experiment Name: At_14day_Shoots-Roots_Sub_P Parameter: Plant Line Value: WS
  misc_feature: MA Experiment 20000314 PARAMETER Experiment Name: At_14day_Shoots-Roots_Sub_P Parameter: Tissue Value: Roots vs. Whole Plant
  misc_feature: MA Experiment ID: 20000328 Result: Down-regulated in Transcription
  misc_feature: MA Experiment 20000328 PARAMETER Experiment Name: At_42deg_Heat_Sub_P Parameter: Age (day) Value: 14
  misc_feature: MA Experiment 20000328 PARAMETER Experiment Name: At_42deg_Heat_Sub_P Parameter: Organism Value: A. thaliana
  misc_feature: MA Experiment 20000328 PARAMETER Experiment Name: At_42deg_Heat_Sub_P Parameter: Plant Line Value: WS
  misc_feature: MA Experiment 20000328 PARAMETER Experiment Name: At_42deg_Heat_Sub_P Parameter: Temperature (deg C) Value: 42 vs. 22
  misc_feature: MA Experiment 20000328 PARAMETER Experiment Name: At_42deg_Heat_Sub_P Parameter: Timepoint (hr) Value: 6
  misc_feature: MA Experiment 20000328 PARAMETER Experiment Name: At_42deg_Heat_Sub_P Parameter: Tissue Value: Aerial
  misc_feature: MA Experiment ID: 20000355 Result: Down-regulated in Transcription
  misc_feature: MA Experiment 20000355 PARAMETER Experiment Name: At_Siliques_Sub_P Parameter: Age (day) Value: 21
  misc_feature: MA Experiment 20000355 PARAMETER Experiment Name: At_Siliques_Sub_P Parameter: Organism Value: A. thaliana
  misc_feature: MA Experiment 20000355 PARAMETER Experiment Name: At_Siliques_Sub_P Parameter: Plant Line Value: WS
  misc_feature: MA Experiment 20000355 PARAMETER Experiment Name: At_Siliques_Sub_P Parameter: Tissue Value: Less Than 5mm Siliques vs. Whole Plant
atgatcaatttgtctctttccctgaccaaatacatgtcctatagcttcatatggatgctctttgtgatccatatatcttgtgttttatcagctactgagcttgagcttcacagacgctgcaatggcacgtttagctgcggcgatcagagagaactcttttaccctttctggacatctggtagagaagactgtggccaccctgacttcaagctcgacgactgtagcggaagattcgcagagcttagcatttcctctgtgaaatttagaattctagcgtcggtttatggctctaatatcataagactcggcagatccgaatatataggcgatctctgtccccaagatcctataaatgcaccattcagcgaaagtgtccttccatttgctcctaacaccgagctgctgactattttttacaactgcagccgagactttccacagcaagttactaattttggagactttgcttgtggggatgatagtgatgatgatagaagttactatgtgacgagaaacctctcgtttcctccactcagtgagattaatgaccttttatacgacttcagtcaatcttgcgatagaaacgtcagtattcccgcatctggatcgacgcttaacatactgcagagcactccgagtaacgataatctaaagaaggctctcgaatacggtttcgagcttgaacttaaccaagattgtcggacgtgcatagactctaagggtgcttgtggatatagtcaaacctcaagtagattcgtctgctattctatagaagagccacaaacccctactccaccaaaccctactagaaacaagggcattgcggttgcttctgtatcgggtttggccattcttctactcgcaggtttgttcttatgcatcagacggagaaggaagactcaggacgctcaatacacaagcaaaagcttgcctatcacatcatactcgagtagagatacatcaagaaatccaacttccacaacaatctcctccagtagcaatcactctcttcttccctcaatctctaaccttgcaaaccgaagcgactactgtggagtccaagtctttagctatgaagaacttgaagaagcaactgagaatttctctagagaactcggggatggtggcttcggtactgtctactacggcgtgttgaaagacggacgagctgtagcagtgaaacgactctacgaaagatcactaaaacgcgtagaacaattcaagaacgaaatcgaaatcttgaaatcactaaaacatccgaacctcgtgatcctctacggatgcacatcaagacacagcagagagcttctactagtctacgaatacatctcaaacggaactctagccgaacatctacacggcaaccgcgcagaagctcgtcctctctgctggtcaacccgattaaacatcgcaatcgaaaccgcaagcgcattatcattcctccacataaaaggaatcatacacagagacatcaagactactaacatactcttagacgataactaccaagtcaaagtcgccgatttcggactttcacggttgtttccaatggatcaaacacacatatcaaccgcaccacaaggcacaccaggctacgtggatccagagtattaccaatgttaccaattaaacgagaagagcgatgtctacagcttcggagtcgtactaacggaactaatctcatcaaaagaagcagtagacattactcgacaccgtcacgatatcaatctagcgaacatggctgtatctaagattcagaacaatgcattacacgagcttgtggattcgagtttaggatacgataatgatcctgaagttaggaggaagatgatggcggtggcggaattagcgtttcgatgtttgcaacaagagagagatgttagaccggcgatggatgagattgtggagattttgagagggattaaggatgatgagaagaagcgtgtgttggtgaagtcgccggatgttgtggatattgaatgcggtggtggtgatgatgttggattgttgaggaatagtgttccgccgccgatttcgccggagactgataagtggactagtagttctgatacggcggcgagtttgtaa

SEQ ID NO: 86453 - protein, 695 aa, Arabidopsis thaliana
  peptide (1)..(695): Ceres Seq. ID no. 12690659
  misc_feature (216)..(695): Homolog of NCBI NO: 24417464 NR Description: unknown [Arabidopsis thaliana]
  misc_feature (8)..(152): Homolog of NCBI NO: 24417464 NR Description: unknown [Arabidopsis thaliana]
  misc_feature (35)..(694): Homolog of NCBI NO: 10177797 NR Description: contains similarity to protein
  misc_feature (15)..(694): Homolog of NCBI NO: 22327431 NR Description: protein kinase - like protein; protein id: supported by cDNA: gi_18175790 [Arabidopsis thaliana] putative protein kinase [Arabidopsis thaliana]
  misc_feature (55)..(691): Homolog of NCBI NO: 34911340 NR Description: P0034C09.1 [Oryza sativa (japonica
  misc_feature (12)..(300): Homolog of NCBI NO: 15219781 NR Description: receptor serine/threonine kinase PR5K, putative; id: At1g66910.1 [Arabidopsis thaliana] >gi|25404649|pir||H96692
  misc_feature (356)..(643): Homolog of NCBI NO: 15219781 NR Description: receptor serine/threonine kinase PR5K, putative; id: At1g66910.1 [Arabidopsis thaliana] >gi|25404649|pir||H96692
  misc_feature (229)..(663): Homolog of NCBI NO: 25402857 NR Description: protein F15H18.11 [imported] - Arabidopsis >gi|6714300|gb|AAF25996.1|AC013354_15 F15H18.11 [Arabidopsis
  misc_feature (352)..(663): Homolog of NCBI NO: 15221764 NR Description: wall-associated kinase, putative; protein id:
  misc_feature (22)..(639): Homolog of NCBI NO: 15408730 NR Description: P0443D08.12 [Oryza sativa (japonica
MINLSLSLTKYMSYSFIWMLFVIHISCVLSATELELHRRCNGTFSCGDQRELFYPFWTSGREDCGHPDFKLDDCSGRFAELSISSVKFRILASVYGSNIIRLGRSEYIGDLCPQDPINAPFSESVLPFAPNTELLTIFYNCSRDFPQQVTNFGDFACGDDSDDDRSYYVTRNLSFPPLSEINDLLYDFSQSCDRNVSIPASGSTLNILQSTPSNDNLKKALEYGFELELNQDCRTCIDSKGACGYSQTSSRFVCYSIEEPQTPTPPNPTRNKGIAVASVSGLAILLLAGLFLCIRRRRKTQDAQYTSKSLPITSYSSRDTSRNPTSTTISSSSNHSLLPSISNLANRSDYCGVQVFSYEELEEATENFSRELGDGGFGTVYYGVLKDGRAVAVKRLYERSLKRVEQFKNEIEILKSLKHPNLVILYGCTSRHSRELLLVYEYISNGTLAEHLHGNRAEARPLCWSTRLNIAIETASALSFLHIKGIIHRDIKTTNILLDDNYQVKVADFGLSRLFPMDQTHISTAPQGTPGYVDPEYYQCYQLNEKSDVYSFGVVLTELISSKEAVDITRHRHDINLANMAVSKIQNNALHELVDSSLGYDNDPEVRRKMMAVAELAFRCLQQERDVRPAMDEIVEILRGIKDDEKKRVLVKSPDVVDIECGGGDDVGLLRNSVPPPISPETDKWTSSSDTAASL

SEQ ID NO: 86454 - protein, 684 aa, Arabidopsis thaliana
  peptide (1)..(684): Ceres Seq. ID no. 12690660
  misc_feature (205)..(684): Homolog of NCBI NO: 24417464 NR Description: unknown [Arabidopsis thaliana]
  misc_feature (1)..(141): Homolog of NCBI NO: 24417464 NR Description: unknown [Arabidopsis thaliana]
  misc_feature (24)..(683): Homolog of NCBI NO: 10177797 NR Description: contains similarity to protein
  misc_feature (4)..(683): Homolog of NCBI NO: 22327431 NR Description: protein kinase - like protein; protein id: supported by cDNA: gi_18175790 [Arabidopsis thaliana] putative protein kinase [Arabidopsis thaliana]
  misc_feature (44)..(680): Homolog of NCBI NO: 34911340 NR Description: P0034C09.1 [Oryza sativa (japonica
  misc_feature (1)..(289): Homolog of NCBI NO: 15219781 NR Description: receptor serine/threonine kinase PR5K, putative; id: At1g66910.1 [Arabidopsis thaliana] >gi|25404649|pir||H96692
  misc_feature (345)..(632): Homolog of NCBI NO: 15219781 NR Description: receptor serine/threonine kinase PR5K, putative; id: At1g66910.1 [Arabidopsis thaliana] >gi|25404649|pir||H96692
  misc_feature (218)..(652): Homolog of NCBI NO: 25402857 NR Description: protein F15H18.11 [imported] - Arabidopsis >gi|6714300|gb|AAF25996.1|AC013354_15 F15H18.11 [Arabidopsis
  misc_feature (341)..(652): Homolog of NCBI NO: 15221764 NR Description: wall-associated kinase, putative; protein id:
  misc_feature (11)..(628): Homolog of NCBI NO: 15408730 NR Description: P0443D08.12 [Oryza sativa (japonica
MSYSFIWMLFVIHISCVLSATELELHRRCNGTFSCGDQRELFYPFWTSGREDCGHPDFKLDDCSGRFAELSISSVKFRILASVYGSNIIRLGRSEYIGDLCPQDPINAPFSESVLPFAPNTELLTIFYNCSRDFPQQVTNFGDFACGDDSDDDRSYYVTRNLSFPPLSEINDLLYDFSQSCDRNVSIPASGSTLNILQSTPSNDNLKKALEYGFELELNQDCRTCIDSKGACGYSQTSSRFVCYSIEEPQTPTPPNPTRNKGIAVASVSGLAILLLAGLFLCIRRRRKTQDAQYTSKSLPITSYSSRDTSRNPTSTTISSSSNHSLLPSISNLANRSDYCGVQVFSYEELEEATENFSRELGDGGFGTVYYGVLKDGRAVAVKRLYERSLKRVEQFKNEIEILKSLKHPNLVILYGCTSRHSRELLLVYEYISNGTLAEHLHGNRAEARPLCWSTRLNIAIETASALSFLHIKGIIHRDIKTTNILLDDNYQVKVADFGLSRLFPMDQTHISTAPQGTPGYVDPEYYQCYQLNEKSDVYSFGVVLTELISSKEAVDITRHRHDINLANMAVSKIQNNALHELVDSSLGYDNDPEVRRKMMAVAELAFRCLQQERDVRPAMDEIVEILRGIKDDEKKRVLVKSPDVVDIECGGGDDVGLLRNSVPPPISPETDKWTSSSDTAASL

SEQ ID NO: 86455 - protein, 677 aa, Arabidopsis thaliana
  peptide (1)..(677): Ceres Seq. ID no. 12690661
  misc_feature (198)..(677): Homolog of NCBI NO: 24417464 NR Description: unknown [Arabidopsis thaliana]
  misc_feature (1)..(134): Homolog of NCBI NO: 24417464 NR Description: unknown [Arabidopsis thaliana]
  misc_feature (17)..(676): Homolog of NCBI NO: 10177797 NR Description: contains similarity to protein
  misc_feature (1)..(676): Homolog of NCBI NO: 22327431 NR Description: protein kinase - like protein; protein id: supported by cDNA: gi_18175790 [Arabidopsis thaliana] putative protein kinase [Arabidopsis thaliana]
  misc_feature (37)..(673): Homolog of NCBI NO: 34911340 NR Description: P0034C09.1 [Oryza sativa (japonica
  misc_feature (1)..(282): Homolog of NCBI NO: 15219781 NR Description: receptor serine/threonine kinase PR5K, putative; id: At1g66910.1 [Arabidopsis thaliana] >gi|25404649|pir||H96692
  misc_feature (338)..(625): Homolog of NCBI NO: 15219781 NR Description: receptor serine/threonine kinase PR5K, putative; id: At1g66910.1 [Arabidopsis thaliana] >gi|25404649|pir||H96692
  misc_feature (211)..(645): Homolog of NCBI NO: 25402857 NR Description: protein F15H18.11 [imported] - Arabidopsis >gi|6714300|gb|AAF25996.1|AC013354_15 F15H18.11 [Arabidopsis
  misc_feature (334)..(645): Homolog of NCBI NO: 15221764 NR Description: wall-associated kinase, putative; protein id:
  misc_feature (4)..(621): Homolog of NCBI NO: 15408730 NR Description: P0443D08.12 [Oryza sativa (japonica
MLFVIHISCVLSATELELHRRCNGTFSCGDQRELFYPFWTSGREDCGHPDFKLDDCSGRFAELSISSVKFRILASVYGSNIIRLGRSEYIGDLCPQDPINAPFSESVLPFAPNTELLTIFYNCSRDFPQQVTNFGDFACGDDSDDDRSYYVTRNLSFPPLSEINDLLYDFSQSCDRNVSIPASGSTLNILQSTPSNDNLKKALEYGFELELNQDCRTCIDSKGACGYSQTSSRFVCYSIEEPQTPTPPNPTRNKGIAVASVSGLAILLLAGLFLCIRRRRKTQDAQYTSKSLPITSYSSRDTSRNPTSTTISSSSNHSLLPSISNLANRSDYCGVQVFSYEELEEATENFSRELGDGGFGTVYYGVLKDGRAVAVKRLYERSLKRVEQFKNEIEILKSLKHPNLVILYGCTSRHSRELLLVYEYISNGTLAEHLHGNRAEARPLCWSTRLNIAIETASALSFLHIKGIIHRDIKTTNILLDDNYQVKVADFGLSRLFPMDQTHISTAPQGTPGYVDPEYYQCYQLNEKSDVYSFGVVLTELISSKEAVDITRHRHDINLANMAVSKIQNNALHELVDSSLGYDNDPEVRRKMMAVAELAFRCLQQERDVRPAMDEIVEILRGIKDDEKKRVLVKSPDVVDIECGGGDDVGLLRNSVPPPISPETDKWTSSSDTAASL

SEQ ID NO: 86456 - DNA, 3357 bp, Arabidopsis thaliana
  misc_feature (1)..(3357): Ceres Seq. ID no. 12690677
  misc_feature: MA Experiment ID: 20000314 Result: Down-regulated in Transcription
  misc_feature: MA Experiment 20000314 PARAMETER Experiment Name: At_14day_Shoots-Roots_Sub_P Parameter: Age (day) Value: 14
  misc_feature: MA Experiment 20000314 PARAMETER Experiment Name: At_14day_Shoots-Roots_Sub_P Parameter: Organism Value: A. thaliana
  misc_feature: MA Experiment 20000314 PARAMETER Experiment Name: At_14day_Shoots-Roots_Sub_P Parameter: Plant Line Value: WS
  misc_feature: MA Experiment 20000314 PARAMETER Experiment Name: At_14day_Shoots-Roots_Sub_P Parameter: Tissue Value: Roots vs. Whole Plant
  misc_feature: MA Experiment ID: 20000315 Result: Down-regulated in Transcription
  misc_feature: MA Experiment 20000315 PARAMETER Experiment Name: At_14day_Shoots-Roots_Sub_P Parameter: Age (day) Value: 14
  misc_feature: MA Experiment 20000315 PARAMETER Experiment Name: At_14day_Shoots-Roots_Sub_P Parameter: Organism Value: A. thaliana
  misc_feature: MA Experiment 20000315 PARAMETER Experiment Name: At_14day_Shoots-Roots_Sub_P Parameter: Plant Line Value: WS
  misc_feature: MA Experiment 20000315 PARAMETER Experiment Name: At_14day_Shoots-Roots_Sub_P Parameter: Tissue Value: Shoots vs. Whole Plant
  misc_feature: MA Experiment ID: 20000327 Result: Down-regulated in Transcription
  misc_feature: MA Experiment 20000327 PARAMETER Experiment Name: At_42deg_Heat_Sub_P Parameter: Age (day) Value: 14
  misc_feature: MA Experiment 20000327 PARAMETER Experiment Name: At_42deg_Heat_Sub_P Parameter: Organism Value: A. thaliana
  misc_feature: MA Experiment 20000327 PARAMETER Experiment Name: At_42deg_Heat_Sub_P Parameter: Plant Line Value: WS
  misc_feature: MA Experiment 20000327 PARAMETER Experiment Name: At_42deg_Heat_Sub_P Parameter: Temperature (deg C) Value: 42 vs. 22
  misc_feature: MA Experiment 20000327 PARAMETER Experiment Name: At_42deg_Heat_Sub_P Parameter: Timepoint (hr) Value: 1
  misc_feature: MA Experiment 20000327 PARAMETER Experiment Name: At_42deg_Heat_Sub_P Parameter: Tissue Value: Aerial
  misc_feature: MA Experiment ID: 20000328 Result: Down-regulated in Transcription
  misc_feature: MA Experiment 20000328 PARAMETER Experiment Name: At_42deg_Heat_Sub_P Parameter: Age (day) Value: 14
  misc_feature: MA Experiment 20000328 PARAMETER Experiment Name: At_42deg_Heat_Sub_P Parameter: Organism Value: A. thaliana
  misc_feature: MA Experiment 20000328 PARAMETER Experiment Name: At_42deg_Heat_Sub_P Parameter: Plant Line Value: WS
  misc_feature: MA Experiment 20000328 PARAMETER Experiment Name: At_42deg_Heat_Sub_P Parameter: Temperature (deg C) Value: 42 vs. 22
  misc_feature: MA Experiment 20000328 PARAMETER Experiment Name: At_42deg_Heat_Sub_P Parameter: Timepoint (hr) Value: 6
  misc_feature: MA Experiment 20000328 PARAMETER Experiment Name: At_42deg_Heat_Sub_P Parameter: Tissue Value: Aerial
atgaattcccagcaaagtactcggacaaagcaaatgttacaacaatcttcgacgcatttactctgcggtgttgttctgttacagctgtttgctgctcaagtcgatgctcaaagatctacaagtccatggcagacgctcagtggtgatgctccacttgtgattgctcgtggtggattttctggactttttccagattcgagtttagctgcataccaatttgcaatggtggtaagtgtagccgatgttgttctatggtgtgatgttcagctaaccaaagatgggcatgggatttgcttccctgatttaaatctggccaatgcctcaaatagtgaagaagtttacccaaatcgtcaaaaatcttaccctgttaatggagtcactactaagggttggttccccattgatttctccttgacagagctgcagaaagttttgttttctttgatccgaggaatattatcacgatcaggaaaatttgatgaaaatggatactcgatttcaacggttcaaaatgtagccacgcagatgaaaccagcattattctggttaaatgttcagcatgatgagttctatgagcagcataatcttagcatgagtagttttcttttatcaacttcaagaactgtttccattgacttcatctcttcccctgaagtaaatttctttaggaaaattgctggcggtttcgggaataatggaccgagttttgtgttccagtttatggggaaagaagatttcgagccgacaacaaatcgaacatacggttctatcttgagtaacctaagttttgtcaagacgtttgcttcagggattcttgtacccaaatcttacatattgcccctcgatgacaagcagtacttgcttcctcatacatccttagttcaagatgctcacaaagcagggctaaaactatatgcgtcaggttttgcaaatgatgttgatattgcatataactacagttgggatccagtttctgaatatctatcttttgttgacaatggcaatttttctgttgatggtatgctctctgattttcctttaactgcatctgcatctgttgactgcttctcccacattggcagaaacgctacaaaacaagtggattttcttgttatatcaaaaaatggtgcaagtggggagtatcctggatgtacaaaattggcatatgagaaggcaatcaaagatggttctgatgttattgattgcccagttcaaatgtctagcgacggtattcccttttgctcaagttcgatagatctcgtgaacagcacaacggtcggccaaactcatctcagaaaccgttccataatcgttcctgagattagctcagttgctggaatatttacttttagtctcacatggcatgagatccagagtttgactcctgcgatttcaaacccttttagggagaacggtatgtcgaggaatccgaatgagagaaattctgggaaccttatttcactctatgaattcctaaacttggcaaaaaactccacttctctatccggtattttgatcagtctagagaatgtagtatacctaagagagaagaaaggactcgacgtagttaaagtagttcttaatagactcacggaaactggttacatcgttggaacattaaaggtcatgattcagtctacgaccagattggttctagttgacttcaagaatcagagcacgtacaagactgtctacaaaattaaagaaaccattggtaatattactgactcggccatcgaagacataaagaaattcgctaacgctgttgtaatcaacaaagcttctgtttttcctaactctgattcgtttctcactggacaaacaacaaatgttttggagaggttgcagaagtttcagctcccggtttatgtggaactatttcagaatgagtttgtctctcaaccatttgacttcttcgcagatgaaactgttgagataaatgcatatatctttggagccggtatcaatggaaccatcacagagttcccttatacagctgcaagatataaaaggaatcgatgtttgggaagagaagaagtaccaccttacatgttacctgttaaccccggtggcgtcttaacgctcataagtacttcatccttacctccagcccaagatccaaacccgattttcacacacgatgatgtcactgagccaccactacctccagttatagcaaaatccccaacctcaactcttggaacaccatcaaccattgcaaaacctctaagaaattttctcaaagtaattcgcatagtttcatggtcagtagccggagttgtattgttcctggtcttattaacattagttttctgttttcaccgaaagagagaaacacggctgagacaacagaagctgaaggctcttattccactcgaacactatacttatgcacaagtgaagagaattacaaagtcatttgcggaagttgttgggagaggaggatttggaattgtttataaaggaacacttagtgatggccgggtggttgcggtgaaggtcttgaaagacacaaaaggtaatggtgaagacttcatcaatgaagttgcgaccatgagcagaacttctcatctcaacattgtttccttgcttggtttctgctctgaaggttccaaaagggcaattatatatgagtttttggaaaatgggtcacttgataagtttatattaggcaagacctccgtgaatatggattggacggcactatatagaattgctttaggagttgctcatggtttagagtacctgcaccatagctgcaaaacaaggatagtacatttcgacattaaaccacaaaatgtactcttggatgacagtttttgtcccaaagtttcggactttggcctcgctaaactctgtgagaagaaagagagcatcttgtctatgctggacacaagaggtaccatagggtacattgcaccagagatgatctcgagagtttatgggaatgtgtcacacaagtcagatgtgtatagctatggaatgttagtccttgagataattggtgcaagaaacaaagagaaagcaaatcaagcatgtgcttctaacacaagttcaatgtactttcctgaatgggtatatagggatcttgaatcatgcaagtctggaaggcatattgaggatggaattaacagcgaagaagatgagcttgcaaagaagatgacattggtgggtttgtggtgtattcagccttctccggtagatcgtcctgcgatgaacagagttgtggagatgatggaaggaagcttggaagctcttgaagtccctcctaggcctgttttgcagcaaatccccatatcaaatcttcatgaatcttctattctttcagaggatgtctctgtctacacagaaggatga

SEQ ID NO: 86457 - protein, 1118 aa, Arabidopsis thaliana
  peptide (1)..(1118): Ceres Seq. ID no. 12690678
  misc_feature (1)..(769): Homolog of NCBI NO: 30697435 NR Description: expressed protein [Arabidopsis thaliana]
  misc_feature (1)..(769): Homolog of NCBI NO: 30794041 NR Description: unknown protein [Arabidopsis thaliana]
  misc_feature (2)..(767): Homolog of NCBI NO: 7485338 NR Description: hypothetical protein F10M23.30 - Arabidopsis >gi|4455192|emb|CAB36515.1| putative protein [Arabidopsis >gi|7269521|emb|CAB79524.1| putative protein [Arabidopsis
  misc_feature (13)..(767): Homolog of NCBI NO: 18416801 NR Description: putative protein; protein id: At4g26690.1,
  misc_feature (1)..(767): Homolog of NCBI NO: 15240520 NR Description: putative protein; protein id: At5g55480.1 thaliana] >gi|9758180|dbj|BAB08565.1|
  misc_feature (21)..(730): Homolog of NCBI NO: 38344811 NR Description: OSJNBb0022F23.4 [Oryza sativa (japonica
  misc_feature (24)..(758): Homolog of NCBI NO: 28393583 NR Description: unknown protein [Arabidopsis thaliana]
  misc_feature (24)..(732): Homolog of NCBI NO: 15232292 NR Description: hypothetical protein; protein id: At3g20520.1
  misc_feature (750)..(1117): Homolog of NCBI NO: 15219781 NR Description: receptor serine/threonine kinase PR5K, putative; id: At1g66910.1 [Arabidopsis thaliana] >gi|25404649|pir||H96692
  misc_feature (756)..(1117): Homolog of NCBI NO: 9755446 NR Description: Putative protein kinase [Arabidopsis thaliana]
MNSQQSTRTKQMLQQSSTHLLCGVVLLQLFAAQVDAQRSTSPWQTLSGDAPLVIARGGFSGLFPDSSLAAYQFAMVVSVADVVLWCDVQLTKDGHGICFPDLNLANASNSEEVYPNRQKSYPVNGVTTKGWFPIDFSLTELQKVLFSLIRGILSRSGKFDENGYSISTVQNVATQMKPALFWLNVQHDEFYEQHNLSMSSFLLSTSRTVSIDFISSPEVNFFRKIAGGFGNNGPSFVFQFMGKEDFEPTTNRTYGSILSNLSFVKTFASGILVPKSYILPLDDKQYLLPHTSLVQDAHKAGLKLYASGFANDVDIAYNYSWDPVSEYLSFVDNGNFSVDGMLSDFPLTASASVDCFSHIGRNATKQVDFLVISKNGASGEYPGCTKLAYEKAIKDGSDVIDCPVQMSSDGIPFCSSSIDLVNSTTVGQTHLRNRSIIVPEISSVAGIFTFSLTWHEIQSLTPAISNPFRENGMSRNPNERNSGNLISLYEFLNLAKNSTSLSGILISLENVVYLREKKGLDVVKVVLNRLTETGYIVGTLKVMIQSTTRLVLVDFKNQSTYKTVYKIKETIGNITDSAIEDIKKFANAVVINKASVFPNSDSFLTGQTTNVLERLQKFQLPVYVELFQNEFVSQPFDFFADETVEINAYIFGAGINGTITEFPYTAARYKRNRCLGREEVPPYMLPVNPGGVLTLISTSSLPPAQDPNPIFTHDDVTEPPLPPVIAKSPTSTLGTPSTIAKPLRNFLKVIRIVSWSVAGVVLFLVLLTLVFCFHRKRETRLRQQKLKALIPLEHYTYAQVKRITKSFAEVVGRGGFGIVYKGTLSDGRVVAVKVLKDTKGNGEDFINEVATMSRTSHLNIVSLLGFCSEGSKRAIIYEFLENGSLDKFILGKTSVNMDWTALYRIALGVAHGLEYLHHSCKTRIVHFDIKPQNVLLDDSFCPKVSDFGLAKLCEKKESILSMLDTRGTIGYIAPEMISRVYGNVSHKSDVYSYGMLVLEIIGARNKEKANQACASNTSSMYFPEWVYRDLESCKSGRHIEDGINSEEDELAKKMTLVGLWCIQPSPVDRPAMNRVVEMMEGSLEALEVPPRPVLQQIPISNLHESSILSEDVSVYTEG

SEQ ID NO: 86458 - protein, 1107 aa, Arabidopsis thaliana
  peptide (1)..(1107): Ceres Seq. ID no. 12690679
  misc_feature (1)..(758): Homolog of NCBI NO: 30697435 NR Description: expressed protein [Arabidopsis thaliana]
  misc_feature (1)..(758): Homolog of NCBI NO: 30794041 NR Description: unknown protein [Arabidopsis thaliana]
  misc_feature (1)..(756): Homolog of NCBI NO: 7485338 NR Description: hypothetical protein F10M23.30 - Arabidopsis >gi|4455192|emb|CAB36515.1| putative protein [Arabidopsis >gi|7269521|emb|CAB79524.1| putative protein [Arabidopsis
  misc_feature (2)..(756): Homolog of NCBI NO: 18416801 NR Description: putative protein; protein id: At4g26690.1,
  misc_feature (1)..(756): Homolog of NCBI NO: 15240520 NR Description: putative protein; protein id: At5g55480.1 thaliana] >gi|9758180|dbj|BAB08565.1|
  misc_feature (10)..(719): Homolog of NCBI NO: 38344811 NR Description: OSJNBb0022F23.4 [Oryza sativa (japonica
  misc_feature (13)..(747): Homolog of NCBI NO: 28393583 NR Description: unknown protein [Arabidopsis thaliana]
  misc_feature (13)..(721): Homolog of NCBI NO: 15232292 NR Description: hypothetical protein; protein id: At3g20520.1
  misc_feature (739)..(1106): Homolog of NCBI NO: 15219781 NR Description: receptor serine/threonine kinase PR5K, putative; id: At1g66910.1 [Arabidopsis thaliana] >gi|25404649|pir||H96692
  misc_feature (745)..(1106): Homolog of NCBI NO: 9755446 NR Description: Putative protein kinase [Arabidopsis thaliana]
MLQQSSTHLLCGVVLLQLFAAQVDAQRSTSPWQTLSGDAPLVIARGGFSGLFPDSSLAAYQFAMVVSVADVVLWCDVQLTKDGHGICFPDLNLANASNSEEVYPNRQKSYPVNGVTTKGWFPIDFSLTELQKVLFSLIRGILSRSGKFDENGYSISTVQNVATQMKPALFWLNVQHDEFYEQHNLSMSSFLLSTSRTVSIDFISSPEVNFFRKIAGGFGNNGPSFVFQFMGKEDFEPTTNRTYGSILSNLSFVKTFASGILVPKSYILPLDDKQYLLPHTSLVQDAHKAGLKLYASGFANDVDIAYNYSWDPVSEYLSFVDNGNFSVDGMLSDFPLTASASVDCFSHIGRNATKQVDFLVISKNGASGEYPGCTKLAYEKAIKDGSDVIDCPVQMSSDGIPFCSSSIDLVNSTTVGQTHLRNRSIIVPEISSVAGIFTFSLTWHEIQSLTPAISNPFRENGMSRNPNERNSGNLISLYEFLNLAKNSTSLSGILISLENVVYLREKKGLDVVKVVLNRLTETGYIVGTLKVMIQSTTRLVLVDFKNQSTYKTVYKIKETIGNITDSAIEDIKKFANAVVINKASVFPNSDSFLTGQTTNVLERLQKFQLPVYVELFQNEFVSQPFDFFADETVEINAYIFGAGINGTITEFPYTAARYKRNRCLGREEVPPYMLPVNPGGVLTLISTSSLPPAQDPNPIFTHDDVTEPPLPPVIAKSPTSTLGTPSTIAKPLRNFLKVIRIVSWSVAGVVLFLVLLTLVFCFHRKRETRLRQQKLKALIPLEHYTYAQVKRITKSFAEVVGRGGFGIVYKGTLSDGRVVAVKVLKDTKGNGEDFINEVATMSRTSHLNIVSLLGFCSEGSKRAIIYEFLENGSLDKFILGKTSVNMDWTALYRIALGVAHGLEYLHHSCKTRIVHFDIKPQNVLLDDSFCPKVSDFGLAKLCEKKESILSMLDTRGTIGYIAPEMISRVYGNVSHKSDVYSYGMLVLEIIGARNKEKANQACASNTSSMYFPEWVYRDLESCKSGRHIEDGINSEEDELAKKMTLVGLWCIQPSPVDRPAMNRVVEMMEGSLEALEVPPRPVLQQIPISNLHESSILSEDVSVYTEG

SEQ ID NO: 86459 - protein, 1044 aa, Arabidopsis thaliana
  peptide (1)..(1044): Ceres Seq. ID no. 12690680
  misc_feature (1)..(695): Homolog of NCBI NO: 30697435 NR Description: expressed protein [Arabidopsis thaliana]
  misc_feature (1)..(695): Homolog of NCBI NO: 30794041 NR Description: unknown protein [Arabidopsis thaliana]
  misc_feature (1)..(693): Homolog of NCBI NO: 7485338 NR Description: hypothetical protein F10M23.30 - Arabidopsis >gi|4455192|emb|CAB36515.1| putative protein [Arabidopsis >gi|7269521|emb|CAB79524.1| putative protein [Arabidopsis
  misc_feature (1)..(693): Homolog of NCBI NO: 18416801 NR Description: putative protein; protein id: At4g26690.1,
  misc_feature (1)..(693): Homolog of NCBI NO: 15240520 NR Description: putative protein; protein id: At5g55480.1 thaliana] >gi|9758180|dbj|BAB08565.1|
  misc_feature (1)..(656): Homolog of NCBI NO: 38344811 NR Description: OSJNBb0022F23.4 [Oryza sativa (japonica
  misc_feature (1)..(684): Homolog of NCBI NO: 28393583 NR Description: unknown protein [Arabidopsis thaliana]
  misc_feature (1)..(658): Homolog of NCBI NO: 15232292 NR Description: hypothetical protein; protein id: At3g20520.1
  misc_feature (676)..(1043): Homolog of NCBI NO: 15219781 NR Description: receptor serine/threonine kinase PR5K, putative; id: At1g66910.1 [Arabidopsis thaliana] >gi|25404649|pir||H96692
  misc_feature (682)..(1043): Homolog of NCBI NO: 9755446 NR Description: Putative protein kinase [Arabidopsis thaliana]
MVVSVADVVLWCDVQLTKDGHGICFPDLNLANASNSEEVYPNRQKSYPVNGVTTKGWFPIDFSLTELQKVLFSLIRGILSRSGKFDENGYSISTVQNVATQMKPALFWLNVQHDEFYEQHNLSMSSFLLSTSRTVSIDFISSPEVNFFRKIAGGFGNNGPSFVFQFMGKEDFEPTTNRTYGSILSNLSFVKTFASGILVPKSYILPLDDKQYLLPHTSLVQDAHKAGLKLYASGFANDVDIAYNYSWDPVSEYLSFVDNGNFSVDGMLSDFPLTASASVDCFSHIGRNATKQVDFLVISKNGASGEYPGCTKLAYEKAIKDGSDVIDCPVQMSSDGIPFCSSSIDLVNSTTVGQTHLRNRSIIVPEISSVAGIFTFSLTWHEIQSLTPAISNPFRENGMSRNPNERNSGNLISLYEFLNLAKNSTSLSGILISLENVVYLREKKGLDVVKVVLNRLTETGYIVGTLKVMIQSTTRLVLVDFKNQSTYKTVYKIKETIGNITDSAIEDIKKFANAVVINKASVFPNSDSFLTGQTTNVLERLQKFQLPVYVELFQNEFVSQPFDFFADETVEINAYIFGAGINGTITEFPYTAARYKRNRCLGREEVPPYMLPVNPGGVLTLISTSSLPPAQDPNPIFTHDDVTEPPLPPVIAKSPTSTLGTPSTIAKPLRNFLKVIRIVSWSVAGVVLFLVLLTLVFCFHRKRETRLRQQKLKALIPLEHYTYAQVKRITKSFAEVVGRGGFGIVYKGTLSDGRVVAVKVLKDTKGNGEDFINEVATMSRTSHLNIVSLLGFCSEGSKRAIIYEFLENGSLDKFILGKTSVNMDWTALYRIALGVAHGLEYLHHSCKTRIVHFDIKPQNVLLDDSFCPKVSDFGLAKLCEKKESILSMLDTRGTIGYIAPEMISRVYGNVSHKSDVYSYGMLVLEIIGARNKEKANQACASNTSSMYFPEWVYRDLESCKSGRHIEDGINSEEDELAKKMTLVGLWCIQPSPVDRPAMNRVVEMMEGSLEALEVPPRPVLQQIPISNLHESSILSEDVSVYTEG

SEQ ID NO: 86460 - DNA, 1197 bp, Arabidopsis thaliana
  misc_feature (1)..(1197): Ceres Seq. ID no. 12690721
  misc_feature: MA Experiment ID: 20000495 Result: Down-regulated in Transcription
  misc_feature: MA Experiment 20000495 PARAMETER Experiment Name: At_Guard_Cells_P Parameter: Harvest Date Value: 8/2/2002
  misc_feature: MA Experiment 20000495 PARAMETER Experiment Name: At_Guard_Cells_P Parameter: Organism Value: A. thaliana
  misc_feature: MA Experiment 20000495 PARAMETER Experiment Name: At_Guard_Cells_P Parameter: Tissue Value: Guard Cells vs. Leaves
  misc_feature: MA Experiment ID: 20001451 Result: Down-regulated in Transcription
  misc_feature: MA Experiment 20001451 PARAMETER Experiment Name: At_Far-red-induction_P Parameter: Age (day) Value: 7
  misc_feature: MA Experiment 20001451 PARAMETER Experiment Name: At_Far-red-induction_P Parameter: Light Value: Far-red vs. White
  misc_feature: MA Experiment 20001451 PARAMETER Experiment Name: At_Far-red-induction_P Parameter: Organism Value: A. thaliana
  misc_feature: MA Experiment 20001451 PARAMETER Experiment Name: At_Far-red-induction_P Parameter: Plant Line Value: Columbia
  misc_feature: MA Experiment 20001451 PARAMETER Experiment Name: At_Far-red-induction_P Parameter: Timepoint (hr) Value: 24
  misc_feature: MA Experiment 20001451 PARAMETER Experiment Name: At_Far-red-induction_P Parameter: Tissue Value: Whole Plant
atggaaagcaaaggaagaatccatccatctcatcatcatatgaggcgtcctcttccaggtcccggtggctgtatagcgcatccggagactttcggtaatcacggtgctataccaccttctgctgctcaaggtgtgtatccttccttcaacatgttacctccacctgaagttatggagcaaaagtttgtggcacaacacggggaattacagagacttgctatagagaatcagagacttggtggaactcatggtagtttaagacaagagttagcagcagcacagcatgaaatacagatgttgcacgcgcaaattgggtcgatgaagtccgagagagagcaacggatgatgggtcttgctgagaaagttgctaaaatggagactgagcttcagaaatctgaggctgttaagttggagatgcaacaagcacgtgctgaggcacggagtcttgttgtggctagggaggagcttatgtctaaagtgcatcagttgactcaggaacttcaaaaatctcgttctgatgtgcagcaaatacctgctctgatgtctgaacttgagaatctaagacaggagtaccagcagtgcagggcaacatatgactatgagaagaagttttataatgaccatctcgagtcacttcaggcaatggagaagaactacatgactatggctagggaagttgaaaaacttcaagcacagttgatgaacaatgcaaattcagatagaagagcaggtggcccttatggtaacaacataaatgctgaaattgacgcttctggacatcagagtggaaacggttattatgaagatgcttttggtcctcagggatatattcctcaaccagtagctggtaacgcaactggaccaaattcagttgttggcgcagctcaatacccttatcaaggagtaactcagccaggatacttccctcaaagacccggttacaactttccaagaggccctcctggttcatatgacccaacaacaaggttaccaacaggaccttacggcgctccattcccacctggaccatctaacaatactccttacgccgagagatgtaacatcgggaaagaaaaaacaaagaaagagaaatttgttgtttgcccttcaccattttgtctctatgactctatgtttcactcagttaaaaagtttacaaatgaatcgaaagttaaatttatctttgtaatactgtag

SEQ ID NO: 86461 - protein, 398 aa, Arabidopsis thaliana
  peptide (1)..(398): Ceres Seq. ID no. 12690722
  misc_feature (1)..(350): Homolog of NCBI NO: 30697468 NR Description: expressed protein [Arabidopsis thaliana]
  misc_feature (14)..(350): Homolog of NCBI NO: 25404669 NR Description: hypothetical protein F5A8.8 [imported] - thaliana >gi|4204281|gb|AAD10662.1| Hypothetical protein
  misc_feature (52)..(326): Homolog of NCBI NO: 9294396 NR Description: gb|AAD10662.1~gene_id:MIE1.26~similar to unknown
  misc_feature (52)..(321): Homolog of NCBI NO: 18400511 NR Description: expressed protein; protein id: At3g14750.1, by cDNA: gi_14334819, supported by cDNA: gi_15293200 [Arabidopsis >gi|14334820|gb|AAK59588.1| unknown protein [Arabidopsis
  misc_feature (1)..(192): Homolog of NCBI NO: 5441873 NR Description: hypothetical protein [Oryza sativa (japonica
  misc_feature (35)..(310): Homolog of NCBI NO: 38605778 NR Description: OSJNBa0044K18.21 [Oryza sativa (japonica
  misc_feature (38)..(243): Homolog of NCBI NO: 28876008 NR Description: hypothetical protein [Oryza sativa (japonica
  misc_feature (29)..(252): Homolog of NCBI NO: 18405242 NR Description: expressed protein; protein id: At1g55170.1, by cDNA: 121378. [Arabidopsis thaliana]
  misc_feature (29)..(252): Homolog of NCBI NO: 25405799 NR Description: myosin-like protein, 97843-94399 [imported] -
  misc_feature (9)..(290): Homolog of NCBI NO: 33146484 NR Description: myosin-like protein [Oryza sativa (japonica
MESKGRIHPSHHHMRRPLPGPGGCIAHPETFGNHGAIPPSAAQGVYPSFNMLPPPEVMEQKFVAQHGELQRLAIENQRLGGTHGSLRQELAAAQHEIQMLHAQIGSMKSEREQRMMGLAEKVAKMETELQKSEAVKLEMQQARAEARSLVVAREELMSKVHQLTQELQKSRSDVQQIPALMSELENLRQEYQQCRATYDYEKKFYNDHLESLQAMEKNYMTMAREVEKLQAQLMNNANSDRRAGGPYGNNINAEIDASGHQSGNGYYEDAFGPQGYIPQPVAGNATGPNSVVGAAQYPYQGVTQPGYFPQRPGYNFPRGPPGSYDPTTRLPTGPYGAPFPPGPSNNTPYAERCNIGKEKTKKEKFVVCPSPFCLYDSMFHSVKKFTNESKVKFIFVIL

SEQ ID NO: 86462 - protein, 385 aa, Arabidopsis thaliana
  peptide (1)..(385): Ceres Seq. ID no. 12690723
  misc_feature (1)..(337): Homolog of NCBI NO: 30697468 NR Description: expressed protein [Arabidopsis thaliana]
  misc_feature (1)..(337): Homolog of NCBI NO: 25404669 NR Description: hypothetical protein F5A8.8 [imported] - thaliana >gi|4204281|gb|AAD10662.1| Hypothetical protein
  misc_feature (39)..(313): Homolog of NCBI NO: 9294396 NR Description: gb|AAD10662.1~gene_id:MIE1.26~similar to unknown
  misc_feature (39)..(308): Homolog of NCBI NO: 18400511 NR Description: expressed protein; protein id: At3g14750.1, by cDNA: gi_14334819, supported by cDNA: gi_15293200 [Arabidopsis >gi|14334820|gb|AAK59588.1| unknown protein [Arabidopsis
  misc_feature (1)..(179): Homolog of NCBI NO: 5441873 NR Description: hypothetical protein [Oryza sativa (japonica
  misc_feature (22)..(297): Homolog of NCBI NO: 38605778 NR Description: OSJNBa0044K18.21 [Oryza sativa (japonica
  misc_feature (25)..(230): Homolog of NCBI NO: 28876008 NR Description: hypothetical protein [Oryza sativa (japonica
  misc_feature (16)..(239): Homolog of NCBI NO: 18405242 NR Description: expressed protein; protein id: At1g55170.1, by cDNA: 121378. [Arabidopsis thaliana]
  misc_feature (16)..(239): Homolog of NCBI NO: 25405799 NR Description: myosin-like protein, 97843-94399 [imported] -
  misc_feature (1)..(277): Homolog of NCBI NO: 33146484 NR Description: myosin-like protein [Oryza sativa (japonica
MRRPLPGPGGCIAHPETFGNHGAIPPSAAQGVYPSFNMLPPPEVMEQKFVAQHGELQRLAIENQRLGGTHGSLRQELAAAQHEIQMLHAQIGSMKSEREQRMMGLAEKVAKMETELQKSEAVKLEMQQARAEARSLVVAREELMSKVHQLTQELQKSRSDVQQIPALMSELENLRQEYQQCRATYDYEKKFYNDHLESLQAMEKNYMTMAREVEKLQAQLMNNANSDRRAGGPYGNNINAEIDASGHQSGNGYYEDAFGPQGYIPQPVAGNATGPNSVVGAAQYPYQGVTQPGYFPQRPGYNFPRGPPGSYDPTTRLPTGPYGAPFPPGPSNNTPYAERCNIGKEKTKKEKFVVCPSPFCLYDSMFHSVKKFTNESKVKFIFVIL

SEQ ID NO: 86463 - protein, 348 aa, Arabidopsis thaliana
  peptide (1)..(348): Ceres Seq. ID no. 12690724
  misc_feature (1)..(300): Homolog of NCBI NO: 30697468 NR Description: expressed protein [Arabidopsis thaliana]
  misc_feature (1)..(300): Homolog of NCBI NO: 25404669 NR Description: hypothetical protein F5A8.8 [imported] - thaliana >gi|4204281|gb|AAD10662.1| Hypothetical protein
  misc_feature (2)..(276): Homolog of NCBI NO: 9294396 NR Description: gb|AAD10662.1~gene_id:MIE1.26~similar to unknown
  misc_feature (2)..(271): Homolog of NCBI NO: 18400511 NR Description: expressed protein; protein id: At3g14750.1, by cDNA: gi_14334819, supported by cDNA: gi_15293200 [Arabidopsis >gi|14334820|gb|AAK59588.1| unknown protein [Arabidopsis
  misc_feature (1)..(142): Homolog of NCBI NO: 5441873 NR Description: hypothetical protein [Oryza sativa (japonica
  misc_feature (1)..(260): Homolog of NCBI NO: 38605778 NR Description: OSJNBa0044K18.21 [Oryza sativa (japonica
  misc_feature (1)..(193): Homolog of NCBI NO: 28876008 NR Description: hypothetical protein [Oryza sativa (japonica
  misc_feature (1)..(202): Homolog of NCBI NO: 18405242 NR Description: expressed protein; protein id: At1g55170.1, by cDNA: 121378. [Arabidopsis thaliana]
  misc_feature (1)..(202): Homolog of NCBI NO: 25405799 NR Description: myosin-like protein, 97843-94399 [imported] -
  misc_feature (1)..(240): Homolog of NCBI NO: 33146484 NR Description: myosin-like protein [Oryza sativa (japonica
MLPPPEVMEQKFVAQHGELQRLAIENQRLGGTHGSLRQELAAAQHEIQMLHAQIGSMKSEREQRMMGLAEKVAKMETELQKSEAVKLEMQQARAEARSLVVAREELMSKVHQLTQELQKSRSDVQQIPALMSELENLRQEYQQCRATYDYEKKFYNDHLESLQAMEKNYMTMAREVEKLQAQLMNNANSDRRAGGPYGNNINAEIDASGHQSGNGYYEDAFGPQGYIPQPVAGNATGPNSVVGAAQYPYQGVTQPGYFPQRPGYNFPRGPPGSYDPTTRLPTGPYGAPFPPGPSNNTPYAERCNIGKEKTKKEKFVVCPSPFCLYDSMFHSVKKFTNESKVKFIFVIL

SEQ ID NO: 86464 - DNA, 1986 bp, Arabidopsis thaliana
  misc_feature (1)..(1986): Ceres Seq. ID no. 12690753
  misc_feature: MA Experiment ID: 20000184 Result: Down-regulated in Transcription
  misc_feature: MA Experiment 20000184 PARAMETER Experiment Name: At_Shoots__P Parameter: Age (day) Value: 7
  misc_feature: MA Experiment 20000184 PARAMETER Experiment Name: At_Shoots__P Parameter: Tissue Value: Shoots vs. Whole Plant
  misc_feature: MA Experiment ID: 20001248 Result: Up-regulated in Transcription
  misc_feature: MA Experiment 20001248 PARAMETER Experiment Name: At_Far-red-induction_P Parameter: Age (day) Value: 7
  misc_feature: MA Experiment 20001248 PARAMETER Experiment Name: At_Far-red-induction_P Parameter: Light Value: Far-red vs. White
  misc_feature: MA Experiment 20001248 PARAMETER Experiment Name: At_Far-red-induction_P Parameter: Organism Value: A. thaliana
  misc_feature: MA Experiment 20001248 PARAMETER Experiment Name: At_Far-red-induction_P Parameter: Plant Line Value: Columbia
  misc_feature: MA Experiment 20001248 PARAMETER Experiment Name: At_Far-red-induction_P Parameter: Timepoint (hr) Value: 4
  misc_feature: MA Experiment 20001248 PARAMETER Experiment Name: At_Far-red-induction_P Parameter: Tissue Value: Whole Plant
  misc_feature: MA Experiment ID: 20001450 Result: Up-regulated in Transcription
  misc_feature: MA Experiment 20001450 PARAMETER Experiment Name: At_Far-red-induction_P Parameter: Age (day) Value: 7
  misc_feature: MA Experiment 20001450 PARAMETER Experiment Name: At_Far-red-induction_P Parameter: Light Value: Far-red vs. White
  misc_feature: MA Experiment 20001450 PARAMETER Experiment Name: At_Far-red-induction_P Parameter: Organism Value: A. thaliana
  misc_feature: MA Experiment 20001450 PARAMETER Experiment Name: At_Far-red-induction_P Parameter: Plant Line Value: Columbia
  misc_feature: MA Experiment 20001450 PARAMETER Experiment Name: At_Far-red-induction_P Parameter: Timepoint (hr) Value: 8
  misc_feature: MA Experiment 20001450 PARAMETER Experiment Name: At_Far-red-induction_P Parameter: Tissue Value: Whole Plant
atgagggatgctggtaaggtcaatggtttatcggcttcggttcccgacccgcctcctaatgctaaccctaaccttgagtttcgaattgcaccggggcatccagtagagattgaaacgaatgaacaacctcattctaaccgtttcaacgctgttattgagaagatagagaggctctataaggttgttatatgtttgatttttcacattcacaacatttttgcataccatgcaatagcactgttgcattcacacatctctgaaaagtgtatgcttacttcagagaataaatctcaggggaacgatagcagtgatggggaagagttagacggtgctcctgatgatgatgagtatgacactgaagattcatttatagatgatgctgaactggatgagtatttcgaagttgataattcaacagttaaacatgatggattttatgtaaatagaggcaagttggagcggatggaaccttcaacaacatctaaccagcaacccaaaaaacggcgacgaaaagattcagcaaaaccctgtcgtgatgcagttgacgtatccgataaacacaccaagttgtctataacagctaggaaaaaggagtcacctttgccttctggagcgcaagatgcaaatacttcagtacctctggatgatgtgaagcattctgatagagcaaatcatcagtctaggaatgatacaagtcacaagtcaagggaaactggatcctctagtgcccttcatcagaaatacagcaacaaaagcttacaccaacaatctacgtccctgctaggaaaatctccccccaatgtctttgcagaggtaacagtagtccgtcagaaagaaaacaatggtatgcatcagctggcaaatgtaacgggaagcagacaatctagtcaagcgtctaaaaaagatggttctaatgtgaagtctaaaacctcaatcctcgagaaagccataagggaactggagaaggtggttgtggaatcaaggcctcctgctatcactgaaaatcaagaagctgatacctcatcccaggcagtgaagagaagattgcccagggatgttaaattgaaacttgctaaagttgctaggattgcgcaggcaagccagggaaaacattcaacagagttaatcaaccgtcttatgagcattgttggtcacctaatccagcttaggtctcttaagaggaacttgaaaatcatgattgatatgggagattctgcaacccgagaaaaggatactaggttcaagcaaatcaacaatgaagttcttgatatgataaaggccaaagtttctttgatggaatcacaggcaatcaaaccagaaggtgcaacatcagacgattttcaggactcagtagaaaagccatctttgaagaagtttgtcatggatgcggcattggaggataaattgtgtgacctatatgacatatttatcgacggattggatgaagatcaaggtccacaaacaaaaaagctatatgtcaatttggctgaactctggccaaatagattgatggattatcgtgggatcaaacatgcaattttccgggcaaaggagagacgaaaagcattgtatggaaaccttgcgaaagagatggatcaaacaaagatgaagaagagtatgaagcagttggtaccaagaacagactgtactgctcagcccaacaccgaattagtggttcagagacaacacagtggggaaaaaaaattgattgttgatccaaatgcaaccagcacttccgtggtcactagtcaaactatggttgacagatcaaatcagcagcagcctgagaagctaaagggaatctcaagctcttgcaatcctacagaggaaacaagagtggtcaagagaaagaacgaggctgtaatggctgagaaacaagtcgttcttgccctgaagaagcccgaacatccacagacacgtgtaatcccagctcctcagaatctgaacatcccacgaacaaccccggacctgaacttgccaagttga

SEQ ID NO: 86465 - protein, 661 aa, Arabidopsis thaliana
  peptide (1)..(661): Ceres Seq. ID no. 12690754
  misc_feature (1)..(661): Homolog of NCBI NO: 15223894 NR Description: unknown protein; protein id: At1g77310.1
  misc_feature (1)..(478): Homolog of NCBI NO: 7486999 NR Description: hypothetical protein T14N5.16 - Arabidopsis >gi|3540209|gb|AAC34359.1| Hypothetical protein [Arabidopsis
  misc_feature (195)..(643): Homolog of NCBI NO: 20161447 NR Description: B1065E10.22 [Oryza sativa (japonica
  misc_feature (31)..(59): Homolog of NCBI NO: 20161447 NR Description: B1065E10.22 [Oryza sativa (japonica
  misc_feature (293)..(414): Homolog of NCBI NO: 16506638 NR Description: wound-responsive protein 14.05 [Castanea sativa]
  misc_feature (94)..(260): Homolog of NCBI NO: 20161447 NR Description: B1065E10.22 [Oryza sativa (japonica
  misc_feature (480)..(640): Homolog of NCBI NO: 4106388 NR Description: unknown [Arabidopsis thaliana]
MRDAGKVNGLSASVPDPPPNANPNLEFRIAPGHPVEIETNEQPHSNRFNAVIEKIERLYKVVICLIFHIHNIFAYHAIALLHSHISEKCMLTSENKSQGNDSSDGEELDGAPDDDEYDTEDSFIDDAELDEYFEVDNSTVKHDGFYVNRGKLERMEPSTTSNQQPKKRRRKDSAKPCRDAVDVSDKHTKLSITARKKESPLPSGAQDANTSVPLDDVKHSDRANHQSRNDTSHKSRETGSSSALHQKYSNKSLHQQSTSLLGKSPPNVFAEVTVVRQKENNGMHQLANVTGSRQSSQASKKDGSNVKSKTSILEKAIRELEKVVVESRPPAITENQEADTSSQAVKRRLPRDVKLKLAKVARIAQASQGKHSTELINRLMSIVGHLIQLRSLKRNLKIMIDMGDSATREKDTRFKQINNEVLDMIKAKVSLMESQAIKPEGATSDDFQDSVEKPSLKKFVMDAALEDKLCDLYDIFIDGLDEDQGPQTKKLYVNLAELWPNRLMDYRGIKHAIFRAKERRKALYGNLAKEMDQTKMKKSMKQLVPRTDCTAQPNTELVVQRQHSGEKKLIVDPNATSTSVVTSQTMVDRSNQQQPEKLKGISSSCNPTEETRVVKRKNEAVMAEKQVVLALKKPEHPQTRVIPAPQNLNIPRTTPDLNLPS

SEQ ID NO: 86466 - protein, 572 aa, Arabidopsis thaliana
  peptide (1)..(572): Ceres Seq. ID no. 12690755
  misc_feature (1)..(572): Homolog of NCBI NO: 15223894 NR Description: unknown protein; protein id: At1g77310.1
  misc_feature (1)..(389): Homolog of NCBI NO: 7486999 NR Description: hypothetical protein T14N5.16 - Arabidopsis >gi|3540209|gb|AAC34359.1| Hypothetical protein [Arabidopsis
  misc_feature (106)..(554): Homolog of NCBI NO: 20161447 NR Description: B1065E10.22 [Oryza sativa (japonica
  misc_feature (204)..(325): Homolog of NCBI NO: 16506638 NR Description: wound-responsive protein 14.05 [Castanea sativa]
  misc_feature (5)..(171): Homolog of NCBI NO: 20161447 NR Description: B1065E10.22 [Oryza sativa (japonica
  misc_feature (391)..(551): Homolog of NCBI NO: 4106388 NR Description: unknown [Arabidopsis thaliana]
MLTSENKSQGNDSSDGEELDGAPDDDEYDTEDSFIDDAELDEYFEVDNSTVKHDGFYVNRGKLERMEPSTTSNQQPKKRRRKDSAKPCRDAVDVSDKHTKLSITARKKESPLPSGAQDANTSVPLDDVKHSDRANHQSRNDTSHKSRETGSSSALHQKYSNKSLHQQSTSLLGKSPPNVFAEVTVVRQKENNGMHQLANVTGSRQSSQASKKDGSNVKSKTSILEKAIRELEKVVVESRPPAITENQEADTSSQAVKRRLPRDVKLKLAKVARIAQASQGKHSTELINRLMSIVGHLIQLRSLKRNLKIMIDMGDSATREKDTRFKQINNEVLDMIKAKVSLMESQAIKPEGATSDDFQDSVEKPSLKKFVMDAALEDKLCDLYDIFIDGLDEDQGPQTKKLYVNLAELWPNRLMDYRGIKHAIFRAKERRKALYGNLAKEMDQTKMKKSMKQLVPRTDCTAQPNTELVVQRQHSGEKKLIVDPNATSTSVVTSQTMVDRSNQQQPEKLKGISSSCNPTEETRVVKRKNEAVMAEKQVVLALKKPEHPQTRVIPAPQNLNIPRTTPDLNLPS

SEQ ID NO: 86467 - protein, 507 aa, Arabidopsis thaliana
  peptide (1)..(507): Ceres Seq. ID no. 12690756
  misc_feature (1)..(507): Homolog of NCBI NO: 15223894 NR Description: unknown protein; protein id: At1g77310.1
  misc_feature (1)..(324): Homolog of NCBI NO: 7486999 NR Description: hypothetical protein T14N5.16 - Arabidopsis >gi|3540209|gb|AAC34359.1| Hypothetical protein [Arabidopsis
  misc_feature (41)..(489): Homolog of NCBI NO: 20161447 NR Description: B1065E10.22 [Oryza sativa (japonica
  misc_feature (139)..(260): Homolog of NCBI NO: 16506638 NR Description: wound-responsive protein 14.05 [Castanea sativa]
  misc_feature (1)..(106): Homolog of NCBI NO: 20161447 NR Description: B1065E10.22 [Oryza sativa (japonica
  misc_feature (326)..(486): Homolog of NCBI NO: 4106388 NR Description: unknown [Arabidopsis thaliana]
MEPSTTSNQQPKKRRRKDSAKPCRDAVDVSDKHTKLSITARKKESPLPSGAQDANTSVPLDDVKHSDRANHQSRNDTSHKSRETGSSSALHQKYSNKSLHQQSTSLLGKSPPNVFAEVTVVRQKENNGMHQLANVTGSRQSSQASKKDGSNVKSKTSILEKAIRELEKVVVESRPPAITENQEADTSSQAVKRRLPRDVKLKLAKVARIAQASQGKHSTELINRLMSIVGHLIQLRSLKRNLKIMIDMGDSATREKDTRFKQINNEVLDMIKAKVSLMESQAIKPEGATSDDFQDSVEKPSLKKFVMDAALEDKLCDLYDIFIDGLDEDQGPQTKKLYVNLAELWPNRLMDYRGIKHAIFRAKERRKALYGNLAKEMDQTKMKKSMKQLVPRTDCTAQPNTELVVQRQHSGEKKLIVDPNATSTSVVTSQTMVDRSNQQQPEKLKGISSSCNPTEETRVVKRKNEAVMAEKQVVLALKKPEHPQTRVIPAPQNLNIPRTTPDLNLPS

SEQ ID NO: 86468 - DNA, 1686 bp, Arabidopsis thaliana
  misc_feature (1)..(1686): Ceres Seq. ID no. 12690834
  misc_feature: MA Experiment ID: 108434 Result: Up-regulated in Transcription
  misc_feature: MA Experiment 108434 PARAMETER Experiment Name: At_Root_Tips_cDNA_P Parameter: Tissue Value: Root Tips
  misc_feature: MA Experiment ID: 108573 Result: Up-regulated in Transcription
  misc_feature: MA Experiment 108573 PARAMETER Experiment Name: At_Drought_cDNA_P Parameter: Timepoint (hr) Value: 6
  misc_feature: MA Experiment 108573 PARAMETER Experiment Name: At_Drought_cDNA_P Parameter: Tissue Value: Aerial
  misc_feature: MA Experiment 108573 PARAMETER Experiment Name: At_Drought_cDNA_P Parameter: Treatment Value: Drought vs. No Drought
  misc_feature: MA Experiment ID: 108574 Result: Down-regulated in Transcription
  misc_feature: MA Experiment 108574 PARAMETER Experiment Name: At_Wounding__cDNA_P Parameter: Timepoint (hr) Value: 1
  misc_feature: MA Experiment 108574 PARAMETER Experiment Name: At_Wounding__cDNA_P Parameter: Tissue Value: Aerial
  misc_feature: MA Experiment 108574 PARAMETER Experiment Name: At_Wounding__cDNA_P Parameter: Treatment Value: Wounding vs. No Wounding
  misc_feature: MA Experiment ID: 108576 Result: Down-regulated in Transcription
  misc_feature: MA Experiment 108576 PARAMETER Experiment Name: At_42deg_Heat_cDNA_P Parameter: Temperature (deg C) Value: 42 vs. 22
  misc_feature: MA Experiment 108576 PARAMETER Experiment Name: At_42deg_Heat_cDNA_P Parameter: Timepoint (hr) Value: 1
  misc_feature: MA Experiment 108576 PARAMETER Experiment Name: At_42deg_Heat_cDNA_P Parameter: Tissue Value: Aerial
  misc_feature: MA Experiment ID: 108577 Result: Down-regulated in Transcription
  misc_feature: MA Experiment 108577 PARAMETER Experiment Name: At_42deg_Heat_cDNA_P Parameter: Temperature (deg C) Value: 42 vs. 22
  misc_feature: MA Experiment 108577 PARAMETER Experiment Name: At_42deg_Heat_cDNA_P Parameter: Timepoint (hr) Value: 6
  misc_feature: MA Experiment 108577 PARAMETER Experiment Name: At_42deg_Heat_cDNA_P Parameter: Tissue Value: Aerial
  misc_feature: MA Experiment ID: 108579 Result: Down-regulated in Transcription
  misc_feature: MA Experiment 108579 PARAMETER Experiment Name: At_4deg_Cold_cDNA_P Parameter: Temperature (deg C) Value: 4 vs. 22
  misc_feature: MA Experiment 108579 PARAMETER Experiment Name: At_4deg_Cold_cDNA_P Parameter: Timepoint (hr) Value: 6
  misc_feature: MA Experiment 108579 PARAMETER Experiment Name: At_4deg_Cold_cDNA_P Parameter: Tissue Value: Aerial
  misc_feature: MA Experiment ID: 108595 Result: Down-regulated in Transcription
  misc_feature: MA Experiment 108595 PARAMETER Experiment Name: At_Ler-pi_Ovule_cDNA_P Parameter: Plant Line Value: null
  misc_feature: MA Experiment ID: 108608 Result: Down-regulated in Transcription
  misc_feature: MA Experiment 108608 PARAMETER Experiment Name: At_100uM_ABA_cDNA_P Parameter: Timepoint (hr) Value: 1
  misc_feature: MA Experiment 108608 PARAMETER Experiment Name: At_100uM_ABA_cDNA_P Parameter: Tissue Value: Aerial
  misc_feature: MA Experiment 108608 PARAMETER Experiment Name: At_100uM_ABA_cDNA_P Parameter: Treatment Value: 100uM ABA vs. No Treatment
  misc_feature: MA Experiment ID: 20000069 Result: Down-regulated in Transcription
  misc_feature: MA Experiment 20000069 PARAMETER Experiment Name: At_100uM_ABA_Mutants_cDNA_P Parameter: Plant Line Value: CS23
  misc_feature: MA Experiment 20000069 PARAMETER Experiment Name: At_100uM_ABA_Mutants_cDNA_P Parameter: Timepoint (hr) Value: 6
  misc_feature: MA Experiment 20000069 PARAMETER Experiment Name: At_100uM_ABA_Mutants_cDNA_P Parameter: Tissue Value: Aerial
  misc_feature: MA Experiment 20000069 PARAMETER Experiment Name: At_100uM_ABA_Mutants_cDNA_P Parameter: Treatment Value: 100uM ABA vs. No Treatment
  misc_feature: MA Experiment ID: 20000072 Result: Down-regulated in Transcription
  misc_feature: MA Experiment 20000072 PARAMETER Experiment Name: At_100uM_ABA_Mutants_cDNA_P Parameter: Plant Line Value: CS8105
  misc_feature: MA Experiment 20000072 PARAMETER Experiment Name: At_100uM_ABA_Mutants_cDNA_P Parameter: Timepoint (hr) Value: 6
  misc_feature: MA Experiment 20000072 PARAMETER Experiment Name: At_100uM_ABA_Mutants_cDNA_P Parameter: Tissue Value: Aerial
  misc_feature: MA Experiment 20000072 PARAMETER Experiment Name: At_100uM_ABA_Mutants_cDNA_P Parameter: Treatment Value: 100uM ABA vs. No Treatment
  misc_feature: MA Experiment ID: 20000086 Result: Down-regulated in Transcription
  misc_feature: MA Experiment 20000086 PARAMETER Experiment Name: At_100uM_ABA_Mutants_cDNA_P Parameter: Plant Line Value: CS22
  misc_feature: MA Experiment 20000086 PARAMETER Experiment Name: At_100uM_ABA_Mutants_cDNA_P Parameter: Timepoint (hr) Value: 6
  misc_feature: MA Experiment 20000086 PARAMETER Experiment Name: At_100uM_ABA_Mutants_cDNA_P Parameter: Tissue Value: Aerial
  misc_feature: MA Experiment 20000086 PARAMETER Experiment Name: At_100uM_ABA_Mutants_cDNA_P Parameter: Treatment Value: 100uM ABA vs. No Treatment
  misc_feature: MA Experiment ID: 20000087 Result: Down-regulated in Transcription
  misc_feature: MA Experiment 20000087 PARAMETER Experiment Name: At_100uM_ABA_Mutants_cDNA_P Parameter: Plant Line Value: WS
  misc_feature: MA Experiment 20000087 PARAMETER Experiment Name: At_100uM_ABA_Mutants_cDNA_P Parameter: Timepoint (hr) Value: 6
  misc_feature: MA Experiment 20000087 PARAMETER Experiment Name: At_100uM_ABA_Mutants_cDNA_P Parameter: Tissue Value: Aerial
  misc_feature: MA Experiment 20000087 PARAMETER Experiment Name: At_100uM_ABA_Mutants_cDNA_P Parameter: Treatment Value: 100uM ABA vs. No Treatment
  misc_feature: MA Experiment ID: 20000090 Result: Down-regulated in Transcription
  misc_feature: MA Experiment ID: 20000144 Result: Down-regulated in Transcription
  misc_feature: MA Experiment 20000144 PARAMETER Experiment Name: At_42deg_Heat_cDNA_P Parameter: Temperature (deg C) Value: 42 vs. 22
  misc_feature: MA Experiment 20000144 PARAMETER Experiment Name: At_42deg_Heat_cDNA_P Parameter: Timepoint (hr) Value: 1
  misc_feature: MA Experiment 20000144 PARAMETER Experiment Name: At_42deg_Heat_cDNA_P Parameter: Tissue Value: Aerial
  misc_feature: MA Experiment ID: 20000166 Result: Down-regulated in Transcription
  misc_feature: MA Experiment 20000166 PARAMETER Experiment Name: At_100uM_ABA_P Parameter: Age (day) Value: 14
  misc_feature: MA Experiment 20000166 PARAMETER Experiment Name: At_100uM_ABA_P Parameter: Organism Value: A. thaliana
  misc_feature: MA Experiment 20000166 PARAMETER Experiment Name: At_100uM_ABA_P Parameter: Plant Line Value: WS
  misc_feature: MA Experiment 20000166 PARAMETER Experiment Name: At_100uM_ABA_P Parameter: Timepoint (hr) Value: 1
  misc_feature: MA Experiment 20000166 PARAMETER Experiment Name: At_100uM_ABA_P Parameter: Tissue Value: Aerial
  misc_feature: MA Experiment 20000166 PARAMETER Experiment Name: At_100uM_ABA_P Parameter: Treatment Value: 100uM ABA vs. No Treatment
  misc_feature: MA Experiment ID: 20000171 Result: Down-regulated in Transcription
  misc_feature: MA Experiment 20000171 PARAMETER Experiment Name: At_42deg_Heat_P Parameter: Age (day) Value: 14
  misc_feature: MA Experiment 20000171 PARAMETER Experiment Name: At_42deg_Heat_P Parameter: Organism Value: A. thaliana
  misc_feature: MA Experiment 20000171 PARAMETER Experiment Name: At_42deg_Heat_P Parameter: Plant Line Value: WS
  misc_feature: MA Experiment 20000171 PARAMETER Experiment Name: At_42deg_Heat_P Parameter: Temperature (deg C) Value: 42 vs. 22
  misc_feature: MA Experiment 20000171 PARAMETER Experiment Name: At_42deg_Heat_P Parameter: Timepoint (hr) Value: 1
  misc_feature: MA Experiment 20000171 PARAMETER Experiment Name: At_42deg_Heat_P Parameter: Tissue Value: Aerial
  misc_feature: MA Experiment ID: 20000184 Result: Down-regulated in Transcription
  misc_feature: MA Experiment 20000184 PARAMETER Experiment Name: At_Shoots__P Parameter: Age (day) Value: 7
  misc_feature: MA Experiment 20000184 PARAMETER Experiment Name: At_Shoots__P Parameter: Tissue Value: Shoots vs. Whole Plant
  misc_feature: MA Experiment ID: 20000227 Result: Down-regulated in Transcription
  misc_feature: MA Experiment 20000227 PARAMETER Experiment Name: At_Root-Tips-vs-Tops_P Parameter: Tissue Value: Root Tips vs. Root Tops
  misc_feature: MA Experiment ID: 20000234 Result: Down-regulated in Transcription
  misc_feature: MA Experiment 20000234 PARAMETER Experiment Name: At_Siliques_P Parameter: Age (day) Value: 21
  misc_feature: MA Experiment 20000234 PARAMETER Experiment Name: At_Siliques_P Parameter: Organism Value: A. thaliana
  misc_feature: MA Experiment 20000234 PARAMETER Experiment Name: At_Siliques_P Parameter: Plant Line Value: WS
  misc_feature: MA Experiment 20000234 PARAMETER Experiment Name: At_Siliques_P Parameter: Tissue Value: Less Than 5mm Siliques vs. Whole Plant
  misc_feature: MA Experiment ID: 20000235 Result: Down-regulated in Transcription
  misc_feature: MA Experiment 20000235 PARAMETER Experiment Name: At_Siliques_P Parameter: Age (day) Value: 21
  misc_feature: MA Experiment 20000235 PARAMETER Experiment Name: At_Siliques_P Parameter: Organism Value: A. thaliana
  misc_feature: MA Experiment 20000235 PARAMETER Experiment Name: At_Siliques_P Parameter: Plant Line Value: WS
  misc_feature: MA Experiment 20000235 PARAMETER Experiment Name: At_Siliques_P Parameter: Tissue Value: 5-10mm Siliques vs. Whole Plant
  misc_feature: MA Experiment ID: 20000264 Result: Down-regulated in Transcription
  misc_feature: MA Experiment 20000264 PARAMETER Experiment Name: At_Open_Flower_P Parameter: Age (day) Value: 21
  misc_feature: MA Experiment 20000264 PARAMETER Experiment Name: At_Open_Flower_P Parameter: Plant Line Value: WS
  misc_feature: MA Experiment 20000264 PARAMETER Experiment Name: At_Open_Flower_P Parameter: Tissue Value: Open Flower vs. Whole Plant
  misc_feature: MA Experiment ID: 20000265 Result: Down-regulated in Transcription
  misc_feature: MA Experiment 20000265 PARAMETER Experiment Name: At_Open_Flower_P Parameter: Age (day) Value: 21
  misc_feature: MA Experiment 20000265 PARAMETER Experiment Name: At_Open_Flower_P Parameter: Plant Line Value: WS
  misc_feature: MA Experiment 20000265 PARAMETER Experiment Name: At_Open_Flower_P Parameter: Tissue Value: Closed Flower vs. Whole Plant
  misc_feature: MA Experiment ID: 20000286 Result: Down-regulated in Transcription
  misc_feature: MA Experiment 20000286 PARAMETER Experiment Name: At_Open_Flower_P Parameter: Age (day) Value: 21
  misc_feature: MA Experiment 20000286 PARAMETER Experiment Name: At_Open_Flower_P Parameter: Plant Line Value: WS
  misc_feature: MA Experiment 20000286 PARAMETER Experiment Name: At_Open_Flower_P Parameter: Tissue Value: Half Open vs. Whole Plant
  misc_feature: MA Experiment ID: 20001247 Result: Up-regulated in Transcription
  misc_feature: MA Experiment 20001247 PARAMETER Experiment Name: At_Far-red-induction_P Parameter: Age (day) Value: 7
  misc_feature: MA Experiment 20001247 PARAMETER Experiment Name: At_Far-red-induction_P Parameter: Light Value: Far-red vs. White
  misc_feature: MA Experiment 20001247 PARAMETER Experiment Name: At_Far-red-induction_P Parameter: Organism Value: A. thaliana
  misc_feature: MA Experiment 20001247 PARAMETER Experiment Name: At_Far-red-induction_P Parameter: Plant Line Value: Columbia
  misc_feature: MA Experiment 20001247 PARAMETER Experiment Name: At_Far-red-induction_P Parameter: Timepoint (hr) Value: 1
  misc_feature: MA Experiment 20001247 PARAMETER Experiment Name: At_Far-red-induction_P Parameter: Tissue Value: Whole Plant
  misc_feature: MA Experiment ID: 20001450 Result: Up-regulated in Transcription
  misc_feature: MA Experiment 20001450 PARAMETER Experiment Name: At_Far-red-induction_P Parameter: Age (day) Value: 7
  misc_feature: MA Experiment 20001450 PARAMETER Experiment Name: At_Far-red-induction_P Parameter: Light Value: Far-red vs. White
  misc_feature: MA Experiment 20001450 PARAMETER Experiment Name: At_Far-red-induction_P Parameter: Organism Value: A. thaliana
  misc_feature: MA Experiment 20001450 PARAMETER Experiment Name: At_Far-red-induction_P Parameter: Plant Line Value: Columbia
  misc_feature: MA Experiment 20001450 PARAMETER Experiment Name: At_Far-red-induction_P Parameter: Timepoint (hr) Value: 8
  misc_feature: MA Experiment 20001450 PARAMETER Experiment Name: At_Far-red-induction_P Parameter: Tissue Value: Whole Plant
  misc_feature: MA Experiment ID: 20001451 Result: Up-regulated in Transcription
  misc_feature: MA Experiment 20001451 PARAMETER Experiment Name: At_Far-red-induction_P Parameter: Age (day) Value: 7
  misc_feature: MA Experiment 20001451 PARAMETER Experiment Name: At_Far-red-induction_P Parameter: Light Value: Far-red vs. White
  misc_feature: MA Experiment 20001451 PARAMETER Experiment Name: At_Far-red-induction_P Parameter: Organism Value: A. thaliana
  misc_feature: MA Experiment 20001451 PARAMETER Experiment Name: At_Far-red-induction_P Parameter: Plant Line Value: Columbia
  misc_feature: MA Experiment 20001451 PARAMETER Experiment Name: At_Far-red-induction_P Parameter: Timepoint (hr) Value: 24
  misc_feature: MA Experiment 20001451 PARAMETER Experiment Name: At_Far-red-induction_P Parameter: Tissue Value: Whole Plant
  misc_feature: MA Experiment ID: 20001556 Result: Down-regulated in Transcription
  misc_feature: MA Experiment 20001556 PARAMETER Experiment Name: At_Drought_Soil_Dry_P Parameter: Age (day) Value: 26
  misc_feature: MA Experiment 20001556 PARAMETER Experiment Name: At_Drought_Soil_Dry_P Parameter: Organism Value: A. thaliana
  misc_feature: MA Experiment 20001556 PARAMETER Experiment Name: At_Drought_Soil_Dry_P Parameter: Plant Line Value: WS
  misc_feature: MA Experiment 20001556 PARAMETER Experiment Name: At_Drought_Soil_Dry_P Parameter: Post Timepoint (hr) Value: None
  misc_feature: MA Experiment 20001556 PARAMETER Experiment Name: At_Drought_Soil_Dry_P Parameter: Post-Treatment Value: None
  misc_feature: MA Experiment 20001556 PARAMETER Experiment Name: At_Drought_Soil_Dry_P Parameter: Timepoint (day) Value: 12
  misc_feature: MA Experiment 20001556 PARAMETER Experiment Name: At_Drought_Soil_Dry_P Parameter: Treatment Value: Drought vs. No Drought
  misc_feature: MA Experiment ID: 20001560 Result: Down-regulated in Transcription
  misc_feature: MA Experiment 20001560 PARAMETER Experiment Name: At_Drought_Soil_Dry_P Parameter: Age (day) Value: 28
  misc_feature: MA Experiment 20001560 PARAMETER Experiment Name: At_Drought_Soil_Dry_P Parameter: Organism Value: A. thaliana
  misc_feature: MA Experiment 20001560 PARAMETER Experiment Name: At_Drought_Soil_Dry_P Parameter: Plant Line Value: WS
  misc_feature: MA Experiment 20001560 PARAMETER Experiment Name: At_Drought_Soil_Dry_P Parameter: Post Timepoint (hr) Value: None
  misc_feature: MA Experiment 20001560 PARAMETER Experiment Name: At_Drought_Soil_Dry_P Parameter: Post-Treatment Value: None
  misc_feature: MA Experiment 20001560 PARAMETER Experiment Name: At_Drought_Soil_Dry_P Parameter: Timepoint (day) Value: 14
  misc_feature: MA Experiment 20001560 PARAMETER Experiment Name: At_Drought_Soil_Dry_P Parameter: Treatment Value: Drought vs. No Drought
ctcctatttctctcttctctctctctttaagtgagcttcgccgttaaactttctccggtaccgggaaattaacgaagaaagcgaaaagtcactgttacactaatatcacaaatctctctctgtctctctctctctctttgtcgaagtcgtgcgtgatgctagttacggtggtgaagcagcggttagtgtactctcgccggagaaattggttatgaccggaatctcacctccgtgatcgaagaaactgttttcgtttttttatcgttacgaagaaatggaaaaacaggcgaagctaacgaggacacagtcgtcgttactccggtcatcgtcgaatctccgttcgtcatatcaaagcttatcttcaatcgtcgaaggcgagcaagatctagaagccggagagaaagaagagaaacagagaagaaaaccacctaaaccattcggttcaccaaatcctaaaaccggtttaaccagaatcaatcccggtttagctttcacaatggtatctctctctttcctaagtctctcatcgttcttcttcttcgtcgtcttctcacaaaccgatgagattctcacatcggagaatcttttactagctttaatcttcgtcgctgtagctctcttcttcgcttccaagaacatctctctactaaaccaaaccgtaatcgcaatcaaaaacttagggttccaaaacagagactcgaaatcaaaaccggtacaatggtacatcggagacgattcaaaaccggagaagaaggtaatcaagagattcgttaaagaaggagttcaattctacagtaatggagatttctacgaaggtgaatttaacaaagggaagtgtaacggaagtggtgtgtattactatttcgtgagaggacgttatgaaggagattggctagatgggagatatgatggtcatgggattgagagttgggctagaggaagtagatataaaggtcaatataggcaaggtcttagacatggttttggtgtttatagattctacactggtgattgttatgctggtgagtggtttaatggtcaaagccatggttttggtgttcaatcttgttctgatggtagctcttaccttggtgagtctagatttggtgttaagcatggtcttggttcttaccatttcagaaatggagataagtatgcaggagagtactttggagacaagattcatgggtttggtgtgtatcgatttgctaatggacactgttatgaaggagcatggcatgaaggtcgtaagcaagggtttggtgcttactcgtttagaaatggtgatgctaaatctggtgaatgggattcaggggttcttgtgacttcacttcctcttacgagtgagccagtttcaagagctgttcaggcggctcgagaaacagcgaataaggcagtgaatcggagacgagtagatgagcaggtgagccgagctgtggctgcagctaataaggctgctacggctgcaagagtggctgctgtgagagccgttcagaatcaaatggatggtaaattttgtcaaagttgaaaaaaggaaaatgtaaaaaatctttttttttaccggtttctctgtaaccctgaatcgaaagtttgtttcagaggtttgtaacagagagttaattttcgatctttttactaatgtaacaaaactgtaaatagttgaagaagaagctttgtttttgttgt

SEQ ID NO: 86469 - protein, 417 aa, Arabidopsis thaliana; identical to SEQ ID NO: 24011
  peptide (1)..(417): Ceres Seq. ID no. 12690835
  misc_feature (294)..(316): Pfam Name: MORN repeat Pfam Description: MORN repeat
  misc_feature (1)..(417): Homolog of NCBI NO: 15219142 NR Description: phosphatidylinositol-4-phosphate 5-kinase, protein id: At1g21920.1, supported by cDNA: 37462., supported by gi_13878044 [Arabidopsis thaliana]
  misc_feature (1)..(417): Homolog of NCBI NO: 21593251 NR Description: phosphatidylinositol-4-phosphate 5-kinase,
  misc_feature (4)..(417): Homolog of NCBI NO: 15217439 NR Description: unknown protein; protein id: At1g77660.1
  misc_feature (46)..(410): Homolog of NCBI NO: 37536922 NR Description: putative phosphatidylinositol-4-phosphate
  misc_feature (71)..(409): Homolog of NCBI NO: 21928129 NR Description: AT4g17080/dl4570w [Arabidopsis thaliana]
  misc_feature (71)..(409): Homolog of NCBI NO: 18403768 NR Description: expressed protein; protein id: At2g35170.1, by cDNA: gi_16604413, supported by cDNA: gi_19699213 [Arabidopsis >gi|25370691|pir||E84765 hypothetical protein At2g35170
  misc_feature (105)..(409): Homolog of NCBI NO: 15235967 NR Description: hypothetical protein; protein id: At4g17080.1
  misc_feature (168)..(344): Homolog of NCBI NO: 40062709 NR Description: MORN repeat protein [uncultured bacterium 314]
  misc_feature (168)..(350): Homolog of NCBI NO: 40062709 NR Description: MORN repeat protein [uncultured bacterium 314]
  misc_feature (169)..(346): Homolog of NCBI NO: 23481997 NR Description: MORN repeat, putative [Plasmodium yoelii yoelii]

SEQ ID NO: 86470 - protein, 343 aa, Arabidopsis thaliana; identical to SEQ ID NO: 24012
  peptide (1)..(343): Ceres Seq. ID no. 12690836
  misc_feature (220)..(242): Pfam Name: MORN repeat Pfam Description: MORN repeat
  misc_feature (1)..(343): Homolog of NCBI NO: 15219142 NR Description: phosphatidylinositol-4-phosphate 5-kinase, protein id: At1g21920.1, supported by cDNA: 37462., supported by gi_13878044 [Arabidopsis thaliana]
  misc_feature (1)..(343): Homolog of NCBI NO: 21593251 NR Description: phosphatidylinositol-4-phosphate 5-kinase,
  misc_feature (1)..(343): Homolog of NCBI NO: 15217439 NR Description: unknown protein; protein id: At1g77660.1
  misc_feature (1)..(336): Homolog of NCBI NO: 37536922 NR Description: putative phosphatidylinositol-4-phosphate
  misc_feature (1)..(335): Homolog of NCBI NO: 21928129 NR Description: AT4g17080/dl4570w [Arabidopsis thaliana]
  misc_feature (1)..(335): Homolog of NCBI NO: 18403768 NR Description: expressed protein; protein id: At2g35170.1, by cDNA: gi_16604413, supported by cDNA: gi_19699213 [Arabidopsis >gi|25370691|pir||E84765 hypothetical protein At2g35170
  misc_feature (31)..(335): Homolog of NCBI NO: 15235967 NR Description: hypothetical protein; protein id: At4g17080.1
  misc_feature (94)..(270): Homolog of NCBI NO: 40062709 NR Description: MORN repeat protein [uncultured bacterium 314]
  misc_feature (94)..(276): Homolog of NCBI NO: 40062709 NR Description: MORN repeat protein [uncultured bacterium 314]
  misc_feature (95)..(272): Homolog of NCBI NO: 23481997 NR Description: MORN repeat, putative [Plasmodium yoelii yoelii]

SEQ ID NO: 86471 - DNA, 717 bp, Arabidopsis thaliana
  misc_feature (1)..(717): Ceres Seq. ID no. 12690842
  misc_feature: MA Experiment ID: 20001911 Result: Up-regulated in Transcription
  misc_feature: MA Experiment 20001911 PARAMETER Experiment Name: At_Drought_Reproduction_P Parameter: Age (day) Value: 40
  misc_feature: MA Experiment 20001911 PARAMETER Experiment Name: At_Drought_Reproduction_P Parameter: Organism Value: A. thaliana
  misc_feature: MA Experiment 20001911 PARAMETER Experiment Name: At_Drought_Reproduction_P Parameter: Plant Line Value: WS
  misc_feature: MA Experiment 20001911 PARAMETER Experiment Name: At_Drought_Reproduction_P Parameter: Timepoint (day) Value: 10
  misc_feature: MA Experiment 20001911 PARAMETER Experiment Name: At_Drought_Reproduction_P Parameter: Tissue Value: Flowers
  misc_feature: MA Experiment 20001911 PARAMETER Experiment Name: At_Drought_Reproduction_P Parameter: Treatment Value: Drought vs. No Drought
atggaacgtggagctcccttctctcactatcagctaccaaaatccatctctgaattgaacttggaccagcacagcaacaacccaaccccaatgaccagctcagtcgtagtagccggcgccggtgacaagaacaatggtatcgtggtccagcagcaaccaccatgtgtggctcgtgagcaagaccaatacatgccaatcgcaaacgtcataagaatcatgcgtaaaaccttaccgtctcacgccaaaatctctgacgacgccaaagaaacgattcaagaatgtgtctccgagtacatcagcttcgtgaccggtgaagccaacgagcgttgccaacgtgagcaacgtaagaccataactgctgaagatatcctttgggctatgagcaagcttgggttcgataactacgtggaccccctcaccgtgttcattaaccggtaccgtgagatagagaccgatcgtggttctgcacttagaggtgagccaccgtcgttgagacaaacctatggaggaaatggtattgggtttcacggcccatctcatggcctacctcctccgggtccttatggttatggtatgttggaccaatccatggttatgggaggtggtcggtactaccaaaacgggtcgtcgggtcaagatgaatccagtgttggtggtggctcttcgtcttccattaacggaatgccggcttttgaccattatggtcagtataagtga

SEQ ID NO: 86472 - protein, 238 aa, Arabidopsis thaliana
  peptide (1)..(238): Ceres Seq. ID no. 12690843
  misc_feature (31)..(238): Homolog of NCBI NO: 15219151 NR Description: CCAAT-box binding factor HAP3 homolog; protein At1g21970.1 [Arabidopsis thaliana] >gi|25402948|pir||G86352
  misc_feature (31)..(238): Homolog of NCBI NO: 3282674 NR Description: CCAAT-box binding factor HAP3 homolog
  misc_feature (1)..(190): Homolog of NCBI NO: 22536010 NR Description: LEC1-like protein [Phaseolus coccineus]
  misc_feature (55)..(227): Homolog of NCBI NO: 9758795 NR Description: contains similarity to CCAAT-box-binding
  misc_feature (55)..(227): Homolog of NCBI NO: 30695265 NR Description: leafy cotyledon 1-related L1L protein
  misc_feature (55)..(227): Homolog of NCBI NO: 28393564 NR Description: unknown protein [Arabidopsis thaliana]
  misc_feature (38)..(184): Homolog of NCBI NO: 15321716 NR Description: leafy cotyledon1 [Zea mays]
  misc_feature (40)..(154): Homolog of NCBI NO: 30349365 NR Description: leafy cotyledon 1 [Oryza sativa (indica
  misc_feature (58)..(147): Homolog of NCBI NO: 16902054 NR Description: CCAAT-box binding factor HAP3 B domain [Vernonia
MERGAPFSHYQLPKSISELNLDQHSNNPTPMTSSVVVAGAGDKNNGIVVQQQPPCVAREQDQYMPIANVIRIMRKTLPSHAKISDDAKETIQECVSEYISFVTGEANERCQREQRKTITAEDILWAMSKLGFDNYVDPLTVFINRYREIETDRGSALRGEPPSLRQTYGGNGIGFHGPSHGLPPPGPYGYGMLDQSMVMGGGRYYQNGSSGQDESSVGGGSSSSINGMPAFDHYGQYK

SEQ ID NO: 86473 - protein, 208 aa, Arabidopsis thaliana; identical to SEQ ID NO: 72072
  peptide (1)..(208): Ceres Seq. ID no. 12690844
  misc_feature (1)..(208): Homolog of NCBI NO: 15219151 NR Description: CCAAT-box binding factor HAP3 homolog; protein At1g21970.1 [Arabidopsis thaliana] >gi|25402948|pir||G86352
  misc_feature (1)..(208): Homolog of NCBI NO: 3282674 NR Description: CCAAT-box binding factor HAP3 homolog
  misc_feature (1)..(160): Homolog of NCBI NO: 22536010 NR Description: LEC1-like protein [Phaseolus coccineus]
  misc_feature (25)..(197): Homolog of NCBI NO: 9758795 NR Description: contains similarity to CCAAT-box-binding
  misc_feature (25)..(197): Homolog of NCBI NO: 30695265 NR Description: leafy cotyledon 1-related L1L protein
  misc_feature (25)..(197): Homolog of NCBI NO: 28393564 NR Description: unknown protein [Arabidopsis thaliana]
  misc_feature (8)..(154): Homolog of NCBI NO: 15321716 NR Description: leafy cotyledon1 [Zea mays]
  misc_feature (10)..(124): Homolog of NCBI NO: 30349365 NR Description: leafy cotyledon 1 [Oryza sativa (indica
  misc_feature (28)..(117): Homolog of NCBI NO: 16902054 NR Description: CCAAT-box binding factor HAP3 B domain [Vernonia

SEQ ID NO: 86474 - protein, 175 aa, Arabidopsis thaliana; identical to SEQ ID NO: 72073
  peptide (1)..(175): Ceres Seq. ID no. 12690845
  misc_feature (1)..(175): Homolog of NCBI NO: 15219151 NR Description: CCAAT-box binding factor HAP3 homolog; protein At1g21970.1 [Arabidopsis thaliana] >gi|25402948|pir||G86352
  misc_feature (1)..(175): Homolog of NCBI NO: 3282674 NR Description: CCAAT-box binding factor HAP3 homolog
  misc_feature (1)..(127): Homolog of NCBI NO: 22536010 NR Description: LEC1-like protein [Phaseolus coccineus]
  misc_feature (1)..(164): Homolog of NCBI NO: 9758795 NR Description: contains similarity to CCAAT-box-binding
  misc_feature (1)..(164): Homolog of NCBI NO: 30695265 NR Description: leafy cotyledon 1-related L1L protein
  misc_feature (1)..(164): Homolog of NCBI NO: 28393564 NR Description: unknown protein [Arabidopsis thaliana]
  misc_feature (1)..(121): Homolog of NCBI NO: 15321716 NR Description: leafy cotyledon1 [Zea mays]
  misc_feature (1)..(91): Homolog of NCBI NO: 30349365 NR Description: leafy cotyledon 1 [Oryza sativa (indica
  misc_feature (1)..(84): Homolog of NCBI NO: 16902054 NR Description: CCAAT-box binding factor HAP3 B domain [Vernonia

SEQ ID NO: 86475 - DNA, 906 bp, Arabidopsis thaliana
  misc_feature (1)..(906): Ceres Seq. ID no. 12690862
  misc_feature: MA Experiment ID: 20000794 Result: Up-regulated in Transcription
  misc_feature: MA Experiment 20000794 PARAMETER Experiment Name: At_Petals_P Parameter: Age (day) Value: 23-25 days
  misc_feature: MA Experiment 20000794 PARAMETER Experiment Name: At_Petals_P Parameter: Plant Line Value: WS
  misc_feature: MA Experiment 20000794 PARAMETER Experiment Name: At_Petals_P Parameter: Tissue Value: Petals vs. Whole plant
  misc_feature: MA Experiment ID: 20001558 Result: Down-regulated in Transcription
  misc_feature: MA Experiment 20001558 PARAMETER Experiment Name: At_Drought_Soil_Dry_P Parameter: Age (day) Value: 27
  misc_feature: MA Experiment 20001558 PARAMETER Experiment Name: At_Drought_Soil_Dry_P Parameter: Organism Value: A. thaliana
  misc_feature: MA Experiment 20001558 PARAMETER Experiment Name: At_Drought_Soil_Dry_P Parameter: Plant Line Value: WS
  misc_feature: MA Experiment 20001558 PARAMETER Experiment Name: At_Drought_Soil_Dry_P Parameter: Post Timepoint (hr) Value: 6
  misc_feature: MA Experiment 20001558 PARAMETER Experiment Name: At_Drought_Soil_Dry_P Parameter: Post-Treatment Value: Re-Water vs. No Drought
  misc_feature: MA Experiment 20001558 PARAMETER Experiment Name: At_Drought_Soil_Dry_P Parameter: Timepoint (day) Value: 13
  misc_feature: MA Experiment 20001558 PARAMETER Experiment Name: At_Drought_Soil_Dry_P Parameter: Treatment Value: Drought vs. No Drought
atggaggtttcttctttctccactgtacccagatactgtaactcacgctcctttgttccagaattgtctcgtttcaggggattcaaagttcacttatgggaccaatctcttgttcctcttcatttcagcattcgaaaacgaaagaacacccctcgttatttgatttcttgcagtcagaagaaagatgtcactgttgttgatggaagttgtatggatgagatctatgataagttggcggaacgtcttgtccctacagcagcggcaatgtttagccccaatcttaaacgtttggtcggtttggctggtcctcctggtgccgggaaaagtacagtagcaaatgaagttgtgcgtcgtgtaaataagctatggcctcagaaagctgcttcttttgatgctgaggttaatccaccggatgttgctatagtacttcccatggatggtttccatttgtatcgttcgcaactcgatgctatggaggatcccaaagaagcccatgcgagaagaggggctccgtggacttttgatcctgcactactgcttaactgtttaaagaagctgaaaaacgagggctcagtttatgtgccatcatttgatcatggagttggggatccagttgaagatgatatctttgttagcctccagcataaagtggtaattgtagaaggaaactacatcttgttagaagaagggtcttggaaagacatctcagatatgtttgatgagaaatggttcatcgatgtgaatctcgatacagcaatgcaacgtgttgaaaaccggcatatctcaactggtaaacccccagatgttgctaaatggcgggtggattataatgaccgacccaacgcagagctgataataaagtcaaagacaaacgctgatctactgatcagatctatgaacatttga

SEQ ID NO: 86476 - protein, 301 aa, Arabidopsis thaliana; identical to SEQ ID NO: 20482
  peptide (1)..(301): Ceres Seq. ID no. 12690863
  misc_feature (97)..(301): Pfam Name: Phosphoribulokinase / Uridine kinase family Pfam Description: Phosphoribulokinase / Uridine kinase family
  misc_feature (7)..(301): Homolog of NCBI NO: 15218676 NR Description: unknown protein; protein id: At1g03030.1
  misc_feature (1)..(169): Homolog of NCBI NO: 25363622 NR Description: hypothetical protein F10O3.15 - Arabidopsis >gi|4587575|gb|AAD25806.1|AC006550_14 Belongs to PF|01121 protein family UPF0038 containing ATP/GTP binding gene.
  misc_feature (192)..(301): Homolog of NCBI NO: 25363622 NR Description: hypothetical protein F10O3.15 - Arabidopsis >gi|4587575|gb|AAD25806.1|AC006550_14 Belongs to PF|01121 protein family UPF0038 containing ATP/GTP binding gene.
  misc_feature (93)..(298): Homolog of NCBI NO: 40741109 NR Description: hypothetical protein AN4382.2 [Aspergillus
  misc_feature (75)..(301): Homolog of NCBI NO: 19113880 NR Description: similarity to uridine kinase [Schizosaccharomyces
  misc_feature (92)..(283): Homolog of NCBI NO: 38108268 NR Description: hypothetical protein MG02303.4 [Magnaporthe
  misc_feature (140)..(285): Homolog of NCBI NO: 40740541 NR Description: hypothetical protein AN8109.2 [Aspergillus
  misc_feature (97)..(296): Homolog of NCBI NO: 23500977 NR Description: kinase-related protein [Brucella suis 1330]
  misc_feature (97)..(296): Homolog of NCBI NO: 17988166 NR Description: PANTOTHENATE KINASE [Brucella melitensis]
  misc_feature (76)..(296): Homolog of NCBI NO: 29830362 NR Description: hypothetical protein [Streptomyces avermitilis

SEQ ID NO: 86477 - protein, 231 aa, Arabidopsis thaliana; identical to SEQ ID NO: 20483
  peptide (1)..(231): Ceres Seq. ID no. 12690864
  misc_feature (27)..(231): Pfam Name: Phosphoribulokinase / Uridine kinase family Pfam Description: Phosphoribulokinase / Uridine kinase family
  misc_feature (1)..(231): Homolog of NCBI NO: 15218676 NR Description: unknown protein; protein id: At1g03030.1
  misc_feature (1)..(99): Homolog of NCBI NO: 25363622 NR Description: hypothetical protein F10O3.15 - Arabidopsis >gi|4587575|gb|AAD25806.1|AC006550_14 Belongs to PF|01121 protein family UPF0038 containing ATP/GTP binding gene.
  misc_feature (122)..(231): Homolog of NCBI NO: 25363622 NR Description: hypothetical protein F10O3.15 - Arabidopsis >gi|4587575|gb|AAD25806.1|AC006550_14 Belongs to PF|01121 protein family UPF0038 containing ATP/GTP binding gene.
  misc_feature (23)..(228): Homolog of NCBI NO: 40741109 NR Description: hypothetical protein AN4382.2 [Aspergillus
  misc_feature (5)..(231): Homolog of NCBI NO: 19113880 NR Description: similarity to uridine kinase [Schizosaccharomyces
  misc_feature (22)..(213): Homolog of NCBI NO: 38108268 NR Description: hypothetical protein MG02303.4 [Magnaporthe
  misc_feature (70)..(215): Homolog of NCBI NO: 40740541 NR Description: hypothetical protein AN8109.2 [Aspergillus
  misc_feature (27)..(226): Homolog of NCBI NO: 23500977 NR Description: kinase-related protein [Brucella suis 1330]
  misc_feature (27)..(226): Homolog of NCBI NO: 17988166 NR Description: PANTOTHENATE KINASE [Brucella melitensis]
  misc_feature (6)..(226): Homolog of NCBI NO: 29830362 NR Description: hypothetical protein [Streptomyces avermitilis

SEQ ID NO: 86478 - protein, 213 aa, Arabidopsis thaliana; identical to SEQ ID NO: 20484
  peptide (1)..(213): Ceres Seq. ID no. 12690865
  misc_feature (9)..(213): Pfam Name: Phosphoribulokinase / Uridine kinase family Pfam Description: Phosphoribulokinase / Uridine kinase family
  misc_feature (1)..(213): Homolog of NCBI NO: 15218676 NR Description: unknown protein; protein id: At1g03030.1
  misc_feature (1)..(81): Homolog of NCBI NO: 25363622 NR Description: hypothetical protein F10O3.15 - Arabidopsis >gi|4587575|gb|AAD25806.1|AC006550_14 Belongs to PF|01121 protein family UPF0038 containing ATP/GTP binding gene.
  misc_feature (104)..(213): Homolog of NCBI NO: 25363622 NR Description: hypothetical protein F10O3.15 - Arabidopsis >gi|4587575|gb|AAD25806.1|AC006550_14 Belongs to PF|01121 protein family UPF0038 containing ATP/GTP binding gene.
  misc_feature (5)..(210): Homolog of NCBI NO: 40741109 NR Description: hypothetical protein AN4382.2 [Aspergillus
  misc_feature (1)..(213): Homolog of NCBI NO: 19113880 NR Description: similarity to uridine kinase [Schizosaccharomyces
  misc_feature (4)..(195): Homolog of NCBI NO: 38108268 NR Description: hypothetical protein MG02303.4 [Magnaporthe
  misc_feature (52)..(197): Homolog of NCBI NO: 40740541 NR Description: hypothetical protein AN8109.2 [Aspergillus
  misc_feature (9)..(208): Homolog of NCBI NO: 23500977 NR Description: kinase-related protein [Brucella suis 1330]
  misc_feature (9)..(208): Homolog of NCBI NO: 17988166 NR Description: PANTOTHENATE KINASE [Brucella melitensis]
  misc_feature (1)..(208): Homolog of NCBI NO: 29830362 NR Description: hypothetical protein [Streptomyces avermitilis

SEQ ID NO: 86479 - DNA, 5417 bp, Arabidopsis thaliana
  misc_feature (1)..(5417): Ceres Seq. ID no. 12690874
  misc_feature: MA Experiment ID: 108569 Result: Down-regulated in Transcription
  misc_feature: MA Experiment 108569 PARAMETER Experiment Name: At_0.001%_MeJA__cDNA_P Parameter: Timepoint (hr) Value: 6
  misc_feature: MA Experiment 108569 PARAMETER Experiment Name: At_0.001%_MeJA__cDNA_P Parameter: Tissue Value: Aerial
  misc_feature: MA Experiment 108569 PARAMETER Experiment Name: At_0.001%_MeJA__cDNA_P Parameter: Treatment Value: 0.001% MeJA vs. No Treatment
  misc_feature: MA Experiment ID: 108572 Result: Up-regulated in Transcription
  misc_feature: MA Experiment 108572 PARAMETER Experiment Name: At_Drought_cDNA_P Parameter: Timepoint (hr) Value: 1
  misc_feature: MA Experiment 108572 PARAMETER Experiment Name: At_Drought_cDNA_P Parameter: Tissue Value: Aerial
  misc_feature: MA Experiment 108572 PARAMETER Experiment Name: At_Drought_cDNA_P Parameter: Treatment Value: Drought vs. No Drought
  misc_feature: MA Experiment ID: 108594 Result: Up-regulated in Transcription
  misc_feature: MA Experiment 108594 PARAMETER Experiment Name: At_Ler-rhl_Root_cDNA_P Parameter: Plant Line Value: null
  misc_feature: MA Experiment ID: 108595 Result: Up-regulated in Transcription
  misc_feature: MA Experiment 108595 PARAMETER Experiment Name: At_Ler-pi_Ovule_cDNA_P Parameter: Plant Line Value: null
  misc_feature: MA Experiment ID: 20000086 Result: Up-regulated in Transcription
  misc_feature: MA Experiment 20000086 PARAMETER Experiment Name: At_100uM_ABA_Mutants_cDNA_P Parameter: Plant Line Value: CS22
  misc_feature: MA Experiment 20000086 PARAMETER Experiment Name: At_100uM_ABA_Mutants_cDNA_P Parameter: Timepoint (hr) Value: 6
  misc_feature: MA Experiment 20000086 PARAMETER Experiment Name: At_100uM_ABA_Mutants_cDNA_P Parameter: Tissue Value: Aerial
  misc_feature: MA Experiment 20000086 PARAMETER Experiment Name: At_100uM_ABA_Mutants_cDNA_P Parameter: Treatment Value: 100uM ABA vs. No Treatment
  misc_feature: MA Experiment ID: 20000171 Result: Down-regulated in Transcription
  misc_feature: MA Experiment 20000171 PARAMETER Experiment Name: At_42deg_Heat_P Parameter: Age (day) Value: 14
  misc_feature: MA Experiment 20000171 PARAMETER Experiment Name: At_42deg_Heat_P Parameter: Organism Value: A. thaliana
  misc_feature: MA Experiment 20000171 PARAMETER Experiment Name: At_42deg_Heat_P Parameter: Plant Line Value: WS
  misc_feature: MA Experiment 20000171 PARAMETER Experiment Name: At_42deg_Heat_P Parameter: Temperature (deg C) Value: 42 vs. 22
  misc_feature: MA Experiment 20000171 PARAMETER Experiment Name: At_42deg_Heat_P Parameter: Timepoint (hr) Value: 1
  misc_feature: MA Experiment 20000171 PARAMETER Experiment Name: At_42deg_Heat_P Parameter: Tissue Value: Aerial
  misc_feature: MA Experiment ID: 20000184 Result: Down-regulated in Transcription
  misc_feature: MA Experiment 20000184 PARAMETER Experiment Name: At_Shoots__P Parameter: Age (day) Value: 7
  misc_feature: MA Experiment 20000184 PARAMETER Experiment Name: At_Shoots__P Parameter: Tissue Value: Shoots vs. Whole Plant
  misc_feature: MA Experiment ID: 20000185 Result: Up-regulated in Transcription
  misc_feature: MA Experiment 20000185 PARAMETER Experiment Name: At_Roots__P Parameter: Age (day) Value: 7 vs. 21
  misc_feature: MA Experiment 20000185 PARAMETER Experiment Name: At_Roots__P Parameter: Organism Value: A. thaliana
  misc_feature: MA Experiment 20000185 PARAMETER Experiment Name: At_Roots__P Parameter: Tissue Value: Roots vs. Whole Plant
  misc_feature: MA Experiment ID: 20000227 Result: Up-regulated in Transcription
  misc_feature: MA Experiment 20000227 PARAMETER Experiment Name: At_Root-Tips-vs-Tops_P Parameter: Tissue Value: Root Tips vs. Root Tops
  misc_feature: MA Experiment ID: 20000264 Result: Up-regulated in Transcription
  misc_feature: MA Experiment 20000264 PARAMETER Experiment Name: At_Open_Flower_P Parameter: Age (day) Value: 21
  misc_feature: MA Experiment 20000264 PARAMETER Experiment Name: At_Open_Flower_P Parameter: Plant Line Value: WS
  misc_feature: MA Experiment 20000264 PARAMETER Experiment Name: At_Open_Flower_P Parameter: Tissue Value: Open Flower vs. Whole Plant
  misc_feature: MA Experiment ID: 20000286 Result: Up-regulated in Transcription
  misc_feature: MA Experiment 20000286 PARAMETER Experiment Name: At_Open_Flower_P Parameter: Age (day) Value: 21
  misc_feature: MA Experiment 20000286 PARAMETER Experiment Name: At_Open_Flower_P Parameter: Plant Line Value: WS
  misc_feature: MA Experiment 20000286 PARAMETER Experiment Name: At_Open_Flower_P Parameter: Tissue Value: Half Open vs. Whole Plant
  misc_feature: MA Experiment ID: 20000307 Result: Up-regulated in Transcription
  misc_feature: MA Experiment 20000307 PARAMETER Experiment Name: At_Germinating_Seeds_Sub_P Parameter: Age (hr) Value: 24 vs. 0
  misc_feature: MA Experiment 20000307 PARAMETER Experiment Name: At_Germinating_Seeds_Sub_P Parameter: Organism Value: A. thaliana
  misc_feature: MA Experiment 20000307 PARAMETER Experiment Name: At_Germinating_Seeds_Sub_P Parameter: Plant Line Value: WS
  misc_feature: MA Experiment 20000307 PARAMETER Experiment Name: At_Germinating_Seeds_Sub_P Parameter: Tissue Value: Germinating Seeds
  misc_feature: MA Experiment ID: 20000315 Result: Down-regulated in Transcription
  misc_feature: MA Experiment 20000315 PARAMETER Experiment Name: At_14day_Shoots-Roots_Sub_P Parameter: Age (day) Value: 14
  misc_feature: MA Experiment 20000315 PARAMETER Experiment Name: At_14day_Shoots-Roots_Sub_P Parameter: Organism Value: A. thaliana
  misc_feature: MA Experiment 20000315 PARAMETER Experiment Name: At_14day_Shoots-Roots_Sub_P Parameter: Plant Line Value: WS
  misc_feature: MA Experiment 20000315 PARAMETER Experiment Name: At_14day_Shoots-Roots_Sub_P Parameter: Tissue Value: Shoots vs. Whole Plant
  misc_feature: MA Experiment ID: 20000328 Result: Down-regulated in Transcription
  misc_feature: MA Experiment 20000328 PARAMETER Experiment Name: At_42deg_Heat_Sub_P Parameter: Age (day) Value: 14
  misc_feature: MA Experiment 20000328 PARAMETER Experiment Name: At_42deg_Heat_Sub_P Parameter: Organism Value: A. thaliana
  misc_feature: MA Experiment 20000328 PARAMETER Experiment Name: At_42deg_Heat_Sub_P Parameter: Plant Line Value: WS
  misc_feature: MA Experiment 20000328 PARAMETER Experiment Name: At_42deg_Heat_Sub_P Parameter: Temperature (deg C) Value: 42 vs. 22
  misc_feature: MA Experiment 20000328 PARAMETER Experiment Name: At_42deg_Heat_Sub_P Parameter: Timepoint (hr) Value: 6
  misc_feature: MA Experiment 20000328 PARAMETER Experiment Name: At_42deg_Heat_Sub_P Parameter: Tissue Value: Aerial
  misc_feature: MA Experiment ID: 20000437 Result: Up-regulated in Transcription
  misc_feature: MA Experiment 20000437 PARAMETER Experiment Name: At_Drought_P Parameter: Age (day) Value: 8
  misc_feature: MA Experiment 20000437 PARAMETER Experiment Name: At_Drought_P Parameter: Organism Value: A. thaliana
  misc_feature: MA Experiment 20000437 PARAMETER Experiment Name: At_Drought_P Parameter: Plant Line Value: WS
  misc_feature: MA Experiment 20000437 PARAMETER Experiment Name: At_Drought_P Parameter: Timepoint (hr) Value: 24
  misc_feature: MA Experiment 20000437 PARAMETER Experiment Name: At_Drought_P Parameter: Tissue Value: Whole Plant
  misc_feature: MA Experiment 20000437 PARAMETER Experiment Name: At_Drought_P Parameter: Treatment Value: Drought vs. No Drought
  misc_feature: MA Experiment ID: 20000452 Result: Up-regulated in Transcription
  misc_feature: MA Experiment 20000452 PARAMETER Experiment Name: At_CS6879_Shoots-Roots_P Parameter: Age (day) Value: 14
  misc_feature: MA Experiment 20000452 PARAMETER Experiment Name: At_CS6879_Shoots-Roots_P Parameter: Organism Value: A. thaliana
  misc_feature: MA Experiment 20000452 PARAMETER Experiment Name: At_CS6879_Shoots-Roots_P Parameter: Plant Line Value: CS6879 vs. WS
  misc_feature: MA Experiment 20000452 PARAMETER Experiment Name: At_CS6879_Shoots-Roots_P Parameter: Tissue Value: Shoots
  misc_feature: MA Experiment ID: 20000495 Result: Up-regulated in Transcription
  misc_feature: MA Experiment 20000495 PARAMETER Experiment Name: At_Guard_Cells_P Parameter: Harvest Date Value: 8/2/2002
  misc_feature: MA Experiment 20000495 PARAMETER Experiment Name: At_Guard_Cells_P Parameter: Organism Value: A. thaliana
  misc_feature: MA Experiment 20000495 PARAMETER Experiment Name: At_Guard_Cells_P Parameter: Tissue Value: Guard Cells vs. Leaves
  misc_feature: MA Experiment ID: 20000496 Result: Up-regulated in Transcription
  misc_feature: MA Experiment 20000496 PARAMETER Experiment Name: At_Guard_Cells_P Parameter: Harvest Date Value: 7/19/2002
  misc_feature: MA Experiment 20000496 PARAMETER Experiment Name: At_Guard_Cells_P Parameter: Organism Value: Canola
  misc_feature: MA Experiment 20000496 PARAMETER Experiment Name: At_Guard_Cells_P Parameter: Tissue Value: Guard Cells vs. Leaves
  misc_feature: MA Experiment ID: 20000794 Result: Up-regulated in Transcription
  misc_feature: MA Experiment 20000794 PARAMETER Experiment Name: At_Petals_P Parameter: Age (day) Value: 23-25 days
  misc_feature: MA Experiment 20000794 PARAMETER Experiment Name: At_Petals_P Parameter: Plant Line Value: WS
  misc_feature: MA Experiment 20000794 PARAMETER Experiment Name: At_Petals_P Parameter: Tissue Value: Petals vs. Whole plant
  misc_feature: MA Experiment ID: 20001451 Result: Up-regulated in Transcription
  misc_feature: MA Experiment 20001451 PARAMETER Experiment Name: At_Far-red-induction_P Parameter: Age (day) Value: 7
  misc_feature: MA Experiment 20001451 PARAMETER Experiment Name: At_Far-red-induction_P Parameter: Light Value: Far-red vs. White
  misc_feature: MA Experiment 20001451 PARAMETER Experiment Name: At_Far-red-induction_P Parameter: Organism Value: A. thaliana
  misc_feature: MA Experiment 20001451 PARAMETER Experiment Name: At_Far-red-induction_P Parameter: Plant Line Value: Columbia
  misc_feature: MA Experiment 20001451 PARAMETER Experiment Name: At_Far-red-induction_P Parameter: Timepoint (hr) Value: 24
  misc_feature: MA Experiment 20001451 PARAMETER Experiment Name: At_Far-red-induction_P Parameter: Tissue Value: Whole Plant
  misc_feature: MA Experiment ID: 20001757 Result: Down-regulated in Transcription
  misc_feature: MA Experiment 20001757 PARAMETER Experiment Name: At_50mM_NH4NO3_L-to-H_P Parameter: Timepoint (hr) Value: 6
  misc_feature: MA Experiment 20001757 PARAMETER Experiment Name: At_50mM_NH4NO3_L-to-H_P Parameter: Tissue Value: Leaf
  misc_feature: MA Experiment 20001757 PARAMETER Experiment Name: At_50mM_NH4NO3_L-to-H_P Parameter: Treatment Value: 50mM NH4NO3 vs 100mM Mannitol
  misc_feature: MA Experiment ID: 20001905 Result: Up-regulated in Transcription
  misc_feature: MA Experiment 20001905 PARAMETER Experiment Name: At_Drought_Reproduction_P Parameter: Age (day) Value: 40
  misc_feature: MA Experiment 20001905 PARAMETER Experiment Name: At_Drought_Reproduction_P Parameter: Organism Value: A. thaliana
  misc_feature: MA Experiment 20001905 PARAMETER Experiment Name: At_Drought_Reproduction_P Parameter: Plant Line Value: WS
  misc_feature: MA Experiment 20001905 PARAMETER Experiment Name: At_Drought_Reproduction_P Parameter: Timepoint (day) Value: 10
  misc_feature: MA Experiment 20001905 PARAMETER Experiment Name: At_Drought_Reproduction_P Parameter: Tissue Value: Rosettes
  misc_feature: MA Experiment 20001905 PARAMETER Experiment Name: At_Drought_Reproduction_P Parameter: Treatment Value: Drought vs. No Drought
  misc_feature: MA Experiment ID: 20001911 Result: Up-regulated in Transcription
  misc_feature: MA Experiment 20001911 PARAMETER Experiment Name: At_Drought_Reproduction_P Parameter: Age (day) Value: 40
  misc_feature: MA Experiment 20001911 PARAMETER Experiment Name: At_Drought_Reproduction_P Parameter: Organism Value: A. thaliana
  misc_feature: MA Experiment 20001911 PARAMETER Experiment Name: At_Drought_Reproduction_P Parameter: Plant Line Value: WS
  misc_feature: MA Experiment 20001911 PARAMETER Experiment Name: At_Drought_Reproduction_P Parameter: Timepoint (day) Value: 10
  misc_feature: MA Experiment 20001911 PARAMETER Experiment Name: At_Drought_Reproduction_P Parameter: Tissue Value: Flowers
  misc_feature: MA Experiment 20001911 PARAMETER Experiment Name: At_Drought_Reproduction_P Parameter: Treatment Value: Drought vs. No Drought
atgactgctgttgtgaatggtaactctaaacgctattcttggtggtgggatagtcacataagccccaagaactcgaaatggcttcaggagaatcttacagatatggatagtaaagtcaagcaaatgatcaaggttattgaagaagatgctgactcttttgctaggcgagcggaaatgtattacaagaagcggcctgagcttatgaaactggttgaggagttttatcgagcatatcgtgctttggctgaaagatacgatcatgccaccggtgttattcgtcatgctcagcagactatggctgaagccttcccaaaccaagaccctatgatgtttggtgaggagtcacctctcggttcttccaccgatggttttgatccacaaacgcctgacagttatccacctatccgagctcctgtttacccagatgatttacgaaaaggtgcttttgggatttcttcctctcatttgagtaccgttaagcgcaatatagccttcatggaagaccctcagtctgtgagtagcgggaaaggttttaaaactgcaaaggcaaggaaaggactgaatttcaataatgttgatggaaaagaaataaatgctaaggttctttcagaatctgaacgcgcaagcaaagctgaggctgaaattgtggctttaaaagatgctctttctaaagtgcaggctgaaaaggaagctagcttagctcagtttgatcagaatttggagaaactgtctaatttggagtctgaggtatctcgtgcacaagaggactctagggtgcttattgaacgagccacaagagccgaagctgaggtcgaaacgctcagagaatccctcagcaaagtagaggttgaaaaggagtccagccttcttcagtatcagcaatgtctgcaaaacatagctgatttggaggatcgcatttctctagcccagaaggaggctggagaagtagatgagcgagccaacagagccgaagctgaaactctagcactgaagcaaagccttgttagttccgaaactgacaaggaagctgctcttgttcaatatcaacaatgcttgaaaaccatatctaacctggaagagaggttgcacaaggctgaggaagattcaaggttaaccaatcagcgggcagaaaatgctgagggtgaagttgaaagcttgaagcaaaaggtttccaaattaattgaagagaatgaagcttacgaactccaataccaacaatgtctggacacaattgcagatttaaagctcaagctgtttcatgctcaagaagaaactcaaaggctcagccgtgaaatagaggatggagttgctaagttaaaatttgcagaggaaaaatgtgttgtgcttgagagatcaaatcaaaatcttcactctgaactggatggtctactagagaaactggggaatcaaagtcatgagctcacggagaaacagaaagagttgggaagattgtggacttgtgtacaagaagaaaacttgcgttttatggaagctgagactgcctttcaaaccctacaacagttacactctcagtctcaggaggaactaagcactttggcattggaactgcaaaacaggtctcaaatcctgaaagatatggaagcccgtaacaatggtttacaggaggaagttcaggaagccaaagaccagagcaaaagcctcaatgagctcaatctctcctcggctgcatcaattaaaagtttgcaggaggaggtctcaaaattacgagagacaatacagaaacttgaggcagaagttgaactaagagtggaccaaagaaatgctttgcagcaagaaatatactgtcttaaagaggaattaagtcagatagggaagaaacaccagtccatggtagaacaggtggaattggttggtttacatccagaaagctttgggtcttctgtcaaggagttacaggaggagaactcaaagctaaaggaaatccgggaaagagaaagtattgaaaagacggccctgattgagaagttagaaatgatggaaaagcttgttcagaaaaaccttcttctggagaactccatatcagatttgaatgctgagctggaaacaatcagaggaaagctgaaaacattggaggaagcttctatgtcacttgctgaagagaaatcaggccttcattctgagaaggacatgttgatttcccgtctgcagagtgctacagaaaacagcaagaaactctctgaggaaaacatggtactggagaattctctttttaatgccaatgtagaacttgaagaactcaagtcgaaattgaaaagcctagaagaatcatgccacctgctgaatgatgacaagaccactttaactagtgaaagagaaagcctactctctcatattgatacaatgagaaaaagaattgaagatctggagaaagaacatgcagaattaaaagtgaaagttttggaattagcgactgagagggagtcttctcttcagaaaattgaagagttgggagtgtctttaaatgccaaggactgtgagtatgctagttttgtgcaattttcagagagtcggatgaatggcatggaatcaacgatccatcaccttcaagatgaaaatcaatgccgggtgagagaatatcaagtggaactggatcgagctcatgatgctcacattgagattattgttctgcagaaatgtttgcaggactggcttgagaagagttcctctttgattgctgagaatcaggatattaaagaggcttctaaactgttagagaagctagtttctgaactagaagaggaaaatattgggaaacaagtgcagattgactcctcgattaactgcattaaaatactgagaacagggatctaccaggtattgatgaagcttgaaataattccaggtataggttccggtgatgagaactcgcgagaccagagaaatatgcatgatatattgaatagacttgaagacatgcaaactatgcttttgagcattcgggatgaaaaccagcactctgccatagagaacctcgtccttattgaatttcttcggcaacttaaatcagaagctgtaggtattgaaacagagaagaaaatccttgaggaagaacttgaatctcagtgtcagcagctctcgttttcgcgggatgagacccagaaacttatcttcgtgaacggagaattgaccacaaaagttaatcaaggagtcaacagagaaaaggttttgatggtggaaattgaggattttcacaggcaggtgttgcagttacgagatgactacaccattctacagggagataataacaaaacgttggatgagaaagcatacttgacaaagtcaacattgcagttggaggaggagaaatgtaaactagaagatgatatctctttgcttctgtcggagactatatatcaaagcaatctcatcattctgttggaggatgtcatcttggaaaagctttcaggagcaatgaaactaaacgaggatctagacagactcagtattgtcaagtgtaagcttgaggaagaggtaagagagcttggtgataagttaaaatctgcagacattgcgaactttcagcttcaagttgtgctagagaaatcgaatgccgaactactctctgccagatcagccaatgttcatttggaacatgaaatagctaatgtgaaggttcagaaggagaaagagcttttagaagcaatgctgatgatctccatcatgcaaaatgaaaaatctgaattatctaaggcagtggagggtttagaatgtagatacaaggaagctaaagcgatagaagaggatagggataagcaggtcttgagactccgtggagattacgatgagcaggttaagaagaatagtcattcgaacgaagctaatctgaaattggaagctgacttgatgaacttactcatggaactcgaagaaatcaaagtggagaaggaaaatctgaaccaggagctttttacagaaaggaatgagattgaactatgggagtctcagtctgcaacattgtttggagagttgcagatttcggctgttcatgaaacattgcttgaagggttgaccaatgagctggtcgaagcatgtaagaaccttgaaagcagaagcacgttaaaagacagggagattgagcagcttaaaggaagagtgaacaacttagaagatgcgaacaaaggacaaaacgatcttatgtgcaaatacgcccaagctattttcctgttgaaggaaagcatacaatctctggaaaaacatgcaatgcttcacgaattcgagaatggaccagccacaactaaccaatcttttgtgggtatctcttatcaggaaactgcttcattggtggataacagcgatggcttcttagagatacaagaattgcatttgagaattaaagctattgaggaggcaataaccaaaaagcttgcaatggaagaactaaaaacttcctctgcccgaagaagcagaaggagaaatggaagcctccggaaacagaaccatgaaatctactccgaggaaaccgagatgatcacaaaagatatcgtactcgatcaggtttctgattgctcatcatatgggataagtacgagagacattttgaagatagaagatgatcacagtttagaggcaaagtcacaaaatcctccgaaaggtaaatccttgtctgaagagtcattggttgtggacaaactagagatctccgatagattcacggatccaaacaaagatgcaaacaagaggaaagttctcgagagacttaattcagatttacagaagctctcaaatcttcatgtcgccgttgaagatttgaaaatcaaagtggagacagaggagaaagacgagaaaggaaaagaaaacgagtacgagacgatcaagggacagatcaacgaagctgaagaagcattagagaaactgttaagcatcaacaggaaactggtgacgaaagttcaaaatggatttgaaagatcagatggaagcaaatcatcaatggatcttgatgagaatgagagtagcagaaggaggaggatatcagaacaggcgagaagaggatcagagaagattggtaggttacagttggagatacagagattacagtttctgttactgaaactggaaggagatagagaggatcgagcaaaagcaaagatatcggatagcaaaacgaggattcttcttcgggattatatctatagcggagtgagaggtgagcgacgaaagaggattaaaaagcggtttgcgttttgtgggtgcgtgcaaccgcctccatctccttgatagttagaactgttgttgcaagtaagctaaataatgttcatgtgaatggaaacgtattgaagtttgatatgaaagagaaacacttttgctaatatctgttttttgcttttccgtagggtttaaaagaaatttgtatattgctaatagtttaaattccaaatttgttctacgtttgcgtttca

SEQ ID NO: 86480 - protein, 1744 aa, Arabidopsis thaliana
  peptide (1)..(1744): Ceres Seq. ID no. 12690875
  misc_feature (382)..(1236): Pfam Name: Myosin tail Pfam Description: Myosin tail
  misc_feature (166)..(1739): Homolog of NCBI NO: 15228859 NR Description: unknown protein; protein id: At3g22790.1
  misc_feature (1)..(871): Homolog of NCBI NO: 15235468 NR Description: unknown protein; protein id: At4g02710.1
  misc_feature (166)..(1634): Homolog of NCBI NO: 9279697 NR Description: centromere protein [Arabidopsis thaliana]
  misc_feature (166)..(1726): Homolog of NCBI NO: 15233570 NR Description: centromere protein homolog; protein id:
  misc_feature (206)..(1513): Homolog of NCBI NO: 37534452 NR Description: putative centromere protein [Oryza sativa
  misc_feature (1)..(1379): Homolog of NCBI NO: 37534452 NR Description: putative centromere protein [Oryza sativa
  misc_feature (35)..(1668): Homolog of NCBI NO: 15233570 NR Description: centromere protein homolog; protein id:
  misc_feature (841)..(1744): Homolog of NCBI NO: 15235468 NR Description: unknown protein; protein id: At4g02710.1
  misc_feature (802)..(1638): Homolog of NCBI NO: 15235468 NR Description: unknown protein; protein id: At4g02710.1
  misc_feature (180)..(1739): Homolog of NCBI NO: 15233570 NR Description: centromere protein homolog; protein id:
MTAVVNGNSKRYSWWWDSHISPKNSKWLQENLTDMDSKVKQMIKVIEEDADSFARRAEMYYKKRPELMKLVEEFYRAYRALAERYDHATGVIRHAQQTMAEAFPNQDPMMFGEESPLGSSTDGFDPQTPDSYPPIRAPVYPDDLRKGAFGISSSHLSTVKRNIAFMEDPQSVSSGKGFKTAKARKGLNFNNVDGKEINAKVLSESERASKAEAEIVALKDALSKVQAEKEASLAQFDQNLEKLSNLESEVSRAQEDSRVLIERATRAEAEVETLRESLSKVEVEKESSLLQYQQCLQNIADLEDRISLAQKEAGEVDERANRAEAETLALKQSLVSSETDKEAALVQYQQCLKTISNLEERLHKAEEDSRLTNQRAENAEGEVESLKQKVSKLIEENEAYELQYQQCLDTIADLKLKLFHAQEETQRLSREIEDGVAKLKFAEEKCVVLERSNQNLHSELDGLLEKLGNQSHELTEKQKELGRLWTCVQEENLRFMEAETAFQTLQQLHSQSQEELSTLALELQNRSQILKDMEARNNGLQEEVQEAKDQSKSLNELNLSSAASIKSLQEEVSKLRETIQKLEAEVELRVDQRNALQQEIYCLKEELSQIGKKHQSMVEQVELVGLHPESFGSSVKELQEENSKLKEIRERESIEKTALIEKLEMMEKLVQKNLLLENSISDLNAELETIRGKLKTLEEASMSLAEEKSGLHSEKDMLISRLQSATENSKKLSEENMVLENSLFNANVELEELKSKLKSLEESCHLLNDDKTTLTSERESLLSHIDTMRKRIEDLEKEHAELKVKVLELATERESSLQKIEELGVSLNAKDCEYASFVQFSESRMNGMESTIHHLQDENQCRVREYQVELDRAHDAHIEIIVLQKCLQDWLEKSSSLIAENQDIKEASKLLEKLVSELEEENIGKQVQIDSSINCIKILRTGIYQVLMKLEIIPGIGSGDENSRDQRNMHDILNRLEDMQTMLLSIRDENQHSAIENLVLIEFLRQLKSEAVGIETEKKILEEELESQCQQLSFSRDETQKLIFVNGELTTKVNQGVNREKVLMVEIEDFHRQVLQLRDDYTILQGDNNKTLDEKAYLTKSTLQLEEEKCKLEDDISLLLSETIYQSNLIILLEDVILEKLSGAMKLNEDLDRLSIVKCKLEEEVRELGDKLKSADIANFQLQVVLEKSNAELLSARSANVHLEHEIANVKVQKEKELLEAMLMISIMQNEKSELSKAVEGLECRYKEAKAIEEDRDKQVLRLRGDYDEQVKKNSHSNEANLKLEADLMNLLMELEEIKVEKENLNQELFTERNEIELWESQSATLFGELQISAVHETLLEGLTNELVEACKNLESRSTLKDREIEQLKGRVNNLEDANKGQNDLMCKYAQAIFLLKESIQSLEKHAMLHEFENGPATTNQSFVGISYQETASLVDNSDGFLEIQELHLRIKAIEEAITKKLAMEELKTSSARRSRRRNGSLRKQNHEIYSEETEMITKDIVLDQVSDCSSYGISTRDILKIEDDHSLEAKSQNPPKGKSLSEESLVVDKLEISDRFTDPNKDANKRKVLERLNSDLQKLSNLHVAVEDLKIKVETEEKDEKGKENEYETIKGQINEAEEALEKLLSINRKLVTKVQNGFERSDGSKSSMDLDENESSRRRRISEQARRGSEKIGRLQLEIQRLQFLLLKLEGDREDRAKAKISDSKTRILLRDYIYSGVRGERRKRIKKRFAFCGCVQPPPSP

SEQ ID NO: 86481 - protein, 1710 aa, Arabidopsis thaliana
  peptide (1)..(1710): Ceres Seq. ID no. 12690876
  misc_feature (348)..(1202): Pfam Name: Myosin tail Pfam Description: Myosin tail
  misc_feature (132)..(1705): Homolog of NCBI NO: 15228859 NR Description: unknown protein; protein id: At3g22790.1
  misc_feature (1)..(837): Homolog of NCBI NO: 15235468 NR Description: unknown protein; protein id: At4g02710.1
  misc_feature (132)..(1600): Homolog of NCBI NO: 9279697 NR Description: centromere protein [Arabidopsis thaliana]
  misc_feature (132)..(1692): Homolog of NCBI NO: 15233570 NR Description: centromere protein homolog; protein id:
  misc_feature (172)..(1479): Homolog of NCBI NO: 37534452 NR Description: putative centromere protein [Oryza sativa
  misc_feature (1)..(1345): Homolog of NCBI NO: 37534452 NR Description: putative centromere protein [Oryza sativa
  misc_feature (1)..(1634): Homolog of NCBI NO: 15233570 NR Description: centromere protein homolog; protein id:
  misc_feature (807)..(1710): Homolog of NCBI NO: 15235468 NR Description: unknown protein; protein id: At4g02710.1
  misc_feature (768)..(1604): Homolog of NCBI NO: 15235468 NR Description: unknown protein; protein id: At4g02710.1
  misc_feature (146)..(1705): Homolog of NCBI NO: 15233570 NR Description: centromere protein homolog; protein id:
MDSKVKQMIKVIEEDADSFARRAEMYYKKRPELMKLVEEFYRAYRALAERYDHATGVIRHAQQTMAEAFPNQDPMMFGEESPLGSSTDGFDPQTPDSYPPIRAPVYPDDLRKGAFGISSSHLSTVKRNIAFMEDPQSVSSGKGFKTAKARKGLNFNNVDGKEINAKVLSESERASKAEAEIVALKDALSKVQAEKEASLAQFDQNLEKLSNLESEVSRAQEDSRVLIERATRAEAEVETLRESLSKVEVEKESSLLQYQQCLQNIADLEDRISLAQKEAGEVDERANRAEAETLALKQSLVSSETDKEAALVQYQQCLKTISNLEERLHKAEEDSRLTNQRAENAEGEVESLKQKVSKLIEENEAYELQYQQCLDTIADLKLKLFHAQEETQRLSREIEDGVAKLKFAEEKCVVLERSNQNLHSELDGLLEKLGNQSHELTEKQKELGRLWTCVQEENLRFMEAETAFQTLQQLHSQSQEELSTLALELQNRSQILKDMEARNNGLQEEVQEAKDQSKSLNELNLSSAASIKSLQEEVSKLRETIQKLEAEVELRVDQRNALQQEIYCLKEELSQIGKKHQSMVEQVELVGLHPESFGSSVKELQEENSKLKEIRERESIEKTALIEKLEMMEKLVQKNLLLENSISDLNAELETIRGKLKTLEEASMSLAEEKSGLHSEKDMLISRLQSATENSKKLSEENMVLENSLFNANVELEELKSKLKSLEESCHLLNDDKTTLTSERESLLSHIDTMRKRIEDLEKEHAELKVKVLELATERESSLQKIEELGVSLNAKDCEYASFVQFSESRMNGMESTIHHLQDENQCRVREYQVELDRAHDAHIEIIVLQKCLQDWLEKSSSLIAENQDIKEASKLLEKLVSELEEENIGKQVQIDSSINCIKILRTGIYQVLMKLEIIPGIGSGDENSRDQRNMHDILNRLEDMQTMLLSIRDENQHSAIENLVLIEFLRQLKSEAVGIETEKKILEEELESQCQQLSFSRDETQKLIFVNGELTTKVNQGVNREKVLMVEIEDFHRQVLQLRDDYTILQGDNNKTLDEKAYLTKSTLQLEEEKCKLEDDISLLLSETIYQSNLIILLEDVILEKLSGAMKLNEDLDRLSIVKCKLEEEVRELGDKLKSADIANFQLQVVLEKSNAELLSARSANVHLEHEIANVKVQKEKELLEAMLMISIMQNEKSELSKAVEGLECRYKEAKAIEEDRDKQVLRLRGDYDEQVKKNSHSNEANLKLEADLMNLLMELEEIKVEKENLNQELFTERNEIELWESQSATLFGELQISAVHETLLEGLTNELVEACKNLESRSTLKDREIEQLKGRVNNLEDANKGQNDLMCKYAQAIFLLKESIQSLEKHAMLHEFENGPATTNQSFVGISYQETASLVDNSDGFLEIQELHLRIKAIEEAITKKLAMEELKTSSARRSRRRNGSLRKQNHEIYSEETEMITKDIVLDQVSDCSSYGISTRDILKIEDDHSLEAKSQNPPKGKSLSEESLVVDKLEISDRFTDPNKDANKRKVLERLNSDLQKLSNLHVAVEDLKIKVETEEKDEKGKENEYETIKGQINEAEEALEKLLSINRKLVTKVQNGFERSDGSKSSMDLDENESSRRRRISEQARRGSEKIGRLQLEIQRLQFLLLKLEGDREDRAKAKISDSKTRILLRDYIYSGVRGERRKRIKKRFAFCGCVQPPPSP

SEQ ID NO: 86482 - protein, 1703 aa, Arabidopsis thaliana
  peptide (1)..(1703): Ceres Seq. ID no. 12690877
  misc_feature (341)..(1195): Pfam Name: Myosin tail Pfam Description: Myosin tail
  misc_feature (125)..(1698): Homolog of NCBI NO: 15228859 NR Description: unknown protein; protein id: At3g22790.1
  misc_feature (1)..(830): Homolog of NCBI NO: 15235468 NR Description: unknown protein; protein id: At4g02710.1
  misc_feature (125)..(1593): Homolog of NCBI NO: 9279697 NR Description: centromere protein [Arabidopsis thaliana]
  misc_feature (125)..(1685): Homolog of NCBI NO: 15233570 NR Description: centromere protein homolog; protein id:
  misc_feature (165)..(1472): Homolog of NCBI NO: 37534452 NR Description: putative centromere protein [Oryza sativa
  misc_feature (1)..(1338): Homolog of NCBI NO: 37534452 NR Description: putative centromere protein [Oryza sativa
  misc_feature (1)..(1627): Homolog of NCBI NO: 15233570 NR Description: centromere protein homolog; protein id:
  misc_feature (800)..(1703): Homolog of NCBI NO: 15235468 NR Description: unknown protein; protein id: At4g02710.1
  misc_feature (761)..(1597): Homolog of NCBI NO: 15235468 NR Description: unknown protein; protein id: At4g02710.1
  misc_feature (139)..(1698): Homolog of NCBI NO: 15233570 NR Description: centromere protein homolog; protein id:
MIKVIEEDADSFARRAEMYYKKRPELMKLVEEFYRAYRALAERYDHATGVIRHAQQTMAEAFPNQDPMMFGEESPLGSSTDGFDPQTPDSYPPIRAPVYPDDLRKGAFGISSSHLSTVKRNIAFMEDPQSVSSGKGFKTAKARKGLNFNNVDGKEINAKVLSESERASKAEAEIVALKDALSKVQAEKEASLAQFDQNLEKLSNLESEVSRAQEDSRVLIERATRAEAEVETLRESLSKVEVEKESSLLQYQQCLQNIADLEDRISLAQKEAGEVDERANRAEAETLALKQSLVSSETDKEAALVQYQQCLKTISNLEERLHKAEEDSRLTNQRAENAEGEVESLKQKVSKLIEENEAYELQYQQCLDTIADLKLKLFHAQEETQRLSREIEDGVAKLKFAEEKCVVLERSNQNLHSELDGLLEKLGNQSHELTEKQKELGRLWTCVQEENLRFMEAETAFQTLQQLHSQSQEELSTLALELQNRSQILKDMEARNNGLQEEVQEAKDQSKSLNELNLSSAASIKSLQEEVSKLRETIQKLEAEVELRVDQRNALQQEIYCLKEELSQIGKKHQSMVEQVELVGLHPESFGSSVKELQEENSKLKEIRERESIEKTALIEKLEMMEKLVQKNLLLENSISDLNAELETIRGKLKTLEEASMSLAEEKSGLHSEKDMLISRLQSATENSKKLSEENMVLENSLFNANVELEELKSKLKSLEESCHLLNDDKTTLTSERESLLSHIDTMRKRIEDLEKEHAELKVKVLELATERESSLQKIEELGVSLNAKDCEYASFVQFSESRMNGMESTIHHLQDENQCRVREYQVELDRAHDAHIEIIVLQKCLQDWLEKSSSLIAENQDIKEASKLLEKLVSELEEENIGKQVQIDSSINCIKILRTGIYQVLMKLEIIPGIGSGDENSRDQRNMHDILNRLEDMQTMLLSIRDENQHSAIENLVLIEFLRQLKSEAVGIETEKKILEEELESQCQQLSFSRDETQKLIFVNGELTTKVNQGVNREKVLMVEIEDFHRQVLQLRDDYTILQGDNNKTLDEKAYLTKSTLQLEEEKCKLEDDISLLLSETIYQSNLIILLEDVILEKLSGAMKLNEDLDRLSIVKCKLEEEVRELGDKLKSADIANFQLQVVLEKSNAELLSARSANVHLEHEIANVKVQKEKELLEAMLMISIMQNEKSELSKAVEGLECRYKEAKAIEEDRDKQVLRLRGDYDEQVKKNSHSNEANLKLEADLMNLLMELEEIKVEKENLNQELFTERNEIELWESQSATLFGELQISAVHETLLEGLTNELVEACKNLESRSTLKDREIEQLKGRVNNLEDANKGQNDLMCKYAQAIFLLKESIQSLEKHAMLHEFENGPATTNQSFVGISYQETASLVDNSDGFLEIQELHLRIKAIEEAITKKLAMEELKTSSARRSRRRNGSLRKQNHEIYSEETEMITKDIVLDQVSDCSSYGISTRDILKIEDDHSLEAKSQNPPKGKSLSEESLVVDKLEISDRFTDPNKDANKRKVLERLNSDLQKLSNLHVAVEDLKIKVETEEKDEKGKENEYETIKGQINEAEEALEKLLSINRKLVTKVQNGFERSDGSKSSMDLDENESSRRRRISEQARRGSEKIGRLQLEIQRLQFLLLKLEGDREDRAKAKISDSKTRILLRDYIYSGVRGERRKRIKKRFAFCGCVQPPPSP

SEQ ID NO: 86483 - DNA, 1482 bp, Arabidopsis thaliana
  misc_feature (1)..(1482): Ceres Seq. ID no. 12690893
  misc_feature: MA Experiment ID: 108434 Result: Down-regulated in Transcription
  misc_feature: MA Experiment 108434 PARAMETER Experiment Name: At_Root_Tips_cDNA_P Parameter: Tissue Value: Root Tips
  misc_feature: MA Experiment ID: 108461 Result: Down-regulated in Transcription
  misc_feature: MA Experiment 108461 PARAMETER Experiment Name: At_Germinating_Seeds_cDNA_P Parameter: Age (day) Value: 1 vs. 0
  misc_feature: MA Experiment 108461 PARAMETER Experiment Name: At_Germinating_Seeds_cDNA_P Parameter: Tissue Value: Germinating Seeds
  misc_feature: MA Experiment ID: 108462 Result: Down-regulated in Transcription
  misc_feature: MA Experiment 108462 PARAMETER Experiment Name: At_Germinating_Seeds_cDNA_P Parameter: Age (day) Value: 2 vs. 0
  misc_feature: MA Experiment 108462 PARAMETER Experiment Name: At_Germinating_Seeds_cDNA_P Parameter: Tissue Value: Germinating Seeds
  misc_feature: MA Experiment ID: 108463 Result: Down-regulated in Transcription
  misc_feature: MA Experiment 108463 PARAMETER Experiment Name: At_Germinating_Seeds_cDNA_P Parameter: Age (day) Value: 3 vs. 0
  misc_feature: MA Experiment 108463 PARAMETER Experiment Name: At_Germinating_Seeds_cDNA_P Parameter: Tissue Value: Germinating Seeds
  misc_feature: MA Experiment ID: 108464 Result: Down-regulated in Transcription
  misc_feature: MA Experiment 108464 PARAMETER Experiment Name: At_Germinating_Seeds_cDNA_P Parameter: Age (day) Value: 4 vs. 0
  misc_feature: MA Experiment 108464 PARAMETER Experiment Name: At_Germinating_Seeds_cDNA_P Parameter: Tissue Value: Germinating Seeds
  misc_feature: MA Experiment ID: 108473 Result: Up-regulated in Transcription
  misc_feature: MA Experiment 108473 PARAMETER Experiment Name: At_Drought_Flowers_cDNA_P Parameter: Timepoint (hr) Value: 7 d
  misc_feature: MA Experiment 108473 PARAMETER Experiment Name: At_Drought_Flowers_cDNA_P Parameter: Tissue Value: Flower
  misc_feature: MA Experiment 108473 PARAMETER Experiment Name: At_Drought_Flowers_cDNA_P Parameter: Treatment Value: Drought vs. No Drought
  misc_feature: MA Experiment ID: 108474 Result: Up-regulated in Transcription
  misc_feature: MA Experiment 108474 PARAMETER Experiment Name: At_Drought_Flowers_cDNA_P Parameter: Timepoint (hr) Value: null
  misc_feature: MA Experiment 108474 PARAMETER Experiment Name: At_Drought_Flowers_cDNA_P Parameter: Treatment Value: Drought vs. No Drought
  misc_feature: MA Experiment ID: 108489 Result: Up-regulated in Transcription
  misc_feature: MA Experiment ID: 108561 Result: Up-regulated in Transcription
  misc_feature: MA Experiment 108561 PARAMETER Experiment Name: At_100uM_ABA_cDNA_P Parameter: Timepoint (hr) Value: 6
  misc_feature: MA Experiment 108561 PARAMETER Experiment Name: At_100uM_ABA_cDNA_P Parameter: Tissue Value: Aerial
  misc_feature: MA Experiment 108561 PARAMETER Experiment Name: At_100uM_ABA_cDNA_P Parameter: Treatment Value: 100uM ABA vs. No Treatment
  misc_feature: MA Experiment ID: 108572 Result: Up-regulated in Transcription
  misc_feature: MA Experiment 108572 PARAMETER Experiment Name: At_Drought_cDNA_P Parameter: Timepoint (hr) Value: 1
  misc_feature: MA Experiment 108572 PARAMETER Experiment Name: At_Drought_cDNA_P Parameter: Tissue Value: Aerial
  misc_feature: MA Experiment 108572 PARAMETER Experiment Name: At_Drought_cDNA_P Parameter: Treatment Value: Drought vs. No Drought
  misc_feature: MA Experiment ID: 108573 Result: Up-regulated in Transcription
  misc_feature: MA Experiment 108573 PARAMETER Experiment Name: At_Drought_cDNA_P Parameter: Timepoint (hr) Value: 6
  misc_feature: MA Experiment 108573 PARAMETER Experiment Name: At_Drought_cDNA_P Parameter: Tissue Value: Aerial
  misc_feature: MA Experiment 108573 PARAMETER Experiment Name: At_Drought_cDNA_P Parameter: Treatment Value: Drought vs. No Drought
  misc_feature: MA Experiment ID: 108605 Result: Up-regulated in Transcription
  misc_feature: MA Experiment 108605 PARAMETER Experiment Name: At_100uM_ABA_cDNA_P Parameter: Timepoint (hr) Value: 6
  misc_feature: MA Experiment 108605 PARAMETER Experiment Name: At_100uM_ABA_cDNA_P Parameter: Tissue Value: Aerial
  misc_feature: MA Experiment 108605 PARAMETER Experiment Name: At_100uM_ABA_cDNA_P Parameter: Treatment Value: 100uM ABA vs. No Treatment
  misc_feature: MA Experiment ID: 108667 Result: Up-regulated in Transcription
  misc_feature: MA Experiment 108667 PARAMETER Experiment Name: At_2mM_SA_cDNA_P Parameter: Plant Line Value: WS
  misc_feature: MA Experiment 108667 PARAMETER Experiment Name: At_2mM_SA_cDNA_P Parameter: Timepoint (hr) Value: 1
  misc_feature: MA Experiment 108667 PARAMETER Experiment Name: At_2mM_SA_cDNA_P Parameter: Treatment Value: 2mM SA vs. No Treatment
  misc_feature: MA Experiment ID: 20000069 Result: Up-regulated in Transcription
  misc_feature: MA Experiment 20000069 PARAMETER Experiment Name: At_100uM_ABA_Mutants_cDNA_P Parameter: Plant Line Value: CS23
  misc_feature: MA Experiment 20000069 PARAMETER Experiment Name: At_100uM_ABA_Mutants_cDNA_P Parameter: Timepoint (hr) Value: 6
  misc_feature: MA Experiment 20000069 PARAMETER Experiment Name: At_100uM_ABA_Mutants_cDNA_P Parameter: Tissue Value: Aerial
  misc_feature: MA Experiment 20000069 PARAMETER Experiment Name: At_100uM_ABA_Mutants_cDNA_P Parameter: Treatment Value: 100uM ABA vs. No Treatment
  misc_feature: MA Experiment ID: 20000070 Result: Up-regulated in Transcription
  misc_feature: MA Experiment 20000070 PARAMETER Experiment Name: At_100uM_ABA_Mutants_cDNA_P Parameter: Plant Line Value: CS24
  misc_feature: MA Experiment 20000070 PARAMETER Experiment Name: At_100uM_ABA_Mutants_cDNA_P Parameter: Timepoint (hr) Value: 6
  misc_feature: MA Experiment 20000070 PARAMETER Experiment Name: At_100uM_ABA_Mutants_cDNA_P Parameter: Tissue Value: Aerial
  misc_feature: MA Experiment 20000070 PARAMETER Experiment Name: At_100uM_ABA_Mutants_cDNA_P Parameter: Treatment Value: 100uM ABA vs. No Treatment
  misc_feature: MA Experiment ID: 20000071 Result: Up-regulated in Transcription
  misc_feature: MA Experiment 20000071 PARAMETER Experiment Name: At_100uM_ABA_Mutants_cDNA_P Parameter: Plant Line Value: CS8104
  misc_feature: MA Experiment 20000071 PARAMETER Experiment Name: At_100uM_ABA_Mutants_cDNA_P Parameter: Timepoint (hr) Value: 6
  misc_feature: MA Experiment 20000071 PARAMETER Experiment Name: At_100uM_ABA_Mutants_cDNA_P Parameter: Tissue Value: Aerial
  misc_feature: MA Experiment 20000071 PARAMETER Experiment Name: At_100uM_ABA_Mutants_cDNA_P Parameter: Treatment Value: 100uM ABA vs. No Treatment
  misc_feature: MA Experiment ID: 20000072 Result: Up-regulated in Transcription
  misc_feature: MA Experiment 20000072 PARAMETER Experiment Name: At_100uM_ABA_Mutants_cDNA_P Parameter: Plant Line Value: CS8105
  misc_feature: MA Experiment 20000072 PARAMETER Experiment Name: At_100uM_ABA_Mutants_cDNA_P Parameter: Timepoint (hr) Value: 6
  misc_feature: MA Experiment 20000072 PARAMETER Experiment Name: At_100uM_ABA_Mutants_cDNA_P Parameter: Tissue Value: Aerial
  misc_feature: MA Experiment 20000072 PARAMETER Experiment Name: At_100uM_ABA_Mutants_cDNA_P Parameter: Treatment Value: 100uM ABA vs. No Treatment
  misc_feature: MA Experiment ID: 20000088 Result: Up-regulated in Transcription
  misc_feature: MA Experiment 20000088 PARAMETER Experiment Name: At_100uM_ABA_Mutants_cDNA_P Parameter: Plant Line Value: Landsberg
  misc_feature: MA Experiment 20000088 PARAMETER Experiment Name: At_100uM_ABA_Mutants_cDNA_P Parameter: Timepoint (hr) Value: 6
  misc_feature: MA Experiment 20000088 PARAMETER Experiment Name: At_100uM_ABA_Mutants_cDNA_P Parameter: Tissue Value: Aerial
  misc_feature: MA Experiment 20000088 PARAMETER Experiment Name: At_100uM_ABA_Mutants_cDNA_P Parameter: Treatment Value: 100uM ABA vs. No Treatment
  misc_feature: MA Experiment ID: 20000169 Result: Up-regulated in Transcription
  misc_feature: MA Experiment 20000169 PARAMETER Experiment Name: At_100uM_ABA_P Parameter: Age (day) Value: 14
  misc_feature: MA Experiment 20000169 PARAMETER Experiment Name: At_100uM_ABA_P Parameter: Organism Value: A. thaliana
  misc_feature: MA Experiment 20000169 PARAMETER Experiment Name: At_100uM_ABA_P Parameter: Plant Line Value: WS
  misc_feature: MA Experiment 20000169 PARAMETER Experiment Name: At_100uM_ABA_P Parameter: Timepoint (hr) Value: 6
  misc_feature: MA Experiment 20000169 PARAMETER Experiment Name: At_100uM_ABA_P Parameter: Tissue Value: Aerial
  misc_feature: MA Experiment 20000169 PARAMETER Experiment Name: At_100uM_ABA_P Parameter: Treatment Value: 100uM ABA vs. No Treatment
  misc_feature: MA Experiment ID: 20000180 Result: Down-regulated in Transcription
  misc_feature: MA Experiment 20000180 PARAMETER Experiment Name: At_Germinating_Seeds_P Parameter: Age (hr) Value: 24 vs. 0
  misc_feature: MA Experiment 20000180 PARAMETER Experiment Name: At_Germinating_Seeds_P Parameter: Tissue Value: Germinating Seeds
  misc_feature: MA Experiment ID: 20000227 Result: Down-regulated in Transcription
  misc_feature: MA Experiment 20000227 PARAMETER Experiment Name: At_Root-Tips-vs-Tops_P Parameter: Tissue Value: Root Tips vs. Root Tops
  misc_feature: MA Experiment ID: 20000234 Result: Down-regulated in Transcription
  misc_feature: MA Experiment 20000234 PARAMETER Experiment Name: At_Siliques_P Parameter: Age (day) Value: 21
  misc_feature: MA Experiment 20000234 PARAMETER Experiment Name: At_Siliques_P Parameter: Organism Value: A. thaliana
  misc_feature: MA Experiment 20000234 PARAMETER Experiment Name: At_Siliques_P Parameter: Plant Line Value: WS
  misc_feature: MA Experiment 20000234 PARAMETER Experiment Name: At_Siliques_P Parameter: Tissue Value: Less Than 5mm Siliques vs. Whole Plant
  misc_feature: MA Experiment ID: 20000235 Result: Down-regulated in Transcription
  misc_feature: MA Experiment 20000235 PARAMETER Experiment Name: At_Siliques_P Parameter: Age (day) Value: 21
  misc_feature: MA Experiment 20000235 PARAMETER Experiment Name: At_Siliques_P Parameter: Organism Value: A. thaliana
  misc_feature: MA Experiment 20000235 PARAMETER Experiment Name: At_Siliques_P Parameter: Plant Line Value: WS
  misc_feature: MA Experiment 20000235 PARAMETER Experiment Name: At_Siliques_P Parameter: Tissue Value: 5-10mm Siliques vs. Whole Plant
  misc_feature: MA Experiment ID: 20000264 Result: Down-regulated in Transcription
  misc_feature: MA Experiment 20000264 PARAMETER Experiment Name: At_Open_Flower_P Parameter: Age (day) Value: 21
  misc_feature: MA Experiment 20000264 PARAMETER Experiment Name: At_Open_Flower_P Parameter: Plant Line Value: WS
  misc_feature: MA Experiment 20000264 PARAMETER Experiment Name: At_Open_Flower_P Parameter: Tissue Value: Open Flower vs. Whole Plant
  misc_feature: MA Experiment ID: 20000265 Result: Down-regulated in Transcription
  misc_feature: MA Experiment 20000265 PARAMETER Experiment Name: At_Open_Flower_P Parameter: Age (day) Value: 21
  misc_feature: MA Experiment 20000265 PARAMETER Experiment Name: At_Open_Flower_P Parameter: Plant Line Value: WS
  misc_feature: MA Experiment 20000265 PARAMETER Experiment Name: At_Open_Flower_P Parameter: Tissue Value: Closed Flower vs. Whole Plant
  misc_feature: MA Experiment ID: 20000286 Result: Down-regulated in Transcription
  misc_feature: MA Experiment 20000286 PARAMETER Experiment Name: At_Open_Flower_P Parameter: Age (day) Value: 21
  misc_feature: MA Experiment 20000286 PARAMETER Experiment Name: At_Open_Flower_P Parameter: Plant Line Value: WS
  misc_feature: MA Experiment 20000286 PARAMETER Experiment Name: At_Open_Flower_P Parameter: Tissue Value: Half Open vs. Whole Plant
  misc_feature: MA Experiment ID: 20000437 Result: Up-regulated in Transcription
  misc_feature: MA Experiment 20000437 PARAMETER Experiment Name: At_Drought_P Parameter: Age (day) Value: 8
  misc_feature: MA Experiment 20000437 PARAMETER Experiment Name: At_Drought_P Parameter: Organism Value: A. thaliana
  misc_feature: MA Experiment 20000437 PARAMETER Experiment Name: At_Drought_P Parameter: Plant Line Value: WS
  misc_feature: MA Experiment 20000437 PARAMETER Experiment Name: At_Drought_P Parameter: Timepoint (hr) Value: 24
  misc_feature: MA Experiment 20000437 PARAMETER Experiment Name: At_Drought_P Parameter: Tissue Value: Whole Plant
  misc_feature: MA Experiment 20000437 PARAMETER Experiment Name: At_Drought_P Parameter: Treatment Value: Drought vs. No Drought
  misc_feature: MA Experiment ID: 20000438 Result: Down-regulated in Transcription
  misc_feature: MA Experiment 20000438 PARAMETER Experiment Name: At_Shoots__P Parameter: Age (day) Value: 14
  misc_feature: MA Experiment 20000438 PARAMETER Experiment Name: At_Shoots__P Parameter: Tissue Value: Shoots vs. Whole Plant
  misc_feature: MA Experiment ID: 20000441 Result: Up-regulated in Transcription
  misc_feature: MA Experiment 20000441 PARAMETER Experiment Name: At_1uM_BR-BRZ__P Parameter: Tissue Value: Shoot Apices
  misc_feature: MA Experiment 20000441 PARAMETER Experiment Name: At_1uM_BR-BRZ__P Parameter: Treatment Value: 1uM BR vs. No Treatment
  misc_feature: MA Experiment ID: 20000455 Result: Up-regulated in Transcription
  misc_feature: MA Experiment 20000455 PARAMETER Experiment Name: At_100uM_ABA_P Parameter: Age (day) Value: 16
  misc_feature: MA Experiment 20000455 PARAMETER Experiment Name: At_100uM_ABA_P Parameter: Organism Value: A. thaliana
  misc_feature: MA Experiment 20000455 PARAMETER Experiment Name: At_100uM_ABA_P Parameter: Plant Line Value: WS
  misc_feature: MA Experiment 20000455 PARAMETER Experiment Name: At_100uM_ABA_P Parameter: Timepoint (hr) Value: 48
  misc_feature: MA Experiment 20000455 PARAMETER Experiment Name: At_100uM_ABA_P Parameter: Tissue Value: Aerial
  misc_feature: MA Experiment 20000455 PARAMETER Experiment Name: At_100uM_ABA_P Parameter: Treatment Value: 100uM ABA vs. No Treatment
  misc_feature: MA Experiment ID: 20000495 Result: Down-regulated in Transcription
  misc_feature: MA Experiment 20000495 PARAMETER Experiment Name: At_Guard_Cells_P Parameter: Harvest Date Value: 8/2/2002
  misc_feature: MA Experiment 20000495 PARAMETER Experiment Name: At_Guard_Cells_P Parameter: Organism Value: A. thaliana
  misc_feature: MA Experiment 20000495 PARAMETER Experiment Name: At_Guard_Cells_P Parameter: Tissue Value: Guard Cells vs. Leaves
  misc_feature: MA Experiment ID: 20000709 Result: Up-regulated in Transcription
  misc_feature: MA Experiment 20000709 PARAMETER Experiment Name: At_15mM_NH4NO3_L-to-H_P Parameter: Age (hr) Value: 14
  misc_feature: MA Experiment 20000709 PARAMETER Experiment Name: At_15mM_NH4NO3_L-to-H_P Parameter: Organism Value: A. thaliana
  misc_feature: MA Experiment 20000709 PARAMETER Experiment Name: At_15mM_NH4NO3_L-to-H_P Parameter: Plant Line Value: WS
  misc_feature: MA Experiment 20000709 PARAMETER Experiment Name: At_15mM_NH4NO3_L-to-H_P Parameter: Timepoint (hr) Value: 4
  misc_feature: MA Experiment 20000709 PARAMETER Experiment Name: At_15mM_NH4NO3_L-to-H_P Parameter: Tissue Value: Aerial
  misc_feature: MA Experiment 20000709 PARAMETER Experiment Name: At_15mM_NH4NO3_L-to-H_P Parameter: Treatment Value: 15mM NH4NO3 vs. 30mM Mannitol
  misc_feature: MA Experiment ID: 20000794 Result: Down-regulated in Transcription
  misc_feature: MA Experiment 20000794 PARAMETER Experiment Name: At_Petals_P Parameter: Age (day) Value: 23-25 days
  misc_feature: MA Experiment 20000794 PARAMETER Experiment Name: At_Petals_P Parameter: Plant Line Value: WS
  misc_feature: MA Experiment 20000794 PARAMETER Experiment Name: At_Petals_P Parameter: Tissue Value: Petals vs. Whole plant
  misc_feature: MA Experiment ID: 20001458 Result: Up-regulated in Transcription
  misc_feature: MA Experiment 20001458 PARAMETER Experiment Name: At_50mM_NH4NO3_L-to-H_P Parameter: Age (day) Value: Undefined
  misc_feature: MA Experiment 20001458 PARAMETER Experiment Name: At_50mM_NH4NO3_L-to-H_P Parameter: Organism Value: Undefined
  misc_feature: MA Experiment 20001458 PARAMETER Experiment Name: At_50mM_NH4NO3_L-to-H_P Parameter: Plant Line Value: Undefined
  misc_feature: MA Experiment 20001458 PARAMETER Experiment Name: At_50mM_NH4NO3_L-to-H_P Parameter: Timepoint (hr) Value: 2
  misc_feature: MA Experiment 20001458 PARAMETER Experiment Name: At_50mM_NH4NO3_L-to-H_P Parameter: Tissue Value: Siliques
  misc_feature: MA Experiment 20001458 PARAMETER Experiment Name: At_50mM_NH4NO3_L-to-H_P Parameter: Treatment Value: 50mM NH4NO3 vs. 100mM Manitol
  misc_feature: MA Experiment ID: 20001556 Result: Up-regulated in Transcription
  misc_feature: MA Experiment 20001556 PARAMETER Experiment Name: At_Drought_Soil_Dry_P Parameter: Age (day) Value: 26
  misc_feature: MA Experiment 20001556 PARAMETER Experiment Name: At_Drought_Soil_Dry_P Parameter: Organism Value: A. thaliana
  misc_feature: MA Experiment 20001556 PARAMETER Experiment Name: At_Drought_Soil_Dry_P Parameter: Plant Line Value: WS
  misc_feature: MA Experiment 20001556 PARAMETER Experiment Name: At_Drought_Soil_Dry_P Parameter: Post Timepoint (hr) Value: None
  misc_feature: MA Experiment 20001556 PARAMETER Experiment Name: At_Drought_Soil_Dry_P Parameter: Post-Treatment Value: None
  misc_feature: MA Experiment 20001556 PARAMETER Experiment Name: At_Drought_Soil_Dry_P Parameter: Timepoint (day) Value: 12
  misc_feature: MA Experiment 20001556 PARAMETER Experiment Name: At_Drought_Soil_Dry_P Parameter: Treatment Value: Drought vs. No Drought
  misc_feature: MA Experiment ID: 20001557 Result: Up-regulated in Transcription
  misc_feature: MA Experiment 20001557 PARAMETER Experiment Name: At_Drought_Soil_Dry_P Parameter: Age (day) Value: 27
  misc_feature: MA Experiment 20001557 PARAMETER Experiment Name: At_Drought_Soil_Dry_P Parameter: Organism Value: A. thaliana
  misc_feature: MA Experiment 20001557 PARAMETER Experiment Name: At_Drought_Soil_Dry_P Parameter: Plant Line Value: WS
  misc_feature: MA Experiment 20001557 PARAMETER Experiment Name: At_Drought_Soil_Dry_P Parameter: Post Timepoint (hr) Value: 3
  misc_feature: MA Experiment 20001557 PARAMETER Experiment Name: At_Drought_Soil_Dry_P Parameter: Post-Treatment Value: Re-Water vs. No Drought
  misc_feature: MA Experiment 20001557 PARAMETER Experiment Name: At_Drought_Soil_Dry_P Parameter: Timepoint (day) Value: 13
  misc_feature: MA Experiment 20001557 PARAMETER Experiment Name: At_Drought_Soil_Dry_P Parameter: Treatment Value: Drought vs. No Drought
  misc_feature: MA Experiment ID: 20001558 Result: Up-regulated in Transcription
  misc_feature: MA Experiment 20001558 PARAMETER Experiment Name: At_Drought_Soil_Dry_P Parameter: Age (day) Value: 27
  misc_feature: MA Experiment 20001558 PARAMETER Experiment Name: At_Drought_Soil_Dry_P Parameter: Organism Value: A. thaliana
  misc_feature: MA Experiment 20001558 PARAMETER Experiment Name: At_Drought_Soil_Dry_P Parameter: Plant Line Value: WS
  misc_feature: MA Experiment 20001558 PARAMETER Experiment Name: At_Drought_Soil_Dry_P Parameter: Post Timepoint (hr) Value: 6
  misc_feature: MA Experiment 20001558 PARAMETER Experiment Name: At_Drought_Soil_Dry_P Parameter: Post-Treatment Value: Re-Water vs. No Drought
  misc_feature: MA Experiment 20001558 PARAMETER Experiment Name: At_Drought_Soil_Dry_P Parameter: Timepoint (day) Value: 13
  misc_feature: MA Experiment 20001558 PARAMETER Experiment Name: At_Drought_Soil_Dry_P Parameter: Treatment Value: Drought vs. No Drought
  misc_feature: MA Experiment ID: 20001559 Result: Up-regulated in Transcription
  misc_feature: MA Experiment 20001559 PARAMETER Experiment Name: At_Drought_Soil_Dry_P Parameter: Age (day) Value: 28
  misc_feature: MA Experiment 20001559 PARAMETER Experiment Name: At_Drought_Soil_Dry_P Parameter: Organism Value: A. thaliana
  misc_feature: MA Experiment 20001559 PARAMETER Experiment Name: At_Drought_Soil_Dry_P Parameter: Plant Line Value: WS
  misc_feature: MA Experiment 20001559 PARAMETER Experiment Name: At_Drought_Soil_Dry_P Parameter: Post Timepoint (hr) Value: 29
  misc_feature: MA Experiment 20001559 PARAMETER Experiment Name: At_Drought_Soil_Dry_P Parameter: Post-Treatment Value: Re-Water vs. No Drought
  misc_feature: MA Experiment 20001559 PARAMETER Experiment Name: At_Drought_Soil_Dry_P Parameter: Timepoint (day) Value: 14
  misc_feature: MA Experiment 20001559 PARAMETER Experiment Name: At_Drought_Soil_Dry_P Parameter: Treatment Value: Drought vs. No Drought
  misc_feature: MA Experiment ID: 20001904 Result: Up-regulated in Transcription
  misc_feature: MA Experiment 20001904 PARAMETER Experiment Name: At_Drought_Reproduction_P Parameter: Age (day) Value: 37
  misc_feature: MA Experiment 20001904 PARAMETER Experiment Name: At_Drought_Reproduction_P Parameter: Organism Value: A. thaliana
  misc_feature: MA Experiment 20001904 PARAMETER Experiment Name: At_Drought_Reproduction_P Parameter: Plant Line Value: WS
  misc_feature: MA Experiment 20001904 PARAMETER Experiment Name: At_Drought_Reproduction_P Parameter: Timepoint (day) Value: 7
  misc_feature: MA Experiment 20001904 PARAMETER Experiment Name: At_Drought_Reproduction_P Parameter: Tissue Value: Rosettes
  misc_feature: MA Experiment 20001904 PARAMETER Experiment Name: At_Drought_Reproduction_P Parameter: Treatment Value: Drought vs. No Drought
  misc_feature: MA Experiment ID: 20001905 Result: Up-regulated in Transcription
  misc_feature: MA Experiment 20001905 PARAMETER Experiment Name: At_Drought_Reproduction_P Parameter: Age (day) Value: 40
  misc_feature: MA Experiment 20001905 PARAMETER Experiment Name: At_Drought_Reproduction_P Parameter: Organism Value: A. thaliana
  misc_feature: MA Experiment 20001905 PARAMETER Experiment Name: At_Drought_Reproduction_P Parameter: Plant Line Value: WS
  misc_feature: MA Experiment 20001905 PARAMETER Experiment Name: At_Drought_Reproduction_P Parameter: Timepoint (day) Value: 10
  misc_feature: MA Experiment 20001905 PARAMETER Experiment Name: At_Drought_Reproduction_P Parameter: Tissue Value: Rosettes
  misc_feature: MA Experiment 20001905 PARAMETER Experiment Name: At_Drought_Reproduction_P Parameter: Treatment Value: Drought vs. No Drought
  misc_feature: MA Experiment ID: 20001911 Result: Up-regulated in Transcription
  misc_feature: MA Experiment 20001911 PARAMETER Experiment Name: At_Drought_Reproduction_P Parameter: Age (day) Value: 40
  misc_feature: MA Experiment 20001911 PARAMETER Experiment Name: At_Drought_Reproduction_P Parameter: Organism Value: A. thaliana
  misc_feature: MA Experiment 20001911 PARAMETER Experiment Name: At_Drought_Reproduction_P Parameter: Plant Line Value: WS
  misc_feature: MA Experiment 20001911 PARAMETER Experiment Name: At_Drought_Reproduction_P Parameter: Timepoint (day) Value: 10
  misc_feature: MA Experiment 20001911 PARAMETER Experiment Name: At_Drought_Reproduction_P Parameter: Tissue Value: Flowers
  misc_feature: MA Experiment 20001911 PARAMETER Experiment Name: At_Drought_Reproduction_P Parameter: Treatment Value: Drought vs. No Drought
aacatcgtcatctctaacaatggcgccttctccgatcatcttctccgttcttcttctcttcatcttctcactctcatcatctgctcaaacacctttccgtcccaaagctctccttctcccagtaacaaaagaccaatctaccctccagtacacaaccgtcatcaaccaacgcacacctctcgtccccgcttccgtcgtcttcgacctcggtggtcgagaactctgggtcgactgcgacaaaggctacgtctcctccacttaccagtctcctcgctgcaactccgccgtctgctcacgtgccggctccacaagctgcggcacatgcttctcccctccgagacctggctgtagtaacaacacttgcggcggcattccggataacaccgttaccggtaccgcaacttccggcgaatttgctttagacgttgtgtctatccagtccactaacggatccaatccgggcagggtcgttaaaatcccaaatttgatcttcgattgtggagcaacgtttcttcttaaaggactcgctaaaggaaccgttggtatggcgggaatgggacgtcacaacatcggtttaccgtcgcaattcgccgccgcgtttagcttccaccgtaaattcgccgtctgtctaacttccggtaaaggcgtcgccttcttcggcaacggaccttacgttttccttcccggaatccagatctcaagtctccaaacgacgccccttctcatcaatccggtcagcactgcttctgcgttttcacaaggtgagaaatcctcagagtactttatcggcgtgacggcgattcaaatcgtcgagaaaacagttccgatcaatccaacgctattgaagattaacgcaagtaccggtatcggaggaaccaaaatcagctccgtcaatccttacacggtgttggagtcatcgatctacaatgcttttacgtcggagttcgttaaacaagcagcggcgaggagcatcaagagagtagcgtcggtgaaaccgttcggcgcgtgtttcagcacgaagaacgtcggcgtgacgcgcctaggatacgccgtgccggagattgagcttgtgcttcatagcaaagacgtcgtttggaggatatttggagccaactcgatggtgagtgtcagtgatgacgtcatctgtttgggtttcgttgacggaggagtcaacgcaagaacctctgttgtgattggagggtttcagttggaggataatttgatcgaatttgatttggcgagtaacaaatttgggtttagttccacgttattgggccgtcaaactaactgcgccaacttcaatttcacttccactgcttgattaaattagttgatccgttttctttttttaaaactgttttttagtggttattatattatgtttgatgtgattaataaagagccaatggaatcattatttggcatttgttatcaactgatttgaataaattatgtaacgagtgaattttatttgataaatct

SEQ ID NO: 86484 - protein, 439 aa, Arabidopsis thaliana
  peptide (1)..(439): Ceres Seq. ID no. 12690894
  misc_feature (27)..(421): Pfam Name: Eukaryotic aspartyl protease Pfam Description: Eukaryotic aspartyl protease
  misc_feature (7)..(439): Homolog of NCBI NO: 15218740 NR Description: unknown protein; protein id: At1g03220.1, by cDNA: 12454., supported by cDNA: gi_13272442, supported by gi_14334705, supported by cDNA: gi_16323419 [Arabidopsis
  misc_feature (7)..(439): Homolog of NCBI NO: 21537233 NR Description: EDGP precursor [Arabidopsis thaliana]
  misc_feature (7)..(439): Homolog of NCBI NO: 18379072 NR Description: expressed protein; protein id: At1g03230.1, by cDNA: gi_12083229 [Arabidopsis thaliana]
  misc_feature (7)..(439): Homolog of NCBI NO: 32482806 NR Description: putative xyloglucanase inhibitor [Solanum
  misc_feature (7)..(437): Homolog of NCBI NO: 27372527 NR Description: xyloglucan-specific fungal endoglucanase
  misc_feature (13)..(437): Homolog of NCBI NO: 7488910 NR Description: dermal glycoprotein precursor, extracellular - (fragment) >gi|285741|dbj|BAA03413.1| EDGP precursor [Daucus
  misc_feature (12)..(432): Homolog of NCBI NO: 11191819 NR Description: conglutin gamma [Lupinus albus]
  misc_feature (26)..(432): Homolog of NCBI NO: 662366 NR Description: conglutin gamma [Lupinus angustifolius]
  misc_feature (26)..(432): Homolog of NCBI NO: 99969 NR Description: conglutin gamma precursor - narrow-leaved blue
  misc_feature (12)..(437): Homolog of NCBI NO: 1401240 NR Description: 7S seed globulin precursor
TSSSLTMAPSPIIFSVLLLFIFSLSSSAQTPFRPKALLLPVTKDQSTLQYTTVINQRTPLVPASVVFDLGGRELWVDCDKGYVSSTYQSPRCNSAVCSRAGSTSCGTCFSPPRPGCSNNTCGGIPDNTVTGTATSGEFALDVVSIQSTNGSNPGRVVKIPNLIFDCGATFLLKGLAKGTVGMAGMGRHNIGLPSQFAAAFSFHRKFAVCLTSGKGVAFFGNGPYVFLPGIQISSLQTTPLLINPVSTASAFSQGEKSSEYFIGVTAIQIVEKTVPINPTLLKINASTGIGGTKISSVNPYTVLESSIYNAFTSEFVKQAAARSIKRVASVKPFGACFSTKNVGVTRLGYAVPEIELVLHSKDVVWRIFGANSMVSVSDDVICLGFVDGGVNARTSVVIGGFQLEDNLIEFDLASNKFGFSSTLLGRQTNCANFNFTSTA

SEQ ID NO: 86485 - protein, 433 aa, Arabidopsis thaliana; identical to SEQ ID NO: 28927
  peptide (1)..(433): Ceres Seq. ID no. 12690895
  misc_feature (21)..(415): Pfam Name: Eukaryotic aspartyl protease Pfam Description: Eukaryotic aspartyl protease
  misc_feature (1)..(433): Homolog of NCBI NO: 15218740 NR Description: unknown protein; protein id: At1g03220.1, by cDNA: 12454., supported by cDNA: gi_13272442, supported by gi_14334705, supported by cDNA: gi_16323419 [Arabidopsis
  misc_feature (1)..(433): Homolog of NCBI NO: 21537233 NR Description: EDGP precursor [Arabidopsis thaliana]
  misc_feature (1)..(433): Homolog of NCBI NO: 18379072 NR Description: expressed protein; protein id: At1g03230.1, by cDNA: gi_12083229 [Arabidopsis thaliana]
  misc_feature (1)..(433): Homolog of NCBI NO: 32482806 NR Description: putative xyloglucanase inhibitor [Solanum
  misc_feature (1)..(431): Homolog of NCBI NO: 27372527 NR Description: xyloglucan-specific fungal endoglucanase
  misc_feature (7)..(431): Homolog of NCBI NO: 7488910 NR Description: dermal glycoprotein precursor, extracellular - (fragment) >gi|285741|dbj|BAA03413.1| EDGP precursor [Daucus
  misc_feature (6)..(426): Homolog of NCBI NO: 11191819 NR Description: conglutin gamma [Lupinus albus]
  misc_feature (20)..(426): Homolog of NCBI NO: 662366 NR Description: conglutin gamma [Lupinus angustifolius]
  misc_feature (20)..(426): Homolog of NCBI NO: 99969 NR Description: conglutin gamma precursor - narrow-leaved blue
  misc_feature (6)..(431): Homolog of NCBI NO: 1401240 NR Description: 7S seed globulin precursor

SEQ ID NO: 86486 - protein, 258 aa, Arabidopsis thaliana; identical to SEQ ID NO: 28928
  peptide (1)..(258): Ceres Seq. ID no. 12690896
  misc_feature (1)..(240): Pfam Name: Eukaryotic aspartyl protease Pfam Description: Eukaryotic aspartyl protease
  misc_feature (1)..(258): Homolog of NCBI NO: 15218740 NR Description: unknown protein; protein id: At1g03220.1, by cDNA: 12454., supported by cDNA: gi_13272442, supported by gi_14334705, supported by cDNA: gi_16323419 [Arabidopsis
  misc_feature (1)..(258): Homolog of NCBI NO: 21537233 NR Description: EDGP precursor [Arabidopsis thaliana]
  misc_feature (1)..(258): Homolog of NCBI NO: 18379072 NR Description: expressed protein; protein id: At1g03230.1, by cDNA: gi_12083229 [Arabidopsis thaliana]
  misc_feature (1)..(258): Homolog of NCBI NO: 32482806 NR Description: putative xyloglucanase inhibitor [Solanum
  misc_feature (1)..(256): Homolog of NCBI NO: 27372527 NR Description: xyloglucan-specific fungal endoglucanase
  misc_feature (1)..(256): Homolog of NCBI NO: 7488910 NR Description: dermal glycoprotein precursor, extracellular - (fragment) >gi|285741|dbj|BAA03413.1| EDGP precursor [Daucus
  misc_feature (1)..(251): Homolog of NCBI NO: 11191819 NR Description: conglutin gamma [Lupinus albus]
  misc_feature (1)..(251): Homolog of NCBI NO: 662366 NR Description: conglutin gamma [Lupinus angustifolius]
  misc_feature (1)..(251): Homolog of NCBI NO: 99969 NR Description: conglutin gamma precursor - narrow-leaved blue
  misc_feature (1)..(256): Homolog of NCBI NO: 1401240 NR Description: 7S seed globulin precursor

SEQ ID NO: 86487 - DNA, 2472 bp, Arabidopsis thaliana
  misc_feature (1)..(2472): Ceres Seq. ID no. 12690910
  misc_feature: MA Experiment ID: 20001451 Result: Up-regulated in Transcription
  misc_feature: MA Experiment 20001451 PARAMETER Experiment Name: At_Far-red-induction_P Parameter: Age (day) Value: 7
  misc_feature: MA Experiment 20001451 PARAMETER Experiment Name: At_Far-red-induction_P Parameter: Light Value: Far-red vs. White
  misc_feature: MA Experiment 20001451 PARAMETER Experiment Name: At_Far-red-induction_P Parameter: Organism Value: A. thaliana
  misc_feature: MA Experiment 20001451 PARAMETER Experiment Name: At_Far-red-induction_P Parameter: Plant Line Value: Columbia
  misc_feature: MA Experiment 20001451 PARAMETER Experiment Name: At_Far-red-induction_P Parameter: Timepoint (hr) Value: 24
  misc_feature: MA Experiment 20001451 PARAMETER Experiment Name: At_Far-red-induction_P Parameter: Tissue Value: Whole Plant
atgagtatagttcaaaagcaagaagagatgaatggatgtggtctcaatgttgacaaagtagaagcctttacagtgtcacctcaggaaaaaggaaggaaaaacaagagaaagttagctgatccttctcaaccaaatgcttcttccctcactgaattccctccatatgagttaccttcgttgaaacctcagaaccatttgagcggaaatggatcggttggggaagtttctaatcagctgcaagttgaagtgtctgaatctgtcgaatgggatgacccatttgcctgtcatcttgaagaattgttgtcgtcaaatttgctcacgctcttccttgatacaatgaagcagcttattgatttaggctacaccgatgacgaagttctgaaagctgtatcacgctgtaggctgtactgtggaggcaataatcttttgtcaaacattgtcaataacaccttgagtgctctcaagactggagacgaaggtgctggttcaggagactatgtgtttgaggatttacaacagcttgtttcctatacgttggtagaaatgataagtcttattaaggaggtcaggccgtccctatcaacagttgaagctatgtggaggcttttgatgtgcgacttgaatgtcttgcaagcctttgaagctgaaggcgatggattggtgagttcaagtaaattatctgattcggaatctcttggtgctgaatctaatcctccaaaatctagtgacccagataacccaaagcctccccaatccgatcctcaaagcaatcggaatgagccactcaaatttggaaacttcccaaatacaccgaactccaaaaaaactcagtctagtggaacaacaccaggaaaagaagtatgctcgggtagcactgtttcttgtcaaggcatgagaagtacatcatttactctagtctctgatgaaaaattggtatcttgtcgaaaaggccgtactaaaaaagagatagcaatgcttcggcaaaaatcatgtgtggaaaaaattaggacttacagcaaaggcagtggctataaggcggcaaagtttgcatcagttggcagcttccttttagagaaaagagtcaaatcatcttctgaatttgtgccaagaaattcttcatcaaagataacagcagagattggagtgaaagtttcattagctgaggatagcggctgttttgtaagaaagaacagtaagttggattcacctgtggtagtggtagatgcaaagggctatataactgccttacctgctaggtcggtaaaatctgcttcaaaaaaaaagactggttctgagtctgtaactctgataccatcagcttcagaaaagaagtctgattcttcgataccatcaacttcagaaaagaagtctggttctgagtctgaagagaaggcatctgtgtctgcaaagctagcaccagattactatgctgggatcccatatgatgcagctctgggtatatatgttccccgggataagaaagatgaattgattctaaagcttgttcctcgagtgaatgatctgcagaatgaactgcaggtctggactgactgggctaatcagaaagtaaaagaggcaactggtagactacttaaggaccaaccagagcttaaggcactaaggaaagagagggaagaggcagaacagtataaaaaagagaagcagttattggaagaaaacactaggaaaaggctatctgagatggattttgcgttgaaaaatgcgaccagccagttggaaaaagcattcaatactgctcacaggctcgagctggaacaatctatactgaagaaagagatggaagctgctaagataaaagccgtcgagtctgctgagagctttagagaagcaaaagagagaggggaaagatcactgaaggatattcactcgtgggaagggcaaaaaattatgttgcaggaagagctcaagggtcaaagggaaaaggtgacagtgctacagaaagaagttaccaaagcaaaaaatcgccagaatcaaatcgaggctgctttgaagcaagaaagaacagccaaagggaaactcagtgctcaggcttcattgataaggaaagaaacaaaggaacttgaagcgcttggaaaagtggaagaagagcggatcaaagggaaagcagaaaccgacgtgaaatattacatagataacatcaagagacttgaaagagagatctcagagctgaaacttaaatcagactactcgagaatcattgcactgaagaaaggcagcagtgagtcaaaggcaacaaaaagagagagtcttgggatgccgaaagtgaaaagagaaagagaatgtgtgatgtgtttatctgaagagatgagtgtgattttcttgccttgtgctcaccaagttctttgctttaaatgcaatcagcttcacgagaaagaaggaatgatggattgtccgtcttgtcgtggaacaatccataggaggattcaagctcgtttcgctcgctccgggtga

SEQ ID NO: 86488 - protein, 823 aa, Arabidopsis thaliana
  peptide (1)..(823): Ceres Seq. ID no. 12690911
  misc_feature (508)..(763): Pfam Name: Caldesmon Pfam Description: Caldesmon
  misc_feature (397)..(669): Homolog of NCBI NO: 15236231 NR Description: putative protein; protein id: At4g03000.1
  misc_feature (636)..(821): Homolog of NCBI NO: 15236231 NR Description: putative protein; protein id: At4g03000.1
  misc_feature (490)..(822): Homolog of NCBI NO: 22531056 NR Description: unknown protein [Arabidopsis thaliana]
  misc_feature (97)..(233): Homolog of NCBI NO: 22531056 NR Description: unknown protein [Arabidopsis thaliana]
  misc_feature (490)..(822): Homolog of NCBI NO: 25408371 NR Description: hypothetical protein At2g35330 [imported] - thaliana >gi|3608154|gb|AAC36187.1| unknown protein [Arabidopsis
  misc_feature (490)..(822): Homolog of NCBI NO: 30686389 NR Description: expressed protein [Arabidopsis thaliana]
  misc_feature (97)..(233): Homolog of NCBI NO: 25408371 NR Description: hypothetical protein At2g35330 [imported] - thaliana >gi|3608154|gb|AAC36187.1| unknown protein [Arabidopsis
  misc_feature (97)..(233): Homolog of NCBI NO: 30686389 NR Description: expressed protein [Arabidopsis thaliana]
  misc_feature (381)..(816): Homolog of NCBI NO: 15223228 NR Description: unknown protein; protein id: At1g32530.1, by cDNA: gi_20259351 [Arabidopsis thaliana] unknown protein [Arabidopsis thaliana]
  misc_feature (96)..(212): Homolog of NCBI NO: 15223228 NR Description: unknown protein; protein id: At1g32530.1, by cDNA: gi_20259351 [Arabidopsis thaliana] unknown protein [Arabidopsis thaliana]
MSIVQKQEEMNGCGLNVDKVEAFTVSPQEKGRKNKRKLADPSQPNASSLTEFPPYELPSLKPQNHLSGNGSVGEVSNQLQVEVSESVEWDDPFACHLEELLSSNLLTLFLDTMKQLIDLGYTDDEVLKAVSRCRLYCGGNNLLSNIVNNTLSALKTGDEGAGSGDYVFEDLQQLVSYTLVEMISLIKEVRPSLSTVEAMWRLLMCDLNVLQAFEAEGDGLVSSSKLSDSESLGAESNPPKSSDPDNPKPPQSDPQSNRNEPLKFGNFPNTPNSKKTQSSGTTPGKEVCSGSTVSCQGMRSTSFTLVSDEKLVSCRKGRTKKEIAMLRQKSCVEKIRTYSKGSGYKAAKFASVGSFLLEKRVKSSSEFVPRNSSSKITAEIGVKVSLAEDSGCFVRKNSKLDSPVVVVDAKGYITALPARSVKSASKKKTGSESVTLIPSASEKKSDSSIPSTSEKKSGSESEEKASVSAKLAPDYYAGIPYDAALGIYVPRDKKDELILKLVPRVNDLQNELQVWTDWANQKVKEATGRLLKDQPELKALRKEREEAEQYKKEKQLLEENTRKRLSEMDFALKNATSQLEKAFNTAHRLELEQSILKKEMEAAKIKAVESAESFREAKERGERSLKDIHSWEGQKIMLQEELKGQREKVTVLQKEVTKAKNRQNQIEAALKQERTAKGKLSAQASLIRKETKELEALGKVEEERIKGKAETDVKYYIDNIKRLEREISELKLKSDYSRIIALKKGSSESKATKRESLGMPKVKRERECVMCLSEEMSVIFLPCAHQVLCFKCNQLHEKEGMMDCPSCRGTIHRRIQARFARSG

SEQ ID NO: 86489 - protein, 814 aa, Arabidopsis thaliana
  peptide (1)..(814): Ceres Seq. ID no. 12690912
  misc_feature (499)..(754): Pfam Name: Caldesmon Pfam Description: Caldesmon
  misc_feature (388)..(660): Homolog of NCBI NO: 15236231 NR Description: putative protein; protein id: At4g03000.1
  misc_feature (627)..(812): Homolog of NCBI NO: 15236231 NR Description: putative protein; protein id: At4g03000.1
  misc_feature (481)..(813): Homolog of NCBI NO: 22531056 NR Description: unknown protein [Arabidopsis thaliana]
  misc_feature (88)..(224): Homolog of NCBI NO: 22531056 NR Description: unknown protein [Arabidopsis thaliana]
  misc_feature (481)..(813): Homolog of NCBI NO: 25408371 NR Description: hypothetical protein At2g35330 [imported] - thaliana >gi|3608154|gb|AAC36187.1| unknown protein [Arabidopsis
  misc_feature (481)..(813): Homolog of NCBI NO: 30686389 NR Description: expressed protein [Arabidopsis thaliana]
  misc_feature (88)..(224): Homolog of NCBI NO: 25408371 NR Description: hypothetical protein At2g35330 [imported] - thaliana >gi|3608154|gb|AAC36187.1| unknown protein [Arabidopsis
  misc_feature (88)..(224): Homolog of NCBI NO: 30686389 NR Description: expressed protein [Arabidopsis thaliana]
  misc_feature (372)..(807): Homolog of NCBI NO: 15223228 NR Description: unknown protein; protein id: At1g32530.1, by cDNA: gi_20259351 [Arabidopsis thaliana] unknown protein [Arabidopsis thaliana]
  misc_feature (87)..(203): Homolog of NCBI NO: 15223228 NR Description: unknown protein; protein id: At1g32530.1, by cDNA: gi_20259351 [Arabidopsis thaliana] unknown protein [Arabidopsis thaliana]
MNGCGLNVDKVEAFTVSPQEKGRKNKRKLADPSQPNASSLTEFPPYELPSLKPQNHLSGNGSVGEVSNQLQVEVSESVEWDDPFACHLEELLSSNLLTLFLDTMKQLIDLGYTDDEVLKAVSRCRLYCGGNNLLSNIVNNTLSALKTGDEGAGSGDYVFEDLQQLVSYTLVEMISLIKEVRPSLSTVEAMWRLLMCDLNVLQAFEAEGDGLVSSSKLSDSESLGAESNPPKSSDPDNPKPPQSDPQSNRNEPLKFGNFPNTPNSKKTQSSGTTPGKEVCSGSTVSCQGMRSTSFTLVSDEKLVSCRKGRTKKEIAMLRQKSCVEKIRTYSKGSGYKAAKFASVGSFLLEKRVKSSSEFVPRNSSSKITAEIGVKVSLAEDSGCFVRKNSKLDSPVVVVDAKGYITALPARSVKSASKKKTGSESVTLIPSASEKKSDSSIPSTSEKKSGSESEEKASVSAKLAPDYYAGIPYDAALGIYVPRDKKDELILKLVPRVNDLQNELQVWTDWANQKVKEATGRLLKDQPELKALRKEREEAEQYKKEKQLLEENTRKRLSEMDFALKNATSQLEKAFNTAHRLELEQSILKKEMEAAKIKAVESAESFREAKERGERSLKDIHSWEGQKIMLQEELKGQREKVTVLQKEVTKAKNRQNQIEAALKQERTAKGKLSAQASLIRKETKELEALGKVEEERIKGKAETDVKYYIDNIKRLEREISELKLKSDYSRIIALKKGSSESKATKRESLGMPKVKRERECVMCLSEEMSVIFLPCAHQVLCFKCNQLHEKEGMMDCPSCRGTIHRRIQARFARSG

SEQ ID NO: 86490 - protein, 711 aa, Arabidopsis thaliana
  peptide (1)..(711): Ceres Seq. ID no. 12690913
  misc_feature (396)..(651): Pfam Name: Caldesmon Pfam Description: Caldesmon
  misc_feature (285)..(557): Homolog of NCBI NO: 15236231 NR Description: putative protein; protein id: At4g03000.1
  misc_feature (524)..(709): Homolog of NCBI NO: 15236231 NR Description: putative protein; protein id: At4g03000.1
  misc_feature (378)..(710): Homolog of NCBI NO: 22531056 NR Description: unknown protein [Arabidopsis thaliana]
  misc_feature (1)..(121): Homolog of NCBI NO: 22531056 NR Description: unknown protein [Arabidopsis thaliana]
  misc_feature (378)..(710): Homolog of NCBI NO: 25408371 NR Description: hypothetical protein At2g35330 [imported] - thaliana >gi|3608154|gb|AAC36187.1| unknown protein [Arabidopsis
  misc_feature (378)..(710): Homolog of NCBI NO: 30686389 NR Description: expressed protein [Arabidopsis thaliana]
  misc_feature (1)..(121): Homolog of NCBI NO: 25408371 NR Description: hypothetical protein At2g35330 [imported] - thaliana >gi|3608154|gb|AAC36187.1| unknown protein [Arabidopsis
  misc_feature (1)..(121): Homolog of NCBI NO: 30686389 NR Description: expressed protein [Arabidopsis thaliana]
  misc_feature (269)..(704): Homolog of NCBI NO: 15223228 NR Description: unknown protein; protein id: At1g32530.1, by cDNA: gi_20259351 [Arabidopsis thaliana] unknown protein [Arabidopsis thaliana]
  misc_feature (1)..(100): Homolog of NCBI NO: 15223228 NR Description: unknown protein; protein id: At1g32530.1, by cDNA: gi_20259351 [Arabidopsis thaliana] unknown protein [Arabidopsis thaliana]
MKQLIDLGYTDDEVLKAVSRCRLYCGGNNLLSNIVNNTLSALKTGDEGAGSGDYVFEDLQQLVSYTLVEMISLIKEVRPSLSTVEAMWRLLMCDLNVLQAFEAEGDGLVSSSKLSDSESLGAESNPPKSSDPDNPKPPQSDPQSNRNEPLKFGNFPNTPNSKKTQSSGTTPGKEVCSGSTVSCQGMRSTSFTLVSDEKLVSCRKGRTKKEIAMLRQKSCVEKIRTYSKGSGYKAAKFASVGSFLLEKRVKSSSEFVPRNSSSKITAEIGVKVSLAEDSGCFVRKNSKLDSPVVVVDAKGYITALPARSVKSASKKKTGSESVTLIPSASEKKSDSSIPSTSEKKSGSESEEKASVSAKLAPDYYAGIPYDAALGIYVPRDKKDELILKLVPRVNDLQNELQVWTDWANQKVKEATGRLLKDQPELKALRKEREEAEQYKKEKQLLEENTRKRLSEMDFALKNATSQLEKAFNTAHRLELEQSILKKEMEAAKIKAVESAESFREAKERGERSLKDIHSWEGQKIMLQEELKGQREKVTVLQKEVTKAKNRQNQIEAALKQERTAKGKLSAQASLIRKETKELEALGKVEEERIKGKAETDVKYYIDNIKRLEREISELKLKSDYSRIIALKKGSSESKATKRESLGMPKVKRERECVMCLSEEMSVIFLPCAHQVLCFKCNQLHEKEGMMDCPSCRGTIHRRIQARFARSG

SEQ ID NO: 86491 - DNA, 2439 bp, Arabidopsis thaliana
  misc_feature (1)..(2439): Ceres Seq. ID no. 12690921
atggagacgaaggcgattggatttcaccacctttctccaccacaaaatattgtgttatggctcctgatcaatcttatcaatatccatctccttcgtatgaatcgatacagaccttttacgatacctgatgaggattggccgggtcctagatgcggccatactctcacggcggttttcgtcaacaattcccatcagcttatcctcttcggcggcagtactactgccgtcgccaaccataactcctccttacccgagatcagtttagatggcgtcaccaattcggtccattcttttgatgttttgaccaggaagtggacaaggcttaatccgattggtgacgttccgtctcccagggcttgtcatgctgccgctttatatggcaccttgatccttattcagggtgggattggtccatccggaccttctgatggagatgtctacatgcttgacatgactaataacaagtggattaagtttctggttggaggggagactccaagccctcgctatggccatgttatggatatagctgctcagaggtggcttgtcatattcagcgggaataatggaaatgaaattctggatgatacatgggcattggacacgcgtggaccattttcatgggacagattgaacccgtctggcaatcagccaagtgggagaatgtatgcttcaggtagttctcgagaagatggtatttttttgctctgcggtggaatagatcactcaggagtgacactgggagatacttacgggctgaaaatggatagcgataatgtttggactcctgttccagctgtagctccttccccgagatatcaacatactgcggttttcggaggttcaaaactgcatgtcattgggggtatactgaatagggctcgcctaatcgatggtgaagcagttgttgctgtgcttgatactgagactggtgaatgggtagataccaatcaaccagagacctctgcgagcggcgccaatagacaaaatcaatatcaacttatgcgacgttgtcaccatgctgctgcatcgtttggcagccacctatatgtgcatggcgggattagagaagatgtattgctcgacgatttgctagttgctgaaacatcccagtcttcaagtcctgaaccagaagaagataatcctgataattatatgttgctcgacgactatctaatggatgaacctaagcctttaagttctgaaccagaagcttcatcctttataatgaggagcacaagtgaaattgcgatggatagattggcagaggcacataacttaccaactatcgaaaatgctttttatgatagtgctattgaaggatacgttccacttcaacatggagctgagacggttggaaatcgaggtggcttggtgagaactgcaagcttggatcaatctactcaagacttgcataagaaggtcatttcgacactgttgagacctaaaacctggacgcctcctgccaacagagattttttcttgagttatttagaagttaagcatttgtgcgatgaggtagagaaaatatttatgaatgaaccaacacttcttcagctcaaagttccaatcaaagtcttcggcgatatccatggacaatacggggatttgatgcgtttatttcatgaatatggacatccttcagtggaaggagatatcacccatatagactatttgtttttgggagattatgttgaccgtggacaacacagcttggagatcatcatgttgctgtttgctttgaagatagaatatccgaagaacatccacttgattcgtggaaatcatgagtctcttgcaatgaatagaatttatggttttcttacagaatgcgaagaaagaatgggcgagtcctatgggttcgaagcatggttaaagattaatcaagtttttgattatcttccgcttgctgcacttctagaaaagaaagttttgtgtgtccatggcggaattgggagggcagttacgatcgaagaaattgaaaatatcgaaaggccggcattcccggatactggatcaatggtcttgaaagacatcttatggtcagatcctacgatgaatgacactgttttgggtatagtagacaatgccagaggagaaggtgttgtctcatttgggcctgatatagtcaaggcatttctagaaaggaatggtctggagatgatactaagagcacacgagtgtgttattgacggctttgaaagattcgctgacggacggcttataacagtcttttctgctacaaattactgtggaactgcacaaaatgcgggagcaatattggtaattggtagagatatggtaatttatcctaagctgattcatcctcaccctcctcccatctcatcttcagaagaagactatacagacaaagcatggatgcaggagctgaacatcgagatgccgcctactccagctcgaggggagtcaagtgaataa

SEQ ID NO: 86492 - protein, 812 aa, Arabidopsis thaliana
  peptide (1)..(812): Ceres Seq. ID no. 12690922
  misc_feature (522)..(730): Pfam Name: Calcineurin-like phosphoesterase Pfam Description: Calcineurin-like phosphoesterase
  misc_feature (121)..(812): Homolog of NCBI NO: 15218816 NR Description: putative serine/threonine protein phosphatase;
  misc_feature (121)..(304): Homolog of NCBI NO: 7488151 NR Description: probable phosphoprotein phosphatase (EC 3.1.3.16)
  misc_feature (43)..(424): Homolog of NCBI NO: 30679350 NR Description: phospho-ser/thr phosphatase -related [Arabidopsis
  misc_feature (466)..(808): Homolog of NCBI NO: 30679350 NR Description: phospho-ser/thr phosphatase -related [Arabidopsis
  misc_feature (43)..(424): Homolog of NCBI NO: 22022522 NR Description: AT4g03080/T4I9_4 [Arabidopsis thaliana]
  misc_feature (466)..(808): Homolog of NCBI NO: 22022522 NR Description: AT4g03080/T4I9_4 [Arabidopsis thaliana]
  misc_feature (43)..(424): Homolog of NCBI NO: 7488152 NR Description: probable phosphoprotein phosphatase (EC 3.1.3.16)
  misc_feature (466)..(808): Homolog of NCBI NO: 7488152 NR Description: probable phosphoprotein phosphatase (EC 3.1.3.16)
  misc_feature (44)..(368): Homolog of NCBI NO: 15223207 NR Description: protein serine/threonine phosphatase alpha,
  misc_feature (467)..(808): Homolog of NCBI NO: 15223207 NR Description: protein serine/threonine phosphatase alpha,
METKAIGFHHLSPPQNIVLWLLINLINIHLLRMNRYRPFTIPDEDWPGPRCGHTLTAVFVNNSHQLILFGGSTTAVANHNSSLPEISLDGVTNSVHSFDVLTRKWTRLNPIGDVPSPRACHAAALYGTLILIQGGIGPSGPSDGDVYMLDMTNNKWIKFLVGGETPSPRYGHVMDIAAQRWLVIFSGNNGNEILDDTWALDTRGPFSWDRLNPSGNQPSGRMYASGSSREDGIFLLCGGIDHSGVTLGDTYGLKMDSDNVWTPVPAVAPSPRYQHTAVFGGSKLHVIGGILNRARLIDGEAVVAVLDTETGEWVDTNQPETSASGANRQNQYQLMRRCHHAAASFGSHLYVHGGIREDVLLDDLLVAETSQSSSPEPEEDNPDNYMLLDDYLMDEPKPLSSEPEASSFIMRSTSEIAMDRLAEAHNLPTIENAFYDSAIEGYVPLQHGAETVGNRGGLVRTASLDQSTQDLHKKVISTLLRPKTWTPPANRDFFLSYLEVKHLCDEVEKIFMNEPTLLQLKVPIKVFGDIHGQYGDLMRLFHEYGHPSVEGDITHIDYLFLGDYVDRGQHSLEIIMLLFALKIEYPKNIHLIRGNHESLAMNRIYGFLTECEERMGESYGFEAWLKINQVFDYLPLAALLEKKVLCVHGGIGRAVTIEEIENIERPAFPDTGSMVLKDILWSDPTMNDTVLGIVDNARGEGVVSFGPDIVKAFLERNGLEMILRAHECVIDGFERFADGRLITVFSATNYCGTAQNAGAILVIGRDMVIYPKLIHPHPPPISSSEEDYTDKAWMQELNIEMPPTPARGESSE

SEQ ID NO: 86493 - protein, 780 aa, Arabidopsis thaliana
  peptide (1)..(780): Ceres Seq. ID no. 12690923
  misc_feature (490)..(698): Pfam Name: Calcineurin-like phosphoesterase Pfam Description: Calcineurin-like phosphoesterase
  misc_feature (89)..(780): Homolog of NCBI NO: 15218816 NR Description: putative serine/threonine protein phosphatase;
  misc_feature (89)..(272): Homolog of NCBI NO: 7488151 NR Description: probable phosphoprotein phosphatase (EC 3.1.3.16)
  misc_feature (11)..(392): Homolog of NCBI NO: 30679350 NR Description: phospho-ser/thr phosphatase -related [Arabidopsis
  misc_feature (434)..(776): Homolog of NCBI NO: 30679350 NR Description: phospho-ser/thr phosphatase -related [Arabidopsis
  misc_feature (11)..(392): Homolog of NCBI NO: 22022522 NR Description: AT4g03080/T4I9_4 [Arabidopsis thaliana]
  misc_feature (434)..(776): Homolog of NCBI NO: 22022522 NR Description: AT4g03080/T4I9_4 [Arabidopsis thaliana]
  misc_feature (11)..(392): Homolog of NCBI NO: 7488152 NR Description: probable phosphoprotein phosphatase (EC 3.1.3.16)
  misc_feature (434)..(776): Homolog of NCBI NO: 7488152 NR Description: probable phosphoprotein phosphatase (EC 3.1.3.16)
  misc_feature (12)..(336): Homolog of NCBI NO: 15223207 NR Description: protein serine/threonine phosphatase alpha,
  misc_feature (435)..(776): Homolog of NCBI NO: 15223207 NR Description: protein serine/threonine phosphatase alpha,
MNRYRPFTIPDEDWPGPRCGHTLTAVFVNNSHQLILFGGSTTAVANHNSSLPEISLDGVTNSVHSFDVLTRKWTRLNPIGDVPSPRACHAAALYGTLILIQGGIGPSGPSDGDVYMLDMTNNKWIKFLVGGETPSPRYGHVMDIAAQRWLVIFSGNNGNEILDDTWALDTRGPFSWDRLNPSGNQPSGRMYASGSSREDGIFLLCGGIDHSGVTLGDTYGLKMDSDNVWTPVPAVAPSPRYQHTAVFGGSKLHVIGGILNRARLIDGEAVVAVLDTETGEWVDTNQPETSASGANRQNQYQLMRRCHHAAASFGSHLYVHGGIREDVLLDDLLVAETSQSSSPEPEEDNPDNYMLLDDYLMDEPKPLSSEPEASSFIMRSTSEIAMDRLAEAHNLPTIENAFYDSAIEGYVPLQHGAETVGNRGGLVRTASLDQSTQDLHKKVISTLLRPKTWTPPANRDFFLSYLEVKHLCDEVEKIFMNEPTLLQLKVPIKVFGDIHGQYGDLMRLFHEYGHPSVEGDITHIDYLFLGDYVDRGQHSLEIIMLLFALKIEYPKNIHLIRGNHESLAMNRIYGFLTECEERMGESYGFEAWLKINQVFDYLPLAALLEKKVLCVHGGIGRAVTIEEIENIERPAFPDTGSMVLKDILWSDPTMNDTVLGIVDNARGEGVVSFGPDIVKAFLERNGLEMILRAHECVIDGFERFADGRLITVFSATNYCGTAQNAGAILVIGRDMVIYPKLIHPHPPPISSSEEDYTDKAWMQELNIEMPPTPARGESSE

SEQ ID NO: 86494 - protein, 665 aa, Arabidopsis thaliana
  peptide (1)..(665): Ceres Seq. ID no. 12690924
  misc_feature (375)..(583): Pfam Name: Calcineurin-like phosphoesterase Pfam Description: Calcineurin-like phosphoesterase
  misc_feature (1)..(665): Homolog of NCBI NO: 15218816 NR Description: putative serine/threonine protein phosphatase;
  misc_feature (1)..(157): Homolog of NCBI NO: 7488151 NR Description: probable phosphoprotein phosphatase (EC 3.1.3.16)
  misc_feature (1)..(277): Homolog of NCBI NO: 30679350 NR Description: phospho-ser/thr phosphatase -related [Arabidopsis
  misc_feature (319)..(661): Homolog of NCBI NO: 30679350 NR Description: phospho-ser/thr phosphatase -related [Arabidopsis
  misc_feature (1)..(277): Homolog of NCBI NO: 22022522 NR Description: AT4g03080/T4I9_4 [Arabidopsis thaliana]
  misc_feature (319)..(661): Homolog of NCBI NO: 22022522 NR Description: AT4g03080/T4I9_4 [Arabidopsis thaliana]
  misc_feature (1)..(277): Homolog of NCBI NO: 7488152 NR Description: probable phosphoprotein phosphatase (EC 3.1.3.16)
  misc_feature (319)..(661): Homolog of NCBI NO: 7488152 NR Description: probable phosphoprotein phosphatase (EC 3.1.3.16)
  misc_feature (1)..(221): Homolog of NCBI NO: 15223207 NR Description: protein serine/threonine phosphatase alpha,
  misc_feature (320)..(661): Homolog of NCBI NO: 15223207 NR Description: protein serine/threonine phosphatase alpha,
MLDMTNNKWIKFLVGGETPSPRYGHVMDIAAQRWLVIFSGNNGNEILDDTWALDTRGPFSWDRLNPSGNQPSGRMYASGSSREDGIFLLCGGIDHSGVTLGDTYGLKMDSDNVWTPVPAVAPSPRYQHTAVFGGSKLHVIGGILNRARLIDGEAVVAVLDTETGEWVDTNQPETSASGANRQNQYQLMRRCHHAAASFGSHLYVHGGIREDVLLDDLLVAETSQSSSPEPEEDNPDNYMLLDDYLMDEPKPLSSEPEASSFIMRSTSEIAMDRLAEAHNLPTIENAFYDSAIEGYVPLQHGAETVGNRGGLVRTASLDQSTQDLHKKVISTLLRPKTWTPPANRDFFLSYLEVKHLCDEVEKIFMNEPTLLQLKVPIKVFGDIHGQYGDLMRLFHEYGHPSVEGDITHIDYLFLGDYVDRGQHSLEIIMLLFALKIEYPKNIHLIRGNHESLAMNRIYGFLTECEERMGESYGFEAWLKINQVFDYLPLAALLEKKVLCVHGGIGRAVTIEEIENIERPAFPDTGSMVLKDILWSDPTMNDTVLGIVDNARGEGVVSFGPDIVKAFLERNGLEMILRAHECVIDGFERFADGRLITVFSATNYCGTAQNAGAILVIGRDMVIYPKLIHPHPPPISSSEEDYTDKAWMQELNIEMPPTPARGESSE

SEQ ID NO: 86495 - DNA, 1365 bp, Arabidopsis thaliana
  misc_feature (1)..(1365): Ceres Seq. ID no. 12690937
  misc_feature: MA Experiment ID: 20000264 Result: Up-regulated in Transcription
  misc_feature: MA Experiment 20000264 PARAMETER Experiment Name: At_Open_Flower_P Parameter: Age (day) Value: 21
  misc_feature: MA Experiment 20000264 PARAMETER Experiment Name: At_Open_Flower_P Parameter: Plant Line Value: WS
  misc_feature: MA Experiment 20000264 PARAMETER Experiment Name: At_Open_Flower_P Parameter: Tissue Value: Open Flower vs. Whole Plant
  misc_feature: MA Experiment ID: 20000436 Result: Up-regulated in Transcription
  misc_feature: MA Experiment 20000436 PARAMETER Experiment Name: At_Drought_P Parameter: Age (day) Value: 7
  misc_feature: MA Experiment 20000436 PARAMETER Experiment Name: At_Drought_P Parameter: Organism Value: A. thaliana
  misc_feature: MA Experiment 20000436 PARAMETER Experiment Name: At_Drought_P Parameter: Plant Line Value: WS
  misc_feature: MA Experiment 20000436 PARAMETER Experiment Name: At_Drought_P Parameter: Timepoint (hr) Value: 12
  misc_feature: MA Experiment 20000436 PARAMETER Experiment Name: At_Drought_P Parameter: Tissue Value: Whole Plant
  misc_feature: MA Experiment 20000436 PARAMETER Experiment Name: At_Drought_P Parameter: Treatment Value: Drought vs. No Drought
  misc_feature: MA Experiment ID: 20001458 Result: Down-regulated in Transcription
  misc_feature: MA Experiment 20001458 PARAMETER Experiment Name: At_50mM_NH4NO3_L-to-H_P Parameter: Age (day) Value: Undefined
  misc_feature: MA Experiment 20001458 PARAMETER Experiment Name: At_50mM_NH4NO3_L-to-H_P Parameter: Organism Value: Undefined
  misc_feature: MA Experiment 20001458 PARAMETER Experiment Name: At_50mM_NH4NO3_L-to-H_P Parameter: Plant Line Value: Undefined
  misc_feature: MA Experiment 20001458 PARAMETER Experiment Name: At_50mM_NH4NO3_L-to-H_P Parameter: Timepoint (hr) Value: 2
  misc_feature: MA Experiment 20001458 PARAMETER Experiment Name: At_50mM_NH4NO3_L-to-H_P Parameter: Tissue Value: Siliques
  misc_feature: MA Experiment 20001458 PARAMETER Experiment Name: At_50mM_NH4NO3_L-to-H_P Parameter: Treatment Value: 50mM NH4NO3 vs. 100mM Manitol
  misc_feature: MA Experiment ID: 20001757 Result: Down-regulated in Transcription
  misc_feature: MA Experiment 20001757 PARAMETER Experiment Name: At_50mM_NH4NO3_L-to-H_P Parameter: Timepoint (hr) Value: 6
  misc_feature: MA Experiment 20001757 PARAMETER Experiment Name: At_50mM_NH4NO3_L-to-H_P Parameter: Tissue Value: Leaf
  misc_feature: MA Experiment 20001757 PARAMETER Experiment Name: At_50mM_NH4NO3_L-to-H_P Parameter: Treatment Value: 50mM NH4NO3 vs 100mM Mannitol
  misc_feature: MA Experiment ID: 20001904 Result: Up-regulated in Transcription
  misc_feature: MA Experiment 20001904 PARAMETER Experiment Name: At_Drought_Reproduction_P Parameter: Age (day) Value: 37
  misc_feature: MA Experiment 20001904 PARAMETER Experiment Name: At_Drought_Reproduction_P Parameter: Organism Value: A. thaliana
  misc_feature: MA Experiment 20001904 PARAMETER Experiment Name: At_Drought_Reproduction_P Parameter: Plant Line Value: WS
  misc_feature: MA Experiment 20001904 PARAMETER Experiment Name: At_Drought_Reproduction_P Parameter: Timepoint (day) Value: 7
  misc_feature: MA Experiment 20001904 PARAMETER Experiment Name: At_Drought_Reproduction_P Parameter: Tissue Value: Rosettes
  misc_feature: MA Experiment 20001904 PARAMETER Experiment Name: At_Drought_Reproduction_P Parameter: Treatment Value: Drought vs. No Drought
atggcggctcaacttcaaccttataacatcatcgagacctgtcacatctctcccccaaagggcaccgttgcatccaccactcttcctctcaccttcttcgatgccccctggctctctctcccactcgccgattctctcttcttcttctcttaccaaaactcaactgaatctttcctccaagactttgtacccaacctcaaacattccctctccatcactctccaacatttcttcccttacgccggtaaactgattatcccgcctcgtcccgaccctccatatttacactacaacgctggcgaagactctcttgttttcaccgtagcagagtctactgaaaccgacttcgaccaactgaagtctgattcccctaaagatatcagtgtgttgcatggcgtcttgcccaagttacctcctcctcacgtctctccggaaggaattcagatgcgaccaataatggcaatgcaagtcaccatcttccctggagctggaatctgtataggcaactcagctacacatgttgtagcagatggagtcaccttcagtcatttcatgaagtattggatgtcattgaccaaatccagcggcaaagatccggccacggttcttctaccctctctgcctattcacagctgcagaaacataatcaaggacccaggagaggtagccgcaggacatttggagcggttttggagccaaaactctgcaaaacacagttcacatgttacgcctgagaacatggtcagagccacttttacattgagccggaagcagatagacaatctcaagagttgggttacagagcagtctgagaatcaatctcctgtttctaccttcgtggtgactctagctttcatttgggtaagcttgattaagacacttgttcaagacagtgaaacagaggccaaggacgaagtctttcacttgatgatcaacgtggattgcaggaatcgtctcaagtacacacaaccaataccacaaacatactttggcaactgtatggctcctggtatcgtatcagtcaagaacacgatttatgcaatcacagcgagaatcaaagatatgttatcaagcgatctgttgaagacagcaccaagatggggacaaggagtacgtaaatgggtcatgtcccattatccaacctcaattgcaggagctccgaaattgggactgtatgacatggattttggattaggaaagccctgcaaaatggagatagtgcacatagaaacaggtggttctatcgcattctcagagtccagagacggcagcaatggagttgagattggaatagcactagagaagaagaaaatggatgtgtttgactcacttctacaaaaggggatcaagaaattcgcaacgtag

SEQ ID NO: 86496 - protein, 454 aa, Arabidopsis thaliana
  peptide (1)..(454): Ceres Seq. ID no. 12690938
  misc_feature (6)..(448): Pfam Name: Transferase family Pfam Description: Transferase family
  misc_feature (1)..(454): Homolog of NCBI NO: 25406735 NR Description: protein F21B7.12 [imported] - Arabidopsis >gi|9280644|gb|AAF86513.1|AC002560_6 F21B7.12 [Arabidopsis
  misc_feature (1)..(454): Homolog of NCBI NO: 15219594 NR Description: hypothetical protein; protein id: At1g03940.1
  misc_feature (1)..(289): Homolog of NCBI NO: 15218822 NR Description: hypothetical protein; protein id: At1g03495.1
  misc_feature (347)..(454): Homolog of NCBI NO: 15218822 NR Description: hypothetical protein; protein id: At1g03495.1
  misc_feature (9)..(450): Homolog of NCBI NO: 28396175 NR Description: malonyl-coenzyme A: anthocyanidin
  misc_feature (7)..(441): Homolog of NCBI NO: 27372445 NR Description: putative malonyl CoA:anthocyanidin
  misc_feature (10)..(449): Homolog of NCBI NO: 7415646 NR Description: anthocyanin acyltransferase [Perilla frutescens]
  misc_feature (10)..(450): Homolog of NCBI NO: 27372443 NR Description: malonyl CoA:anthocyanin 3-O-glucoside-6''-O-
  misc_feature (4)..(448): Homolog of NCBI NO: 38503267 NR Description: Anthocyanin 5-aromatic acyltransferase (5AT)
  misc_feature (10)..(450): Homolog of NCBI NO: 38679123 NR Description: putative acyltransferase [Salvia splendens]
MAAQLQPYNIIETCHISPPKGTVASTTLPLTFFDAPWLSLPLADSLFFFSYQNSTESFLQDFVPNLKHSLSITLQHFFPYAGKLIIPPRPDPPYLHYNAGEDSLVFTVAESTETDFDQLKSDSPKDISVLHGVLPKLPPPHVSPEGIQMRPIMAMQVTIFPGAGICIGNSATHVVADGVTFSHFMKYWMSLTKSSGKDPATVLLPSLPIHSCRNIIKDPGEVAAGHLERFWSQNSAKHSSHVTPENMVRATFTLSRKQIDNLKSWVTEQSENQSPVSTFVVTLAFIWVSLIKTLVQDSETEAKDEVFHLMINVDCRNRLKYTQPIPQTYFGNCMAPGIVSVKNTIYAITARIKDMLSSDLLKTAPRWGQGVRKWVMSHYPTSIAGAPKLGLYDMDFGLGKPCKMEIVHIETGGSIAFSESRDGSNGVEIGIALEKKKMDVFDSLLQKGIKKFAT

SEQ ID NO: 86497 - protein, 306 aa, Arabidopsis thaliana
  peptide (1)..(306): Ceres Seq. ID no. 12690939
  misc_feature (1)..(300): Pfam Name: Transferase family Pfam Description: Transferase family
  misc_feature (1)..(306): Homolog of NCBI NO: 25406735 NR Description: protein F21B7.12 [imported] - Arabidopsis >gi|9280644|gb|AAF86513.1|AC002560_6 F21B7.12 [Arabidopsis
  misc_feature (1)..(306): Homolog of NCBI NO: 15219594 NR Description: hypothetical protein; protein id: At1g03940.1
  misc_feature (1)..(141): Homolog of NCBI NO: 15218822 NR Description: hypothetical protein; protein id: At1g03495.1
  misc_feature (199)..(306): Homolog of NCBI NO: 15218822 NR Description: hypothetical protein; protein id: At1g03495.1
  misc_feature (1)..(302): Homolog of NCBI NO: 28396175 NR Description: malonyl-coenzyme A: anthocyanidin
  misc_feature (1)..(293): Homolog of NCBI NO: 27372445 NR Description: putative malonyl CoA:anthocyanidin
  misc_feature (1)..(301): Homolog of NCBI NO: 7415646 NR Description: anthocyanin acyltransferase [Perilla frutescens]
  misc_feature (1)..(302): Homolog of NCBI NO: 27372443 NR Description: malonyl CoA:anthocyanin 3-O-glucoside-6''-O-
  misc_feature (1)..(300): Homolog of NCBI NO: 38503267 NR Description: Anthocyanin 5-aromatic acyltransferase (5AT)
  misc_feature (1)..(302): Homolog of NCBI NO: 38679123 NR Description: putative acyltransferase [Salvia splendens]
MRPIMAMQVTIFPGAGICIGNSATHVVADGVTFSHFMKYWMSLTKSSGKDPATVLLPSLPIHSCRNIIKDPGEVAAGHLERFWSQNSAKHSSHVTPENMVRATFTLSRKQIDNLKSWVTEQSENQSPVSTFVVTLAFIWVSLIKTLVQDSETEAKDEVFHLMINVDCRNRLKYTQPIPQTYFGNCMAPGIVSVKNTIYAITARIKDMLSSDLLKTAPRWGQGVRKWVMSHYPTSIAGAPKLGLYDMDFGLGKPCKMEIVHIETGGSIAFSESRDGSNGVEIGIALEKKKMDVFDSLLQKGIKKFAT

SEQ ID NO: 86498 - protein, 302 aa, Arabidopsis thaliana
  peptide (1)..(302): Ceres Seq. ID no. 12690940
  misc_feature (1)..(296): Pfam Name: Transferase family Pfam Description: Transferase family
  misc_feature (1)..(302): Homolog of NCBI NO: 25406735 NR Description: protein F21B7.12 [imported] - Arabidopsis >gi|9280644|gb|AAF86513.1|AC002560_6 F21B7.12 [Arabidopsis
  misc_feature (1)..(302): Homolog of NCBI NO: 15219594 NR Description: hypothetical protein; protein id: At1g03940.1
  misc_feature (1)..(137): Homolog of NCBI NO: 15218822 NR Description: hypothetical protein; protein id: At1g03495.1
  misc_feature (195)..(302): Homolog of NCBI NO: 15218822 NR Description: hypothetical protein; protein id: At1g03495.1
  misc_feature (1)..(298): Homolog of NCBI NO: 28396175 NR Description: malonyl-coenzyme A: anthocyanidin
  misc_feature (1)..(289): Homolog of NCBI NO: 27372445 NR Description: putative malonyl CoA:anthocyanidin
  misc_feature (1)..(297): Homolog of NCBI NO: 7415646 NR Description: anthocyanin acyltransferase [Perilla frutescens]
  misc_feature (1)..(298): Homolog of NCBI NO: 27372443 NR Description: malonyl CoA:anthocyanin 3-O-glucoside-6''-O-
  misc_feature (1)..(296): Homolog of NCBI NO: 38503267 NR Description: Anthocyanin 5-aromatic acyltransferase (5AT)
  misc_feature (1)..(298): Homolog of NCBI NO: 38679123 NR Description: putative acyltransferase [Salvia splendens]
MAMQVTIFPGAGICIGNSATHVVADGVTFSHFMKYWMSLTKSSGKDPATVLLPSLPIHSCRNIIKDPGEVAAGHLERFWSQNSAKHSSHVTPENMVRATFTLSRKQIDNLKSWVTEQSENQSPVSTFVVTLAFIWVSLIKTLVQDSETEAKDEVFHLMINVDCRNRLKYTQPIPQTYFGNCMAPGIVSVKNTIYAITARIKDMLSSDLLKTAPRWGQGVRKWVMSHYPTSIAGAPKLGLYDMDFGLGKPCKMEIVHIETGGSIAFSESRDGSNGVEIGIALEKKKMDVFDSLLQKGIKKFAT

SEQ ID NO: 86499 - DNA, 1887 bp, Arabidopsis thaliana
  misc_feature (1)..(1887): Ceres Seq. ID no. 12690945
  misc_feature: MA Experiment ID: 20001247 Result: Up-regulated in Transcription
  misc_feature: MA Experiment 20001247 PARAMETER Experiment Name: At_Far-red-induction_P Parameter: Age (day) Value: 7
  misc_feature: MA Experiment 20001247 PARAMETER Experiment Name: At_Far-red-induction_P Parameter: Light Value: Far-red vs. White
  misc_feature: MA Experiment 20001247 PARAMETER Experiment Name: At_Far-red-induction_P Parameter: Organism Value: A. thaliana
  misc_feature: MA Experiment 20001247 PARAMETER Experiment Name: At_Far-red-induction_P Parameter: Plant Line Value: Columbia
  misc_feature: MA Experiment 20001247 PARAMETER Experiment Name: At_Far-red-induction_P Parameter: Timepoint (hr) Value: 1
  misc_feature: MA Experiment 20001247 PARAMETER Experiment Name: At_Far-red-induction_P Parameter: Tissue Value: Whole Plant
atgcgaagattttaccggaagcccttttctgtaccgcttctgaatcgtccgcattgttcttcacaatctcactgtttgtacaaaaatggagactttttgtcggatgattcaaagtgctcgcctttatcgagctcaaggacgagtgttagatgggtgttcaatagcagctcacttcctcctcccgaatggatagaaccttttaacgatgtctccgatttggtgaaatcgaatcgtaatctcctgccgtcgccatgggtaagccaaattctcaaccttttagatggttcggcttctatggaatcgaatctagatggtttctgccgtaagtttcttatcaaactatcgcccaattttgtttcgtttgtgttgaaatccgatgagattcgcgaaaaacctgatattgcttggagtttcttctgttggtctcgtaagcagaagaagtatactcataacctcgagtgttatgtctccttggttgatgtattggctctggcaaaagatgtggatagaattaggtttgtaagcagtgagattaagaaatttgagtttcctatgactgtttctgcggcgaatgctctgattaagagttttgggaagcttggaatggtggaggaattgttgtgggtttggcgtaaaatgaaagagaatgggattgagccgactttgtacacttataactttttgatgaacggtttagtgagcgccatgttcgttgattcggcagagcgtgtttttgaggttatggagagtggcaggatcaaaccagacattgtgacttataacacaatgatcaaaggttattgtaaagcagggcagacacagaaagctatggagaagcttagagatatggagacgagaggtcatgaggctgataagattacgtatatgactatgatccaggcttgttatgcagatagcgactttggttcttgtgtggctttgtatcaagagatggatgagaagggaattcaagtcccgcctcatgcgtttagcttagtgattggtggactttgtaaggaagggaaattgaatgaagggtatactgtttttgagaatatgatacgtaaaggatctaaaccaaatgtagctatatacacggttttgatagatggttatgcgaaaagtggaagtgttgaagacgcgataaggcttttacatagaatgatagacgaagggtttaaacccgatgtggtaacttattctgtcgtagttaatggtttgtgtaaaaacgggagagtggaagaggcattggactatttccatacttgccggtttgacggattggctatcaattcaatgttttattctagtctcattgatggtttaggaaaagcgggcagagtagatgaagccgagaggctttttgaagagatgtctgagaaaggatgcacaagggattcatactgttacaatgcactgatcgatgcgtttacaaagcatcggaaagtcgatgaagcgatagccctgtttaagagaatggaagaagaagaaggttgtgatcaaacggtttatacatacacgatactcttatccggaatgttcaaagaacatagaaacgaggaggcgttaaagctttgggacatgatgatcgataaaggcattacaccaaccgcagcttgcttcagggcgttgtcgactgggctatgtttgtccggaaaagtggcgagagcttgtaagatactggatgagttagcaccaatggagagaggaagagaagtgccagggaggatcagaacagtgatgatcaatgcgttgaggaaagtgggaaaagcagatttagcaatgaagctaatgcatagcaaaattgggattggttatgaaagaatgggtagtgttaaaaggcgtgtcaagtttacgactttacttgaaacttgttttgactcttga

SEQ ID NO: 86500 - protein, 628 aa, Arabidopsis thaliana
  peptide (1)..(628): Ceres Seq. ID no. 12690946
  misc_feature (293)..(327): Pfam Name: PPR repeat Pfam Description: PPR repeat
  misc_feature (1)..(613): Homolog of NCBI NO: 15218855 NR Description: hypothetical protein; protein id: At1g03560.1
  misc_feature (185)..(613): Homolog of NCBI NO: 34393621 NR Description: putative fertility restorer homologue [Oryza
  misc_feature (58)..(159): Homolog of NCBI NO: 34393621 NR Description: putative fertility restorer homologue [Oryza
  misc_feature (191)..(623): Homolog of NCBI NO: 34393621 NR Description: putative fertility restorer homologue [Oryza
  misc_feature (168)..(628): Homolog of NCBI NO: 15218855 NR Description: hypothetical protein; protein id: At1g03560.1
  misc_feature (155)..(564): Homolog of NCBI NO: 15242446 NR Description: putative protein; protein id: At5g39710.1
  misc_feature (151)..(599): Homolog of NCBI NO: 15236546 NR Description: putative protein; protein id: At4g31850.1
  misc_feature (151)..(607): Homolog of NCBI NO: 34015356 NR Description: putative fertility restorer [Oryza sativa
  misc_feature (172)..(567): Homolog of NCBI NO: 15218325 NR Description: hypothetical protein; protein id: At1g09900.1
  misc_feature (140)..(598): Homolog of NCBI NO: 25518293 NR Description: hypothetical protein F13K23.2 - Arabidopsis >gi|8698724|gb|AAF78482.1|AC012187_2 Contains similarity to an protein F16M19.7 gi|6598837 from Arabidopsis thaliana BAC
MRRFYRKPFSVPLLNRPHCSSQSHCLYKNGDFLSDDSKCSPLSSSRTSVRWVFNSSSLPPPEWIEPFNDVSDLVKSNRNLLPSPWVSQILNLLDGSASMESNLDGFCRKFLIKLSPNFVSFVLKSDEIREKPDIAWSFFCWSRKQKKYTHNLECYVSLVDVLALAKDVDRIRFVSSEIKKFEFPMTVSAANALIKSFGKLGMVEELLWVWRKMKENGIEPTLYTYNFLMNGLVSAMFVDSAERVFEVMESGRIKPDIVTYNTMIKGYCKAGQTQKAMEKLRDMETRGHEADKITYMTMIQACYADSDFGSCVALYQEMDEKGIQVPPHAFSLVIGGLCKEGKLNEGYTVFENMIRKGSKPNVAIYTVLIDGYAKSGSVEDAIRLLHRMIDEGFKPDVVTYSVVVNGLCKNGRVEEALDYFHTCRFDGLAINSMFYSSLIDGLGKAGRVDEAERLFEEMSEKGCTRDSYCYNALIDAFTKHRKVDEAIALFKRMEEEEGCDQTVYTYTILLSGMFKEHRNEEALKLWDMMIDKGITPTAACFRALSTGLCLSGKVARACKILDELAPMERGREVPGRIRTVMINALRKVGKADLAMKLMHSKIGIGYERMGSVKRRVKFTTLLETCFDS

SEQ ID NO: 86501 - protein, 530 aa, Arabidopsis thaliana
  peptide (1)..(530): Ceres Seq. ID no. 12690947
  misc_feature (195)..(229): Pfam Name: PPR repeat Pfam Description: PPR repeat
  misc_feature (1)..(515): Homolog of NCBI NO: 15218855 NR Description: hypothetical protein; protein id: At1g03560.1
  misc_feature (87)..(515): Homolog of NCBI NO: 34393621 NR Description: putative fertility restorer homologue [Oryza
  misc_feature (1)..(61): Homolog of NCBI NO: 34393621 NR Description: putative fertility restorer homologue [Oryza
  misc_feature (93)..(525): Homolog of NCBI NO: 34393621 NR Description: putative fertility restorer homologue [Oryza
  misc_feature (70)..(530): Homolog of NCBI NO: 15218855 NR Description: hypothetical protein; protein id: At1g03560.1
  misc_feature (57)..(466): Homolog of NCBI NO: 15242446 NR Description: putative protein; protein id: At5g39710.1
  misc_feature (53)..(501): Homolog of NCBI NO: 15236546 NR Description: putative protein; protein id: At4g31850.1
  misc_feature (53)..(509): Homolog of NCBI NO: 34015356 NR Description: putative fertility restorer [Oryza sativa
  misc_feature (74)..(469): Homolog of NCBI NO: 15218325 NR Description: hypothetical protein; protein id: At1g09900.1
  misc_feature (42)..(500): Homolog of NCBI NO: 25518293 NR Description: hypothetical protein F13K23.2 - Arabidopsis >gi|8698724|gb|AAF78482.1|AC012187_2 Contains similarity to an protein F16M19.7 gi|6598837 from Arabidopsis thaliana BAC
MESNLDGFCRKFLIKLSPNFVSFVLKSDEIREKPDIAWSFFCWSRKQKKYTHNLECYVSLVDVLALAKDVDRIRFVSSEIKKFEFPMTVSAANALIKSFGKLGMVEELLWVWRKMKENGIEPTLYTYNFLMNGLVSAMFVDSAERVFEVMESGRIKPDIVTYNTMIKGYCKAGQTQKAMEKLRDMETRGHEADKITYMTMIQACYADSDFGSCVALYQEMDEKGIQVPPHAFSLVIGGLCKEGKLNEGYTVFENMIRKGSKPNVAIYTVLIDGYAKSGSVEDAIRLLHRMIDEGFKPDVVTYSVVVNGLCKNGRVEEALDYFHTCRFDGLAINSMFYSSLIDGLGKAGRVDEAERLFEEMSEKGCTRDSYCYNALIDAFTKHRKVDEAIALFKRMEEEEGCDQTVYTYTILLSGMFKEHRNEEALKLWDMMIDKGITPTAACFRALSTGLCLSGKVARACKILDELAPMERGREVPGRIRTVMINALRKVGKADLAMKLMHSKIGIGYERMGSVKRRVKFTTLLETCFDS

SEQ ID NO: 86502 - protein, 444 aa, Arabidopsis thaliana
  peptide (1)..(444): Ceres Seq. ID no. 12690948
  misc_feature (109)..(143): Pfam Name: PPR repeat Pfam Description: PPR repeat
  misc_feature (1)..(429): Homolog of NCBI NO: 15218855 NR Description: hypothetical protein; protein id: At1g03560.1
  misc_feature (1)..(429): Homolog of NCBI NO: 34393621 NR Description: putative fertility restorer homologue [Oryza
  misc_feature (7)..(439): Homolog of NCBI NO: 34393621 NR Description: putative fertility restorer homologue [Oryza
  misc_feature (1)..(444): Homolog of NCBI NO: 15218855 NR Description: hypothetical protein; protein id: At1g03560.1
  misc_feature (1)..(380): Homolog of NCBI NO: 15242446 NR Description: putative protein; protein id: At5g39710.1
  misc_feature (1)..(415): Homolog of NCBI NO: 15236546 NR Description: putative protein; protein id: At4g31850.1
  misc_feature (1)..(423): Homolog of NCBI NO: 34015356 NR Description: putative fertility restorer [Oryza sativa
  misc_feature (1)..(383): Homolog of NCBI NO: 15218325 NR Description: hypothetical protein; protein id: At1g09900.1
  misc_feature (1)..(414): Homolog of NCBI NO: 25518293 NR Description: hypothetical protein F13K23.2 - Arabidopsis >gi|8698724|gb|AAF78482.1|AC012187_2 Contains similarity to an protein F16M19.7 gi|6598837 from Arabidopsis thaliana BAC
  misc_feature (1)..(373): Homolog of NCBI NO: 15221300 NR Description: hypothetical protein; protein id: At1g74580.1
MTVSAANALIKSFGKLGMVEELLWVWRKMKENGIEPTLYTYNFLMNGLVSAMFVDSAERVFEVMESGRIKPDIVTYNTMIKGYCKAGQTQKAMEKLRDMETRGHEADKITYMTMIQACYADSDFGSCVALYQEMDEKGIQVPPHAFSLVIGGLCKEGKLNEGYTVFENMIRKGSKPNVAIYTVLIDGYAKSGSVEDAIRLLHRMIDEGFKPDVVTYSVVVNGLCKNGRVEEALDYFHTCRFDGLAINSMFYSSLIDGLGKAGRVDEAERLFEEMSEKGCTRDSYCYNALIDAFTKHRKVDEAIALFKRMEEEEGCDQTVYTYTILLSGMFKEHRNEEALKLWDMMIDKGITPTAACFRALSTGLCLSGKVARACKILDELAPMERGREVPGRIRTVMINALRKVGKADLAMKLMHSKIGIGYERMGSVKRRVKFTTLLETCFDS

SEQ ID NO: 86503 - DNA, 750 bp, Arabidopsis thaliana
  misc_feature (1)..(750): Ceres Seq. ID no. 12690952
  misc_feature: MA Experiment ID: 20000227 Result: Down-regulated in Transcription
  misc_feature: MA Experiment 20000227 PARAMETER Experiment Name: At_Root-Tips-vs-Tops_P Parameter: Tissue Value: Root Tips vs. Root Tops
  misc_feature: MA Experiment ID: 20001450 Result: Up-regulated in Transcription
  misc_feature: MA Experiment 20001450 PARAMETER Experiment Name: At_Far-red-induction_P Parameter: Age (day) Value: 7
  misc_feature: MA Experiment 20001450 PARAMETER Experiment Name: At_Far-red-induction_P Parameter: Light Value: Far-red vs. White
  misc_feature: MA Experiment 20001450 PARAMETER Experiment Name: At_Far-red-induction_P Parameter: Organism Value: A. thaliana
  misc_feature: MA Experiment 20001450 PARAMETER Experiment Name: At_Far-red-induction_P Parameter: Plant Line Value: Columbia
  misc_feature: MA Experiment 20001450 PARAMETER Experiment Name: At_Far-red-induction_P Parameter: Timepoint (hr) Value: 8
  misc_feature: MA Experiment 20001450 PARAMETER Experiment Name: At_Far-red-induction_P Parameter: Tissue Value: Whole Plant
atgaagcgtgggaaaggcgagaaaaaggcaacaaagagccgcgatggcagcggtcaagtagttccgctcactgaaccagtggttacagctacgggtatggttggaacaagatcatggataggagggctcttcacacgctccaatagacgtcaagacaaggcagtcgactacactttgtctcctcttcaggaggaaagacttcaaaggctgcaagatcgtatggttgtacctttcgacgagacacgtcctgatcatcaggaatcacttaaagcattgtggaacgtcgcgtttccgaatgttcatctcacgggtttagtaacagaacaatggaaagaaatgggatggcaaggtcccaatccatctaccgatttcaggggttgcggatttatcgctctagaaaatttactattttctgcaagaacttatccggtttgtttccggaggctattgttaaaacaaagaggcgaccgggcaaagtgggagtacccttttgcagtggccggaatcaacatctccttcatgttgatccaaatgctcgatttacaaaataatcaagacgagagggcattcgatgtactatactgtatagctttcgcgatgatggatgctcaatggcttgcaatgcacgcttcttacatggaattcaatgaagtattacaagcaactcggaatcagctggagagagagctttctttggatgatattcatcggattcaagatcttcctgcctacaatctcttgttccaatag

SEQ ID NO: 86504 - protein, 249 aa, Arabidopsis thaliana
  peptide (1)..(249): Ceres Seq. ID no. 12690953
  misc_feature (83)..(229): Pfam Name: Protein of unknown function, DUF609 Pfam Description: Protein of unknown function, DUF609
  misc_feature (1)..(249): Homolog of NCBI NO: 25363286 NR Description: protein F21B7.23 [imported] - Arabidopsis >gi|9280660|gb|AAF86529.1|AC002560_22 F21B7.23 [Arabidopsis
  misc_feature (1)..(249): Homolog of NCBI NO: 15218859 NR Description: hypothetical protein; protein id: At1g03620.1
  misc_feature (1)..(124): Homolog of NCBI NO: 7485905 NR Description: hypothetical protein F21B7.12 - Arabidopsis
  misc_feature (33)..(249): Homolog of NCBI NO: 38344760 NR Description: OSJNBa0068L06.3 [Oryza sativa (japonica
  misc_feature (1)..(247): Homolog of NCBI NO: 38345956 NR Description: OSJNBb0038F03.14 [Oryza sativa (japonica
  misc_feature (29)..(247): Homolog of NCBI NO: 14140119 NR Description: putative protein [Oryza sativa]
  misc_feature (29)..(249): Homolog of NCBI NO: 11288393 NR Description: hypothetical protein F27H5.50 - Arabidopsis >gi|7576202|emb|CAB87863.1| putative protein [Arabidopsis
  misc_feature (29)..(249): Homolog of NCBI NO: 7485547 NR Description: hypothetical protein At2g44770 [imported] -
  misc_feature (29)..(249): Homolog of NCBI NO: 18411543 NR Description: putative protein; protein id: At3g60260.1, by cDNA: 104796., supported by cDNA: gi_17473881, supported by gi_20148670 [Arabidopsis thaliana] >gi|17473882|gb|AAL38361.1|
  misc_feature (59)..(249): Homolog of NCBI NO: 18396599 NR Description: expressed protein; protein id: At3g03610.1, by cDNA: 28199., supported by cDNA: gi_18377968 [Arabidopsis >gi|18377969|gb|AAL67127.1| unknown protein [Arabidopsis
MKRGKGEKKATKSRDGSGQVVPLTEPVVTATGMVGTRSWIGGLFTRSNRRQDKAVDYTLSPLQEERLQRLQDRMVVPFDETRPDHQESLKALWNVAFPNVHLTGLVTEQWKEMGWQGPNPSTDFRGCGFIALENLLFSARTYPVCFRRLLLKQRGDRAKWEYPFAVAGINISFMLIQMLDLQNNQDERAFDVLYCIAFAMMDAQWLAMHASYMEFNEVLQATRNQLERELSLDDIHRIQDLPAYNLLFQ

SEQ ID NO: 86505 - protein, 217 aa, Arabidopsis thaliana
  peptide (1)..(217): Ceres Seq. ID no. 12690954
  misc_feature (51)..(197): Pfam Name: Protein of unknown function, DUF609 Pfam Description: Protein of unknown function, DUF609
  misc_feature (1)..(217): Homolog of NCBI NO: 25363286 NR Description: protein F21B7.23 [imported] - Arabidopsis >gi|9280660|gb|AAF86529.1|AC002560_22 F21B7.23 [Arabidopsis
  misc_feature (1)..(217): Homolog of NCBI NO: 15218859 NR Description: hypothetical protein; protein id: At1g03620.1
  misc_feature (1)..(92): Homolog of NCBI NO: 7485905 NR Description: hypothetical protein F21B7.12 - Arabidopsis
  misc_feature (1)..(217): Homolog of NCBI NO: 38344760 NR Description: OSJNBa0068L06.3 [Oryza sativa (japonica
  misc_feature (1)..(215): Homolog of NCBI NO: 38345956 NR Description: OSJNBb0038F03.14 [Oryza sativa (japonica
  misc_feature (1)..(215): Homolog of NCBI NO: 14140119 NR Description: putative protein [Oryza sativa]
  misc_feature (1)..(217): Homolog of NCBI NO: 11288393 NR Description: hypothetical protein F27H5.50 - Arabidopsis >gi|7576202|emb|CAB87863.1| putative protein [Arabidopsis
  misc_feature (1)..(217): Homolog of NCBI NO: 7485547 NR Description: hypothetical protein At2g44770 [imported] -
  misc_feature (1)..(217): Homolog of NCBI NO: 18411543 NR Description: putative protein; protein id: At3g60260.1, by cDNA: 104796., supported by cDNA: gi_17473881, supported by gi_20148670 [Arabidopsis thaliana] >gi|17473882|gb|AAL38361.1|
  misc_feature (27)..(217): Homolog of NCBI NO: 18396599 NR Description: expressed protein; protein id: At3g03610.1, by cDNA: 28199., supported by cDNA: gi_18377968 [Arabidopsis >gi|18377969|gb|AAL67127.1| unknown protein [Arabidopsis
MVGTRSWIGGLFTRSNRRQDKAVDYTLSPLQEERLQRLQDRMVVPFDETRPDHQESLKALWNVAFPNVHLTGLVTEQWKEMGWQGPNPSTDFRGCGFIALENLLFSARTYPVCFRRLLLKQRGDRAKWEYPFAVAGINISFMLIQMLDLQNNQDERAFDVLYCIAFAMMDAQWLAMHASYMEFNEVLQATRNQLERELSLDDIHRIQDLPAYNLLFQ

SEQ ID NO: 86506 - protein, 176 aa, Arabidopsis thaliana
  peptide (1)..(176): Ceres Seq. ID no. 12690955
  misc_feature (10)..(156): Pfam Name: Protein of unknown function, DUF609 Pfam Description: Protein of unknown function, DUF609
  misc_feature (1)..(176): Homolog of NCBI NO: 25363286 NR Description: protein F21B7.23 [imported] - Arabidopsis >gi|9280660|gb|AAF86529.1|AC002560_22 F21B7.23 [Arabidopsis
  misc_feature (1)..(176): Homolog of NCBI NO: 15218859 NR Description: hypothetical protein; protein id: At1g03620.1
  misc_feature (1)..(51): Homolog of NCBI NO: 7485905 NR Description: hypothetical protein F21B7.12 - Arabidopsis
  misc_feature (1)..(176): Homolog of NCBI NO: 38344760 NR Description: OSJNBa0068L06.3 [Oryza sativa (japonica
  misc_feature (1)..(174): Homolog of NCBI NO: 38345956 NR Description: OSJNBb0038F03.14 [Oryza sativa (japonica
  misc_feature (1)..(174): Homolog of NCBI NO: 14140119 NR Description: putative protein [Oryza sativa]
  misc_feature (1)..(176): Homolog of NCBI NO: 11288393 NR Description: hypothetical protein F27H5.50 - Arabidopsis >gi|7576202|emb|CAB87863.1| putative protein [Arabidopsis
  misc_feature (1)..(176): Homolog of NCBI NO: 7485547 NR Description: hypothetical protein At2g44770 [imported] -
  misc_feature (1)..(176): Homolog of NCBI NO: 18411543 NR Description: putative protein; protein id: At3g60260.1, by cDNA: 104796., supported by cDNA: gi_17473881, supported by gi_20148670 [Arabidopsis thaliana] >gi|17473882|gb|AAL38361.1|
  misc_feature (1)..(176): Homolog of NCBI NO: 18396599 NR Description: expressed protein; protein id: At3g03610.1, by cDNA: 28199., supported by cDNA: gi_18377968 [Arabidopsis >gi|18377969|gb|AAL67127.1| unknown protein [Arabidopsis
MVVPFDETRPDHQESLKALWNVAFPNVHLTGLVTEQWKEMGWQGPNPSTDFRGCGFIALENLLFSARTYPVCFRRLLLKQRGDRAKWEYPFAVAGINISFMLIQMLDLQNNQDERAFDVLYCIAFAMMDAQWLAMHASYMEFNEVLQATRNQLERELSLDDIHRIQDLPAYNLLFQ

SEQ ID NO: 86507 - DNA, 1428 bp, Arabidopsis thaliana
  misc_feature (1)..(1428): Ceres Seq. ID no. 12690982
  misc_feature: MA Experiment ID: 108488 Result: Up-regulated in Transcription
  misc_feature: MA Experiment ID: 108577 Result: Down-regulated in Transcription
  misc_feature: MA Experiment 108577 PARAMETER Experiment Name: At_42deg_Heat_cDNA_P Parameter: Temperature (deg C) Value: 42 vs. 22
  misc_feature: MA Experiment 108577 PARAMETER Experiment Name: At_42deg_Heat_cDNA_P Parameter: Timepoint (hr) Value: 6
  misc_feature: MA Experiment 108577 PARAMETER Experiment Name: At_42deg_Heat_cDNA_P Parameter: Tissue Value: Aerial
  misc_feature: MA Experiment ID: 108595 Result: Down-regulated in Transcription
  misc_feature: MA Experiment 108595 PARAMETER Experiment Name: At_Ler-pi_Ovule_cDNA_P Parameter: Plant Line Value: null
  misc_feature: MA Experiment ID: 20000445 Result: Up-regulated in Transcription
  misc_feature: MA Experiment 20000445 PARAMETER Experiment Name: At_100uM_NAA__P Parameter: Age (day) Value: 14
  misc_feature: MA Experiment 20000445 PARAMETER Experiment Name: At_100uM_NAA__P Parameter: Organism Value: A. thaliana
  misc_feature: MA Experiment 20000445 PARAMETER Experiment Name: At_100uM_NAA__P Parameter: Plant Line Value: WS
  misc_feature: MA Experiment 20000445 PARAMETER Experiment Name: At_100uM_NAA__P Parameter: Timepoint (hr) Value: 6
  misc_feature: MA Experiment 20000445 PARAMETER Experiment Name: At_100uM_NAA__P Parameter: Tissue Value: Aerial
  misc_feature: MA Experiment 20000445 PARAMETER Experiment Name: At_100uM_NAA__P Parameter: Treatment Value: 100uM NAA vs. No Treatment
  misc_feature: MA Experiment ID: 20001911 Result: Down-regulated in Transcription
  misc_feature: MA Experiment 20001911 PARAMETER Experiment Name: At_Drought_Reproduction_P Parameter: Age (day) Value: 40
  misc_feature: MA Experiment 20001911 PARAMETER Experiment Name: At_Drought_Reproduction_P Parameter: Organism Value: A. thaliana
  misc_feature: MA Experiment 20001911 PARAMETER Experiment Name: At_Drought_Reproduction_P Parameter: Plant Line Value: WS
  misc_feature: MA Experiment 20001911 PARAMETER Experiment Name: At_Drought_Reproduction_P Parameter: Timepoint (day) Value: 10
  misc_feature: MA Experiment 20001911 PARAMETER Experiment Name: At_Drought_Reproduction_P Parameter: Tissue Value: Flowers
  misc_feature: MA Experiment 20001911 PARAMETER Experiment Name: At_Drought_Reproduction_P Parameter: Treatment Value: Drought vs. No Drought
gtaatgataattaagcttttttctgctttaatggaaggaccttgacacttctctctctctttctctttgctattcatcttctacagtttcttaaaaattatactcttcttctccaaaatatctcagactctcttatttttgatcgtcttcttcttcttcgttgtgagcttccatttttcatccaggatttgttttttccgtttgaggtaaagcagctttgcagttaaagaaaccttgagtatccaatgtccccggaagaggagctacagagcaatgtatcggtggctagttcttcacctactagcaattgcatctccaggaacactctaggaggacttaaagagcataactacttgggtctctctgattgttcttctgttggaagctctactctctctccccttgctgaagatgacaaagctactatcagcctcaaggctacggagctgacacttggtcttcctggatcacaatctcctgcgagagacacagagcttaaccttttgagcccagcaaagctagatgagaagccattctttcctttgcttccttctaaagatgagatatgctcctcctcgcaaaagaacaatgcatcgggaaacaaaagaggcttttctgacacaatggatcagtttgctgaagctaaaagttcagtgtatactgagaaaaactggatgttccctgaagcagcagccacccagtctgtaacaaagaaagatgtgccacaaaacatacccaaaggacagtctagcactacaaacaatagctctagtccacctgcagccaaggcacaaattgtcggttggcctccagtgagatcctacaggaagaacacattggccactacttgtaagaacagtgacgaagttgatgggaggccaggttctggggctctcttcgtgaaggtcagtatggatggtgctccttatctgaggaaagttgacctgaggagctacactaactacggggagctttcttcagccttggagaaaatgttcaccactttcactcttggtcaatgtggatctaatggagctgctgggaaggatatgcttagtgagaccaagctcaaggatcttttgaatggaaaagactatgtgctcacttatgaggataaggatggtgactggatgcttgttggagatgttccgtgggagatgtttattgatgtctgcaagaagctgaagataatgaaagggtgtgatgctattggctgcagctccgagagcaatggagaaatcgaagatgagagcttaaaagatggaacatgacaaagctttctaactatacaaaatatgtgcgatcttttggtggtgtttttaaatttcaaaacatcaatatctttagtttctgaatttttaaaatgaagtaagtaagactacgaatgtaaggaaatgaagaagaattaaaaatgatctatttttgttg

SEQ ID NO: 86508 - protein, 341 aa, Arabidopsis thaliana
  peptide (1)..(341): Ceres Seq. ID no. 12690983
  misc_feature (61)..(326): Pfam Name: AUX/IAA family Pfam Description: AUX/IAA family
  misc_feature (1)..(326): Homolog of NCBI NO: 30698143 NR Description: auxin-responsive protein IAA9 (Indoleacetic
  misc_feature (1)..(323): Homolog of NCBI NO: 10177324 NR Description: auxin-induced protein IAA9 [Arabidopsis thaliana]
  misc_feature (1)..(323): Homolog of NCBI NO: 30698145 NR Description: auxin-responsive protein IAA9 (Indoleacetic
  misc_feature (1)..(326): Homolog of NCBI NO: 21592701 NR Description: auxin-induced protein IAA9 [Arabidopsis thaliana]
MSPEEELQSNVSVASSSPTSNCISRNTLGGLKEHNYLGLSDCSSVGSSTLSPLAEDDKATISLKATELTLGLPGSQSPARDTELNLLSPAKLDEKPFFPLLPSKDEICSSSQKNNASGNKRGFSDTMDQFAEAKSSVYTEKNWMFPEAAATQSVTKKDVPQNIPKGQSSTTNNSSSPPAAKAQIVGWPPVRSYRKNTLATTCKNSDEVDGRPGSGALFVKVSMDGAPYLRKVDLRSYTNYGELSSALEKMFTTFTLGQCGSNGAAGKDMLSETKLKDLLNGKDYVLTYEDKDGDWMLVGDVPWEMFIDVCKKLKIMKGCDAIGCSSESNGEIEDESLKDGT

SEQ ID NO: 86509 - protein, 215 aa, Arabidopsis thaliana
  peptide (1)..(215): Ceres Seq. ID no. 12690984
  misc_feature (1)..(200): Pfam Name: AUX/IAA family Pfam Description: AUX/IAA family
  misc_feature (1)..(200): Homolog of NCBI NO: 30698143 NR Description: auxin-responsive protein IAA9 (Indoleacetic
  misc_feature (1)..(197): Homolog of NCBI NO: 10177324 NR Description: auxin-induced protein IAA9 [Arabidopsis thaliana]
  misc_feature (1)..(197): Homolog of NCBI NO: 30698145 NR Description: auxin-responsive protein IAA9 (Indoleacetic
  misc_feature (1)..(200): Homolog of NCBI NO: 21592701 NR Description: auxin-induced protein IAA9 [Arabidopsis thaliana]
MDQFAEAKSSVYTEKNWMFPEAAATQSVTKKDVPQNIPKGQSSTTNNSSSPPAAKAQIVGWPPVRSYRKNTLATTCKNSDEVDGRPGSGALFVKVSMDGAPYLRKVDLRSYTNYGELSSALEKMFTTFTLGQCGSNGAAGKDMLSETKLKDLLNGKDYVLTYEDKDGDWMLVGDVPWEMFIDVCKKLKIMKGCDAIGCSSESNGEIEDESLKDGT

SEQ ID NO: 86510 - protein, 198 aa, Arabidopsis thaliana
  peptide (1)..(198): Ceres Seq. ID no. 12690985
  misc_feature (1)..(183): Pfam Name: AUX/IAA family Pfam Description: AUX/IAA family
  misc_feature (1)..(183): Homolog of NCBI NO: 30698143 NR Description: auxin-responsive protein IAA9 (Indoleacetic
  misc_feature (1)..(180): Homolog of NCBI NO: 10177324 NR Description: auxin-induced protein IAA9 [Arabidopsis thaliana]
  misc_feature (1)..(180): Homolog of NCBI NO: 30698145 NR Description: auxin-responsive protein IAA9 (Indoleacetic
  misc_feature (1)..(183): Homolog of NCBI NO: 21592701 NR Description: auxin-induced protein IAA9 [Arabidopsis thaliana]
MFPEAAATQSVTKKDVPQNIPKGQSSTTNNSSSPPAAKAQIVGWPPVRSYRKNTLATTCKNSDEVDGRPGSGALFVKVSMDGAPYLRKVDLRSYTNYGELSSALEKMFTTFTLGQCGSNGAAGKDMLSETKLKDLLNGKDYVLTYEDKDGDWMLVGDVPWEMFIDVCKKLKIMKGCDAIGCSSESNGEIEDESLKDGT

SEQ ID NO: 86511 - DNA, 1572 bp, Arabidopsis thaliana
  misc_feature (1)..(1572): Ceres Seq. ID no. 12690988
  misc_feature: MA Experiment ID: 108595 Result: Down-regulated in Transcription
  misc_feature: MA Experiment 108595 PARAMETER Experiment Name: At_Ler-pi_Ovule_cDNA_P Parameter: Plant Line Value: null
  misc_feature: MA Experiment ID: 20000087 Result: Down-regulated in Transcription
  misc_feature: MA Experiment 20000087 PARAMETER Experiment Name: At_100uM_ABA_Mutants_cDNA_P Parameter: Plant Line Value: WS
  misc_feature: MA Experiment 20000087 PARAMETER Experiment Name: At_100uM_ABA_Mutants_cDNA_P Parameter: Timepoint (hr) Value: 6
  misc_feature: MA Experiment 20000087 PARAMETER Experiment Name: At_100uM_ABA_Mutants_cDNA_P Parameter: Tissue Value: Aerial
  misc_feature: MA Experiment 20000087 PARAMETER Experiment Name: At_100uM_ABA_Mutants_cDNA_P Parameter: Treatment Value: 100uM ABA vs. No Treatment
  misc_feature: MA Experiment ID: 20000185 Result: Down-regulated in Transcription
  misc_feature: MA Experiment 20000185 PARAMETER Experiment Name: At_Roots__P Parameter: Age (day) Value: 7 vs. 21
  misc_feature: MA Experiment 20000185 PARAMETER Experiment Name: At_Roots__P Parameter: Organism Value: A. thaliana
  misc_feature: MA Experiment 20000185 PARAMETER Experiment Name: At_Roots__P Parameter: Tissue Value: Roots vs. Whole Plant
  misc_feature: MA Experiment ID: 20001905 Result: Down-regulated in Transcription
  misc_feature: MA Experiment 20001905 PARAMETER Experiment Name: At_Drought_Reproduction_P Parameter: Age (day) Value: 40
  misc_feature: MA Experiment 20001905 PARAMETER Experiment Name: At_Drought_Reproduction_P Parameter: Organism Value: A. thaliana
  misc_feature: MA Experiment 20001905 PARAMETER Experiment Name: At_Drought_Reproduction_P Parameter: Plant Line Value: WS
  misc_feature: MA Experiment 20001905 PARAMETER Experiment Name: At_Drought_Reproduction_P Parameter: Timepoint (day) Value: 10
  misc_feature: MA Experiment 20001905 PARAMETER Experiment Name: At_Drought_Reproduction_P Parameter: Tissue Value: Rosettes
  misc_feature: MA Experiment 20001905 PARAMETER Experiment Name: At_Drought_Reproduction_P Parameter: Treatment Value: Drought vs. No Drought
aaagctccgttattcaagattattccgataatgcagtcactctccaccccacacaccatctctcttcttctccccagaacctctccgtctcgtctttctccctctcttcactcccttgctttccccactcgattacggtctctttcctattcttctcaaacgtcgatcctccccgatgccggcgatgatttcattgtcggtgactgtctcgtctacgaggacggcgtcttcgaagacccttaccttgataaggaggtcactcaggttgcgaagcaggagcgcaagaagaatcggcgtggcggggctaagagattagatgaatccgagattgagcccgagaacctcgtgccagaggaatggagggatattcaggcggaggtgaatctgacgaagaaggacaagcgcaaaatagcgcaggagatggagttcggggttcgggtggagaagaagaggcaagggctaattccgctgaggaaagttgacttgaatgactttctcacgtacaaggaagccaagttggctcaattgaggcctgtcattctcgataaaccgggaaatttctccgacgacagtggagcgtcaagcgatggagagaccgctgtatcatctcccagcgagcgagtggctcctaagaaccctagatgggcagtttacggaaagggattcgaccacgttgccaagttcttcaatagcgacaagtacgatcccagcgacaagaaatccgacggccctcgaaagctgctttcaaaagaagagaagtttatgctcaatagccggaatcctgacctagccgttgccacatcaaaaaaatggcttcctcttcacacactggcagcatgtggagagttttatctggttgattccttgctaaagcacaatcttgatatcaatgcaaccgatgtgggcggcttgacagtacttcaccgagcaatcattggtaagaagcaggctattactaactacctgctgagggaatcggcaaatccatttgttcttgatgacgaaggtgcgaccttgatgcactatgctgtgcaaacagcatcagctcccacaataaaacttctcctactgtataacgctgatataaacgctcaggacagggacgggtggactccactgcacgttgcagtacaggccagaagaagcgacattgtaaagcttcttttgataaaaggggcggacatagaagtgaagaacaaggatgggttaactccgcttgggctttgcctctaccttggaagagagataaggacgtatgaggtgatgaagctgttgaaagagtttccacttagcagacacaagaagagattggtaacaacagatgaagatattgaatagtcctttcaatttcagcttgaagtacactcacttatgagaacctgagaaaaggagatggaggtaaaggtgatgattagggcattggaacctcggagtcggagtgggtccactgtctcacttccttaaatttggtttgctgttagtcttatccatcgattttggatatttatcacaacttgatccattcttaaagaaaatatctgaaaataaataaaaagtaatacatatatatat

SEQ ID NO: 86512 - protein, 445 aa, Arabidopsis thaliana; identical to SEQ ID NO: 20554
  peptide (1)..(445): Ceres Seq. ID no. 12690989
  misc_feature (11)..(445): Homolog of NCBI NO: 30698188 NR Description: expressed protein [Arabidopsis thaliana] Ankyrin repeat protein, chloroplast precursor (AKRP)
  misc_feature (11)..(445): Homolog of NCBI NO: 26450056 NR Description: unknown protein [Arabidopsis thaliana]
  misc_feature (1)..(407): Homolog of NCBI NO: 322461 NR Description: ankyrin-repeat protein - Arabidopsis thaliana
  misc_feature (17)..(432): Homolog of NCBI NO: 22758264 NR Description: Putative ankyrin-repeat protein [Oryza sativa
  misc_feature (225)..(429): Homolog of NCBI NO: 15242597 NR Description: ankyrin repeat protein EMB506; protein id: supported by cDNA: gi_17380823, supported by cDNA: gi_5911311 thaliana] >gi|5911312|gb|AAD55746.1|AF026167_1 ankyrin repeat
  misc_feature (271)..(406): Homolog of NCBI NO: 25990817 NR Description: gankyrin oncoprotein [Mesocricetus auratus]
  misc_feature (273)..(415): Homolog of NCBI NO: 28274852 NR Description: ankyrin repeat protein E4_2 [synthetic construct]
  misc_feature (271)..(416): Homolog of NCBI NO: 4506217 NR Description: proteasome 26S non-ATPase subunit 10 isoform 1;
  misc_feature (271)..(416): Homolog of NCBI NO: 39654744 NR Description: Chain A, X-Ray Structure Of Human Gankyrin
  misc_feature (273)..(415): Homolog of NCBI NO: 28274854 NR Description: ankyrin repeat protein E4_8 [synthetic construct]

SEQ ID NO: 86513 - protein, 435 aa, Arabidopsis thaliana; identical to SEQ ID NO: 20555
  peptide (1)..(435): Ceres Seq. ID no. 12690990
  misc_feature (1)..(435): Homolog of NCBI NO: 30698188 NR Description: expressed protein [Arabidopsis thaliana] Ankyrin repeat protein, chloroplast precursor (AKRP)
  misc_feature (1)..(435): Homolog of NCBI NO: 26450056 NR Description: unknown protein [Arabidopsis thaliana]
  misc_feature (1)..(397): Homolog of NCBI NO: 322461 NR Description: ankyrin-repeat protein - Arabidopsis thaliana
  misc_feature (7)..(422): Homolog of NCBI NO: 22758264 NR Description: Putative ankyrin-repeat protein [Oryza sativa
  misc_feature (215)..(419): Homolog of NCBI NO: 15242597 NR Description: ankyrin repeat protein EMB506; protein id: supported by cDNA: gi_17380823, supported by cDNA: gi_5911311 thaliana] >gi|5911312|gb|AAD55746.1|AF026167_1 ankyrin repeat
  misc_feature (261)..(396): Homolog of NCBI NO: 25990817 NR Description: gankyrin oncoprotein [Mesocricetus auratus]
  misc_feature (263)..(405): Homolog of NCBI NO: 28274852 NR Description: ankyrin repeat protein E4_2 [synthetic construct]
  misc_feature (261)..(406): Homolog of NCBI NO: 4506217 NR Description: proteasome 26S non-ATPase subunit 10 isoform 1;
  misc_feature (261)..(406): Homolog of NCBI NO: 39654744 NR Description: Chain A, X-Ray Structure Of Human Gankyrin
  misc_feature (263)..(405): Homolog of NCBI NO: 28274854 NR Description: ankyrin repeat protein E4_8 [synthetic construct]

SEQ ID NO: 86514 - protein, 305 aa, Arabidopsis thaliana; identical to SEQ ID NO: 20556
  peptide (1)..(305): Ceres Seq. ID no. 12690991
  misc_feature (1)..(305): Homolog of NCBI NO: 30698188 NR Description: expressed protein [Arabidopsis thaliana] Ankyrin repeat protein, chloroplast precursor (AKRP)
  misc_feature (1)..(305): Homolog of NCBI NO: 26450056 NR Description: unknown protein [Arabidopsis thaliana]
  misc_feature (1)..(267): Homolog of NCBI NO: 322461 NR Description: ankyrin-repeat protein - Arabidopsis thaliana
  misc_feature (1)..(292): Homolog of NCBI NO: 22758264 NR Description: Putative ankyrin-repeat protein [Oryza sativa
  misc_feature (85)..(289): Homolog of NCBI NO: 15242597 NR Description: ankyrin repeat protein EMB506; protein id: supported by cDNA: gi_17380823, supported by cDNA: gi_5911311 thaliana] >gi|5911312|gb|AAD55746.1|AF026167_1 ankyrin repeat
  misc_feature (131)..(266): Homolog of NCBI NO: 25990817 NR Description: gankyrin oncoprotein [Mesocricetus auratus]
  misc_feature (133)..(275): Homolog of NCBI NO: 28274852 NR Description: ankyrin repeat protein E4_2 [synthetic construct]
  misc_feature (131)..(276): Homolog of NCBI NO: 4506217 NR Description: proteasome 26S non-ATPase subunit 10 isoform 1;
  misc_feature (131)..(276): Homolog of NCBI NO: 39654744 NR Description: Chain A, X-Ray Structure Of Human Gankyrin
  misc_feature (133)..(275): Homolog of NCBI NO: 28274854 NR Description: ankyrin repeat protein E4_8 [synthetic construct]

SEQ ID NO: 86515 - DNA, 1364 bp, Arabidopsis thaliana
  misc_feature (1)..(1364): Ceres Seq. ID no. 12691000
  misc_feature: MA Experiment ID: 20000495 Result: Up-regulated in Transcription
  misc_feature: MA Experiment 20000495 PARAMETER Experiment Name: At_Guard_Cells_P Parameter: Harvest Date Value: 8/2/2002
  misc_feature: MA Experiment 20000495 PARAMETER Experiment Name: At_Guard_Cells_P Parameter: Organism Value: A. thaliana
  misc_feature: MA Experiment 20000495 PARAMETER Experiment Name: At_Guard_Cells_P Parameter: Tissue Value: Guard Cells vs. Leaves
  misc_feature: MA Experiment ID: 20000496 Result: Up-regulated in Transcription
  misc_feature: MA Experiment 20000496 PARAMETER Experiment Name: At_Guard_Cells_P Parameter: Harvest Date Value: 7/19/2002
  misc_feature: MA Experiment 20000496 PARAMETER Experiment Name: At_Guard_Cells_P Parameter: Organism Value: Canola
  misc_feature: MA Experiment 20000496 PARAMETER Experiment Name: At_Guard_Cells_P Parameter: Tissue Value: Guard Cells vs. Leaves
  misc_feature: MA Experiment ID: 20000794 Result: Up-regulated in Transcription
  misc_feature: MA Experiment 20000794 PARAMETER Experiment Name: At_Petals_P Parameter: Age (day) Value: 23-25 days
  misc_feature: MA Experiment 20000794 PARAMETER Experiment Name: At_Petals_P Parameter: Plant Line Value: WS
  misc_feature: MA Experiment 20000794 PARAMETER Experiment Name: At_Petals_P Parameter: Tissue Value: Petals vs. Whole plant
  misc_feature: MA Experiment ID: 20001451 Result: Up-regulated in Transcription
  misc_feature: MA Experiment 20001451 PARAMETER Experiment Name: At_Far-red-induction_P Parameter: Age (day) Value: 7
  misc_feature: MA Experiment 20001451 PARAMETER Experiment Name: At_Far-red-induction_P Parameter: Light Value: Far-red vs. White
  misc_feature: MA Experiment 20001451 PARAMETER Experiment Name: At_Far-red-induction_P Parameter: Organism Value: A. thaliana
  misc_feature: MA Experiment 20001451 PARAMETER Experiment Name: At_Far-red-induction_P Parameter: Plant Line Value: Columbia
  misc_feature: MA Experiment 20001451 PARAMETER Experiment Name: At_Far-red-induction_P Parameter: Timepoint (hr) Value: 24
  misc_feature: MA Experiment 20001451 PARAMETER Experiment Name: At_Far-red-induction_P Parameter: Tissue Value: Whole Plant
  misc_feature: MA Experiment ID: 20001911 Result: Up-regulated in Transcription
  misc_feature: MA Experiment 20001911 PARAMETER Experiment Name: At_Drought_Reproduction_P Parameter: Age (day) Value: 40
  misc_feature: MA Experiment 20001911 PARAMETER Experiment Name: At_Drought_Reproduction_P Parameter: Organism Value: A. thaliana
  misc_feature: MA Experiment 20001911 PARAMETER Experiment Name: At_Drought_Reproduction_P Parameter: Plant Line Value: WS
  misc_feature: MA Experiment 20001911 PARAMETER Experiment Name: At_Drought_Reproduction_P Parameter: Timepoint (day) Value: 10
  misc_feature: MA Experiment 20001911 PARAMETER Experiment Name: At_Drought_Reproduction_P Parameter: Tissue Value: Flowers
  misc_feature: MA Experiment 20001911 PARAMETER Experiment Name: At_Drought_Reproduction_P Parameter: Treatment Value: Drought vs. No Drought
agtcgagatggcctctcagtctcaggttttggtggaagagaaatcgagtgttagaatcttgacactaaacagaccaaagcagctgaatgctctgtccttccacatgatctctcgattgctgcaactgttccttgcatttgaggaggaccctagtgtgaaacttgtcatcctaaagggtcatgggagagccttttgtgctggtggcgatgttgcagctgttgttcgtgacatcaatcaaggtaactggagactcggtgccaattacttctcatctgaatacatgctcaactatgttatggccacatatagcaaagctcaggtttcaatcttgaatggtatcgtcatgggaggcggagctggtgtatccgtccatggtcgatttcgtattgcaactgagaacacggtttttgccatgcctgagacagctctggggctctttccagatgtaggcgcctcctacttcttgtcaaggctccctggtttttttggggagtatgttggcctcacaggagctagattagatggtgctgaaatgcttgcttgtggccttgcaactcattttgtgccttcaacgaggttgactgcattagaagcagatctttgcagaattaattcaaatgatccaacttttgcctcaacaattctcgatgcatacacccagcatccgcgcctgaaacagcagagtgcttaccgcaggttagatgttattgataggtgtttctcaaggagaacagtcgaagaaattatatctgcacttgagagagaggccactcaagaagcagatggttggatctcagctaccattcaagcattgaagaagggttcaccagcaagccttaaaatctctcttagatcgataagggaagggcgattgcagggggtggggcagtgtcttatccgcgagtatagaatggtgtgtcatgtgatgaagggagaaatcagcaaagattttgtggaggttttgcaagctttttccatctgaaaccgtctttgttgtagaccgtagttacaacagcgtgtctttacttatgcaggggtgcagagccatattggtagacaaagataagaacccaaagtgggagccaaggcgactggaggacatgaaggatagcatggtggagcagtacttcgagagagtggaacgggaggatgatctaaagcttccgccaaggaataacttgcctgctttagggatcgcaaagctgtgaagtggagaaggtgatggagcactattgtttacgtctgtgggaaagaaaaaagaaaataaatgtaacaacacttgtgttgaataggacttgcatacattacataaatcattattgtatttgagaattgacaccaaagcagcagagcagaattgtgtt

SEQ ID NO: 86516 - protein, 326 aa, Arabidopsis thaliana
  peptide (1)..(326): Ceres Seq. ID no. 12691001
  misc_feature (18)..(189): Pfam Name: Enoyl-CoA hydratase/isomerase family Pfam Description: Enoyl-CoA hydratase/isomerase family
  misc_feature (1)..(326): Homolog of NCBI NO: 15239206 NR Description: 3-hydroxyisobutyryl-coenzyme A hydrolase; protein
  misc_feature (3)..(316): Homolog of NCBI NO: 15224549 NR Description: 3-hydroxyisobutyryl-coenzyme A hydrolase; protein
  misc_feature (6)..(326): Homolog of NCBI NO: 15224539 NR Description: 3-hydroxyisobutyryl-coenzyme A hydrolase; protein
  misc_feature (35)..(323): Homolog of NCBI NO: 6014701 NR Description: enoyl-CoA-hydratase [Avicennia marina]
  misc_feature (106)..(323): Homolog of NCBI NO: 2688820 NR Description: enoyl-CoA hydratase [Prunus armeniaca]
  misc_feature (8)..(275): Homolog of NCBI NO: 30695218 NR Description: enoyl-CoA hydratase/isomerase family [Arabidopsis
  misc_feature (248)..(323): Homolog of NCBI NO: 30695218 NR Description: enoyl-CoA hydratase/isomerase family [Arabidopsis
  misc_feature (6)..(323): Homolog of NCBI NO: 22329062 NR Description: enoyl-CoA hydratase - like protein; protein id: supported by cDNA: gi_19424018, supported by cDNA: gi_21281144
  misc_feature (4)..(323): Homolog of NCBI NO: 37536724 NR Description: putative enoyl-CoA-hydratase [Oryza sativa
  misc_feature (9)..(326): Homolog of NCBI NO: 30679729 NR Description: 3-hydroxyisobutyryl-coenzyme A hydrolase
VEMASQSQVLVEEKSSVRILTLNRPKQLNALSFHMISRLLQLFLAFEEDPSVKLVILKGHGRAFCAGGDVAAVVRDINQGNWRLGANYFSSEYMLNYVMATYSKAQVSILNGIVMGGGAGVSVHGRFRIATENTVFAMPETALGLFPDVGASYFLSRLPGFFGEYVGLTGARLDGAEMLACGLATHFVPSTRLTALEADLCRINSNDPTFASTILDAYTQHPRLKQQSAYRRLDVIDRCFSRRTVEEIISALEREATQEADGWISATIQALKKGSPASLKISLRSIREGRLQGVGQCLIREYRMVCHVMKGEISKDFVEVLQAFSI

SEQ ID NO: 86517 - protein, 324 aa, Arabidopsis thaliana
  peptide (1)..(324): Ceres Seq. ID no. 12691002
  misc_feature (16)..(187): Pfam Name: Enoyl-CoA hydratase/isomerase family Pfam Description: Enoyl-CoA hydratase/isomerase family
  misc_feature (1)..(324): Homolog of NCBI NO: 15239206 NR Description: 3-hydroxyisobutyryl-coenzyme A hydrolase; protein
  misc_feature (1)..(314): Homolog of NCBI NO: 15224549 NR Description: 3-hydroxyisobutyryl-coenzyme A hydrolase; protein
  misc_feature (4)..(324): Homolog of NCBI NO: 15224539 NR Description: 3-hydroxyisobutyryl-coenzyme A hydrolase; protein
  misc_feature (33)..(321): Homolog of NCBI NO: 6014701 NR Description: enoyl-CoA-hydratase [Avicennia marina]
  misc_feature (104)..(321): Homolog of NCBI NO: 2688820 NR Description: enoyl-CoA hydratase [Prunus armeniaca]
  misc_feature (6)..(273): Homolog of NCBI NO: 30695218 NR Description: enoyl-CoA hydratase/isomerase family [Arabidopsis
  misc_feature (246)..(321): Homolog of NCBI NO: 30695218 NR Description: enoyl-CoA hydratase/isomerase family [Arabidopsis
  misc_feature (4)..(321): Homolog of NCBI NO: 22329062 NR Description: enoyl-CoA hydratase - like protein; protein id: supported by cDNA: gi_19424018, supported by cDNA: gi_21281144
  misc_feature (2)..(321): Homolog of NCBI NO: 37536724 NR Description: putative enoyl-CoA-hydratase [Oryza sativa
  misc_feature (7)..(324): Homolog of NCBI NO: 30679729 NR Description: 3-hydroxyisobutyryl-coenzyme A hydrolase
MASQSQVLVEEKSSVRILTLNRPKQLNALSFHMISRLLQLFLAFEEDPSVKLVILKGHGRAFCAGGDVAAVVRDINQGNWRLGANYFSSEYMLNYVMATYSKAQVSILNGIVMGGGAGVSVHGRFRIATENTVFAMPETALGLFPDVGASYFLSRLPGFFGEYVGLTGARLDGAEMLACGLATHFVPSTRLTALEADLCRINSNDPTFASTILDAYTQHPRLKQQSAYRRLDVIDRCFSRRTVEEIISALEREATQEADGWISATIQALKKGSPASLKISLRSIREGRLQGVGQCLIREYRMVCHVMKGEISKDFVEVLQAFSI

SEQ ID NO: 86518 - protein, 292 aa, Arabidopsis thaliana
  peptide (1)..(292): Ceres Seq. ID no. 12691003
  misc_feature (1)..(155): Pfam Name: Enoyl-CoA hydratase/isomerase family Pfam Description: Enoyl-CoA hydratase/isomerase family
  misc_feature (1)..(292): Homolog of NCBI NO: 15239206 NR Description: 3-hydroxyisobutyryl-coenzyme A hydrolase; protein
  misc_feature (1)..(282): Homolog of NCBI NO: 15224549 NR Description: 3-hydroxyisobutyryl-coenzyme A hydrolase; protein
  misc_feature (1)..(292): Homolog of NCBI NO: 15224539 NR Description: 3-hydroxyisobutyryl-coenzyme A hydrolase; protein
  misc_feature (1)..(289): Homolog of NCBI NO: 6014701 NR Description: enoyl-CoA-hydratase [Avicennia marina]
  misc_feature (72)..(289): Homolog of NCBI NO: 2688820 NR Description: enoyl-CoA hydratase [Prunus armeniaca]
  misc_feature (1)..(241): Homolog of NCBI NO: 30695218 NR Description: enoyl-CoA hydratase/isomerase family [Arabidopsis
  misc_feature (214)..(289): Homolog of NCBI NO: 30695218 NR Description: enoyl-CoA hydratase/isomerase family [Arabidopsis
  misc_feature (1)..(289): Homolog of NCBI NO: 22329062 NR Description: enoyl-CoA hydratase - like protein; protein id: supported by cDNA: gi_19424018, supported by cDNA: gi_21281144
  misc_feature (1)..(289): Homolog of NCBI NO: 37536724 NR Description: putative enoyl-CoA-hydratase [Oryza sativa
  misc_feature (1)..(292): Homolog of NCBI NO: 30679729 NR Description: 3-hydroxyisobutyryl-coenzyme A hydrolase
MISRLLQLFLAFEEDPSVKLVILKGHGRAFCAGGDVAAVVRDINQGNWRLGANYFSSEYMLNYVMATYSKAQVSILNGIVMGGGAGVSVHGRFRIATENTVFAMPETALGLFPDVGASYFLSRLPGFFGEYVGLTGARLDGAEMLACGLATHFVPSTRLTALEADLCRINSNDPTFASTILDAYTQHPRLKQQSAYRRLDVIDRCFSRRTVEEIISALEREATQEADGWISATIQALKKGSPASLKISLRSIREGRLQGVGQCLIREYRMVCHVMKGEISKDFVEVLQAFSI

SEQ ID NO: 86519 - DNA, 865 bp, Arabidopsis thaliana
  misc_feature (1)..(865): Ceres Seq. ID no. 12691011
  misc_feature: MA Experiment ID: 108435 Result: Down-regulated in Transcription
  misc_feature: MA Experiment 108435 PARAMETER Experiment Name: At_stm_Mutants_cDNA_P Parameter: Plant Line Value: wt Landsburg vs stm
  misc_feature: MA Experiment 108435 PARAMETER Experiment Name: At_stm_Mutants_cDNA_P Parameter: Tissue Value: Shoot Apical Meristem Region
  misc_feature: MA Experiment ID: 108461 Result: Up-regulated in Transcription
  misc_feature: MA Experiment 108461 PARAMETER Experiment Name: At_Germinating_Seeds_cDNA_P Parameter: Age (day) Value: 1 vs. 0
  misc_feature: MA Experiment 108461 PARAMETER Experiment Name: At_Germinating_Seeds_cDNA_P Parameter: Tissue Value: Germinating Seeds
  misc_feature: MA Experiment ID: 108462 Result: Up-regulated in Transcription
  misc_feature: MA Experiment 108462 PARAMETER Experiment Name: At_Germinating_Seeds_cDNA_P Parameter: Age (day) Value: 2 vs. 0
  misc_feature: MA Experiment 108462 PARAMETER Experiment Name: At_Germinating_Seeds_cDNA_P Parameter: Tissue Value: Germinating Seeds
  misc_feature: MA Experiment ID: 108464 Result: Up-regulated in Transcription
  misc_feature: MA Experiment 108464 PARAMETER Experiment Name: At_Germinating_Seeds_cDNA_P Parameter: Age (day) Value: 4 vs. 0
  misc_feature: MA Experiment 108464 PARAMETER Experiment Name: At_Germinating_Seeds_cDNA_P Parameter: Tissue Value: Germinating Seeds
  misc_feature: MA Experiment ID: 108595 Result: Down-regulated in Transcription
  misc_feature: MA Experiment 108595 PARAMETER Experiment Name: At_Ler-pi_Ovule_cDNA_P Parameter: Plant Line Value: null
  misc_feature: MA Experiment ID: 20000087 Result: Down-regulated in Transcription
  misc_feature: MA Experiment 20000087 PARAMETER Experiment Name: At_100uM_ABA_Mutants_cDNA_P Parameter: Plant Line Value: WS
  misc_feature: MA Experiment 20000087 PARAMETER Experiment Name: At_100uM_ABA_Mutants_cDNA_P Parameter: Timepoint (hr) Value: 6
  misc_feature: MA Experiment 20000087 PARAMETER Experiment Name: At_100uM_ABA_Mutants_cDNA_P Parameter: Tissue Value: Aerial
  misc_feature: MA Experiment 20000087 PARAMETER Experiment Name: At_100uM_ABA_Mutants_cDNA_P Parameter: Treatment Value: 100uM ABA vs. No Treatment
  misc_feature: MA Experiment ID: 20000224 Result: Down-regulated in Transcription
accaaaaaaaaaactcaagagagactttgtggccatggcagcctctctccaatccaccgctacattcctccagtcggcgaagatcgccaccgctccttctcgcggaagttctcacctccgatcgactcaagccgtcggcaaatcttttgggctcgaaacttcctcggctcgcctcacttgctccttccagtctgactttaaggacttcaccggtaaatgctccgacgctgtcaaaatcgccggattcgctcttgccacctctgctctcgtcgtctcgggagcaagtgcggagggagctccaaagagattgacctatgatgagatcgaaggacccttcgaggttgcttcagacggaagcgtcaatttcaaggaagaagatggaatcgactatgctgcagtcacagtccaacttccaggaggtgaacgtgtgccattccttttcacagtcaaacagcttgacgcctcaggcaaaccagacagcttcaccggaaaattcttggttccatcgtaccgtggctcttccttcttggacccaaagggccgtggtggatccacaggatatgacaacgccgtggcattgccagctggaggcagaggagacgaggaggagcttgtaaaggagaacgtgaagaacactgccgcttcagtgggagagatcactctgaaagtgacaaagagcaagccggagacaggagaggtgatcggagtgttcgagagtcttcagccgtcggatactgacttgggtgctaaggtaccaaaggatgtgaagatccaaggggtgtggtatggtcaacttgagtgatcatgttattatattttccgttgattgtgtttgatgataatgataacatcttttgatgctttc

SEQ ID NO: 86520 - protein, 266 aa, Arabidopsis thaliana
  peptide (1)..(266): Ceres Seq. ID no. 12691012
  misc_feature (102)..(266): Pfam Name: Manganese-stabilising protein / photosystem II Pfam Description: Manganese-stabilising protein / photosystem II
  misc_feature (102)..(266): Homolog of NCBI NO: 30013657 NR Description: oxygen evolving complex 33 kDa photosystem II
  misc_feature (12)..(121): Homolog of NCBI NO: 30013657 NR Description: oxygen evolving complex 33 kDa photosystem II
  misc_feature (102)..(266): Homolog of NCBI NO: 11134054 NR Description: Oxygen-evolving enhancer protein 1, chloroplast (OEE1) (33 kDa subunit of oxygen evolving system of photosystem
  misc_feature (12)..(121): Homolog of NCBI NO: 11134054 NR Description: Oxygen-evolving enhancer protein 1, chloroplast (OEE1) (33 kDa subunit of oxygen evolving system of photosystem
  misc_feature (102)..(266): Homolog of NCBI NO: 12644171 NR Description: Oxygen-evolving enhancer protein 1, chloroplast (OEE1) (33 kDa subunit of oxygen evolving system of photosystem
  misc_feature (12)..(121): Homolog of NCBI NO: 12644171 NR Description: Oxygen-evolving enhancer protein 1, chloroplast (OEE1) (33 kDa subunit of oxygen evolving system of photosystem
  misc_feature (102)..(266): Homolog of NCBI NO: 131385 NR Description: OXYGEN-EVOLVING ENHANCER PROTEIN 1, CHLOROPLAST (OEE1) (33 KDA SUBUNIT OF OXYGEN EVOLVING SYSTEM OF PHOTOSYSTEM
  misc_feature (12)..(121): Homolog of NCBI NO: 131385 NR Description: OXYGEN-EVOLVING ENHANCER PROTEIN 1, CHLOROPLAST (OEE1) (33 KDA SUBUNIT OF OXYGEN EVOLVING SYSTEM OF PHOTOSYSTEM
  misc_feature (102)..(266): Homolog of NCBI NO: 100454 NR Description: photosystem II oxygen-evolving complex protein 1
  misc_feature (13)..(121): Homolog of NCBI NO: 100454 NR Description: photosystem II oxygen-evolving complex protein 1
PKKKLKRDFVAMAASLQSTATFLQSAKIATAPSRGSSHLRSTQAVGKSFGLETSSARLTCSFQSDFKDFTGKCSDAVKIAGFALATSALVVSGASAEGAPKRLTYDEIEGPFEVASDGSVNFKEEDGIDYAAVTVQLPGGERVPFLFTVKQLDASGKPDSFTGKFLVPSYRGSSFLDPKGRGGSTGYDNAVALPAGGRGDEEELVKENVKNTAASVGEITLKVTKSKPETGEVIGVFESLQPSDTDLGAKVPKDVKIQGVWYGQLE

SEQ ID NO: 86521 - protein, 255 aa, Arabidopsis thaliana
  peptide (1)..(255): Ceres Seq. ID no. 12691013
  misc_feature (91)..(255): Pfam Name: Manganese-stabilising protein / photosystem II Pfam Description: Manganese-stabilising protein / photosystem II
  misc_feature (91)..(255): Homolog of NCBI NO: 30013657 NR Description: oxygen evolving complex 33 kDa photosystem II
  misc_feature (1)..(110): Homolog of NCBI NO: 30013657 NR Description: oxygen evolving complex 33 kDa photosystem II
  misc_feature (91)..(255): Homolog of NCBI NO: 11134054 NR Description: Oxygen-evolving enhancer protein 1, chloroplast (OEE1) (33 kDa subunit of oxygen evolving system of photosystem
  misc_feature (1)..(110): Homolog of NCBI NO: 11134054 NR Description: Oxygen-evolving enhancer protein 1, chloroplast (OEE1) (33 kDa subunit of oxygen evolving system of photosystem
  misc_feature (91)..(255): Homolog of NCBI NO: 12644171 NR Description: Oxygen-evolving enhancer protein 1, chloroplast (OEE1) (33 kDa subunit of oxygen evolving system of photosystem
  misc_feature (1)..(110): Homolog of NCBI NO: 12644171 NR Description: Oxygen-evolving enhancer protein 1, chloroplast (OEE1) (33 kDa subunit of oxygen evolving system of photosystem
  misc_feature (91)..(255): Homolog of NCBI NO: 131385 NR Description: OXYGEN-EVOLVING ENHANCER PROTEIN 1, CHLOROPLAST (OEE1) (33 KDA SUBUNIT OF OXYGEN EVOLVING SYSTEM OF PHOTOSYSTEM
  misc_feature (1)..(110): Homolog of NCBI NO: 131385 NR Description: OXYGEN-EVOLVING ENHANCER PROTEIN 1, CHLOROPLAST (OEE1) (33 KDA SUBUNIT OF OXYGEN EVOLVING SYSTEM OF PHOTOSYSTEM
  misc_feature (91)..(255): Homolog of NCBI NO: 100454 NR Description: photosystem II oxygen-evolving complex protein 1
  misc_feature (2)..(110): Homolog of NCBI NO: 100454 NR Description: photosystem II oxygen-evolving complex protein 1
MAASLQSTATFLQSAKIATAPSRGSSHLRSTQAVGKSFGLETSSARLTCSFQSDFKDFTGKCSDAVKIAGFALATSALVVSGASAEGAPKRLTYDEIEGPFEVASDGSVNFKEEDGIDYAAVTVQLPGGERVPFLFTVKQLDASGKPDSFTGKFLVPSYRGSSFLDPKGRGGSTGYDNAVALPAGGRGDEEELVKENVKNTAASVGEITLKVTKSKPETGEVIGVFESLQPSDTDLGAKVPKDVKIQGVWYGQLE

SEQ ID NO: 86522 - DNA, 1176 bp, Arabidopsis thaliana
  misc_feature (1)..(1176): Ceres Seq. ID no. 12691014
  misc_feature: MA Experiment ID: 20000234 Result: Down-regulated in Transcription
  misc_feature: MA Experiment 20000234 PARAMETER Experiment Name: At_Siliques_P Parameter: Age (day) Value: 21
  misc_feature: MA Experiment 20000234 PARAMETER Experiment Name: At_Siliques_P Parameter: Organism Value: A. thaliana
  misc_feature: MA Experiment 20000234 PARAMETER Experiment Name: At_Siliques_P Parameter: Plant Line Value: WS
  misc_feature: MA Experiment 20000234 PARAMETER Experiment Name: At_Siliques_P Parameter: Tissue Value: Less Than 5mm Siliques vs. Whole Plant
  misc_feature: MA Experiment ID: 20000235 Result: Down-regulated in Transcription
  misc_feature: MA Experiment 20000235 PARAMETER Experiment Name: At_Siliques_P Parameter: Age (day) Value: 21
  misc_feature: MA Experiment 20000235 PARAMETER Experiment Name: At_Siliques_P Parameter: Organism Value: A. thaliana
  misc_feature: MA Experiment 20000235 PARAMETER Experiment Name: At_Siliques_P Parameter: Plant Line Value: WS
  misc_feature: MA Experiment 20000235 PARAMETER Experiment Name: At_Siliques_P Parameter: Tissue Value: 5-10mm Siliques vs. Whole Plant
  misc_feature: MA Experiment ID: 20000264 Result: Down-regulated in Transcription
  misc_feature: MA Experiment 20000264 PARAMETER Experiment Name: At_Open_Flower_P Parameter: Age (day) Value: 21
  misc_feature: MA Experiment 20000264 PARAMETER Experiment Name: At_Open_Flower_P Parameter: Plant Line Value: WS
  misc_feature: MA Experiment 20000264 PARAMETER Experiment Name: At_Open_Flower_P Parameter: Tissue Value: Open Flower vs. Whole Plant
  misc_feature: MA Experiment ID: 20000265 Result: Down-regulated in Transcription
  misc_feature: MA Experiment 20000265 PARAMETER Experiment Name: At_Open_Flower_P Parameter: Age (day) Value: 21
  misc_feature: MA Experiment 20000265 PARAMETER Experiment Name: At_Open_Flower_P Parameter: Plant Line Value: WS
  misc_feature: MA Experiment 20000265 PARAMETER Experiment Name: At_Open_Flower_P Parameter: Tissue Value: Closed Flower vs. Whole Plant
cttcaaacgctcggaagtttccgctttggattcctgtcaccggcgatttcgtgggatgataacgacgccgagctatatttcgtgactgaagcaaagtgatgattcttcgattgaaagaccaaacgctcatcaaaatcaattcaactcgttcgtacttatcttccttagttttccgacgagattctcactcgcaggctcggacaaaacccgatcacgaccgccggagaagaggatacgagagggatgtgagaatcgaggagaagaaggaacacgatggattgtttctgtgcaagagcaaaggccaacaccttcttaccaacactagaatcctcgactccattgttcgaagctccgatatcaggccgactgatacagtcttggagatcggacctggcactggaaatctcacgatgaaacttcttgaagctgctcagaatgtcgtagccgtcgagctagataagcgtatggtggagattctacgcaaaagggtttctgaccatggttttgcagataaacttacgattattcaaaaagatgttctgaagacagattttcctcactttgatctcgtggttgcaaatattccttacaacatatcttcccctcttgtggccaagcttgtatacggctccaatacttttcgaagcgccacactcttgcttcaaaaggaattctcccgccggctcctggcaaatccaggagattccgatttcaatagattggcggtgaacgttaagattacaccaaaggagataataccggatgttaatgttcaagaatggttggcattcactcgcacgtgtttcgggaagaagaataagacgcttggttccatgtttaggcagaagaaaaaggtcatggaattgcagagtttgtctgcagggaggcatggctcgaatgttgaggttatgaatcagacaggtggtgattctgacagtgatgttgaagaagatgggaaagatgatttgttgtgtttggatacagatgcaagtatgttcaaggaaagggtaattgaaattctgagaacaaatgggttcgaagagaagagaccatccaagctttcacatcgtgagttgttacatttgctttctttgtttaaccaagctggaatttttttccatgatattacatcattacaaatggatctacacgaataatgataagttttctttaatg

SEQ ID NO: 86523 - protein, 352 aa, Arabidopsis thaliana
  peptide (1)..(352): Ceres Seq. ID no. 12691015
  misc_feature (82)..(158): Pfam Name: ubiE/COQ5 methyltransferase family Pfam Description: ubiE/COQ5 methyltransferase family
  misc_feature (1)..(352): Homolog of NCBI NO: 30698221 NR Description: dimethyladenosine transferase-related protein
  misc_feature (60)..(214): Homolog of NCBI NO: 15226591 NR Description: putative dimethyladenosine transferase; protein At2g47420.1, supported by cDNA: gi_14532649, supported by cDNA: [Arabidopsis thaliana] >gi|7433486|pir||T00442 probable
  misc_feature (239)..(340): Homolog of NCBI NO: 15226591 NR Description: putative dimethyladenosine transferase; protein At2g47420.1, supported by cDNA: gi_14532649, supported by cDNA: [Arabidopsis thaliana] >gi|7433486|pir||T00442 probable
  misc_feature (212)..(316): Homolog of NCBI NO: 15226591 NR Description: putative dimethyladenosine transferase; protein At2g47420.1, supported by cDNA: gi_14532649, supported by cDNA: [Arabidopsis thaliana] >gi|7433486|pir||T00442 probable
  misc_feature (212)..(340): Homolog of NCBI NO: 34394642 NR Description: Ribosomal RNA adenine dimethylase-like protein
  misc_feature (123)..(229): Homolog of NCBI NO: 34394642 NR Description: Ribosomal RNA adenine dimethylase-like protein
  misc_feature (42)..(214): Homolog of NCBI NO: 7657198 NR Description: putative dimethyladenosine transferase [Homo
  misc_feature (42)..(214): Homolog of NCBI NO: 12803983 NR Description: Similar to putative dimethyladenosine transferase
  misc_feature (212)..(248): Homolog of NCBI NO: 7657198 NR Description: putative dimethyladenosine transferase [Homo
  misc_feature (212)..(248): Homolog of NCBI NO: 12803983 NR Description: Similar to putative dimethyladenosine transferase
MILRLKDQTLIKINSTRSYLSSLVFRRDSHSQARTKPDHDRRRRGYERDVRIEEKKEHDGLFLCKSKGQHLLTNTRILDSIVRSSDIRPTDTVLEIGPGTGNLTMKLLEAAQNVVAVELDKRMVEILRKRVSDHGFADKLTIIQKDVLKTDFPHFDLVVANIPYNISSPLVAKLVYGSNTFRSATLLLQKEFSRRLLANPGDSDFNRLAVNVKITPKEIIPDVNVQEWLAFTRTCFGKKNKTLGSMFRQKKKVMELQSLSAGRHGSNVEVMNQTGGDSDSDVEEDGKDDLLCLDTDASMFKERVIEILRTNGFEEKRPSKLSHRELLHLLSLFNQAGIFFHDITSLQMDLHE

SEQ ID NO: 86524 - protein, 248 aa, Arabidopsis thaliana
  peptide (1)..(248): Ceres Seq. ID no. 12691016
  misc_feature (1)..(54): Pfam Name: ubiE/COQ5 methyltransferase family Pfam Description: ubiE/COQ5 methyltransferase family
  misc_feature (1)..(248): Homolog of NCBI NO: 30698221 NR Description: dimethyladenosine transferase-related protein
  misc_feature (1)..(110): Homolog of NCBI NO: 15226591 NR Description: putative dimethyladenosine transferase; protein At2g47420.1, supported by cDNA: gi_14532649, supported by cDNA: [Arabidopsis thaliana] >gi|7433486|pir||T00442 probable
  misc_feature (135)..(236): Homolog of NCBI NO: 15226591 NR Description: putative dimethyladenosine transferase; protein At2g47420.1, supported by cDNA: gi_14532649, supported by cDNA: [Arabidopsis thaliana] >gi|7433486|pir||T00442 probable
  misc_feature (108)..(212): Homolog of NCBI NO: 15226591 NR Description: putative dimethyladenosine transferase; protein At2g47420.1, supported by cDNA: gi_14532649, supported by cDNA: [Arabidopsis thaliana] >gi|7433486|pir||T00442 probable
  misc_feature (108)..(236): Homolog of NCBI NO: 34394642 NR Description: Ribosomal RNA adenine dimethylase-like protein
  misc_feature (19)..(125): Homolog of NCBI NO: 34394642 NR Description: Ribosomal RNA adenine dimethylase-like protein
  misc_feature (1)..(110): Homolog of NCBI NO: 7657198 NR Description: putative dimethyladenosine transferase [Homo
  misc_feature (1)..(110): Homolog of NCBI NO: 12803983 NR Description: Similar to putative dimethyladenosine transferase
  misc_feature (108)..(144): Homolog of NCBI NO: 7657198 NR Description: putative dimethyladenosine transferase [Homo
  misc_feature (108)..(144): Homolog of NCBI NO: 12803983 NR Description: Similar to putative dimethyladenosine transferase
MKLLEAAQNVVAVELDKRMVEILRKRVSDHGFADKLTIIQKDVLKTDFPHFDLVVANIPYNISSPLVAKLVYGSNTFRSATLLLQKEFSRRLLANPGDSDFNRLAVNVKITPKEIIPDVNVQEWLAFTRTCFGKKNKTLGSMFRQKKKVMELQSLSAGRHGSNVEVMNQTGGDSDSDVEEDGKDDLLCLDTDASMFKERVIEILRTNGFEEKRPSKLSHRELLHLLSLFNQAGIFFHDITSLQMDLHE

SEQ ID NO: 86525 - protein, 230 aa, Arabidopsis thaliana
  peptide (1)..(230): Ceres Seq. ID no. 12691017
  misc_feature (1)..(230): Homolog of NCBI NO: 30698221 NR Description: dimethyladenosine transferase-related protein
  misc_feature (1)..(92): Homolog of NCBI NO: 15226591 NR Description: putative dimethyladenosine transferase; protein At2g47420.1, supported by cDNA: gi_14532649, supported by cDNA: [Arabidopsis thaliana] >gi|7433486|pir||T00442 probable
  misc_feature (117)..(218): Homolog of NCBI NO: 15226591 NR Description: putative dimethyladenosine transferase; protein At2g47420.1, supported by cDNA: gi_14532649, supported by cDNA: [Arabidopsis thaliana] >gi|7433486|pir||T00442 probable
  misc_feature (90)..(194): Homolog of NCBI NO: 15226591 NR Description: putative dimethyladenosine transferase; protein At2g47420.1, supported by cDNA: gi_14532649, supported by cDNA: [Arabidopsis thaliana] >gi|7433486|pir||T00442 probable
  misc_feature (90)..(218): Homolog of NCBI NO: 34394642 NR Description: Ribosomal RNA adenine dimethylase-like protein
  misc_feature (1)..(107): Homolog of NCBI NO: 34394642 NR Description: Ribosomal RNA adenine dimethylase-like protein
  misc_feature (1)..(92): Homolog of NCBI NO: 7657198 NR Description: putative dimethyladenosine transferase [Homo
  misc_feature (1)..(92): Homolog of NCBI NO: 12803983 NR Description: Similar to putative dimethyladenosine transferase
  misc_feature (90)..(126): Homolog of NCBI NO: 7657198 NR Description: putative dimethyladenosine transferase [Homo
  misc_feature (90)..(126): Homolog of NCBI NO: 12803983 NR Description: Similar to putative dimethyladenosine transferase
MVEILRKRVSDHGFADKLTIIQKDVLKTDFPHFDLVVANIPYNISSPLVAKLVYGSNTFRSATLLLQKEFSRRLLANPGDSDFNRLAVNVKITPKEIIPDVNVQEWLAFTRTCFGKKNKTLGSMFRQKKKVMELQSLSAGRHGSNVEVMNQTGGDSDSDVEEDGKDDLLCLDTDASMFKERVIEILRTNGFEEKRPSKLSHRELLHLLSLFNQAGIFFHDITSLQMDLHE

SEQ ID NO: 86526 - DNA, 1239 bp, Arabidopsis thaliana
  misc_feature (1)..(1239): Ceres Seq. ID no. 12691088
  misc_feature: MA Experiment ID: 20000327 Result: Up-regulated in Transcription
  misc_feature: MA Experiment 20000327 PARAMETER Experiment Name: At_42deg_Heat_Sub_P Parameter: Age (day) Value: 14
  misc_feature: MA Experiment 20000327 PARAMETER Experiment Name: At_42deg_Heat_Sub_P Parameter: Organism Value: A. thaliana
  misc_feature: MA Experiment 20000327 PARAMETER Experiment Name: At_42deg_Heat_Sub_P Parameter: Plant Line Value: WS
  misc_feature: MA Experiment 20000327 PARAMETER Experiment Name: At_42deg_Heat_Sub_P Parameter: Temperature (deg C) Value: 42 vs. 22
  misc_feature: MA Experiment 20000327 PARAMETER Experiment Name: At_42deg_Heat_Sub_P Parameter: Timepoint (hr) Value: 1
  misc_feature: MA Experiment 20000327 PARAMETER Experiment Name: At_42deg_Heat_Sub_P Parameter: Tissue Value: Aerial
atgactggtctgaactcaaggcacccgaaagttgatctcaaaccacttcctaaaggtataaggtacgcattccttggtccaaactctacttaccctgtgatcattaatgcagagttaaatgatgacgaagtgaacctgctattatctgaacttagaaagtataggagagcaattggttattcattatctgacattaatggaatttcacctagtttatgcaaccataggatctaccttgaaaacgaattctattctagcattgaaccacagaggaggttaaatctcaacttgaaagaagtagtgaaaaaagaaattttgaaactgcttgatgttggtgtcatctaccctatctctgatagtacttgggtttctccagtgcattgcgtccctaaaaaaggtggaatgattgtagttaaaaatgaaaaggatgaactgatccctactagaactataactggtcatataatgtgcattgattataggaagataaatgctgcatgtaggaaagatcaatttcttttatcattcattgatcaaatgcttaaacgcctagccaatcatccatactattgctttcttgatggatatagtggttactttcaaataccaattcaccctaatgatcaagagaaaaccactttcacatgtcctcatggaacttttgcttataagagaatgccatttggtttatgcaatgctcctgcaacatttcagaggtgtatgacctctatattttcagatttaatcgaggagatggtggaggtcttcatggacgatttttcggtctatggcccctctttctcctcatgtttgttgaatcttggcagggtattgaccaggtgcgaagagacgaaccttgttctcaattgggaaaagtgtcatttcatggtgaaggaaggcatagtgttgtgtcacaagatatcagaaaagggcatagaggttgacaaaggaaaaattgaagtgatgatgcagttgcagccaccaaaaacggtgaaggacatcagaagtttcattggtcatgctgggttctacggaagatttattaaagacttctccaagatagccaggccggacttctttagaactaggagaaagttctgggccgaatttggaaatcttcaaaacatcaataagttgcgcaattcaattgccgtcaggtattggtgtctctcgacaccagggattgtgtcgatcgacacctacgtcaattttcgtctccggattactgccgtagcttaa

SEQ ID NO: 86527 - protein, 412 aa, Arabidopsis thaliana
  peptide (1)..(412): Ceres Seq. ID no. 12691089
  misc_feature (120)..(307): Pfam Name: Reverse transcriptase (RNA-dependent DNA polymerase) Pfam Description: Reverse transcriptase (RNA-dependent DNA
  misc_feature (1)..(385): Homolog of NCBI NO: 22327243 NR Description: similar to polyprotein, putative; protein id:
  misc_feature (9)..(357): Homolog of NCBI NO: 6691191 NR Description: F7F22.15 [Arabidopsis thaliana]
  misc_feature (9)..(357): Homolog of NCBI NO: 15223982 NR Description: polyprotein, putative; protein id: At1g42375.1
  misc_feature (9)..(357): Homolog of NCBI NO: 22327227 NR Description: similar to polyprotein, putative; protein id:
  misc_feature (9)..(357): Homolog of NCBI NO: 6691193 NR Description: F7F22.17 [Arabidopsis thaliana]
  misc_feature (9)..(357): Homolog of NCBI NO: 15221270 NR Description: Athila retroelment ORF 1, putative; protein id:
  misc_feature (9)..(334): Homolog of NCBI NO: 25407395 NR Description: probable athila transposon protein [imported] - thaliana >gi|7267363|emb|CAB81136.1| putative athila transposon
  misc_feature (33)..(357): Homolog of NCBI NO: 9884624 NR Description: retroelement pol polyprotein-like [Arabidopsis
  misc_feature (56)..(357): Homolog of NCBI NO: 8778801 NR Description: T32E20.9 [Arabidopsis thaliana]
  misc_feature (101)..(354): Homolog of NCBI NO: 15724050 NR Description: reverse transcriptase [Arabidopsis thaliana]
MTGLNSRHPKVDLKPLPKGIRYAFLGPNSTYPVIINAELNDDEVNLLLSELRKYRRAIGYSLSDINGISPSLCNHRIYLENEFYSSIEPQRRLNLNLKEVVKKEILKLLDVGVIYPISDSTWVSPVHCVPKKGGMIVVKNEKDELIPTRTITGHIMCIDYRKINAACRKDQFLLSFIDQMLKRLANHPYYCFLDGYSGYFQIPIHPNDQEKTTFTCPHGTFAYKRMPFGLCNAPATFQRCMTSIFSDLIEEMVEVFMDDFSVYGPSFSSCLLNLGRVLTRCEETNLVLNWEKCHFMVKEGIVLCHKISEKGIEVDKGKIEVMMQLQPPKTVKDIRSFIGHAGFYGRFIKDFSKIARPDFFRTRRKFWAEFGNLQNINKLRNSIAVRYWCLSTPGIVSIDTYVNFRLRITAVA

SEQ ID NO: 86528 - protein, 278 aa, Arabidopsis thaliana
  peptide (1)..(278): Ceres Seq. ID no. 12691090
  misc_feature (1)..(173): Pfam Name: Reverse transcriptase (RNA-dependent DNA polymerase) Pfam Description: Reverse transcriptase (RNA-dependent DNA
  misc_feature (1)..(251): Homolog of NCBI NO: 22327243 NR Description: similar to polyprotein, putative; protein id:
  misc_feature (1)..(223): Homolog of NCBI NO: 6691191 NR Description: F7F22.15 [Arabidopsis thaliana]
  misc_feature (1)..(223): Homolog of NCBI NO: 15223982 NR Description: polyprotein, putative; protein id: At1g42375.1
  misc_feature (1)..(223): Homolog of NCBI NO: 22327227 NR Description: similar to polyprotein, putative; protein id:
  misc_feature (1)..(223): Homolog of NCBI NO: 6691193 NR Description: F7F22.17 [Arabidopsis thaliana]
  misc_feature (1)..(223): Homolog of NCBI NO: 15221270 NR Description: Athila retroelment ORF 1, putative; protein id:
  misc_feature (1)..(200): Homolog of NCBI NO: 25407395 NR Description: probable athila transposon protein [imported] - thaliana >gi|7267363|emb|CAB81136.1| putative athila transposon
  misc_feature (1)..(223): Homolog of NCBI NO: 9884624 NR Description: retroelement pol polyprotein-like [Arabidopsis
  misc_feature (1)..(223): Homolog of NCBI NO: 8778801 NR Description: T32E20.9 [Arabidopsis thaliana]
  misc_feature (1)..(220): Homolog of NCBI NO: 15724050 NR Description: reverse transcriptase [Arabidopsis thaliana]
MIVVKNEKDELIPTRTITGHIMCIDYRKINAACRKDQFLLSFIDQMLKRLANHPYYCFLDGYSGYFQIPIHPNDQEKTTFTCPHGTFAYKRMPFGLCNAPATFQRCMTSIFSDLIEEMVEVFMDDFSVYGPSFSSCLLNLGRVLTRCEETNLVLNWEKCHFMVKEGIVLCHKISEKGIEVDKGKIEVMMQLQPPKTVKDIRSFIGHAGFYGRFIKDFSKIARPDFFRTRRKFWAEFGNLQNINKLRNSIAVRYWCLSTPGIVSIDTYVNFRLRITAVA

SEQ ID NO: 86529 - protein, 257 aa, Arabidopsis thaliana
  peptide (1)..(257): Ceres Seq. ID no. 12691091
  misc_feature (1)..(152): Pfam Name: Reverse transcriptase (RNA-dependent DNA polymerase) Pfam Description: Reverse transcriptase (RNA-dependent DNA
  misc_feature (1)..(230): Homolog of NCBI NO: 22327243 NR Description: similar to polyprotein, putative; protein id:
  misc_feature (1)..(202): Homolog of NCBI NO: 6691191 NR Description: F7F22.15 [Arabidopsis thaliana]
  misc_feature (1)..(202): Homolog of NCBI NO: 15223982 NR Description: polyprotein, putative; protein id: At1g42375.1
  misc_feature (1)..(202): Homolog of NCBI NO: 22327227 NR Description: similar to polyprotein, putative; protein id:
  misc_feature (1)..(202): Homolog of NCBI NO: 6691193 NR Description: F7F22.17 [Arabidopsis thaliana]
  misc_feature (1)..(202): Homolog of NCBI NO: 15221270 NR Description: Athila retroelment ORF 1, putative; protein id:
  misc_feature (1)..(179): Homolog of NCBI NO: 25407395 NR Description: probable athila transposon protein [imported] - thaliana >gi|7267363|emb|CAB81136.1| putative athila transposon
  misc_feature (1)..(202): Homolog of NCBI NO: 9884624 NR Description: retroelement pol polyprotein-like [Arabidopsis
  misc_feature (1)..(202): Homolog of NCBI NO: 8778801 NR Description: T32E20.9 [Arabidopsis thaliana]
  misc_feature (1)..(199): Homolog of NCBI NO: 15724050 NR Description: reverse transcriptase [Arabidopsis thaliana]
MCIDYRKINAACRKDQFLLSFIDQMLKRLANHPYYCFLDGYSGYFQIPIHPNDQEKTTFTCPHGTFAYKRMPFGLCNAPATFQRCMTSIFSDLIEEMVEVFMDDFSVYGPSFSSCLLNLGRVLTRCEETNLVLNWEKCHFMVKEGIVLCHKISEKGIEVDKGKIEVMMQLQPPKTVKDIRSFIGHAGFYGRFIKDFSKIARPDFFRTRRKFWAEFGNLQNINKLRNSIAVRYWCLSTPGIVSIDTYVNFRLRITAVA

SEQ ID NO: 86530 - DNA, 2127 bp, Arabidopsis thaliana
  misc_feature (1)..(2127): Ceres Seq. ID no. 12691276
  misc_feature: MA Experiment ID: 20001910 Result: Up-regulated in Transcription
  misc_feature: MA Experiment 20001910 PARAMETER Experiment Name: At_Drought_Reproduction_P Parameter: Age (day) Value: 37
  misc_feature: MA Experiment 20001910 PARAMETER Experiment Name: At_Drought_Reproduction_P Parameter: Organism Value: A. thaliana
  misc_feature: MA Experiment 20001910 PARAMETER Experiment Name: At_Drought_Reproduction_P Parameter: Plant Line Value: WS
  misc_feature: MA Experiment 20001910 PARAMETER Experiment Name: At_Drought_Reproduction_P Parameter: Timepoint (day) Value: 7
  misc_feature: MA Experiment 20001910 PARAMETER Experiment Name: At_Drought_Reproduction_P Parameter: Tissue Value: Flowers
  misc_feature: MA Experiment 20001910 PARAMETER Experiment Name: At_Drought_Reproduction_P Parameter: Treatment Value: Drought vs. No Drought
atggcttcaccgtactcgtccgacgatatccattctccggtgaactcaacggtcgttgcaatagacaaagagaaacatagttcttacgctgttcgttgggccgtcgaccatctcctcaatatgattcacaatcccgtcatgattcttgtccatgttcgtaccaaaaattcaaaccatggagccaacttgaacaatgatgatctaaatcagctttttattccatatcgaggatattgtgcgcgaaaagggatttctatgacggaggttgttctagacgattccgacgtagcaaaaacaatcttggattacgttaataacaacctggttaacaatcttgtattgggagcatccacgaagaacaccttcgctaggtcttttatgtttagtaaaccacatgaggtgcaatctagcataatgaaatcgacgcctgatttttgttcggtgtatgtcatttctaaaggagggaaagttcagtcttcccgaccagctcaaagacctatcaccaatacgcttgccccgcctcgtgttccatcctctggctttttaatccaatctttatccgatagcgagcaagatctcatacctagggtccagcgtagtgcaaggaacaaacctaatgagactacttatccgcataatcgtgccgccttcaacacgacgcaaaaaggttacaaaagccctataaatgggtcgatggatttcaacaacggctttaatcaagctgccttccaaagaaatcccacgttacaaagttcgttttctgatgaatctgatggtgggtttggagtgatgggttcagttgatctctcttctcaaaatagtatggatttttatcatggtgcatcgagttcttcagaagagtcaattccacaatcaactaaagatattgaagctgagatgagaaggctaaagcttgaacttaagcaaactatggacatgtatagctcagcttgtaaagaagcacttacggcaaaaagaaaggcaaacgagctaaatcaatggaagatagaagaagctcgtaaattcgagaaagcgaggctttctgaagaagcagcattggcagttgctgaaatcgagaaagcaaagtgtagaacagccgtagaagcagctgagaaagctcaaagaatggctgaactagaaggacaaagaaggaagcaagcagagatgaaagctgtaagtgaagaaaaggacaaagaccgcgcagtgagtgctttggcacataacgatgttcgctacagaaaatatagtatagaagagatcgaagaagctacagagaggtttgcaaatcataggaagattggtgaaggaggatatggacctgtgtacaatggtgaacttgaccacactcctgttgccattaaagttttaagacctgatgctgctcaaggaaaaaaacaatttcaacaagaagttgaggttctatgttccataaggcatcctcacatggttcttctccttggtgcatgtcctgaatatggatgtttggtttacgagttcatggaaaatgggagcttagaggatagactttttcgtactggaaactctccaccgctttcgtggaggaaacgttttgaaatagcggcggagattgctaccgcactctcattccttcatcaagctaagccagaacctttagttcaccgcgacctaaaaccagccaatatactcttagacaaaaactacgtgagcaagatcagcgacgttggtttagcgcggttagtccccgcatcgatagctgatagcgtcacgcaattccacatgacatctgcggcaggaacgttttgttacatagaccctgaataccaacaaacaggaatgttaaccacaaaatcagacgtatactcattggggatattgctacttcagattataaccggaaggcctcccatggggctggctcaccaagtttcaagggcaattagtaaaggaactttcaaggaaatgcttgaccccgttgtgcctgattggcctgtacaagaggctcaatcttttgctactctagcgttgaaatgtgcggagctaagaaaaagagatagaccagatcttgggaaggaagtagtcccacatcttattagattaaaaaactttgggaatgatggtgatgagagaactaacgaatggatatga

SEQ ID NO: 86531 - protein, 708 aa, Arabidopsis thaliana
  peptide (1)..(708): Ceres Seq. ID no. 12691277
  misc_feature (427)..(629): Pfam Name: Protein kinase domain Pfam Description: Protein kinase domain
  misc_feature (1)..(701): Homolog of NCBI NO: 15239834 NR Description: putative receptor - like kinase; protein id:
  misc_feature (57)..(703): Homolog of NCBI NO: 21902013 NR Description: putative serine threonine kinase [Oryza sativa
  misc_feature (19)..(699): Homolog of NCBI NO: 15238484 NR Description: putative protein; protein id: At5g35380.1
  misc_feature (184)..(699): Homolog of NCBI NO: 15224129 NR Description: putative protein kinase; protein id: At2g24370.1
  misc_feature (19)..(64): Homolog of NCBI NO: 15224129 NR Description: putative protein kinase; protein id: At2g24370.1
  misc_feature (84)..(699): Homolog of NCBI NO: 10178101 NR Description: receptor-like protein kinase [Arabidopsis
  misc_feature (68)..(699): Homolog of NCBI NO: 14719286 NR Description: serine threonine kinase 1 [Zea mays]
  misc_feature (68)..(699): Homolog of NCBI NO: 18092335 NR Description: serine threonine kinase [Zea mays]
  misc_feature (71)..(699): Homolog of NCBI NO: 15219360 NR Description: protein kinase, putative; protein id: At1g16760.1
  misc_feature (71)..(702): Homolog of NCBI NO: 30699374 NR Description: protein kinase family [Arabidopsis thaliana]
MASPYSSDDIHSPVNSTVVAIDKEKHSSYAVRWAVDHLLNMIHNPVMILVHVRTKNSNHGANLNNDDLNQLFIPYRGYCARKGISMTEVVLDDSDVAKTILDYVNNNLVNNLVLGASTKNTFARSFMFSKPHEVQSSIMKSTPDFCSVYVISKGGKVQSSRPAQRPITNTLAPPRVPSSGFLIQSLSDSEQDLIPRVQRSARNKPNETTYPHNRAAFNTTQKGYKSPINGSMDFNNGFNQAAFQRNPTLQSSFSDESDGGFGVMGSVDLSSQNSMDFYHGASSSSEESIPQSTKDIEAEMRRLKLELKQTMDMYSSACKEALTAKRKANELNQWKIEEARKFEKARLSEEAALAVAEIEKAKCRTAVEAAEKAQRMAELEGQRRKQAEMKAVSEEKDKDRAVSALAHNDVRYRKYSIEEIEEATERFANHRKIGEGGYGPVYNGELDHTPVAIKVLRPDAAQGKKQFQQEVEVLCSIRHPHMVLLLGACPEYGCLVYEFMENGSLEDRLFRTGNSPPLSWRKRFEIAAEIATALSFLHQAKPEPLVHRDLKPANILLDKNYVSKISDVGLARLVPASIADSVTQFHMTSAAGTFCYIDPEYQQTGMLTTKSDVYSLGILLLQIITGRPPMGLAHQVSRAISKGTFKEMLDPVVPDWPVQEAQSFATLALKCAELRKRDRPDLGKEVVPHLIRLKNFGNDGDERTNEWI

SEQ ID NO: 86532 - protein, 668 aa, Arabidopsis thaliana
  peptide (1)..(668): Ceres Seq. ID no. 12691278
  misc_feature (387)..(589): Pfam Name: Protein kinase domain Pfam Description: Protein kinase domain
  misc_feature (1)..(661): Homolog of NCBI NO: 15239834 NR Description: putative receptor - like kinase; protein id:
  misc_feature (17)..(663): Homolog of NCBI NO: 21902013 NR Description: putative serine threonine kinase [Oryza sativa
  misc_feature (1)..(659): Homolog of NCBI NO: 15238484 NR Description: putative protein; protein id: At5g35380.1
  misc_feature (144)..(659): Homolog of NCBI NO: 15224129 NR Description: putative protein kinase; protein id: At2g24370.1
  misc_feature (1)..(24): Homolog of NCBI NO: 15224129 NR Description: putative protein kinase; protein id: At2g24370.1
  misc_feature (44)..(659): Homolog of NCBI NO: 10178101 NR Description: receptor-like protein kinase [Arabidopsis
  misc_feature (28)..(659): Homolog of NCBI NO: 14719286 NR Description: serine threonine kinase 1 [Zea mays]
  misc_feature (28)..(659): Homolog of NCBI NO: 18092335 NR Description: serine threonine kinase [Zea mays]
  misc_feature (31)..(659): Homolog of NCBI NO: 15219360 NR Description: protein kinase, putative; protein id: At1g16760.1
  misc_feature (31)..(662): Homolog of NCBI NO: 30699374 NR Description: protein kinase family [Arabidopsis thaliana]
MIHNPVMILVHVRTKNSNHGANLNNDDLNQLFIPYRGYCARKGISMTEVVLDDSDVAKTILDYVNNNLVNNLVLGASTKNTFARSFMFSKPHEVQSSIMKSTPDFCSVYVISKGGKVQSSRPAQRPITNTLAPPRVPSSGFLIQSLSDSEQDLIPRVQRSARNKPNETTYPHNRAAFNTTQKGYKSPINGSMDFNNGFNQAAFQRNPTLQSSFSDESDGGFGVMGSVDLSSQNSMDFYHGASSSSEESIPQSTKDIEAEMRRLKLELKQTMDMYSSACKEALTAKRKANELNQWKIEEARKFEKARLSEEAALAVAEIEKAKCRTAVEAAEKAQRMAELEGQRRKQAEMKAVSEEKDKDRAVSALAHNDVRYRKYSIEEIEEATERFANHRKIGEGGYGPVYNGELDHTPVAIKVLRPDAAQGKKQFQQEVEVLCSIRHPHMVLLLGACPEYGCLVYEFMENGSLEDRLFRTGNSPPLSWRKRFEIAAEIATALSFLHQAKPEPLVHRDLKPANILLDKNYVSKISDVGLARLVPASIADSVTQFHMTSAAGTFCYIDPEYQQTGMLTTKSDVYSLGILLLQIITGRPPMGLAHQVSRAISKGTFKEMLDPVVPDWPVQEAQSFATLALKCAELRKRDRPDLGKEVVPHLIRLKNFGNDGDERTNEWI

SEQ ID NO: 86533 - protein, 662 aa, Arabidopsis thaliana
  peptide (1)..(662): Ceres Seq. ID no. 12691279
  misc_feature (381)..(583): Pfam Name: Protein kinase domain Pfam Description: Protein kinase domain
  misc_feature (1)..(655): Homolog of NCBI NO: 15239834 NR Description: putative receptor - like kinase; protein id:
  misc_feature (11)..(657): Homolog of NCBI NO: 21902013 NR Description: putative serine threonine kinase [Oryza sativa
  misc_feature (1)..(653): Homolog of NCBI NO: 15238484 NR Description: putative protein; protein id: At5g35380.1
  misc_feature (138)..(653): Homolog of NCBI NO: 15224129 NR Description: putative protein kinase; protein id: At2g24370.1
  misc_feature (1)..(18): Homolog of NCBI NO: 15224129 NR Description: putative protein kinase; protein id: At2g24370.1
  misc_feature (38)..(653): Homolog of NCBI NO: 10178101 NR Description: receptor-like protein kinase [Arabidopsis
  misc_feature (22)..(653): Homolog of NCBI NO: 14719286 NR Description: serine threonine kinase 1 [Zea mays]
  misc_feature (22)..(653): Homolog of NCBI NO: 18092335 NR Description: serine threonine kinase [Zea mays]
  misc_feature (25)..(653): Homolog of NCBI NO: 15219360 NR Description: protein kinase, putative; protein id: At1g16760.1
  misc_feature (25)..(656): Homolog of NCBI NO: 30699374 NR Description: protein kinase family [Arabidopsis thaliana]
MILVHVRTKNSNHGANLNNDDLNQLFIPYRGYCARKGISMTEVVLDDSDVAKTILDYVNNNLVNNLVLGASTKNTFARSFMFSKPHEVQSSIMKSTPDFCSVYVISKGGKVQSSRPAQRPITNTLAPPRVPSSGFLIQSLSDSEQDLIPRVQRSARNKPNETTYPHNRAAFNTTQKGYKSPINGSMDFNNGFNQAAFQRNPTLQSSFSDESDGGFGVMGSVDLSSQNSMDFYHGASSSSEESIPQSTKDIEAEMRRLKLELKQTMDMYSSACKEALTAKRKANELNQWKIEEARKFEKARLSEEAALAVAEIEKAKCRTAVEAAEKAQRMAELEGQRRKQAEMKAVSEEKDKDRAVSALAHNDVRYRKYSIEEIEEATERFANHRKIGEGGYGPVYNGELDHTPVAIKVLRPDAAQGKKQFQQEVEVLCSIRHPHMVLLLGACPEYGCLVYEFMENGSLEDRLFRTGNSPPLSWRKRFEIAAEIATALSFLHQAKPEPLVHRDLKPANILLDKNYVSKISDVGLARLVPASIADSVTQFHMTSAAGTFCYIDPEYQQTGMLTTKSDVYSLGILLLQIITGRPPMGLAHQVSRAISKGTFKEMLDPVVPDWPVQEAQSFATLALKCAELRKRDRPDLGKEVVPHLIRLKNFGNDGDERTNEWI

SEQ ID NO: 86534 - DNA, 1187 bp, Arabidopsis thaliana
  misc_feature (1)..(1187): Ceres Seq. ID no. 12691440
  misc_feature: MA Experiment ID: 108461 Result: Down-regulated in Transcription
  misc_feature: MA Experiment 108461 PARAMETER Experiment Name: At_Germinating_Seeds_cDNA_P Parameter: Age (day) Value: 1 vs. 0
  misc_feature: MA Experiment 108461 PARAMETER Experiment Name: At_Germinating_Seeds_cDNA_P Parameter: Tissue Value: Germinating Seeds
  misc_feature: MA Experiment ID: 108462 Result: Down-regulated in Transcription
  misc_feature: MA Experiment 108462 PARAMETER Experiment Name: At_Germinating_Seeds_cDNA_P Parameter: Age (day) Value: 2 vs. 0
  misc_feature: MA Experiment 108462 PARAMETER Experiment Name: At_Germinating_Seeds_cDNA_P Parameter: Tissue Value: Germinating Seeds
  misc_feature: MA Experiment ID: 108573 Result: Up-regulated in Transcription
  misc_feature: MA Experiment 108573 PARAMETER Experiment Name: At_Drought_cDNA_P Parameter: Timepoint (hr) Value: 6
  misc_feature: MA Experiment 108573 PARAMETER Experiment Name: At_Drought_cDNA_P Parameter: Tissue Value: Aerial
  misc_feature: MA Experiment 108573 PARAMETER Experiment Name: At_Drought_cDNA_P Parameter: Treatment Value: Drought vs. No Drought
  misc_feature: MA Experiment ID: 108585 Result: Up-regulated in Transcription
  misc_feature: MA Experiment 108585 PARAMETER Experiment Name: At_5mM_NaNP_cDNA_P Parameter: Timepoint (hr) Value: 6
  misc_feature: MA Experiment 108585 PARAMETER Experiment Name: At_5mM_NaNP_cDNA_P Parameter: Tissue Value: Aerial
  misc_feature: MA Experiment 108585 PARAMETER Experiment Name: At_5mM_NaNP_cDNA_P Parameter: Treatment Value: null
  misc_feature: MA Experiment ID: 20000224 Result: Down-regulated in Transcription
  misc_feature: MA Experiment ID: 20000264 Result: Up-regulated in Transcription
  misc_feature: MA Experiment 20000264 PARAMETER Experiment Name: At_Open_Flower_P Parameter: Age (day) Value: 21
  misc_feature: MA Experiment 20000264 PARAMETER Experiment Name: At_Open_Flower_P Parameter: Plant Line Value: WS
  misc_feature: MA Experiment 20000264 PARAMETER Experiment Name: At_Open_Flower_P Parameter: Tissue Value: Open Flower vs. Whole Plant
  misc_feature: MA Experiment ID: 20000286 Result: Up-regulated in Transcription
  misc_feature: MA Experiment 20000286 PARAMETER Experiment Name: At_Open_Flower_P Parameter: Age (day) Value: 21
  misc_feature: MA Experiment 20000286 PARAMETER Experiment Name: At_Open_Flower_P Parameter: Plant Line Value: WS
  misc_feature: MA Experiment 20000286 PARAMETER Experiment Name: At_Open_Flower_P Parameter: Tissue Value: Half Open vs. Whole Plant
aaatccagtttcgctcctccttgctctagctctgttatctgattcgtaaccattgatgaaatgcgagttctcgacgaaattgcagagtcaccatttctgatttcaccgctaaaccctaattcgacagccaatggatatagatgggtcgataagtgccatggattcttacataacacggttctcgttgcggcttctctcttcttcgtcgcttacttagcttacgaagcgaagaagagtctgtctaaactctcgaatcggagatcttatatcatgattgcttattatggttgtctttggcttgttagcttgctcaatcttgcttggtgctgtctccagggttgggaatgtactcctgggaaagaagttgtttggaatctgttaactttgttcacaacatctggaatgttgtttctggaagtaagcttggtggcttttctcttccaaggaaactatgcaagcggtgcagaagcattaactagaacgttcctaatctcgggttttattgttgctcttgatttgcttctcaaggcaatttttctctttggatttggagtgccattgtttattgacaacaatgaaaatggaaaaacgttcaaatggggcttatggatcattcataagcttctactcactggcgtttatgggatggtgttcttgatgtacaactctaggtggagagaaaaattgcctgcaaggcctgcattctacaactacataatcatcatgttcgccttatacagcctttacctagttgcatctgcgtttaccgcaaacaacgcgcattttggtttctggttatatgggatcatgagtgtttgctaccacgcattataccttcctcttctttacataacgttcctcgcagactttttccaggaagaagatttgaacttggagaatgtatactactcagagatgaaggatgctggatttttcgactctgattgggaataggactagggtaacaaacatcttcctcattttctcaatctgtaaatacacgttgggtaggatctcctagaagtcatggctgctttttccggctttggcgggttacattttagggtctagtcttttgtatgtctgtactttttcctcatgtttctttctcttttataaatccaaaatgtcttgtgaatctctttgttccttaagctgataatctaaaagaaagttttgtagtagtc

SEQ ID NO: 86535 - protein, 297 aa, Arabidopsis thaliana
  peptide (1)..(297): Ceres Seq. ID no. 12691441
  misc_feature (1)..(297): Homolog of NCBI NO: 15240462 NR Description: putative protein; protein id: At5g27210.1, by cDNA: 96808., supported by cDNA: gi_14532471 [Arabidopsis
  misc_feature (1)..(297): Homolog of NCBI NO: 21618098 NR Description: unknown [Arabidopsis thaliana]
  misc_feature (1)..(297): Homolog of NCBI NO: 14532472 NR Description: AT5g27210/T21B4_120 [Arabidopsis thaliana]
  misc_feature (1)..(297): Homolog of NCBI NO: 18397089 NR Description: expressed protein; protein id: At3g05010.1, by cDNA: gi_15028250 [Arabidopsis thaliana]
  misc_feature (1)..(297): Homolog of NCBI NO: 12322847 NR Description: unknown protein; 15342-13483 [Arabidopsis
  misc_feature (156)..(297): Homolog of NCBI NO: 21326119 NR Description: putative expressed protein [Sorghum bicolor]
  misc_feature (28)..(151): Homolog of NCBI NO: 21326119 NR Description: putative expressed protein [Sorghum bicolor]
  misc_feature (130)..(263): Homolog of NCBI NO: 7485300 NR Description: hypothetical protein A_TM021B04.15 - Arabidopsis >gi|2191194|gb|AAB61079.1| contains weak to the SAPB protein
MRVLDEIAESPFLISPLNPNSTANGYRWVDKCHGFLHNTVLVAASLFFVAYLAYEAKKSLSKLSNRRSYIMIAYYGCLWLVSLLNLAWCCLQGWECTPGKEVVWNLLTLFTTSGMLFLEVSLVAFLFQGNYASGAEALTRTFLISGFIVALDLLLKAIFLFGFGVPLFIDNNENGKTFKWGLWIIHKLLLTGVYGMVFLMYNSRWREKLPARPAFYNYIIIMFALYSLYLVASAFTANNAHFGFWLYGIMSVCYHALYLPLLYITFLADFFQEEDLNLENVYYSEMKDAGFFDSDWE

SEQ ID NO: 86536 - protein, 227 aa, Arabidopsis thaliana
  peptide (1)..(227): Ceres Seq. ID no. 12691442
  misc_feature (1)..(227): Homolog of NCBI NO: 15240462 NR Description: putative protein; protein id: At5g27210.1, by cDNA: 96808., supported by cDNA: gi_14532471 [Arabidopsis
  misc_feature (1)..(227): Homolog of NCBI NO: 21618098 NR Description: unknown [Arabidopsis thaliana]
  misc_feature (1)..(227): Homolog of NCBI NO: 14532472 NR Description: AT5g27210/T21B4_120 [Arabidopsis thaliana]
  misc_feature (1)..(227): Homolog of NCBI NO: 18397089 NR Description: expressed protein; protein id: At3g05010.1, by cDNA: gi_15028250 [Arabidopsis thaliana]
  misc_feature (1)..(227): Homolog of NCBI NO: 12322847 NR Description: unknown protein; 15342-13483 [Arabidopsis
  misc_feature (86)..(227): Homolog of NCBI NO: 21326119 NR Description: putative expressed protein [Sorghum bicolor]
  misc_feature (1)..(81): Homolog of NCBI NO: 21326119 NR Description: putative expressed protein [Sorghum bicolor]
  misc_feature (60)..(193): Homolog of NCBI NO: 7485300 NR Description: hypothetical protein A_TM021B04.15 - Arabidopsis >gi|2191194|gb|AAB61079.1| contains weak to the SAPB protein
MIAYYGCLWLVSLLNLAWCCLQGWECTPGKEVVWNLLTLFTTSGMLFLEVSLVAFLFQGNYASGAEALTRTFLISGFIVALDLLLKAIFLFGFGVPLFIDNNENGKTFKWGLWIIHKLLLTGVYGMVFLMYNSRWREKLPARPAFYNYIIIMFALYSLYLVASAFTANNAHFGFWLYGIMSVCYHALYLPLLYITFLADFFQEEDLNLENVYYSEMKDAGFFDSDWE

SEQ ID NO: 86537 - protein, 183 aa, Arabidopsis thaliana
  peptide (1)..(183): Ceres Seq. ID no. 12691443
  misc_feature (1)..(183): Homolog of NCBI NO: 15240462 NR Description: putative protein; protein id: At5g27210.1, by cDNA: 96808., supported by cDNA: gi_14532471 [Arabidopsis
  misc_feature (1)..(183): Homolog of NCBI NO: 21618098 NR Description: unknown [Arabidopsis thaliana]
  misc_feature (1)..(183): Homolog of NCBI NO: 14532472 NR Description: AT5g27210/T21B4_120 [Arabidopsis thaliana]
  misc_feature (1)..(183): Homolog of NCBI NO: 18397089 NR Description: expressed protein; protein id: At3g05010.1, by cDNA: gi_15028250 [Arabidopsis thaliana]
  misc_feature (1)..(183): Homolog of NCBI NO: 12322847 NR Description: unknown protein; 15342-13483 [Arabidopsis
  misc_feature (42)..(183): Homolog of NCBI NO: 21326119 NR Description: putative expressed protein [Sorghum bicolor]
  misc_feature (1)..(37): Homolog of NCBI NO: 21326119 NR Description: putative expressed protein [Sorghum bicolor]
  misc_feature (16)..(149): Homolog of NCBI NO: 7485300 NR Description: hypothetical protein A_TM021B04.15 - Arabidopsis >gi|2191194|gb|AAB61079.1| contains weak to the SAPB protein
MLFLEVSLVAFLFQGNYASGAEALTRTFLISGFIVALDLLLKAIFLFGFGVPLFIDNNENGKTFKWGLWIIHKLLLTGVYGMVFLMYNSRWREKLPARPAFYNYIIIMFALYSLYLVASAFTANNAHFGFWLYGIMSVCYHALYLPLLYITFLADFFQEEDLNLENVYYSEMKDAGFFDSDWE

SEQ ID NO: 86538 - DNA, 1371 bp, Arabidopsis thaliana
  misc_feature (1)..(1371): Ceres Seq. ID no. 12691466
  misc_feature: MA Experiment ID: 108434 Result: Down-regulated in Transcription
  misc_feature: MA Experiment 108434 PARAMETER Experiment Name: At_Root_Tips_cDNA_P Parameter: Tissue Value: Root Tips
  misc_feature: MA Experiment ID: 108461 Result: Down-regulated in Transcription
  misc_feature: MA Experiment 108461 PARAMETER Experiment Name: At_Germinating_Seeds_cDNA_P Parameter: Age (day) Value: 1 vs. 0
  misc_feature: MA Experiment 108461 PARAMETER Experiment Name: At_Germinating_Seeds_cDNA_P Parameter: Tissue Value: Germinating Seeds
  misc_feature: MA Experiment ID: 108462 Result: Down-regulated in Transcription
  misc_feature: MA Experiment 108462 PARAMETER Experiment Name: At_Germinating_Seeds_cDNA_P Parameter: Age (day) Value: 2 vs. 0
  misc_feature: MA Experiment 108462 PARAMETER Experiment Name: At_Germinating_Seeds_cDNA_P Parameter: Tissue Value: Germinating Seeds
  misc_feature: MA Experiment ID: 108463 Result: Down-regulated in Transcription
  misc_feature: MA Experiment 108463 PARAMETER Experiment Name: At_Germinating_Seeds_cDNA_P Parameter: Age (day) Value: 3 vs. 0
  misc_feature: MA Experiment 108463 PARAMETER Experiment Name: At_Germinating_Seeds_cDNA_P Parameter: Tissue Value: Germinating Seeds
  misc_feature: MA Experiment ID: 108464 Result: Down-regulated in Transcription
  misc_feature: MA Experiment 108464 PARAMETER Experiment Name: At_Germinating_Seeds_cDNA_P Parameter: Age (day) Value: 4 vs. 0
  misc_feature: MA Experiment 108464 PARAMETER Experiment Name: At_Germinating_Seeds_cDNA_P Parameter: Tissue Value: Germinating Seeds
  misc_feature: MA Experiment ID: 108576 Result: Up-regulated in Transcription
  misc_feature: MA Experiment 108576 PARAMETER Experiment Name: At_42deg_Heat_cDNA_P Parameter: Temperature (deg C) Value: 42 vs. 22
  misc_feature: MA Experiment 108576 PARAMETER Experiment Name: At_42deg_Heat_cDNA_P Parameter: Timepoint (hr) Value: 1
  misc_feature: MA Experiment 108576 PARAMETER Experiment Name: At_42deg_Heat_cDNA_P Parameter: Tissue Value: Aerial
  misc_feature: MA Experiment ID: 20000111 Result: Up-regulated in Transcription
  misc_feature: MA Experiment 20000111 PARAMETER Experiment Name: At_42deg_Heat_cDNA_P Parameter: Temperature (deg C) Value: 42 vs. 22
  misc_feature: MA Experiment 20000111 PARAMETER Experiment Name: At_42deg_Heat_cDNA_P Parameter: Timepoint (hr) Value: 6
  misc_feature: MA Experiment 20000111 PARAMETER Experiment Name: At_42deg_Heat_cDNA_P Parameter: Tissue Value: Aerial
  misc_feature: MA Experiment ID: 20000180 Result: Down-regulated in Transcription
  misc_feature: MA Experiment 20000180 PARAMETER Experiment Name: At_Germinating_Seeds_P Parameter: Age (hr) Value: 24 vs. 0
  misc_feature: MA Experiment 20000180 PARAMETER Experiment Name: At_Germinating_Seeds_P Parameter: Tissue Value: Germinating Seeds
  misc_feature: MA Experiment ID: 20000264 Result: Up-regulated in Transcription
  misc_feature: MA Experiment 20000264 PARAMETER Experiment Name: At_Open_Flower_P Parameter: Age (day) Value: 21
  misc_feature: MA Experiment 20000264 PARAMETER Experiment Name: At_Open_Flower_P Parameter: Plant Line Value: WS
  misc_feature: MA Experiment 20000264 PARAMETER Experiment Name: At_Open_Flower_P Parameter: Tissue Value: Open Flower vs. Whole Plant
  misc_feature: MA Experiment ID: 20000527 Result: Down-regulated in Transcription
  misc_feature: MA Experiment 20000527 PARAMETER Experiment Name: At_10percent_PEG_P Parameter: Age (day) Value: 20
  misc_feature: MA Experiment 20000527 PARAMETER Experiment Name: At_10percent_PEG_P Parameter: Organism Value: A. thaliana
  misc_feature: MA Experiment 20000527 PARAMETER Experiment Name: At_10percent_PEG_P Parameter: Plant Line Value: WS
  misc_feature: MA Experiment 20000527 PARAMETER Experiment Name: At_10percent_PEG_P Parameter: Timepoint (day) Value: 20
  misc_feature: MA Experiment 20000527 PARAMETER Experiment Name: At_10percent_PEG_P Parameter: Tissue Value: Whole Plant
  misc_feature: MA Experiment 20000527 PARAMETER Experiment Name: At_10percent_PEG_P Parameter: Treatment Value: 10percent PEG vs. No Treatment
  misc_feature: MA Experiment ID: 20000794 Result: Up-regulated in Transcription
  misc_feature: MA Experiment 20000794 PARAMETER Experiment Name: At_Petals_P Parameter: Age (day) Value: 23-25 days
  misc_feature: MA Experiment 20000794 PARAMETER Experiment Name: At_Petals_P Parameter: Plant Line Value: WS
  misc_feature: MA Experiment 20000794 PARAMETER Experiment Name: At_Petals_P Parameter: Tissue Value: Petals vs. Whole plant
  misc_feature: MA Experiment ID: 20001557 Result: Up-regulated in Transcription
  misc_feature: MA Experiment 20001557 PARAMETER Experiment Name: At_Drought_Soil_Dry_P Parameter: Age (day) Value: 27
  misc_feature: MA Experiment 20001557 PARAMETER Experiment Name: At_Drought_Soil_Dry_P Parameter: Organism Value: A. thaliana
  misc_feature: MA Experiment 20001557 PARAMETER Experiment Name: At_Drought_Soil_Dry_P Parameter: Plant Line Value: WS
  misc_feature: MA Experiment 20001557 PARAMETER Experiment Name: At_Drought_Soil_Dry_P Parameter: Post Timepoint (hr) Value: 3
  misc_feature: MA Experiment 20001557 PARAMETER Experiment Name: At_Drought_Soil_Dry_P Parameter: Post-Treatment Value: Re-Water vs. No Drought
  misc_feature: MA Experiment 20001557 PARAMETER Experiment Name: At_Drought_Soil_Dry_P Parameter: Timepoint (day) Value: 13
  misc_feature: MA Experiment 20001557 PARAMETER Experiment Name: At_Drought_Soil_Dry_P Parameter: Treatment Value: Drought vs. No Drought
aattaaccgtcacgagctacatgctctgtatcttcagatttcctaaatacttacaattcccattccaattctgatttggttaatccaaaacaaaaaaaaaggaaactttcttttaccctaaatctataaaaacgaaacccttcttcacaaatctttgttcttcgtaatctctcttaaaagcttttgtttcaatttcaatggagtgggttcgaggagaaacaattgggttcggaaccttctctactgtcagtacagcgacaaagtctagaaactccggcgactttcctgcacttatcgctgtgaagtcgacggatgcttatggcgccgcttcactctccaacgagaaatcggtgttggattcactcggtgattgtcctgagatcatacggtgttacggcgaggattcaacggtggagaacggagaagagatgcataacttgttattagagtacgcttcgagaggaagcttagcgagttacatgaagaaacttggcggtgagggtttaccggagtccaccgtgcgtcgccacacaggatcagtgcttcgagggttacgtcacatccacgctaaagggtttgcacactgcgatataaaactcgcgaatattctgttatttaacgacggctctgttaaaattgccgatttcggtttggcgatgagagttgacggagatttaacggcgttaagaaaaagtgtggagattagagggacgccgttatacatggcaccggaatgtgttaatgataacgagtatggatcagcggctgacgtgtgggctttaggatgtgctgtagttgagatgtttagtggcaaaacggcatggagtgttaaagaaggatcacacttcatgtcgcttttgatacgtataggtgttggtgatgagttaccgaagattccagagatgttgtccgaagaaggcaaggattttttgtcgaagtgttttgttaaagatccagcgaaaagatggacggctgagatgcttttgaaccattcgtttgtaaccattgatcttgaagatgatcaccgagaaaacttcgttgtgaaggttaaggatgaggataaagtattgatgtctccaaagtgtccttttgagtttgatgattgggattcttttacattggattcaaacccctcgtttgattctccggtggagagacttgggagtttggttagtggttcgatccctgattggtctgtcggtgggagttggcttacagtccggtgatgaaagttatatgaaaacagaggaaaaacagtgtgtttggaaggctagggcttttttttagcacctagttagacccattctacgattcttgttcgtattctttaggtgtaattgatttgttaatacaattcattctagtgttcct

SEQ ID NO: 86539 - protein, 342 aa, Arabidopsis thaliana
  peptide (1)..(342): Ceres Seq. ID no. 12691467
  misc_feature (3)..(268): Pfam Name: Protein kinase domain Pfam Description: Protein kinase domain
  misc_feature (1)..(342): Homolog of NCBI NO: 15229715 NR Description: protein kinase -like protein; protein id: supported by cDNA: 253633. [Arabidopsis thaliana]
  misc_feature (1)..(342): Homolog of NCBI NO: 21554379 NR Description: protein kinase-like protein [Arabidopsis thaliana]
  misc_feature (1)..(342): Homolog of NCBI NO: 15240194 NR Description: protein kinase-like protein; protein id:
  misc_feature (1)..(342): Homolog of NCBI NO: 17979279 NR Description: unknown protein [Arabidopsis thaliana]
  misc_feature (1)..(341): Homolog of NCBI NO: 25407778 NR Description: MAP3K-like protein kinase [imported] -
  misc_feature (3)..(342): Homolog of NCBI NO: 15240456 NR Description: putative protein; protein id: At5g55090.1
  misc_feature (1)..(269): Homolog of NCBI NO: 15222311 NR Description: MAP3K gamma protein kinase, putative; protein id: [Arabidopsis thaliana] >gi|25406957|pir||E86206 hypothetical
  misc_feature (1)..(342): Homolog of NCBI NO: 15236903 NR Description: putative NPK1-related protein kinase; protein id:
  misc_feature (1)..(342): Homolog of NCBI NO: 19423926 NR Description: unknown protein [Arabidopsis thaliana]
  misc_feature (1)..(342): Homolog of NCBI NO: 15225692 NR Description: putative protein kinase; protein id: At2g32510.1
MEWVRGETIGFGTFSTVSTATKSRNSGDFPALIAVKSTDAYGAASLSNEKSVLDSLGDCPEIIRCYGEDSTVENGEEMHNLLLEYASRGSLASYMKKLGGEGLPESTVRRHTGSVLRGLRHIHAKGFAHCDIKLANILLFNDGSVKIADFGLAMRVDGDLTALRKSVEIRGTPLYMAPECVNDNEYGSAADVWALGCAVVEMFSGKTAWSVKEGSHFMSLLIRIGVGDELPKIPEMLSEEGKDFLSKCFVKDPAKRWTAEMLLNHSFVTIDLEDDHRENFVVKVKDEDKVLMSPKCPFEFDDWDSFTLDSNPSFDSPVERLGSLVSGSIPDWSVGGSWLTVR

SEQ ID NO: 86540 - protein, 265 aa, Arabidopsis thaliana
  peptide (1)..(265): Ceres Seq. ID no. 12691468
  misc_feature (1)..(191): Pfam Name: Protein kinase domain Pfam Description: Protein kinase domain
  misc_feature (1)..(265): Homolog of NCBI NO: 15229715 NR Description: protein kinase -like protein; protein id: supported by cDNA: 253633. [Arabidopsis thaliana]
  misc_feature (1)..(265): Homolog of NCBI NO: 21554379 NR Description: protein kinase-like protein [Arabidopsis thaliana]
  misc_feature (1)..(265): Homolog of NCBI NO: 15240194 NR Description: protein kinase-like protein; protein id:
  misc_feature (1)..(265): Homolog of NCBI NO: 17979279 NR Description: unknown protein [Arabidopsis thaliana]
  misc_feature (1)..(264): Homolog of NCBI NO: 25407778 NR Description: MAP3K-like protein kinase [imported] -
  misc_feature (1)..(265): Homolog of NCBI NO: 15240456 NR Description: putative protein; protein id: At5g55090.1
  misc_feature (1)..(192): Homolog of NCBI NO: 15222311 NR Description: MAP3K gamma protein kinase, putative; protein id: [Arabidopsis thaliana] >gi|25406957|pir||E86206 hypothetical
  misc_feature (1)..(265): Homolog of NCBI NO: 15236903 NR Description: putative NPK1-related protein kinase; protein id:
  misc_feature (1)..(265): Homolog of NCBI NO: 19423926 NR Description: unknown protein [Arabidopsis thaliana]
  misc_feature (1)..(265): Homolog of NCBI NO: 15225692 NR Description: putative protein kinase; protein id: At2g32510.1
MHNLLLEYASRGSLASYMKKLGGEGLPESTVRRHTGSVLRGLRHIHAKGFAHCDIKLANILLFNDGSVKIADFGLAMRVDGDLTALRKSVEIRGTPLYMAPECVNDNEYGSAADVWALGCAVVEMFSGKTAWSVKEGSHFMSLLIRIGVGDELPKIPEMLSEEGKDFLSKCFVKDPAKRWTAEMLLNHSFVTIDLEDDHRENFVVKVKDEDKVLMSPKCPFEFDDWDSFTLDSNPSFDSPVERLGSLVSGSIPDWSVGGSWLTVR

SEQ ID NO: 86541 - protein, 248 aa, Arabidopsis thaliana
  peptide (1)..(248): Ceres Seq. ID no. 12691469
  misc_feature (1)..(174): Pfam Name: Protein kinase domain Pfam Description: Protein kinase domain
  misc_feature (1)..(248): Homolog of NCBI NO: 15229715 NR Description: protein kinase -like protein; protein id: supported by cDNA: 253633. [Arabidopsis thaliana]
  misc_feature (1)..(248): Homolog of NCBI NO: 21554379 NR Description: protein kinase-like protein [Arabidopsis thaliana]
  misc_feature (1)..(248): Homolog of NCBI NO: 15240194 NR Description: protein kinase-like protein; protein id:
  misc_feature (1)..(248): Homolog of NCBI NO: 17979279 NR Description: unknown protein [Arabidopsis thaliana]
  misc_feature (1)..(247): Homolog of NCBI NO: 25407778 NR Description: MAP3K-like protein kinase [imported] -
  misc_feature (1)..(248): Homolog of NCBI NO: 15240456 NR Description: putative protein; protein id: At5g55090.1
  misc_feature (1)..(175): Homolog of NCBI NO: 15222311 NR Description: MAP3K gamma protein kinase, putative; protein id: [Arabidopsis thaliana] >gi|25406957|pir||E86206 hypothetical
  misc_feature (1)..(248): Homolog of NCBI NO: 15236903 NR Description: putative NPK1-related protein kinase; protein id:
  misc_feature (1)..(248): Homolog of NCBI NO: 19423926 NR Description: unknown protein [Arabidopsis thaliana]
  misc_feature (1)..(248): Homolog of NCBI NO: 15225692 NR Description: putative protein kinase; protein id: At2g32510.1
MKKLGGEGLPESTVRRHTGSVLRGLRHIHAKGFAHCDIKLANILLFNDGSVKIADFGLAMRVDGDLTALRKSVEIRGTPLYMAPECVNDNEYGSAADVWALGCAVVEMFSGKTAWSVKEGSHFMSLLIRIGVGDELPKIPEMLSEEGKDFLSKCFVKDPAKRWTAEMLLNHSFVTIDLEDDHRENFVVKVKDEDKVLMSPKCPFEFDDWDSFTLDSNPSFDSPVERLGSLVSGSIPDWSVGGSWLTVR

SEQ ID NO: 86542 - DNA, 2124 bp, Arabidopsis thaliana
  misc_feature (1)..(2124): Ceres Seq. ID no. 12691487
  misc_feature: MA Experiment ID: 20001247 Result: Down-regulated in Transcription
  misc_feature: MA Experiment 20001247 PARAMETER Experiment Name: At_Far-red-induction_P Parameter: Age (day) Value: 7
  misc_feature: MA Experiment 20001247 PARAMETER Experiment Name: At_Far-red-induction_P Parameter: Light Value: Far-red vs. White
  misc_feature: MA Experiment 20001247 PARAMETER Experiment Name: At_Far-red-induction_P Parameter: Organism Value: A. thaliana
  misc_feature: MA Experiment 20001247 PARAMETER Experiment Name: At_Far-red-induction_P Parameter: Plant Line Value: Columbia
  misc_feature: MA Experiment 20001247 PARAMETER Experiment Name: At_Far-red-induction_P Parameter: Timepoint (hr) Value: 1
  misc_feature: MA Experiment 20001247 PARAMETER Experiment Name: At_Far-red-induction_P Parameter: Tissue Value: Whole Plant
atgccactgaacgaaatagcttcttccgttgtagaacttacacggaaatgcgtctcgatcacggtactaaaacgggcgcgtcagatccacgctctcgtcctcaccgccggcgctggcgccgctaccgagtctccgtacgcaaataacaatctcatctcaatgtatgtgaggtgtggttcactggaacaagcacggaaagtgttcgacaaaatgcctcacagaaacgtagtttcttataatgcgctttattcggcgtattcccggaacccagattttgcaagttatgcgtttcctctaacaacccatatggcgtttgagtacgtgaagcccaatagttcaactttcactagcttagtgcaagtatgtgctgtgcttgaggatgttttaatggggtcatcattaaactcgcagattataaagcttggttattcagataatgtagttgtccagacatcggttttggggatgtactctagttgcggggacttagaatctgcgaggagaatatttgactgtgtaaataatagagatgcggttgcttggaacacaatgatagttgggagtttgaaaaatgataagatagaagatgggcttatgttctttcgaaacatgttgatgtctggtgttgatccaacgcagttcacgtattcgattgtgttgaatggttgtagtaaattgggaagctattcactggggaaactaatccatgcccggataatagtctctgatagtttagctgatttacctctagataatgctcttcttgacatgtattgcagttgtggagacatgagggaagcattttatgtgtttgggaggattcataacccaaatttggtttcatggaactcgattatttcagggtgctcagaaaacggctttggagagcaagcgatgcttatgtatagaaggttgctgaggatgtccacacctcggccggatgaatatactttctctgctgctatatctgcgacagcggaaccagaaagatttgttcatgggaagcttcttcacggacaagtaacgaaattaggatatgaaaggagtgtttttgttggaacaacactattgtcgatgtacttcaagaacagggaagctgaatctgcacagaaggtgtttgatgtgatgaaggaaagggatgttgttctctggactgagatgatcgtagggcattctagattaggaaacagcgaattagcggtccaattcttcattgaaatgtacagagaaaagaatagaagtgatggtttttccctgagtagtgtcataggagcatgttcagatatggcaatgctaagacaaggtgaagttttccattgtcttgccataaggacgggattcgattgtgttatgtcagtatgtggagcgctagtagacatgtatgggaaaaacggtaaatacgaaactgcagaaacaatattctctcttgcttcaaatccagatttgaaatgttggaattcgatgctaggtgcttatagtcagcatggaatggtagaaaaagctctgagcttcttcgagcaaatactagaaaacggattcatgccagatgctgttacatacttgtctttattagcagcctgtagccacaggggatcaacgttgcaaggtaagttcctatggaaccaaatgaaggaacagggcatcaaagcagggtttaagcactactcttgcatggtgaatttagtatcaaaagctgggttagtagacgaggcactggaactgatagaacaatctcctcccgggaacaaccaagcagagctctggagaactctgctaagcgcatgtgttaacacaagaaacttgcagataggactatatgcagctgagcaaatactgaaacttgatccagaagacactgcaacacacattctactatcaaatttatatgcagtaaatgggagatgggaggatgttgcagagatgagaaggaagattagaggattagcttcatctaaagatccaggattgagctggattgaagtgaacaacaacaatacacaagttttctcctcaggagaccagtcgaacccagaagttgtaagtcaagctcaagatgaattaaatagattaaagagaaatatgttgtgcaaatcatcattcaataaacttgtctgttcaaattaa

SEQ ID NO: 86543 - protein, 707 aa, Arabidopsis thaliana
  peptide (1)..(707): Ceres Seq. ID no. 12691488
  misc_feature (483)..(517): Pfam Name: PPR repeat Pfam Description: PPR repeat
  misc_feature (3)..(700): Homolog of NCBI NO: 32488730 NR Description: OSJNBb0004A17.9 [Oryza sativa (japonica
  misc_feature (1)..(689): Homolog of NCBI NO: 15236324 NR Description: putative protein; protein id: At4g13650.1
  misc_feature (5)..(691): Homolog of NCBI NO: 15226200 NR Description: putative selenium-binding protein; protein id:
  misc_feature (23)..(695): Homolog of NCBI NO: 15226150 NR Description: hypothetical protein; protein id: At2g33680.1
  misc_feature (29)..(679): Homolog of NCBI NO: 15232006 NR Description: hypothetical protein; protein id: At3g09040.1 thaliana] >gi|5923669|gb|AAD56320.1|AC009326_7 hypothetical
  misc_feature (10)..(705): Homolog of NCBI NO: 38423978 NR Description: PPR-repeat protein-like [Oryza sativa (japonica
  misc_feature (17)..(691): Homolog of NCBI NO: 34896392 NR Description: hypothetical protein [Oryza sativa (japonica group)] >gi|19697432|gb|AAL93067.1| hypothetical protein [Oryza
  misc_feature (13)..(679): Homolog of NCBI NO: 15240583 NR Description: putative protein; protein id: At5g13230.1
  misc_feature (4)..(700): Homolog of NCBI NO: 34915012 NR Description: P0458A05.10 [Oryza sativa (japonica
  misc_feature (11)..(678): Homolog of NCBI NO: 15218216 NR Description: hypothetical protein; protein id: At1g15510.1
MPLNEIASSVVELTRKCVSITVLKRARQIHALVLTAGAGAATESPYANNNLISMYVRCGSLEQARKVFDKMPHRNVVSYNALYSAYSRNPDFASYAFPLTTHMAFEYVKPNSSTFTSLVQVCAVLEDVLMGSSLNSQIIKLGYSDNVVVQTSVLGMYSSCGDLESARRIFDCVNNRDAVAWNTMIVGSLKNDKIEDGLMFFRNMLMSGVDPTQFTYSIVLNGCSKLGSYSLGKLIHARIIVSDSLADLPLDNALLDMYCSCGDMREAFYVFGRIHNPNLVSWNSIISGCSENGFGEQAMLMYRRLLRMSTPRPDEYTFSAAISATAEPERFVHGKLLHGQVTKLGYERSVFVGTTLLSMYFKNREAESAQKVFDVMKERDVVLWTEMIVGHSRLGNSELAVQFFIEMYREKNRSDGFSLSSVIGACSDMAMLRQGEVFHCLAIRTGFDCVMSVCGALVDMYGKNGKYETAETIFSLASNPDLKCWNSMLGAYSQHGMVEKALSFFEQILENGFMPDAVTYLSLLAACSHRGSTLQGKFLWNQMKEQGIKAGFKHYSCMVNLVSKAGLVDEALELIEQSPPGNNQAELWRTLLSACVNTRNLQIGLYAAEQILKLDPEDTATHILLSNLYAVNGRWEDVAEMRRKIRGLASSKDPGLSWIEVNNNNTQVFSSGDQSNPEVVSQAQDELNRLKRNMLCKSSFNKLVCSN

SEQ ID NO: 86544 - protein, 654 aa, Arabidopsis thaliana
  peptide (1)..(654): Ceres Seq. ID no. 12691489
  misc_feature (430)..(464): Pfam Name: PPR repeat Pfam Description: PPR repeat
  misc_feature (1)..(647): Homolog of NCBI NO: 32488730 NR Description: OSJNBb0004A17.9 [Oryza sativa (japonica
  misc_feature (1)..(636): Homolog of NCBI NO: 15236324 NR Description: putative protein; protein id: At4g13650.1
  misc_feature (1)..(638): Homolog of NCBI NO: 15226200 NR Description: putative selenium-binding protein; protein id:
  misc_feature (1)..(642): Homolog of NCBI NO: 15226150 NR Description: hypothetical protein; protein id: At2g33680.1
  misc_feature (1)..(626): Homolog of NCBI NO: 15232006 NR Description: hypothetical protein; protein id: At3g09040.1 thaliana] >gi|5923669|gb|AAD56320.1|AC009326_7 hypothetical
  misc_feature (1)..(652): Homolog of NCBI NO: 38423978 NR Description: PPR-repeat protein-like [Oryza sativa (japonica
  misc_feature (1)..(638): Homolog of NCBI NO: 34896392 NR Description: hypothetical protein [Oryza sativa (japonica group)] >gi|19697432|gb|AAL93067.1| hypothetical protein [Oryza
  misc_feature (1)..(626): Homolog of NCBI NO: 15240583 NR Description: putative protein; protein id: At5g13230.1
  misc_feature (1)..(647): Homolog of NCBI NO: 34915012 NR Description: P0458A05.10 [Oryza sativa (japonica
  misc_feature (1)..(625): Homolog of NCBI NO: 15218216 NR Description: hypothetical protein; protein id: At1g15510.1
MYVRCGSLEQARKVFDKMPHRNVVSYNALYSAYSRNPDFASYAFPLTTHMAFEYVKPNSSTFTSLVQVCAVLEDVLMGSSLNSQIIKLGYSDNVVVQTSVLGMYSSCGDLESARRIFDCVNNRDAVAWNTMIVGSLKNDKIEDGLMFFRNMLMSGVDPTQFTYSIVLNGCSKLGSYSLGKLIHARIIVSDSLADLPLDNALLDMYCSCGDMREAFYVFGRIHNPNLVSWNSIISGCSENGFGEQAMLMYRRLLRMSTPRPDEYTFSAAISATAEPERFVHGKLLHGQVTKLGYERSVFVGTTLLSMYFKNREAESAQKVFDVMKERDVVLWTEMIVGHSRLGNSELAVQFFIEMYREKNRSDGFSLSSVIGACSDMAMLRQGEVFHCLAIRTGFDCVMSVCGALVDMYGKNGKYETAETIFSLASNPDLKCWNSMLGAYSQHGMVEKALSFFEQILENGFMPDAVTYLSLLAACSHRGSTLQGKFLWNQMKEQGIKAGFKHYSCMVNLVSKAGLVDEALELIEQSPPGNNQAELWRTLLSACVNTRNLQIGLYAAEQILKLDPEDTATHILLSNLYAVNGRWEDVAEMRRKIRGLASSKDPGLSWIEVNNNNTQVFSSGDQSNPEVVSQAQDELNRLKRNMLCKSSFNKLVCSN

SEQ ID NO: 86545 - protein, 637 aa, Arabidopsis thaliana
  peptide (1)..(637): Ceres Seq. ID no. 12691490
  misc_feature (413)..(447): Pfam Name: PPR repeat Pfam Description: PPR repeat
  misc_feature (1)..(630): Homolog of NCBI NO: 32488730 NR Description: OSJNBb0004A17.9 [Oryza sativa (japonica
  misc_feature (1)..(619): Homolog of NCBI NO: 15236324 NR Description: putative protein; protein id: At4g13650.1
  misc_feature (1)..(621): Homolog of NCBI NO: 15226200 NR Description: putative selenium-binding protein; protein id:
  misc_feature (1)..(625): Homolog of NCBI NO: 15226150 NR Description: hypothetical protein; protein id: At2g33680.1
  misc_feature (1)..(609): Homolog of NCBI NO: 15232006 NR Description: hypothetical protein; protein id: At3g09040.1 thaliana] >gi|5923669|gb|AAD56320.1|AC009326_7 hypothetical
  misc_feature (1)..(635): Homolog of NCBI NO: 38423978 NR Description: PPR-repeat protein-like [Oryza sativa (japonica
  misc_feature (1)..(621): Homolog of NCBI NO: 34896392 NR Description: hypothetical protein [Oryza sativa (japonica group)] >gi|19697432|gb|AAL93067.1| hypothetical protein [Oryza
  misc_feature (1)..(609): Homolog of NCBI NO: 15240583 NR Description: putative protein; protein id: At5g13230.1
  misc_feature (1)..(630): Homolog of NCBI NO: 34915012 NR Description: P0458A05.10 [Oryza sativa (japonica
  misc_feature (1)..(608): Homolog of NCBI NO: 15218216 NR Description: hypothetical protein; protein id: At1g15510.1
MPHRNVVSYNALYSAYSRNPDFASYAFPLTTHMAFEYVKPNSSTFTSLVQVCAVLEDVLMGSSLNSQIIKLGYSDNVVVQTSVLGMYSSCGDLESARRIFDCVNNRDAVAWNTMIVGSLKNDKIEDGLMFFRNMLMSGVDPTQFTYSIVLNGCSKLGSYSLGKLIHARIIVSDSLADLPLDNALLDMYCSCGDMREAFYVFGRIHNPNLVSWNSIISGCSENGFGEQAMLMYRRLLRMSTPRPDEYTFSAAISATAEPERFVHGKLLHGQVTKLGYERSVFVGTTLLSMYFKNREAESAQKVFDVMKERDVVLWTEMIVGHSRLGNSELAVQFFIEMYREKNRSDGFSLSSVIGACSDMAMLRQGEVFHCLAIRTGFDCVMSVCGALVDMYGKNGKYETAETIFSLASNPDLKCWNSMLGAYSQHGMVEKALSFFEQILENGFMPDAVTYLSLLAACSHRGSTLQGKFLWNQMKEQGIKAGFKHYSCMVNLVSKAGLVDEALELIEQSPPGNNQAELWRTLLSACVNTRNLQIGLYAAEQILKLDPEDTATHILLSNLYAVNGRWEDVAEMRRKIRGLASSKDPGLSWIEVNNNNTQVFSSGDQSNPEVVSQAQDELNRLKRNMLCKSSFNKLVCSN

SEQ ID NO: 86546 - DNA, 2040 bp, Arabidopsis thaliana
  misc_feature (1)..(2040): Ceres Seq. ID no. 12691491
atggctaccggaaacttggcttctcgtcttcatctcttgatcgatctttgtgttcgccaattccctgaaagagaagaagtaactttgccgacgaaggaaacggaaaaagatctgcttctttctctatctcaggtgttgagagaaattcaatcttggaggagcgaaatttcatgtgataaggcggtggaatcgcgagaggagactgttgttgatcatgatgaatctgctgatgctttatatggtccagactctatagagtatttatgcttagaaagacttgtggcggatcttgtttgtttgttgggtatggagaatgtgcatgttaaacatttggctggcaacatacttgtggaagtatccggttgtcttgttgaatctggaagtcaatgggatgagttcattcgtttgctttgtgaatgtttgcggttagcagttatctacagtttcccaattcctgctgtaggatctgaaactggatttggaagtctagatcaatgtttcttcggttctgatgttcttaaatgtaagctggaaaaggctaactggtccacggtgtcggatatctttcgagttcttcgtaatatattgaagcgcttgagccaagaagacaatgaggaaatttttgatgtatacttggaatctgtcaactctacacttgcaaaagttccttggtgccgattggatactattttttctcatcagcatggtagtggtgaaagaaatttccaaggtcagagtggaaacagtgaggaagcaactgtatttcttgggagctttgtccagtttctctgttccatggttcagcaggttcatgttgtagaagattctgatgattttgaaccttcatatttgatcctccaaaaaaccatcaagcttattccggatctcctccgttggtgccaaccaaagttgaaaagtcaaagtggctcttgcatgtcaagatacctagggcacaagttactggtgttgatgatcaggcttactgataagtccaaaatcaaatgtaccattcttctttcatggctgcaatatttgcaacgggattctcaaggctttcttcaacacaccctaacaaagtttaaacccgttcaagataattgtttggagggttcgccattctttgtgagtttgtctgatagggaggtcaatgagatgcattctaatcatttgcaaagactctctgtgtttctgttcctacggtgctccttcactttgatttactcaagtagacataacgacaagctatgtgagtttgattgtagaaagaaagggatggcagagatgtttaaatggattgaacgacagattccaggcaatatgttttctgatcacagaatttatagcaagaagaatgttgaattttctgcatccttcgttcggctgttcatgcatgaggatgatctattatttaaagtcctcctgcaattgctgtctgtaccattgcatagacaggaattgcctaacgtggaagggggttcgcttgaagatgaggaacaaattactctcttccgtttatcaaccttgttcaatcctctgcattatgatcatcaagtacttcttgattaccttatatctaaagatattggggctagctgcgcagagtacctgctgagatgcttgcgtgcagtatgtgattcatggactctatttgtggaattcccatttgaaggaagtacagatgctccatctccgaagagaagaaaagttttgcctgagacttctgaggttgaacaaaactggagattacatgcccaggcttttgaagacgccaaagattgtctgctttcgttacaaaattcagttgttaagctacatcagaagaaactgtttccatacaacccagaggctcttctacgacgctctgtctatcccatgagtaatatatctggaccaaagcaaaatgttgtgatccttagtttgtgggttgcggtgagattctctgagacagaacagaaggatcagatgccaacacaaagaagtctcctttccagatcaaatttcaaactaatcggctcaccagtagaagtgtatctgctatga

SEQ ID NO: 86547 - protein, 679 aa, Arabidopsis thaliana
  peptide (1)..(679): Ceres Seq. ID no. 12691492
  misc_feature (87)..(376): Homolog of NCBI NO: 34915430 NR Description: hypothetical protein~similar to Arabidopsis
  misc_feature (441)..(619): Homolog of NCBI NO: 34915430 NR Description: hypothetical protein~similar to Arabidopsis
  misc_feature (98)..(527): Homolog of NCBI NO: 33146559 NR Description: unknown protein [Oryza sativa (japonica
  misc_feature (416)..(619): Homolog of NCBI NO: 33146559 NR Description: unknown protein [Oryza sativa (japonica
MATGNLASRLHLLIDLCVRQFPEREEVTLPTKETEKDLLLSLSQVLREIQSWRSEISCDKAVESREETVVDHDESADALYGPDSIEYLCLERLVADLVCLLGMENVHVKHLAGNILVEVSGCLVESGSQWDEFIRLLCECLRLAVIYSFPIPAVGSETGFGSLDQCFFGSDVLKCKLEKANWSTVSDIFRVLRNILKRLSQEDNEEIFDVYLESVNSTLAKVPWCRLDTIFSHQHGSGERNFQGQSGNSEEATVFLGSFVQFLCSMVQQVHVVEDSDDFEPSYLILQKTIKLIPDLLRWCQPKLKSQSGSCMSRYLGHKLLVLMIRLTDKSKIKCTILLSWLQYLQRDSQGFLQHTLTKFKPVQDNCLEGSPFFVSLSDREVNEMHSNHLQRLSVFLFLRCSFTLIYSSRHNDKLCEFDCRKKGMAEMFKWIERQIPGNMFSDHRIYSKKNVEFSASFVRLFMHEDDLLFKVLLQLLSVPLHRQELPNVEGGSLEDEEQITLFRLSTLFNPLHYDHQVLLDYLISKDIGASCAEYLLRCLRAVCDSWTLFVEFPFEGSTDAPSPKRRKVLPETSEVEQNWRLHAQAFEDAKDCLLSLQNSVVKLHQKKLFPYNPEALLRRSVYPMSNISGPKQNVVILSLWVAVRFSETEQKDQMPTQRSLLSRSNFKLIGSPVEVYLL

SEQ ID NO: 86548 - protein, 577 aa, Arabidopsis thaliana
  peptide (1)..(577): Ceres Seq. ID no. 12691493
  misc_feature (1)..(274): Homolog of NCBI NO: 34915430 NR Description: hypothetical protein~similar to Arabidopsis
  misc_feature (339)..(517): Homolog of NCBI NO: 34915430 NR Description: hypothetical protein~similar to Arabidopsis
  misc_feature (1)..(425): Homolog of NCBI NO: 33146559 NR Description: unknown protein [Oryza sativa (japonica
  misc_feature (314)..(517): Homolog of NCBI NO: 33146559 NR Description: unknown protein [Oryza sativa (japonica
MENVHVKHLAGNILVEVSGCLVESGSQWDEFIRLLCECLRLAVIYSFPIPAVGSETGFGSLDQCFFGSDVLKCKLEKANWSTVSDIFRVLRNILKRLSQEDNEEIFDVYLESVNSTLAKVPWCRLDTIFSHQHGSGERNFQGQSGNSEEATVFLGSFVQFLCSMVQQVHVVEDSDDFEPSYLILQKTIKLIPDLLRWCQPKLKSQSGSCMSRYLGHKLLVLMIRLTDKSKIKCTILLSWLQYLQRDSQGFLQHTLTKFKPVQDNCLEGSPFFVSLSDREVNEMHSNHLQRLSVFLFLRCSFTLIYSSRHNDKLCEFDCRKKGMAEMFKWIERQIPGNMFSDHRIYSKKNVEFSASFVRLFMHEDDLLFKVLLQLLSVPLHRQELPNVEGGSLEDEEQITLFRLSTLFNPLHYDHQVLLDYLISKDIGASCAEYLLRCLRAVCDSWTLFVEFPFEGSTDAPSPKRRKVLPETSEVEQNWRLHAQAFEDAKDCLLSLQNSVVKLHQKKLFPYNPEALLRRSVYPMSNISGPKQNVVILSLWVAVRFSETEQKDQMPTQRSLLSRSNFKLIGSPVEVYLL

SEQ ID NO: 86549 - protein, 414 aa, Arabidopsis thaliana
  peptide (1)..(414): Ceres Seq. ID no. 12691494
  misc_feature (1)..(111): Homolog of NCBI NO: 34915430 NR Description: hypothetical protein~similar to Arabidopsis
  misc_feature (176)..(354): Homolog of NCBI NO: 34915430 NR Description: hypothetical protein~similar to Arabidopsis
  misc_feature (1)..(262): Homolog of NCBI NO: 33146559 NR Description: unknown protein [Oryza sativa (japonica
  misc_feature (151)..(354): Homolog of NCBI NO: 33146559 NR Description: unknown protein [Oryza sativa (japonica
MVQQVHVVEDSDDFEPSYLILQKTIKLIPDLLRWCQPKLKSQSGSCMSRYLGHKLLVLMIRLTDKSKIKCTILLSWLQYLQRDSQGFLQHTLTKFKPVQDNCLEGSPFFVSLSDREVNEMHSNHLQRLSVFLFLRCSFTLIYSSRHNDKLCEFDCRKKGMAEMFKWIERQIPGNMFSDHRIYSKKNVEFSASFVRLFMHEDDLLFKVLLQLLSVPLHRQELPNVEGGSLEDEEQITLFRLSTLFNPLHYDHQVLLDYLISKDIGASCAEYLLRCLRAVCDSWTLFVEFPFEGSTDAPSPKRRKVLPETSEVEQNWRLHAQAFEDAKDCLLSLQNSVVKLHQKKLFPYNPEALLRRSVYPMSNISGPKQNVVILSLWVAVRFSETEQKDQMPTQRSLLSRSNFKLIGSPVEVYLL

SEQ ID NO: 86550 - DNA, 908 bp, Arabidopsis thaliana
  misc_feature (1)..(908): Ceres Seq. ID no. 12691495
  misc_feature: MA Experiment ID: 108434 Result: Down-regulated in Transcription
  misc_feature: MA Experiment 108434 PARAMETER Experiment Name: At_Root_Tips_cDNA_P Parameter: Tissue Value: Root Tips
  misc_feature: MA Experiment ID: 108435 Result: Up-regulated in Transcription
  misc_feature: MA Experiment 108435 PARAMETER Experiment Name: At_stm_Mutants_cDNA_P Parameter: Plant Line Value: wt Landsburg vs stm
  misc_feature: MA Experiment 108435 PARAMETER Experiment Name: At_stm_Mutants_cDNA_P Parameter: Tissue Value: Shoot Apical Meristem Region
  misc_feature: MA Experiment ID: 108463 Result: Up-regulated in Transcription
  misc_feature: MA Experiment 108463 PARAMETER Experiment Name: At_Germinating_Seeds_cDNA_P Parameter: Age (day) Value: 3 vs. 0
  misc_feature: MA Experiment 108463 PARAMETER Experiment Name: At_Germinating_Seeds_cDNA_P Parameter: Tissue Value: Germinating Seeds
  misc_feature: MA Experiment ID: 108501 Result: Down-regulated in Transcription
  misc_feature: MA Experiment 108501 PARAMETER Experiment Name: At_ap2_floral_buds_cDNA_P Parameter: Plant Line Value: ap2 (Ler.)
  misc_feature: MA Experiment 108501 PARAMETER Experiment Name: At_ap2_floral_buds_cDNA_P Parameter: Tissue Value: Closed Flower
  misc_feature: MA Experiment ID: 108577 Result: Down-regulated in Transcription
  misc_feature: MA Experiment 108577 PARAMETER Experiment Name: At_42deg_Heat_cDNA_P Parameter: Temperature (deg C) Value: 42 vs. 22
  misc_feature: MA Experiment 108577 PARAMETER Experiment Name: At_42deg_Heat_cDNA_P Parameter: Timepoint (hr) Value: 6
  misc_feature: MA Experiment 108577 PARAMETER Experiment Name: At_42deg_Heat_cDNA_P Parameter: Tissue Value: Aerial
  misc_feature: MA Experiment ID: 108579 Result: Down-regulated in Transcription
  misc_feature: MA Experiment 108579 PARAMETER Experiment Name: At_4deg_Cold_cDNA_P Parameter: Temperature (deg C) Value: 4 vs. 22
  misc_feature: MA Experiment 108579 PARAMETER Experiment Name: At_4deg_Cold_cDNA_P Parameter: Timepoint (hr) Value: 6
  misc_feature: MA Experiment 108579 PARAMETER Experiment Name: At_4deg_Cold_cDNA_P Parameter: Tissue Value: Aerial
  misc_feature: MA Experiment ID: 108585 Result: Down-regulated in Transcription
  misc_feature: MA Experiment 108585 PARAMETER Experiment Name: At_5mM_NaNP_cDNA_P Parameter: Timepoint (hr) Value: 6
  misc_feature: MA Experiment 108585 PARAMETER Experiment Name: At_5mM_NaNP_cDNA_P Parameter: Tissue Value: Aerial
  misc_feature: MA Experiment 108585 PARAMETER Experiment Name: At_5mM_NaNP_cDNA_P Parameter: Treatment Value: null
  misc_feature: MA Experiment ID: 108609 Result: Up-regulated in Transcription
  misc_feature: MA Experiment 108609 PARAMETER Experiment Name: At_100uM_ABA_cDNA_P Parameter: Timepoint (hr) Value: 24
  misc_feature: MA Experiment 108609 PARAMETER Experiment Name: At_100uM_ABA_cDNA_P Parameter: Tissue Value: Aerial
  misc_feature: MA Experiment 108609 PARAMETER Experiment Name: At_100uM_ABA_cDNA_P Parameter: Treatment Value: 100uM ABA vs. No Treatment
  misc_feature: MA Experiment ID: 20000068 Result: Up-regulated in Transcription
  misc_feature: MA Experiment ID: 20000069 Result: Up-regulated in Transcription
  misc_feature: MA Experiment 20000069 PARAMETER Experiment Name: At_100uM_ABA_Mutants_cDNA_P Parameter: Plant Line Value: CS23
  misc_feature: MA Experiment 20000069 PARAMETER Experiment Name: At_100uM_ABA_Mutants_cDNA_P Parameter: Timepoint (hr) Value: 6
  misc_feature: MA Experiment 20000069 PARAMETER Experiment Name: At_100uM_ABA_Mutants_cDNA_P Parameter: Tissue Value: Aerial
  misc_feature: MA Experiment 20000069 PARAMETER Experiment Name: At_100uM_ABA_Mutants_cDNA_P Parameter: Treatment Value: 100uM ABA vs. No Treatment
  misc_feature: MA Experiment ID: 20000071 Result: Up-regulated in Transcription
  misc_feature: MA Experiment 20000071 PARAMETER Experiment Name: At_100uM_ABA_Mutants_cDNA_P Parameter: Plant Line Value: CS8104
  misc_feature: MA Experiment 20000071 PARAMETER Experiment Name: At_100uM_ABA_Mutants_cDNA_P Parameter: Timepoint (hr) Value: 6
  misc_feature: MA Experiment 20000071 PARAMETER Experiment Name: At_100uM_ABA_Mutants_cDNA_P Parameter: Tissue Value: Aerial
  misc_feature: MA Experiment 20000071 PARAMETER Experiment Name: At_100uM_ABA_Mutants_cDNA_P Parameter: Treatment Value: 100uM ABA vs. No Treatment
  misc_feature: MA Experiment ID: 20000117 Result: Up-regulated in Transcription
  misc_feature: MA Experiment 20000117 PARAMETER Experiment Name: At_100uM_ABA_Mutants_cDNA_P Parameter: Plant Line Value: Columbia
  misc_feature: MA Experiment 20000117 PARAMETER Experiment Name: At_100uM_ABA_Mutants_cDNA_P Parameter: Timepoint (hr) Value: 6
  misc_feature: MA Experiment 20000117 PARAMETER Experiment Name: At_100uM_ABA_Mutants_cDNA_P Parameter: Tissue Value: Aerial
  misc_feature: MA Experiment 20000117 PARAMETER Experiment Name: At_100uM_ABA_Mutants_cDNA_P Parameter: Treatment Value: 100uM ABA vs. No Treatment
  misc_feature: MA Experiment ID: 20000179 Result: Up-regulated in Transcription
  misc_feature: MA Experiment 20000179 PARAMETER Experiment Name: At_Germinating_Seeds_P Parameter: Age (hr) Value: 6 vs. 0
  misc_feature: MA Experiment 20000179 PARAMETER Experiment Name: At_Germinating_Seeds_P Parameter: Tissue Value: Germinating Seeds
  misc_feature: MA Experiment ID: 20000180 Result: Up-regulated in Transcription
  misc_feature: MA Experiment 20000180 PARAMETER Experiment Name: At_Germinating_Seeds_P Parameter: Age (hr) Value: 24 vs. 0
  misc_feature: MA Experiment 20000180 PARAMETER Experiment Name: At_Germinating_Seeds_P Parameter: Tissue Value: Germinating Seeds
  misc_feature: MA Experiment ID: 20000185 Result: Down-regulated in Transcription
  misc_feature: MA Experiment 20000185 PARAMETER Experiment Name: At_Roots__P Parameter: Age (day) Value: 7 vs. 21
  misc_feature: MA Experiment 20000185 PARAMETER Experiment Name: At_Roots__P Parameter: Organism Value: A. thaliana
  misc_feature: MA Experiment 20000185 PARAMETER Experiment Name: At_Roots__P Parameter: Tissue Value: Roots vs. Whole Plant
  misc_feature: MA Experiment ID: 20000224 Result: Up-regulated in Transcription
  misc_feature: MA Experiment ID: 20000264 Result: Down-regulated in Transcription
  misc_feature: MA Experiment 20000264 PARAMETER Experiment Name: At_Open_Flower_P Parameter: Age (day) Value: 21
  misc_feature: MA Experiment 20000264 PARAMETER Experiment Name: At_Open_Flower_P Parameter: Plant Line Value: WS
  misc_feature: MA Experiment 20000264 PARAMETER Experiment Name: At_Open_Flower_P Parameter: Tissue Value: Open Flower vs. Whole Plant
  misc_feature: MA Experiment ID: 20000438 Result: Up-regulated in Transcription
  misc_feature: MA Experiment 20000438 PARAMETER Experiment Name: At_Shoots__P Parameter: Age (day) Value: 14
  misc_feature: MA Experiment 20000438 PARAMETER Experiment Name: At_Shoots__P Parameter: Tissue Value: Shoots vs. Whole Plant
  misc_feature: MA Experiment ID: 20000439 Result: Down-regulated in Transcription
  misc_feature: MA Experiment 20000439 PARAMETER Experiment Name: At_Roots__P Parameter: Age (day) Value: 14 vs. 21
  misc_feature: MA Experiment 20000439 PARAMETER Experiment Name: At_Roots__P Parameter: Organism Value: A. thaliana
  misc_feature: MA Experiment 20000439 PARAMETER Experiment Name: At_Roots__P Parameter: Tissue Value: Roots vs. Whole Plant
  misc_feature: MA Experiment ID: 20000445 Result: Down-regulated in Transcription
  misc_feature: MA Experiment 20000445 PARAMETER Experiment Name: At_100uM_NAA__P Parameter: Age (day) Value: 14
  misc_feature: MA Experiment 20000445 PARAMETER Experiment Name: At_100uM_NAA__P Parameter: Organism Value: A. thaliana
  misc_feature: MA Experiment 20000445 PARAMETER Experiment Name: At_100uM_NAA__P Parameter: Plant Line Value: WS
  misc_feature: MA Experiment 20000445 PARAMETER Experiment Name: At_100uM_NAA__P Parameter: Timepoint (hr) Value: 6
  misc_feature: MA Experiment 20000445 PARAMETER Experiment Name: At_100uM_NAA__P Parameter: Tissue Value: Aerial
  misc_feature: MA Experiment 20000445 PARAMETER Experiment Name: At_100uM_NAA__P Parameter: Treatment Value: 100uM NAA vs. No Treatment
  misc_feature: MA Experiment ID: 20000453 Result: Up-regulated in Transcription
  misc_feature: MA Experiment 20000453 PARAMETER Experiment Name: At_100uM_ABA_P Parameter: Age (day) Value: 15
  misc_feature: MA Experiment 20000453 PARAMETER Experiment Name: At_100uM_ABA_P Parameter: Organism Value: A. thaliana
  misc_feature: MA Experiment 20000453 PARAMETER Experiment Name: At_100uM_ABA_P Parameter: Plant Line Value: WS
  misc_feature: MA Experiment 20000453 PARAMETER Experiment Name: At_100uM_ABA_P Parameter: Timepoint (hr) Value: 24
  misc_feature: MA Experiment 20000453 PARAMETER Experiment Name: At_100uM_ABA_P Parameter: Tissue Value: Aerial
  misc_feature: MA Experiment 20000453 PARAMETER Experiment Name: At_100uM_ABA_P Parameter: Treatment Value: 100uM ABA vs. No Treatment
  misc_feature: MA Experiment ID: 20000573 Result: Down-regulated in Transcription
  misc_feature: MA Experiment 20000573 PARAMETER Experiment Name: At_100uM_ABA_Mutants__P Parameter: Organism Value: A. thaliana
  misc_feature: MA Experiment 20000573 PARAMETER Experiment Name: At_100uM_ABA_Mutants__P Parameter: Plant Line Value: CS22 vs. Ler wt
  misc_feature: MA Experiment 20000573 PARAMETER Experiment Name: At_100uM_ABA_Mutants__P Parameter: Timepoint (hr) Value: N/A
  misc_feature: MA Experiment 20000573 PARAMETER Experiment Name: At_100uM_ABA_Mutants__P Parameter: Tissue Value: Whole Plant
  misc_feature: MA Experiment 20000573 PARAMETER Experiment Name: At_100uM_ABA_Mutants__P Parameter: Treatment Value: None
  misc_feature: MA Experiment ID: 20000574 Result: Down-regulated in Transcription
  misc_feature: MA Experiment 20000574 PARAMETER Experiment Name: At_100uM_ABA_Mutants__P Parameter: Organism Value: A. thaliana
  misc_feature: MA Experiment 20000574 PARAMETER Experiment Name: At_100uM_ABA_Mutants__P Parameter: Plant Line Value: CS23 vs. Ler wt
  misc_feature: MA Experiment 20000574 PARAMETER Experiment Name: At_100uM_ABA_Mutants__P Parameter: Timepoint (hr) Value: N/A
  misc_feature: MA Experiment 20000574 PARAMETER Experiment Name: At_100uM_ABA_Mutants__P Parameter: Tissue Value: Whole Plant
  misc_feature: MA Experiment 20000574 PARAMETER Experiment Name: At_100uM_ABA_Mutants__P Parameter: Treatment Value: None
  misc_feature: MA Experiment ID: 20000794 Result: Down-regulated in Transcription
  misc_feature: MA Experiment 20000794 PARAMETER Experiment Name: At_Petals_P Parameter: Age (day) Value: 23-25 days
  misc_feature: MA Experiment 20000794 PARAMETER Experiment Name: At_Petals_P Parameter: Plant Line Value: WS
  misc_feature: MA Experiment 20000794 PARAMETER Experiment Name: At_Petals_P Parameter: Tissue Value: Petals vs. Whole plant
  misc_feature: MA Experiment ID: 20001247 Result: Down-regulated in Transcription
  misc_feature: MA Experiment 20001247 PARAMETER Experiment Name: At_Far-red-induction_P Parameter: Age (day) Value: 7
  misc_feature: MA Experiment 20001247 PARAMETER Experiment Name: At_Far-red-induction_P Parameter: Light Value: Far-red vs. White
  misc_feature: MA Experiment 20001247 PARAMETER Experiment Name: At_Far-red-induction_P Parameter: Organism Value: A. thaliana
  misc_feature: MA Experiment 20001247 PARAMETER Experiment Name: At_Far-red-induction_P Parameter: Plant Line Value: Columbia
  misc_feature: MA Experiment 20001247 PARAMETER Experiment Name: At_Far-red-induction_P Parameter: Timepoint (hr) Value: 1
  misc_feature: MA Experiment 20001247 PARAMETER Experiment Name: At_Far-red-induction_P Parameter: Tissue Value: Whole Plant
  misc_feature: MA Experiment ID: 20001248 Result: Down-regulated in Transcription
  misc_feature: MA Experiment 20001248 PARAMETER Experiment Name: At_Far-red-induction_P Parameter: Age (day) Value: 7
  misc_feature: MA Experiment 20001248 PARAMETER Experiment Name: At_Far-red-induction_P Parameter: Light Value: Far-red vs. White
  misc_feature: MA Experiment 20001248 PARAMETER Experiment Name: At_Far-red-induction_P Parameter: Organism Value: A. thaliana
  misc_feature: MA Experiment 20001248 PARAMETER Experiment Name: At_Far-red-induction_P Parameter: Plant Line Value: Columbia
  misc_feature: MA Experiment 20001248 PARAMETER Experiment Name: At_Far-red-induction_P Parameter: Timepoint (hr) Value: 4
  misc_feature: MA Experiment 20001248 PARAMETER Experiment Name: At_Far-red-induction_P Parameter: Tissue Value: Whole Plant
  misc_feature: MA Experiment ID: 20001450 Result: Down-regulated in Transcription
  misc_feature: MA Experiment 20001450 PARAMETER Experiment Name: At_Far-red-induction_P Parameter: Age (day) Value: 7
  misc_feature: MA Experiment 20001450 PARAMETER Experiment Name: At_Far-red-induction_P Parameter: Light Value: Far-red vs. White
  misc_feature: MA Experiment 20001450 PARAMETER Experiment Name: At_Far-red-induction_P Parameter: Organism Value: A. thaliana
  misc_feature: MA Experiment 20001450 PARAMETER Experiment Name: At_Far-red-induction_P Parameter: Plant Line Value: Columbia
  misc_feature: MA Experiment 20001450 PARAMETER Experiment Name: At_Far-red-induction_P Parameter: Timepoint (hr) Value: 8
  misc_feature: MA Experiment 20001450 PARAMETER Experiment Name: At_Far-red-induction_P Parameter: Tissue Value: Whole Plant
  misc_feature: MA Experiment ID: 20001554 Result: Up-regulated in Transcription
  misc_feature: MA Experiment 20001554 PARAMETER Experiment Name: At_Drought_Soil_Dry_P Parameter: Age (day) Value: 21
  misc_feature: MA Experiment 20001554 PARAMETER Experiment Name: At_Drought_Soil_Dry_P Parameter: Organism Value: A. thaliana
  misc_feature: MA Experiment 20001554 PARAMETER Experiment Name: At_Drought_Soil_Dry_P Parameter: Plant Line Value: WS
  misc_feature: MA Experiment 20001554 PARAMETER Experiment Name: At_Drought_Soil_Dry_P Parameter: Post Timepoint (hr) Value: None
  misc_feature: MA Experiment 20001554 PARAMETER Experiment Name: At_Drought_Soil_Dry_P Parameter: Post-Treatment Value: None
  misc_feature: MA Experiment 20001554 PARAMETER Experiment Name: At_Drought_Soil_Dry_P Parameter: Timepoint (day) Value: 7
  misc_feature: MA Experiment 20001554 PARAMETER Experiment Name: At_Drought_Soil_Dry_P Parameter: Treatment Value: Drought vs. No Drought
  misc_feature: MA Experiment ID: 20001555 Result: Up-regulated in Transcription
  misc_feature: MA Experiment 20001555 PARAMETER Experiment Name: At_Drought_Soil_Dry_P Parameter: Age (day) Value: 24
  misc_feature: MA Experiment 20001555 PARAMETER Experiment Name: At_Drought_Soil_Dry_P Parameter: Organism Value: A. thaliana
  misc_feature: MA Experiment 20001555 PARAMETER Experiment Name: At_Drought_Soil_Dry_P Parameter: Plant Line Value: WS
  misc_feature: MA Experiment 20001555 PARAMETER Experiment Name: At_Drought_Soil_Dry_P Parameter: Post Timepoint (hr) Value: None
  misc_feature: MA Experiment 20001555 PARAMETER Experiment Name: At_Drought_Soil_Dry_P Parameter: Post-Treatment Value: None
  misc_feature: MA Experiment 20001555 PARAMETER Experiment Name: At_Drought_Soil_Dry_P Parameter: Timepoint (day) Value: 10
  misc_feature: MA Experiment 20001555 PARAMETER Experiment Name: At_Drought_Soil_Dry_P Parameter: Treatment Value: Drought vs. No Drought
  misc_feature: MA Experiment ID: 20001556 Result: Up-regulated in Transcription
  misc_feature: MA Experiment 20001556 PARAMETER Experiment Name: At_Drought_Soil_Dry_P Parameter: Age (day) Value: 26
  misc_feature: MA Experiment 20001556 PARAMETER Experiment Name: At_Drought_Soil_Dry_P Parameter: Organism Value: A. thaliana
  misc_feature: MA Experiment 20001556 PARAMETER Experiment Name: At_Drought_Soil_Dry_P Parameter: Plant Line Value: WS
  misc_feature: MA Experiment 20001556 PARAMETER Experiment Name: At_Drought_Soil_Dry_P Parameter: Post Timepoint (hr) Value: None
  misc_feature: MA Experiment 20001556 PARAMETER Experiment Name: At_Drought_Soil_Dry_P Parameter: Post-Treatment Value: None
  misc_feature: MA Experiment 20001556 PARAMETER Experiment Name: At_Drought_Soil_Dry_P Parameter: Timepoint (day) Value: 12
  misc_feature: MA Experiment 20001556 PARAMETER Experiment Name: At_Drought_Soil_Dry_P Parameter: Treatment Value: Drought vs. No Drought
  misc_feature: MA Experiment ID: 20001559 Result: Up-regulated in Transcription
  misc_feature: MA Experiment 20001559 PARAMETER Experiment Name: At_Drought_Soil_Dry_P Parameter: Age (day) Value: 28
  misc_feature: MA Experiment 20001559 PARAMETER Experiment Name: At_Drought_Soil_Dry_P Parameter: Organism Value: A. thaliana
  misc_feature: MA Experiment 20001559 PARAMETER Experiment Name: At_Drought_Soil_Dry_P Parameter: Plant Line Value: WS
  misc_feature: MA Experiment 20001559 PARAMETER Experiment Name: At_Drought_Soil_Dry_P Parameter: Post Timepoint (hr) Value: 29
  misc_feature: MA Experiment 20001559 PARAMETER Experiment Name: At_Drought_Soil_Dry_P Parameter: Post-Treatment Value: Re-Water vs. No Drought
  misc_feature: MA Experiment 20001559 PARAMETER Experiment Name: At_Drought_Soil_Dry_P Parameter: Timepoint (day) Value: 14
  misc_feature: MA Experiment 20001559 PARAMETER Experiment Name: At_Drought_Soil_Dry_P Parameter: Treatment Value: Drought vs. No Drought
  misc_feature: MA Experiment ID: 20001560 Result: Up-regulated in Transcription
  misc_feature: MA Experiment 20001560 PARAMETER Experiment Name: At_Drought_Soil_Dry_P Parameter: Age (day) Value: 28
  misc_feature: MA Experiment 20001560 PARAMETER Experiment Name: At_Drought_Soil_Dry_P Parameter: Organism Value: A. thaliana
  misc_feature: MA Experiment 20001560 PARAMETER Experiment Name: At_Drought_Soil_Dry_P Parameter: Plant Line Value: WS
  misc_feature: MA Experiment 20001560 PARAMETER Experiment Name: At_Drought_Soil_Dry_P Parameter: Post Timepoint (hr) Value: None
  misc_feature: MA Experiment 20001560 PARAMETER Experiment Name: At_Drought_Soil_Dry_P Parameter: Post-Treatment Value: None
  misc_feature: MA Experiment 20001560 PARAMETER Experiment Name: At_Drought_Soil_Dry_P Parameter: Timepoint (day) Value: 14
  misc_feature: MA Experiment 20001560 PARAMETER Experiment Name: At_Drought_Soil_Dry_P Parameter: Treatment Value: Drought vs. No Drought
  misc_feature: MA Experiment ID: 20001757 Result: Up-regulated in Transcription
  misc_feature: MA Experiment 20001757 PARAMETER Experiment Name: At_50mM_NH4NO3_L-to-H_P Parameter: Timepoint (hr) Value: 6
  misc_feature: MA Experiment 20001757 PARAMETER Experiment Name: At_50mM_NH4NO3_L-to-H_P Parameter: Tissue Value: Leaf
  misc_feature: MA Experiment 20001757 PARAMETER Experiment Name: At_50mM_NH4NO3_L-to-H_P Parameter: Treatment Value: 50mM NH4NO3 vs 100mM Mannitol
  misc_feature: MA Experiment ID: 20001906 Result: Up-regulated in Transcription
  misc_feature: MA Experiment 20001906 PARAMETER Experiment Name: At_Drought_Reproduction_P Parameter: Age (day) Value: 35
  misc_feature: MA Experiment 20001906 PARAMETER Experiment Name: At_Drought_Reproduction_P Parameter: Organism Value: A. thaliana
  misc_feature: MA Experiment 20001906 PARAMETER Experiment Name: At_Drought_Reproduction_P Parameter: Plant Line Value: WS
  misc_feature: MA Experiment 20001906 PARAMETER Experiment Name: At_Drought_Reproduction_P Parameter: Timepoint (day) Value: 5
  misc_feature: MA Experiment 20001906 PARAMETER Experiment Name: At_Drought_Reproduction_P Parameter: Tissue Value: Siliques
  misc_feature: MA Experiment 20001906 PARAMETER Experiment Name: At_Drought_Reproduction_P Parameter: Treatment Value: Drought vs. No Drought
  misc_feature: MA Experiment ID: 20001908 Result: Up-regulated in Transcription
  misc_feature: MA Experiment 20001908 PARAMETER Experiment Name: At_Drought_Reproduction_P Parameter: Age (day) Value: 40
  misc_feature: MA Experiment 20001908 PARAMETER Experiment Name: At_Drought_Reproduction_P Parameter: Organism Value: A. thaliana
  misc_feature: MA Experiment 20001908 PARAMETER Experiment Name: At_Drought_Reproduction_P Parameter: Plant Line Value: WS
  misc_feature: MA Experiment 20001908 PARAMETER Experiment Name: At_Drought_Reproduction_P Parameter: Timepoint (day) Value: 10
  misc_feature: MA Experiment 20001908 PARAMETER Experiment Name: At_Drought_Reproduction_P Parameter: Tissue Value: Siliques
  misc_feature: MA Experiment 20001908 PARAMETER Experiment Name: At_Drought_Reproduction_P Parameter: Treatment Value: Drought vs. No Drought
atgacataccaaaagcaataccaaatgcaaacacaccacatgcagcaacaacaactccatcacttcgtctttgtccacggctcatgtcatggagcatggtgctggttcaaactagctgcaaagctcaagctcgatggtcaccgtgtgacagctatcgaccttggtggctccggtgtcgacacgaggcagctccatgaggttcgtttggtgtcggcgtatctagagcctttgatgagtttcatggagtctctccctgaaaacgagaaagtggttcttgttggtcatagctatggtggcattggaacttctcttgctatggaaaggtttccgaccaaagtctctgtcggaatcttcctctctgcttacatgccgcaccatgactctcctccggcggttttgattcaagagtattttacgagactaccagagggtttcgctatggactgtgagtttacattcgaggaaggattagaacacccaccaagttcagttttgttcggtactagtttcttgaaggagaaggcatatagtaattgccagttagaggatctagaattagccatggcgttgatgaaaccaagctggttatacactaaggaaatgggaggtgaagatctgataacaaaggagaggtatggatctgggaagagagtgtttattgtctgtgaaggcgacaatgtggttccagaggagattcagaagtggatgattagtaactacgagcctcacgaagttaagcggattgaagaagctggtcacatggctatgctcactaagcctcatgaactttctcaactgctacaagaaatagcagcgaaatataactaaatgtaaaatgatgacacctgtgtatgatttgggctcagttacatctatgatatgaataagagagtttcaatatttgtgat

SEQ ID NO: 86551 - protein, 275 aa, Arabidopsis thaliana
  peptide (1)..(275): Ceres Seq. ID no. 12691496
  misc_feature (47)..(269): Pfam Name: alpha/beta hydrolase fold Pfam Description: alpha/beta hydrolase fold
  misc_feature (1)..(275): Homolog of NCBI NO: 30693313 NR Description: hydrolase, alpha/beta fold family [Arabidopsis >gi|18650620|gb|AAL75909.1| AT3g50440/T20E23_40 [Arabidopsis >gi|22655406|gb|AAM98295.1| At3g50440/T20E23_40 [Arabidopsis
  misc_feature (14)..(275): Homolog of NCBI NO: 11358112 NR Description: hypothetical protein T20E23.40 - Arabidopsis >gi|6561984|emb|CAB62473.1| putative protein [Arabidopsis
  misc_feature (15)..(274): Homolog of NCBI NO: 15227867 NR Description: putative acetone-cyanohydrin lyase; protein id:
  misc_feature (15)..(274): Homolog of NCBI NO: 27754457 NR Description: putative acetone-cyanohydrin lyase [Arabidopsis
  misc_feature (21)..(275): Homolog of NCBI NO: 40549303 NR Description: salicylic acid-binding protein 2 [Nicotiana
  misc_feature (15)..(275): Homolog of NCBI NO: 21554666 NR Description: putative acetone-cyanohydrin lyase [Arabidopsis
  misc_feature (15)..(274): Homolog of NCBI NO: 15227863 NR Description: putative acetone-cyanohydrin lyase; protein id: supported by cDNA: 26006., supported by cDNA: gi_13605602,
  misc_feature (21)..(274): Homolog of NCBI NO: 14279437 NR Description: ethylene-induced esterase [Citrus sinensis]
  misc_feature (15)..(274): Homolog of NCBI NO: 15227865 NR Description: putative acetone-cyanohydrin lyase; protein id:
  misc_feature (17)..(271): Homolog of NCBI NO: 6651393 NR Description: polyneuridine aldehyde esterase [Rauvolfia
MTYQKQYQMQTHHMQQQQLHHFVFVHGSCHGAWCWFKLAAKLKLDGHRVTAIDLGGSGVDTRQLHEVRLVSAYLEPLMSFMESLPENEKVVLVGHSYGGIGTSLAMERFPTKVSVGIFLSAYMPHHDSPPAVLIQEYFTRLPEGFAMDCEFTFEEGLEHPPSSVLFGTSFLKEKAYSNCQLEDLELAMALMKPSWLYTKEMGGEDLITKERYGSGKRVFIVCEGDNVVPEEIQKWMISNYEPHEVKRIEEAGHMAMLTKPHELSQLLQEIAAKYN

SEQ ID NO: 86552 - protein, 267 aa, Arabidopsis thaliana; identical to SEQ ID NO: 83900
  peptide (1)..(267): Ceres Seq. ID no. 12691497
  misc_feature (39)..(261): Pfam Name: alpha/beta hydrolase fold Pfam Description: alpha/beta hydrolase fold
  misc_feature (1)..(267): Homolog of NCBI NO: 30693313 NR Description: hydrolase, alpha/beta fold family [Arabidopsis >gi|18650620|gb|AAL75909.1| AT3g50440/T20E23_40 [Arabidopsis >gi|22655406|gb|AAM98295.1| At3g50440/T20E23_40 [Arabidopsis
  misc_feature (6)..(267): Homolog of NCBI NO: 11358112 NR Description: hypothetical protein T20E23.40 - Arabidopsis >gi|6561984|emb|CAB62473.1| putative protein [Arabidopsis
  misc_feature (7)..(266): Homolog of NCBI NO: 15227867 NR Description: putative acetone-cyanohydrin lyase; protein id:
  misc_feature (7)..(266): Homolog of NCBI NO: 27754457 NR Description: putative acetone-cyanohydrin lyase [Arabidopsis
  misc_feature (13)..(267): Homolog of NCBI NO: 40549303 NR Description: salicylic acid-binding protein 2 [Nicotiana
  misc_feature (7)..(267): Homolog of NCBI NO: 21554666 NR Description: putative acetone-cyanohydrin lyase [Arabidopsis
  misc_feature (7)..(266): Homolog of NCBI NO: 15227863 NR Description: putative acetone-cyanohydrin lyase; protein id: supported by cDNA: 26006., supported by cDNA: gi_13605602,
  misc_feature (13)..(266): Homolog of NCBI NO: 14279437 NR Description: ethylene-induced esterase [Citrus sinensis]
  misc_feature (7)..(266): Homolog of NCBI NO: 15227865 NR Description: putative acetone-cyanohydrin lyase; protein id:
  misc_feature (9)..(263): Homolog of NCBI NO: 6651393 NR Description: polyneuridine aldehyde esterase [Rauvolfia

SEQ ID NO: 86553 - protein, 262 aa, Arabidopsis thaliana; identical to SEQ ID NO: 83901
  peptide (1)..(262): Ceres Seq. ID no. 12691498
  misc_feature (34)..(256): Pfam Name: alpha/beta hydrolase fold Pfam Description: alpha/beta hydrolase fold
  misc_feature (1)..(262): Homolog of NCBI NO: 30693313 NR Description: hydrolase, alpha/beta fold family [Arabidopsis >gi|18650620|gb|AAL75909.1| AT3g50440/T20E23_40 [Arabidopsis >gi|22655406|gb|AAM98295.1| At3g50440/T20E23_40 [Arabidopsis
  misc_feature (1)..(262): Homolog of NCBI NO: 11358112 NR Description: hypothetical protein T20E23.40 - Arabidopsis >gi|6561984|emb|CAB62473.1| putative protein [Arabidopsis
  misc_feature (2)..(261): Homolog of NCBI NO: 15227867 NR Description: putative acetone-cyanohydrin lyase; protein id:
  misc_feature (2)..(261): Homolog of NCBI NO: 27754457 NR Description: putative acetone-cyanohydrin lyase [Arabidopsis
  misc_feature (8)..(262): Homolog of NCBI NO: 40549303 NR Description: salicylic acid-binding protein 2 [Nicotiana
  misc_feature (2)..(262): Homolog of NCBI NO: 21554666 NR Description: putative acetone-cyanohydrin lyase [Arabidopsis
  misc_feature (2)..(261): Homolog of NCBI NO: 15227863 NR Description: putative acetone-cyanohydrin lyase; protein id: supported by cDNA: 26006., supported by cDNA: gi_13605602,
  misc_feature (8)..(261): Homolog of NCBI NO: 14279437 NR Description: ethylene-induced esterase [Citrus sinensis]
  misc_feature (2)..(261): Homolog of NCBI NO: 15227865 NR Description: putative acetone-cyanohydrin lyase; protein id:
  misc_feature (4)..(258): Homolog of NCBI NO: 6651393 NR Description: polyneuridine aldehyde esterase [Rauvolfia

SEQ ID NO: 86554 - DNA, 1023 bp, Arabidopsis thaliana
  misc_feature (1)..(1023): Ceres Seq. ID no. 12691526
  misc_feature: MA Experiment ID: 20000171 Result: Up-regulated in Transcription
  misc_feature: MA Experiment 20000171 PARAMETER Experiment Name: At_42deg_Heat_P Parameter: Age (day) Value: 14
  misc_feature: MA Experiment 20000171 PARAMETER Experiment Name: At_42deg_Heat_P Parameter: Organism Value: A. thaliana
  misc_feature: MA Experiment 20000171 PARAMETER Experiment Name: At_42deg_Heat_P Parameter: Plant Line Value: WS
  misc_feature: MA Experiment 20000171 PARAMETER Experiment Name: At_42deg_Heat_P Parameter: Temperature (deg C) Value: 42 vs. 22
  misc_feature: MA Experiment 20000171 PARAMETER Experiment Name: At_42deg_Heat_P Parameter: Timepoint (hr) Value: 1
  misc_feature: MA Experiment 20000171 PARAMETER Experiment Name: At_42deg_Heat_P Parameter: Tissue Value: Aerial
  misc_feature: MA Experiment ID: 20000211 Result: Up-regulated in Transcription
  misc_feature: MA Experiment 20000211 PARAMETER Experiment Name: At_0.001percent_MeJA__P Parameter: Age (day) Value: 14
  misc_feature: MA Experiment 20000211 PARAMETER Experiment Name: At_0.001percent_MeJA__P Parameter: Organism Value: A. thaliana
  misc_feature: MA Experiment 20000211 PARAMETER Experiment Name: At_0.001percent_MeJA__P Parameter: Plant Line Value: WS
  misc_feature: MA Experiment 20000211 PARAMETER Experiment Name: At_0.001percent_MeJA__P Parameter: Timepoint (hr) Value: 1
  misc_feature: MA Experiment 20000211 PARAMETER Experiment Name: At_0.001percent_MeJA__P Parameter: Tissue Value: Aerial
  misc_feature: MA Experiment 20000211 PARAMETER Experiment Name: At_0.001percent_MeJA__P Parameter: Treatment Value: 0.001percent MeJA vs. No Treatment
  misc_feature: MA Experiment ID: 20000235 Result: Up-regulated in Transcription
  misc_feature: MA Experiment 20000235 PARAMETER Experiment Name: At_Siliques_P Parameter: Age (day) Value: 21
  misc_feature: MA Experiment 20000235 PARAMETER Experiment Name: At_Siliques_P Parameter: Organism Value: A. thaliana
  misc_feature: MA Experiment 20000235 PARAMETER Experiment Name: At_Siliques_P Parameter: Plant Line Value: WS
  misc_feature: MA Experiment 20000235 PARAMETER Experiment Name: At_Siliques_P Parameter: Tissue Value: 5-10mm Siliques vs. Whole Plant
  misc_feature: MA Experiment ID: 20000265 Result: Up-regulated in Transcription
  misc_feature: MA Experiment 20000265 PARAMETER Experiment Name: At_Open_Flower_P Parameter: Age (day) Value: 21
  misc_feature: MA Experiment 20000265 PARAMETER Experiment Name: At_Open_Flower_P Parameter: Plant Line Value: WS
  misc_feature: MA Experiment 20000265 PARAMETER Experiment Name: At_Open_Flower_P Parameter: Tissue Value: Closed Flower vs. Whole Plant
  misc_feature: MA Experiment ID: 20001451 Result: Down-regulated in Transcription
  misc_feature: MA Experiment 20001451 PARAMETER Experiment Name: At_Far-red-induction_P Parameter: Age (day) Value: 7
  misc_feature: MA Experiment 20001451 PARAMETER Experiment Name: At_Far-red-induction_P Parameter: Light Value: Far-red vs. White
  misc_feature: MA Experiment 20001451 PARAMETER Experiment Name: At_Far-red-induction_P Parameter: Organism Value: A. thaliana
  misc_feature: MA Experiment 20001451 PARAMETER Experiment Name: At_Far-red-induction_P Parameter: Plant Line Value: Columbia
  misc_feature: MA Experiment 20001451 PARAMETER Experiment Name: At_Far-red-induction_P Parameter: Timepoint (hr) Value: 24
  misc_feature: MA Experiment 20001451 PARAMETER Experiment Name: At_Far-red-induction_P Parameter: Tissue Value: Whole Plant
atggcggagtatatctgtttattcggcaaggacagtgcagcgattgttataaagcaaccaaagaaatcaccattattcttaaggatgattgttttagtgtttgctatggtttgtggtctctacatttgcgctgtttgcttaaaacagttaagtaatgtcagcttccaaacctcccaacttgtccaaactagtcctattgattctcactcgctacgctttgttactcggattcattatccaaagcctcagacttttaatagagctgaatgtggacataatccggtgaggtactttgcgatattgtcgatgcagagatcaggaagcggttggttcgaaacattgttgaatagtcataacaatgtgagttctaatggagagattttctctgttttggatcgaaggaaaaacatttcttcaatcattcagactcttgatagagtttataatcttgattggtttacgagtgcttcaaagaacgaatgttctgctgctattggtttcaaatggatgcttaaccagggtttgttggagaaccataaagacatagtagagtactttaaccgaagaggcgtctctgcgatatttctgtttagaaggaatcctttaagaagaatggtttctgtgttggcaaattcttatgaccgttatgctaagcttttgaatggaactcataagtctcatgttcattctcctgcagaggcagatgcactttctagatataagccggtaatcaactcgacatcgttgatccacgatttacaagaaacagagaattcagctgcaaaggctttagaatatttcaataccactcgtcatattgttgtcttctacgaagatctcataacaaatcaaacgacattgaaacaagttcaagagtttttgaacattccagtgaaggatttgtcaagcagacaggtgaaaatacatagaggagatttgtcagatcatataaagaattgggaagatataaacaagactttgaatgggactgagtacgagaaatttctacgagctgattattag

SEQ ID NO: 86555 - protein, 340 aa, Arabidopsis thaliana
  peptide (1)..(340): Ceres Seq. ID no. 12691527
  misc_feature (88)..(308): Homolog of NCBI NO: 15229813 NR Description: hypothetical protein; protein id: At3g50620.1
  misc_feature (1)..(340): Homolog of NCBI NO: 40823013 NR Description: At2g15730 [Arabidopsis thaliana]
  misc_feature (1)..(340): Homolog of NCBI NO: 22329158 NR Description: hypothetical protein; protein id: At4g34420.1
  misc_feature (9)..(340): Homolog of NCBI NO: 29824462 NR Description: unknown protein [Oryza sativa (japonica
  misc_feature (17)..(340): Homolog of NCBI NO: 33146729 NR Description: unknown protein [Oryza sativa (japonica
  misc_feature (9)..(233): Homolog of NCBI NO: 14029013 NR Description: Unknown protein [Oryza sativa]
  misc_feature (233)..(340): Homolog of NCBI NO: 25411661 NR Description: hypothetical protein At2g15730 [imported] - thaliana >gi|4335739|gb|AAD17417.1| hypothetical protein
  misc_feature (233)..(340): Homolog of NCBI NO: 30679514 NR Description: expressed protein [Arabidopsis thaliana]
  misc_feature (122)..(183): Homolog of NCBI NO: 25411661 NR Description: hypothetical protein At2g15730 [imported] - thaliana >gi|4335739|gb|AAD17417.1| hypothetical protein
  misc_feature (122)..(183): Homolog of NCBI NO: 30679514 NR Description: expressed protein [Arabidopsis thaliana]
MAEYICLFGKDSAAIVIKQPKKSPLFLRMIVLVFAMVCGLYICAVCLKQLSNVSFQTSQLVQTSPIDSHSLRFVTRIHYPKPQTFNRAECGHNPVRYFAILSMQRSGSGWFETLLNSHNNVSSNGEIFSVLDRRKNISSIIQTLDRVYNLDWFTSASKNECSAAIGFKWMLNQGLLENHKDIVEYFNRRGVSAIFLFRRNPLRRMVSVLANSYDRYAKLLNGTHKSHVHSPAEADALSRYKPVINSTSLIHDLQETENSAAKALEYFNTTRHIVVFYEDLITNQTTLKQVQEFLNIPVKDLSSRQVKIHRGDLSDHIKNWEDINKTLNGTEYEKFLRADY

SEQ ID NO: 86556 - protein, 312 aa, Arabidopsis thaliana
  peptide (1)..(312): Ceres Seq. ID no. 12691528
  misc_feature (60)..(280): Homolog of NCBI NO: 15229813 NR Description: hypothetical protein; protein id: At3g50620.1
  misc_feature (1)..(312): Homolog of NCBI NO: 40823013 NR Description: At2g15730 [Arabidopsis thaliana]
  misc_feature (1)..(312): Homolog of NCBI NO: 22329158 NR Description: hypothetical protein; protein id: At4g34420.1
  misc_feature (1)..(312): Homolog of NCBI NO: 29824462 NR Description: unknown protein [Oryza sativa (japonica
  misc_feature (1)..(312): Homolog of NCBI NO: 33146729 NR Description: unknown protein [Oryza sativa (japonica
  misc_feature (1)..(205): Homolog of NCBI NO: 14029013 NR Description: Unknown protein [Oryza sativa]
  misc_feature (205)..(312): Homolog of NCBI NO: 25411661 NR Description: hypothetical protein At2g15730 [imported] - thaliana >gi|4335739|gb|AAD17417.1| hypothetical protein
  misc_feature (205)..(312): Homolog of NCBI NO: 30679514 NR Description: expressed protein [Arabidopsis thaliana]
  misc_feature (94)..(155): Homolog of NCBI NO: 25411661 NR Description: hypothetical protein At2g15730 [imported] - thaliana >gi|4335739|gb|AAD17417.1| hypothetical protein
  misc_feature (94)..(155): Homolog of NCBI NO: 30679514 NR Description: expressed protein [Arabidopsis thaliana]
MIVLVFAMVCGLYICAVCLKQLSNVSFQTSQLVQTSPIDSHSLRFVTRIHYPKPQTFNRAECGHNPVRYFAILSMQRSGSGWFETLLNSHNNVSSNGEIFSVLDRRKNISSIIQTLDRVYNLDWFTSASKNECSAAIGFKWMLNQGLLENHKDIVEYFNRRGVSAIFLFRRNPLRRMVSVLANSYDRYAKLLNGTHKSHVHSPAEADALSRYKPVINSTSLIHDLQETENSAAKALEYFNTTRHIVVFYEDLITNQTTLKQVQEFLNIPVKDLSSRQVKIHRGDLSDHIKNWEDINKTLNGTEYEKFLRADY

SEQ ID NO: 86557 - protein, 305 aa, Arabidopsis thaliana
  peptide (1)..(305): Ceres Seq. ID no. 12691529
  misc_feature (53)..(273): Homolog of NCBI NO: 15229813 NR Description: hypothetical protein; protein id: At3g50620.1
  misc_feature (1)..(305): Homolog of NCBI NO: 40823013 NR Description: At2g15730 [Arabidopsis thaliana]
  misc_feature (1)..(305): Homolog of NCBI NO: 22329158 NR Description: hypothetical protein; protein id: At4g34420.1
  misc_feature (1)..(305): Homolog of NCBI NO: 29824462 NR Description: unknown protein [Oryza sativa (japonica
  misc_feature (1)..(305): Homolog of NCBI NO: 33146729 NR Description: unknown protein [Oryza sativa (japonica
  misc_feature (1)..(198): Homolog of NCBI NO: 14029013 NR Description: Unknown protein [Oryza sativa]
  misc_feature (198)..(305): Homolog of NCBI NO: 25411661 NR Description: hypothetical protein At2g15730 [imported] - thaliana >gi|4335739|gb|AAD17417.1| hypothetical protein
  misc_feature (198)..(305): Homolog of NCBI NO: 30679514 NR Description: expressed protein [Arabidopsis thaliana]
  misc_feature (87)..(148): Homolog of NCBI NO: 25411661 NR Description: hypothetical protein At2g15730 [imported] - thaliana >gi|4335739|gb|AAD17417.1| hypothetical protein
  misc_feature (87)..(148): Homolog of NCBI NO: 30679514 NR Description: expressed protein [Arabidopsis thaliana]
MVCGLYICAVCLKQLSNVSFQTSQLVQTSPIDSHSLRFVTRIHYPKPQTFNRAECGHNPVRYFAILSMQRSGSGWFETLLNSHNNVSSNGEIFSVLDRRKNISSIIQTLDRVYNLDWFTSASKNECSAAIGFKWMLNQGLLENHKDIVEYFNRRGVSAIFLFRRNPLRRMVSVLANSYDRYAKLLNGTHKSHVHSPAEADALSRYKPVINSTSLIHDLQETENSAAKALEYFNTTRHIVVFYEDLITNQTTLKQVQEFLNIPVKDLSSRQVKIHRGDLSDHIKNWEDINKTLNGTEYEKFLRADY

SEQ ID NO: 86558 - DNA, 1095 bp, Arabidopsis thaliana
  misc_feature (1)..(1095): Ceres Seq. ID no. 12691549
acaattaacaaactcggccgtcgtcatgtctctccgtaaaaccctaaccgccgtgaatcaatcttcgttaccgccggattctttaatctccgccggtaatctcactgtttcagaggtctctggttcatcttctagaatcagatttcgtcctcgtaaaatcaggaaagtttcgtcagatccgtcgccgaggatcattatcaccgcgtctcctcctctatcaacaaaatcgactgttgatatcgctctacgtcacttacaaagctccgatgaacttctcggagcattaatcacaacgcacaacgatcctccactgttcgactcaagtaatactccgtttctctccttagcgagatcaatcctataccaacaactcgcgacgaaagcagcgaaatgtatctacgatcgattcatctctctattcaacggtggagaagcaggtgttgttcctgaatctgtgatctcactctccgccgttgatcttcgtaagatcggtgtctccgggagaaaagctagttacctccacgatctagctgataaatacaacaacggtgtgctttctgatgaattgattctgaaaatgagtgatgaagagttgattgataggttaactttggttaaaggaattggagtgtggactgttcatatgtttatgatcttctcgttgcatagacctgatgtgttgcctgtgggagatcttggtgtgaggaaaggtgtgaaagatctttatggtttgaaaaatcttccaggtccattgcaaatggagcagctttgtgagaaatggcgtccttataggtctgttggttcatggtacatgtggagactaatcgagtctcgtaagaccaaatagcacctgcctgtaatcgggcagttaatatgatcctgtgacgaagaagcttttccatgcccatcacttcctttccaagtttcacttgctggtaatctgagttattttgtgtctgtaaattatggagcacgtaagaaaaatccttcttgtattttaactgtattccacggattatatttctgtgactgttgtaaacatgtatcatgtatggggtttcatttgacttggatattgagaagcatggcttattt

SEQ ID NO: 86559 - protein, 281 aa, Arabidopsis thaliana
  peptide (1)..(281): Ceres Seq. ID no. 12691550
  misc_feature (116)..(181): Pfam Name: HhH-GPD superfamily base excision DNA repair protein Pfam Description: HhH-GPD superfamily base excision DNA repair
  misc_feature (9)..(281): Homolog of NCBI NO: 15230333 NR Description: putative DNA-3-methyladenine glycosidase; protein
  misc_feature (24)..(278): Homolog of NCBI NO: 5091600 NR Description: This gene is a member of PF|01332 Alkylbase DNA
  misc_feature (62)..(280): Homolog of NCBI NO: 18394744 NR Description: Expressed protein; protein id: At1g19480.1,
  misc_feature (62)..(280): Homolog of NCBI NO: 21593178 NR Description: unknown [Arabidopsis thaliana]
  misc_feature (49)..(280): Homolog of NCBI NO: 18410802 NR Description: 3-methyladenine DNA glycosylase, putative; id: At1g75230.1, supported by cDNA: gi_13430601, supported by
  misc_feature (49)..(280): Homolog of NCBI NO: 25406423 NR Description: hypothetical protein F22H5.5 [imported] -
  misc_feature (62)..(280): Homolog of NCBI NO: 25402893 NR Description: protein F18O14.25 [imported] - Arabidopsis >gi|8778423|gb|AAF79431.1|AC025808_13 F18O14.25 [Arabidopsis
  misc_feature (81)..(276): Homolog of NCBI NO: 37521587 NR Description: probable DNA-3-methyladenine glycosylase violaceus] >gi|35212585|dbj|BAC89959.1| gll2018 [Gloeobacter
  misc_feature (81)..(273): Homolog of NCBI NO: 22971879 NR Description: hypothetical protein [Chloroflexus aurantiacus]
  misc_feature (79)..(276): Homolog of NCBI NO: 33592951 NR Description: DNA-3-methyladenine glycosylase [Bordetella
QLTNSAVVMSLRKTLTAVNQSSLPPDSLISAGNLTVSEVSGSSSRIRFRPRKIRKVSSDPSPRIIITASPPLSTKSTVDIALRHLQSSDELLGALITTHNDPPLFDSSNTPFLSLARSILYQQLATKAAKCIYDRFISLFNGGEAGVVPESVISLSAVDLRKIGVSGRKASYLHDLADKYNNGVLSDELILKMSDEELIDRLTLVKGIGVWTVHMFMIFSLHRPDVLPVGDLGVRKGVKDLYGLKNLPGPLQMEQLCEKWRPYRSVGSWYMWRLIESRKTK

SEQ ID NO: 86560 - protein, 273 aa, Arabidopsis thaliana; identical to SEQ ID NO: 25819
  peptide (1)..(273): Ceres Seq. ID no. 12691551
  misc_feature (108)..(173): Pfam Name: HhH-GPD superfamily base excision DNA repair protein Pfam Description: HhH-GPD superfamily base excision DNA repair
  misc_feature (1)..(273): Homolog of NCBI NO: 15230333 NR Description: putative DNA-3-methyladenine glycosidase; protein
  misc_feature (16)..(270): Homolog of NCBI NO: 5091600 NR Description: This gene is a member of PF|01332 Alkylbase DNA
  misc_feature (54)..(272): Homolog of NCBI NO: 18394744 NR Description: Expressed protein; protein id: At1g19480.1,
  misc_feature (54)..(272): Homolog of NCBI NO: 21593178 NR Description: unknown [Arabidopsis thaliana]
  misc_feature (41)..(272): Homolog of NCBI NO: 18410802 NR Description: 3-methyladenine DNA glycosylase, putative; id: At1g75230.1, supported by cDNA: gi_13430601, supported by
  misc_feature (41)..(272): Homolog of NCBI NO: 25406423 NR Description: hypothetical protein F22H5.5 [imported] -
  misc_feature (54)..(272): Homolog of NCBI NO: 25402893 NR Description: protein F18O14.25 [imported] - Arabidopsis >gi|8778423|gb|AAF79431.1|AC025808_13 F18O14.25 [Arabidopsis
  misc_feature (73)..(268): Homolog of NCBI NO: 37521587 NR Description: probable DNA-3-methyladenine glycosylase violaceus] >gi|35212585|dbj|BAC89959.1| gll2018 [Gloeobacter
  misc_feature (73)..(265): Homolog of NCBI NO: 22971879 NR Description: hypothetical protein [Chloroflexus aurantiacus]
  misc_feature (71)..(268): Homolog of NCBI NO: 33592951 NR Description: DNA-3-methyladenine glycosylase [Bordetella

SEQ ID NO: 86561 - DNA, 1326 bp, Arabidopsis thaliana
  misc_feature (1)..(1326): Ceres Seq. ID no. 12691597
  misc_feature: MA Experiment ID: 108435 Result: Up-regulated in Transcription
  misc_feature: MA Experiment 108435 PARAMETER Experiment Name: At_stm_Mutants_cDNA_P Parameter: Plant Line Value: wt Landsburg vs stm
  misc_feature: MA Experiment 108435 PARAMETER Experiment Name: At_stm_Mutants_cDNA_P Parameter: Tissue Value: Shoot Apical Meristem Region
  misc_feature: MA Experiment ID: 108461 Result: Up-regulated in Transcription
  misc_feature: MA Experiment 108461 PARAMETER Experiment Name: At_Germinating_Seeds_cDNA_P Parameter: Age (day) Value: 1 vs. 0
  misc_feature: MA Experiment 108461 PARAMETER Experiment Name: At_Germinating_Seeds_cDNA_P Parameter: Tissue Value: Germinating Seeds
  misc_feature: MA Experiment ID: 108462 Result: Up-regulated in Transcription
  misc_feature: MA Experiment 108462 PARAMETER Experiment Name: At_Germinating_Seeds_cDNA_P Parameter: Age (day) Value: 2 vs. 0
  misc_feature: MA Experiment 108462 PARAMETER Experiment Name: At_Germinating_Seeds_cDNA_P Parameter: Tissue Value: Germinating Seeds
  misc_feature: MA Experiment ID: 108463 Result: Up-regulated in Transcription
  misc_feature: MA Experiment 108463 PARAMETER Experiment Name: At_Germinating_Seeds_cDNA_P Parameter: Age (day) Value: 3 vs. 0
  misc_feature: MA Experiment 108463 PARAMETER Experiment Name: At_Germinating_Seeds_cDNA_P Parameter: Tissue Value: Germinating Seeds
  misc_feature: MA Experiment ID: 108464 Result: Up-regulated in Transcription
  misc_feature: MA Experiment 108464 PARAMETER Experiment Name: At_Germinating_Seeds_cDNA_P Parameter: Age (day) Value: 4 vs. 0
  misc_feature: MA Experiment 108464 PARAMETER Experiment Name: At_Germinating_Seeds_cDNA_P Parameter: Tissue Value: Germinating Seeds
  misc_feature: MA Experiment ID: 108473 Result: Down-regulated in Transcription
  misc_feature: MA Experiment 108473 PARAMETER Experiment Name: At_Drought_Flowers_cDNA_P Parameter: Timepoint (hr) Value: 7 d
  misc_feature: MA Experiment 108473 PARAMETER Experiment Name: At_Drought_Flowers_cDNA_P Parameter: Tissue Value: Flower
  misc_feature: MA Experiment 108473 PARAMETER Experiment Name: At_Drought_Flowers_cDNA_P Parameter: Treatment Value: Drought vs. No Drought
  misc_feature: MA Experiment ID: 108489 Result: Down-regulated in Transcription
  misc_feature: MA Experiment ID: 108569 Result: Up-regulated in Transcription
  misc_feature: MA Experiment 108569 PARAMETER Experiment Name: At_0.001%_MeJA__cDNA_P Parameter: Timepoint (hr) Value: 6
  misc_feature: MA Experiment 108569 PARAMETER Experiment Name: At_0.001%_MeJA__cDNA_P Parameter: Tissue Value: Aerial
  misc_feature: MA Experiment 108569 PARAMETER Experiment Name: At_0.001%_MeJA__cDNA_P Parameter: Treatment Value: 0.001% MeJA vs. No Treatment
  misc_feature: MA Experiment ID: 108577 Result: Up-regulated in Transcription
  misc_feature: MA Experiment 108577 PARAMETER Experiment Name: At_42deg_Heat_cDNA_P Parameter: Temperature (deg C) Value: 42 vs. 22
  misc_feature: MA Experiment 108577 PARAMETER Experiment Name: At_42deg_Heat_cDNA_P Parameter: Timepoint (hr) Value: 6
  misc_feature: MA Experiment 108577 PARAMETER Experiment Name: At_42deg_Heat_cDNA_P Parameter: Tissue Value: Aerial
  misc_feature: MA Experiment ID: 108579 Result: Up-regulated in Transcription
  misc_feature: MA Experiment 108579 PARAMETER Experiment Name: At_4deg_Cold_cDNA_P Parameter: Temperature (deg C) Value: 4 vs. 22
  misc_feature: MA Experiment 108579 PARAMETER Experiment Name: At_4deg_Cold_cDNA_P Parameter: Timepoint (hr) Value: 6
  misc_feature: MA Experiment 108579 PARAMETER Experiment Name: At_4deg_Cold_cDNA_P Parameter: Tissue Value: Aerial
  misc_feature: MA Experiment ID: 108585 Result: Up-regulated in Transcription
  misc_feature: MA Experiment 108585 PARAMETER Experiment Name: At_5mM_NaNP_cDNA_P Parameter: Timepoint (hr) Value: 6
  misc_feature: MA Experiment 108585 PARAMETER Experiment Name: At_5mM_NaNP_cDNA_P Parameter: Tissue Value: Aerial
  misc_feature: MA Experiment 108585 PARAMETER Experiment Name: At_5mM_NaNP_cDNA_P Parameter: Treatment Value: null
  misc_feature: MA Experiment ID: 108595 Result: Up-regulated in Transcription
  misc_feature: MA Experiment 108595 PARAMETER Experiment Name: At_Ler-pi_Ovule_cDNA_P Parameter: Plant Line Value: null
  misc_feature: MA Experiment ID: 20000069 Result: Down-regulated in Transcription
  misc_feature: MA Experiment 20000069 PARAMETER Experiment Name: At_100uM_ABA_Mutants_cDNA_P Parameter: Plant Line Value: CS23
  misc_feature: MA Experiment 20000069 PARAMETER Experiment Name: At_100uM_ABA_Mutants_cDNA_P Parameter: Timepoint (hr) Value: 6
  misc_feature: MA Experiment 20000069 PARAMETER Experiment Name: At_100uM_ABA_Mutants_cDNA_P Parameter: Tissue Value: Aerial
  misc_feature: MA Experiment 20000069 PARAMETER Experiment Name: At_100uM_ABA_Mutants_cDNA_P Parameter: Treatment Value: 100uM ABA vs. No Treatment
  misc_feature: MA Experiment ID: 20000070 Result: Down-regulated in Transcription
  misc_feature: MA Experiment 20000070 PARAMETER Experiment Name: At_100uM_ABA_Mutants_cDNA_P Parameter: Plant Line Value: CS24
  misc_feature: MA Experiment 20000070 PARAMETER Experiment Name: At_100uM_ABA_Mutants_cDNA_P Parameter: Timepoint (hr) Value: 6
  misc_feature: MA Experiment 20000070 PARAMETER Experiment Name: At_100uM_ABA_Mutants_cDNA_P Parameter: Tissue Value: Aerial
  misc_feature: MA Experiment 20000070 PARAMETER Experiment Name: At_100uM_ABA_Mutants_cDNA_P Parameter: Treatment Value: 100uM ABA vs. No Treatment
  misc_feature: MA Experiment ID: 20000071 Result: Down-regulated in Transcription
  misc_feature: MA Experiment 20000071 PARAMETER Experiment Name: At_100uM_ABA_Mutants_cDNA_P Parameter: Plant Line Value: CS8104
  misc_feature: MA Experiment 20000071 PARAMETER Experiment Name: At_100uM_ABA_Mutants_cDNA_P Parameter: Timepoint (hr) Value: 6
  misc_feature: MA Experiment 20000071 PARAMETER Experiment Name: At_100uM_ABA_Mutants_cDNA_P Parameter: Tissue Value: Aerial
  misc_feature: MA Experiment 20000071 PARAMETER Experiment Name: At_100uM_ABA_Mutants_cDNA_P Parameter: Treatment Value: 100uM ABA vs. No Treatment
  misc_feature: MA Experiment ID: 20000086 Result: Down-regulated in Transcription
  misc_feature: MA Experiment 20000086 PARAMETER Experiment Name: At_100uM_ABA_Mutants_cDNA_P Parameter: Plant Line Value: CS22
  misc_feature: MA Experiment 20000086 PARAMETER Experiment Name: At_100uM_ABA_Mutants_cDNA_P Parameter: Timepoint (hr) Value: 6
  misc_feature: MA Experiment 20000086 PARAMETER Experiment Name: At_100uM_ABA_Mutants_cDNA_P Parameter: Tissue Value: Aerial
  misc_feature: MA Experiment 20000086 PARAMETER Experiment Name: At_100uM_ABA_Mutants_cDNA_P Parameter: Treatment Value: 100uM ABA vs. No Treatment
  misc_feature: MA Experiment ID: 20000087 Result: Down-regulated in Transcription
  misc_feature: MA Experiment 20000087 PARAMETER Experiment Name: At_100uM_ABA_Mutants_cDNA_P Parameter: Plant Line Value: WS
  misc_feature: MA Experiment 20000087 PARAMETER Experiment Name: At_100uM_ABA_Mutants_cDNA_P Parameter: Timepoint (hr) Value: 6
  misc_feature: MA Experiment 20000087 PARAMETER Experiment Name: At_100uM_ABA_Mutants_cDNA_P Parameter: Tissue Value: Aerial
  misc_feature: MA Experiment 20000087 PARAMETER Experiment Name: At_100uM_ABA_Mutants_cDNA_P Parameter: Treatment Value: 100uM ABA vs. No Treatment
  misc_feature: MA Experiment ID: 20000088 Result: Down-regulated in Transcription
  misc_feature: MA Experiment 20000088 PARAMETER Experiment Name: At_100uM_ABA_Mutants_cDNA_P Parameter: Plant Line Value: Landsberg
  misc_feature: MA Experiment 20000088 PARAMETER Experiment Name: At_100uM_ABA_Mutants_cDNA_P Parameter: Timepoint (hr) Value: 6
  misc_feature: MA Experiment 20000088 PARAMETER Experiment Name: At_100uM_ABA_Mutants_cDNA_P Parameter: Tissue Value: Aerial
  misc_feature: MA Experiment 20000088 PARAMETER Experiment Name: At_100uM_ABA_Mutants_cDNA_P Parameter: Treatment Value: 100uM ABA vs. No Treatment
  misc_feature: MA Experiment ID: 20000089 Result: Down-regulated in Transcription
  misc_feature: MA Experiment ID: 20000090 Result: Down-regulated in Transcription
  misc_feature: MA Experiment ID: 20000117 Result: Down-regulated in Transcription
  misc_feature: MA Experiment 20000117 PARAMETER Experiment Name: At_100uM_ABA_Mutants_cDNA_P Parameter: Plant Line Value: Columbia
  misc_feature: MA Experiment 20000117 PARAMETER Experiment Name: At_100uM_ABA_Mutants_cDNA_P Parameter: Timepoint (hr) Value: 6
  misc_feature: MA Experiment 20000117 PARAMETER Experiment Name: At_100uM_ABA_Mutants_cDNA_P Parameter: Tissue Value: Aerial
  misc_feature: MA Experiment 20000117 PARAMETER Experiment Name: At_100uM_ABA_Mutants_cDNA_P Parameter: Treatment Value: 100uM ABA vs. No Treatment
  misc_feature: MA Experiment ID: 20000179 Result: Up-regulated in Transcription
  misc_feature: MA Experiment 20000179 PARAMETER Experiment Name: At_Germinating_Seeds_P Parameter: Age (hr) Value: 6 vs. 0
  misc_feature: MA Experiment 20000179 PARAMETER Experiment Name: At_Germinating_Seeds_P Parameter: Tissue Value: Germinating Seeds
  misc_feature: MA Experiment ID: 20000180 Result: Up-regulated in Transcription
  misc_feature: MA Experiment 20000180 PARAMETER Experiment Name: At_Germinating_Seeds_P Parameter: Age (hr) Value: 24 vs. 0
  misc_feature: MA Experiment 20000180 PARAMETER Experiment Name: At_Germinating_Seeds_P Parameter: Tissue Value: Germinating Seeds
  misc_feature: MA Experiment ID: 20000185 Result: Up-regulated in Transcription
  misc_feature: MA Experiment 20000185 PARAMETER Experiment Name: At_Roots__P Parameter: Age (day) Value: 7 vs. 21
  misc_feature: MA Experiment 20000185 PARAMETER Experiment Name: At_Roots__P Parameter: Organism Value: A. thaliana
  misc_feature: MA Experiment 20000185 PARAMETER Experiment Name: At_Roots__P Parameter: Tissue Value: Roots vs. Whole Plant
  misc_feature: MA Experiment ID: 20000227 Result: Up-regulated in Transcription
  misc_feature: MA Experiment 20000227 PARAMETER Experiment Name: At_Root-Tips-vs-Tops_P Parameter: Tissue Value: Root Tips vs. Root Tops
  misc_feature: MA Experiment ID: 20000234 Result: Up-regulated in Transcription
  misc_feature: MA Experiment 20000234 PARAMETER Experiment Name: At_Siliques_P Parameter: Age (day) Value: 21
  misc_feature: MA Experiment 20000234 PARAMETER Experiment Name: At_Siliques_P Parameter: Organism Value: A. thaliana
  misc_feature: MA Experiment 20000234 PARAMETER Experiment Name: At_Siliques_P Parameter: Plant Line Value: WS
  misc_feature: MA Experiment 20000234 PARAMETER Experiment Name: At_Siliques_P Parameter: Tissue Value: Less Than 5mm Siliques vs. Whole Plant
  misc_feature: MA Experiment ID: 20000264 Result: Up-regulated in Transcription
  misc_feature: MA Experiment 20000264 PARAMETER Experiment Name: At_Open_Flower_P Parameter: Age (day) Value: 21
  misc_feature: MA Experiment 20000264 PARAMETER Experiment Name: At_Open_Flower_P Parameter: Plant Line Value: WS
  misc_feature: MA Experiment 20000264 PARAMETER Experiment Name: At_Open_Flower_P Parameter: Tissue Value: Open Flower vs. Whole Plant
  misc_feature: MA Experiment ID: 20000265 Result: Up-regulated in Transcription
  misc_feature: MA Experiment 20000265 PARAMETER Experiment Name: At_Open_Flower_P Parameter: Age (day) Value: 21
  misc_feature: MA Experiment 20000265 PARAMETER Experiment Name: At_Open_Flower_P Parameter: Plant Line Value: WS
  misc_feature: MA Experiment 20000265 PARAMETER Experiment Name: At_Open_Flower_P Parameter: Tissue Value: Closed Flower vs. Whole Plant
  misc_feature: MA Experiment ID: 20000267 Result: Up-regulated in Transcription
  misc_feature: MA Experiment 20000267 PARAMETER Experiment Name: At_Drought_P Parameter: Age (day) Value: 7
  misc_feature: MA Experiment 20000267 PARAMETER Experiment Name: At_Drought_P Parameter: Organism Value: A. thaliana
  misc_feature: MA Experiment 20000267 PARAMETER Experiment Name: At_Drought_P Parameter: Plant Line Value: WS
  misc_feature: MA Experiment 20000267 PARAMETER Experiment Name: At_Drought_P Parameter: Timepoint (hr) Value: 6
  misc_feature: MA Experiment 20000267 PARAMETER Experiment Name: At_Drought_P Parameter: Tissue Value: Whole Plant
  misc_feature: MA Experiment 20000267 PARAMETER Experiment Name: At_Drought_P Parameter: Treatment Value: Drought vs. No Drought
  misc_feature: MA Experiment ID: 20000286 Result: Up-regulated in Transcription
  misc_feature: MA Experiment 20000286 PARAMETER Experiment Name: At_Open_Flower_P Parameter: Age (day) Value: 21
  misc_feature: MA Experiment 20000286 PARAMETER Experiment Name: At_Open_Flower_P Parameter: Plant Line Value: WS
  misc_feature: MA Experiment 20000286 PARAMETER Experiment Name: At_Open_Flower_P Parameter: Tissue Value: Half Open vs. Whole Plant
  misc_feature: MA Experiment ID: 20000308 Result: Up-regulated in Transcription
  misc_feature: MA Experiment 20000308 PARAMETER Experiment Name: At_100mM_NaCl__P Parameter: Age (day) Value: 17
  misc_feature: MA Experiment 20000308 PARAMETER Experiment Name: At_100mM_NaCl__P Parameter: Organism Value: A. thaliana
  misc_feature: MA Experiment 20000308 PARAMETER Experiment Name: At_100mM_NaCl__P Parameter: Plant Line Value: WS
  misc_feature: MA Experiment 20000308 PARAMETER Experiment Name: At_100mM_NaCl__P Parameter: Timepoint (hr) Value: 72
  misc_feature: MA Experiment 20000308 PARAMETER Experiment Name: At_100mM_NaCl__P Parameter: Tissue Value: Whole Plant
  misc_feature: MA Experiment 20000308 PARAMETER Experiment Name: At_100mM_NaCl__P Parameter: Treatment Value: 100mM NaCl vs. No Treatment
  misc_feature: MA Experiment ID: 20000439 Result: Up-regulated in Transcription
  misc_feature: MA Experiment 20000439 PARAMETER Experiment Name: At_Roots__P Parameter: Age (day) Value: 14 vs. 21
  misc_feature: MA Experiment 20000439 PARAMETER Experiment Name: At_Roots__P Parameter: Organism Value: A. thaliana
  misc_feature: MA Experiment 20000439 PARAMETER Experiment Name: At_Roots__P Parameter: Tissue Value: Roots vs. Whole Plant
  misc_feature: MA Experiment ID: 20000573 Result: Down-regulated in Transcription
  misc_feature: MA Experiment 20000573 PARAMETER Experiment Name: At_100uM_ABA_Mutants__P Parameter: Organism Value: A. thaliana
  misc_feature: MA Experiment 20000573 PARAMETER Experiment Name: At_100uM_ABA_Mutants__P Parameter: Plant Line Value: CS22 vs. Ler wt
  misc_feature: MA Experiment 20000573 PARAMETER Experiment Name: At_100uM_ABA_Mutants__P Parameter: Timepoint (hr) Value: N/A
  misc_feature: MA Experiment 20000573 PARAMETER Experiment Name: At_100uM_ABA_Mutants__P Parameter: Tissue Value: Whole Plant
  misc_feature: MA Experiment 20000573 PARAMETER Experiment Name: At_100uM_ABA_Mutants__P Parameter: Treatment Value: None
  misc_feature: MA Experiment ID: 20001248 Result: Down-regulated in Transcription
  misc_feature: MA Experiment 20001248 PARAMETER Experiment Name: At_Far-red-induction_P Parameter: Age (day) Value: 7
  misc_feature: MA Experiment 20001248 PARAMETER Experiment Name: At_Far-red-induction_P Parameter: Light Value: Far-red vs. White
  misc_feature: MA Experiment 20001248 PARAMETER Experiment Name: At_Far-red-induction_P Parameter: Organism Value: A. thaliana
  misc_feature: MA Experiment 20001248 PARAMETER Experiment Name: At_Far-red-induction_P Parameter: Plant Line Value: Columbia
  misc_feature: MA Experiment 20001248 PARAMETER Experiment Name: At_Far-red-induction_P Parameter: Timepoint (hr) Value: 4
  misc_feature: MA Experiment 20001248 PARAMETER Experiment Name: At_Far-red-induction_P Parameter: Tissue Value: Whole Plant
  misc_feature: MA Experiment ID: 20001554 Result: Up-regulated in Transcription
  misc_feature: MA Experiment 20001554 PARAMETER Experiment Name: At_Drought_Soil_Dry_P Parameter: Age (day) Value: 21
  misc_feature: MA Experiment 20001554 PARAMETER Experiment Name: At_Drought_Soil_Dry_P Parameter: Organism Value: A. thaliana
  misc_feature: MA Experiment 20001554 PARAMETER Experiment Name: At_Drought_Soil_Dry_P Parameter: Plant Line Value: WS
  misc_feature: MA Experiment 20001554 PARAMETER Experiment Name: At_Drought_Soil_Dry_P Parameter: Post Timepoint (hr) Value: None
  misc_feature: MA Experiment 20001554 PARAMETER Experiment Name: At_Drought_Soil_Dry_P Parameter: Post-Treatment Value: None
  misc_feature: MA Experiment 20001554 PARAMETER Experiment Name: At_Drought_Soil_Dry_P Parameter: Timepoint (day) Value: 7
  misc_feature: MA Experiment 20001554 PARAMETER Experiment Name: At_Drought_Soil_Dry_P Parameter: Treatment Value: Drought vs. No Drought
  misc_feature: MA Experiment ID: 20001555 Result: Up-regulated in Transcription
  misc_feature: MA Experiment 20001555 PARAMETER Experiment Name: At_Drought_Soil_Dry_P Parameter: Age (day) Value: 24
  misc_feature: MA Experiment 20001555 PARAMETER Experiment Name: At_Drought_Soil_Dry_P Parameter: Organism Value: A. thaliana
  misc_feature: MA Experiment 20001555 PARAMETER Experiment Name: At_Drought_Soil_Dry_P Parameter: Plant Line Value: WS
  misc_feature: MA Experiment 20001555 PARAMETER Experiment Name: At_Drought_Soil_Dry_P Parameter: Post Timepoint (hr) Value: None
  misc_feature: MA Experiment 20001555 PARAMETER Experiment Name: At_Drought_Soil_Dry_P Parameter: Post-Treatment Value: None
  misc_feature: MA Experiment 20001555 PARAMETER Experiment Name: At_Drought_Soil_Dry_P Parameter: Timepoint (day) Value: 10
  misc_feature: MA Experiment 20001555 PARAMETER Experiment Name: At_Drought_Soil_Dry_P Parameter: Treatment Value: Drought vs. No Drought
  misc_feature: MA Experiment ID: 20001556 Result: Up-regulated in Transcription
  misc_feature: MA Experiment 20001556 PARAMETER Experiment Name: At_Drought_Soil_Dry_P Parameter: Age (day) Value: 26
  misc_feature: MA Experiment 20001556 PARAMETER Experiment Name: At_Drought_Soil_Dry_P Parameter: Organism Value: A. thaliana
  misc_feature: MA Experiment 20001556 PARAMETER Experiment Name: At_Drought_Soil_Dry_P Parameter: Plant Line Value: WS
  misc_feature: MA Experiment 20001556 PARAMETER Experiment Name: At_Drought_Soil_Dry_P Parameter: Post Timepoint (hr) Value: None
  misc_feature: MA Experiment 20001556 PARAMETER Experiment Name: At_Drought_Soil_Dry_P Parameter: Post-Treatment Value: None
  misc_feature: MA Experiment 20001556 PARAMETER Experiment Name: At_Drought_Soil_Dry_P Parameter: Timepoint (day) Value: 12
  misc_feature: MA Experiment 20001556 PARAMETER Experiment Name: At_Drought_Soil_Dry_P Parameter: Treatment Value: Drought vs. No Drought
  misc_feature: MA Experiment ID: 20001557 Result: Up-regulated in Transcription
  misc_feature: MA Experiment 20001557 PARAMETER Experiment Name: At_Drought_Soil_Dry_P Parameter: Age (day) Value: 27
  misc_feature: MA Experiment 20001557 PARAMETER Experiment Name: At_Drought_Soil_Dry_P Parameter: Organism Value: A. thaliana
  misc_feature: MA Experiment 20001557 PARAMETER Experiment Name: At_Drought_Soil_Dry_P Parameter: Plant Line Value: WS
  misc_feature: MA Experiment 20001557 PARAMETER Experiment Name: At_Drought_Soil_Dry_P Parameter: Post Timepoint (hr) Value: 3
  misc_feature: MA Experiment 20001557 PARAMETER Experiment Name: At_Drought_Soil_Dry_P Parameter: Post-Treatment Value: Re-Water vs. No Drought
  misc_feature: MA Experiment 20001557 PARAMETER Experiment Name: At_Drought_Soil_Dry_P Parameter: Timepoint (day) Value: 13
  misc_feature: MA Experiment 20001557 PARAMETER Experiment Name: At_Drought_Soil_Dry_P Parameter: Treatment Value: Drought vs. No Drought
  misc_feature: MA Experiment ID: 20001559 Result: Up-regulated in Transcription
  misc_feature: MA Experiment 20001559 PARAMETER Experiment Name: At_Drought_Soil_Dry_P Parameter: Age (day) Value: 28
  misc_feature: MA Experiment 20001559 PARAMETER Experiment Name: At_Drought_Soil_Dry_P Parameter: Organism Value: A. thaliana
  misc_feature: MA Experiment 20001559 PARAMETER Experiment Name: At_Drought_Soil_Dry_P Parameter: Plant Line Value: WS
  misc_feature: MA Experiment 20001559 PARAMETER Experiment Name: At_Drought_Soil_Dry_P Parameter: Post Timepoint (hr) Value: 29
  misc_feature: MA Experiment 20001559 PARAMETER Experiment Name: At_Drought_Soil_Dry_P Parameter: Post-Treatment Value: Re-Water vs. No Drought
  misc_feature: MA Experiment 20001559 PARAMETER Experiment Name: At_Drought_Soil_Dry_P Parameter: Timepoint (day) Value: 14
  misc_feature: MA Experiment 20001559 PARAMETER Experiment Name: At_Drought_Soil_Dry_P Parameter: Treatment Value: Drought vs. No Drought
  misc_feature: MA Experiment ID: 20001757 Result: Down-regulated in Transcription
  misc_feature: MA Experiment 20001757 PARAMETER Experiment Name: At_50mM_NH4NO3_L-to-H_P Parameter: Timepoint (hr) Value: 6
  misc_feature: MA Experiment 20001757 PARAMETER Experiment Name: At_50mM_NH4NO3_L-to-H_P Parameter: Tissue Value: Leaf
  misc_feature: MA Experiment 20001757 PARAMETER Experiment Name: At_50mM_NH4NO3_L-to-H_P Parameter: Treatment Value: 50mM NH4NO3 vs 100mM Mannitol
  misc_feature: MA Experiment ID: 20001904 Result: Up-regulated in Transcription
  misc_feature: MA Experiment 20001904 PARAMETER Experiment Name: At_Drought_Reproduction_P Parameter: Age (day) Value: 37
  misc_feature: MA Experiment 20001904 PARAMETER Experiment Name: At_Drought_Reproduction_P Parameter: Organism Value: A. thaliana
  misc_feature: MA Experiment 20001904 PARAMETER Experiment Name: At_Drought_Reproduction_P Parameter: Plant Line Value: WS
  misc_feature: MA Experiment 20001904 PARAMETER Experiment Name: At_Drought_Reproduction_P Parameter: Timepoint (day) Value: 7
  misc_feature: MA Experiment 20001904 PARAMETER Experiment Name: At_Drought_Reproduction_P Parameter: Tissue Value: Rosettes
  misc_feature: MA Experiment 20001904 PARAMETER Experiment Name: At_Drought_Reproduction_P Parameter: Treatment Value: Drought vs. No Drought
atctctcttaatttagtcttttgtcttcgtaattacaatggctccaggaactttgactgagctagccggagagtctaagctcaactctaaatttgtcagggacgaagatgaacggcccaaagtcgcttacaatgtgtttagcgacgaaatcccggtgatctctctcgccggtatcgatgacgtcgatggaaaaagaggagagatctgccgtcagatcgttgaggcttgtgagaattggggcatcttccaagtggtcgatcacggcgtcgatactaacttagtggcggatatgactcgtctcgctcgtgacttctttgctttacctccggaagacaagctccgtttcgacatgtccggtggtaaaaaaggaggattcatcgtctctagtcacctccagggagaggctgtgcaagattggagagagattgtaacgtatttctcgtacccggtgagaaacagagactactcacggtggccagataagccggaaggttgggtgaaagtgacggaggagtatagtgagaggcttatgagtttggcttgtaagcttcttgaggttttgtctgaagctatgggtcttgagaaagagtctcttaccaatgcatgcgtcgatatggaccaaaagattgttgttaattattacccaaaatgccctcagcctgatctcaccctcggactcaagcgtcacactgaccctggaaccattaccttgctgctacaagaccaagtcggtggattacaagccacacgtgacaatggcaagacatggattacggttcagcctgttgaaggagcgtttgtcgtcaatctcggcgaccacggccattttttgagcaatgggaggttcaagaatgctgatcatcaggccgtggtgaactctaactcgagcagattatccatagccacgttccagaaccccgcgccggatgccacagtgtatccactgaaagtaagagaaggagagaaggcaatattggaggagccaatcacgtttgccgagatgtataagagaaagatgggaagagatttggagcttgctcgcctcaagaagctggctaaagaggagcgtgaccacaaagaagttgacaagcctgtcgaccaaatcttcgcttagaatctttgtgttcttgcttacttgttgttgcgttggttctgttttgtacgttggtactgaaaattatgctaggctcggtgtgttttgtgtttatttatgttctttcgaatcataaagaaataatgataattgatgcacttgtctatgacaaaaacatcatactccacctgtatttgacgcgttgggtttatgtcaaaaagcattaatacttc

SEQ ID NO: 86562 - protein, 358 aa, Arabidopsis thaliana; identical to SEQ ID NO: 23579
  peptide (1)..(358): Ceres Seq. ID no. 12691598
  misc_feature (1)..(358): Homolog of NCBI NO: 15230433 NR Description: flavanone 3-hydroxylase (FH3); protein id: supported by cDNA: 36653., supported by cDNA: gi_16226799, by cDNA: gi_16604532 [Arabidopsis thaliana]
  misc_feature (1)..(358): Homolog of NCBI NO: 1002803 NR Description: flavanone 3-hydroxylase
  misc_feature (1)..(358): Homolog of NCBI NO: 21593152 NR Description: flavanone 3-hydroxylase FH3 [Arabidopsis thaliana]
  misc_feature (15)..(358): Homolog of NCBI NO: 12578949 NR Description: flavanone-3-hydroxylase [Arabidopsis thaliana]
  misc_feature (15)..(358): Homolog of NCBI NO: 12578915 NR Description: flavanone-3-hydroxylase [Arabidopsis thaliana]
  misc_feature (2)..(358): Homolog of NCBI NO: 729506 NR Description: Naringenin,2-oxoglutarate 3-dioxygenase
  misc_feature (15)..(358): Homolog of NCBI NO: 12578929 NR Description: flavanone-3-hydroxylase [Arabidopsis thaliana]
  misc_feature (15)..(358): Homolog of NCBI NO: 12578935 NR Description: flavanone-3-hydroxylase [Arabidopsis thaliana]
  misc_feature (11)..(350): Homolog of NCBI NO: 24740452 NR Description: flavanone-3-hydroxylase [Arabidopsis thaliana]
  misc_feature (15)..(358): Homolog of NCBI NO: 12578941 NR Description: flavanone-3-hydroxylase [Arabidopsis thaliana]

SEQ ID NO: 86563 - protein, 274 aa, Arabidopsis thaliana; identical to SEQ ID NO: 23580
  peptide (1)..(274): Ceres Seq. ID no. 12691599
  misc_feature (1)..(274): Homolog of NCBI NO: 15230433 NR Description: flavanone 3-hydroxylase (FH3); protein id: supported by cDNA: 36653., supported by cDNA: gi_16226799, by cDNA: gi_16604532 [Arabidopsis thaliana]
  misc_feature (1)..(274): Homolog of NCBI NO: 1002803 NR Description: flavanone 3-hydroxylase
  misc_feature (1)..(274): Homolog of NCBI NO: 21593152 NR Description: flavanone 3-hydroxylase FH3 [Arabidopsis thaliana]
  misc_feature (1)..(274): Homolog of NCBI NO: 12578949 NR Description: flavanone-3-hydroxylase [Arabidopsis thaliana]
  misc_feature (1)..(274): Homolog of NCBI NO: 12578915 NR Description: flavanone-3-hydroxylase [Arabidopsis thaliana]
  misc_feature (1)..(274): Homolog of NCBI NO: 729506 NR Description: Naringenin,2-oxoglutarate 3-dioxygenase
  misc_feature (1)..(274): Homolog of NCBI NO: 12578929 NR Description: flavanone-3-hydroxylase [Arabidopsis thaliana]
  misc_feature (1)..(274): Homolog of NCBI NO: 12578935 NR Description: flavanone-3-hydroxylase [Arabidopsis thaliana]
  misc_feature (1)..(266): Homolog of NCBI NO: 24740452 NR Description: flavanone-3-hydroxylase [Arabidopsis thaliana]
  misc_feature (1)..(274): Homolog of NCBI NO: 12578941 NR Description: flavanone-3-hydroxylase [Arabidopsis thaliana]

SEQ ID NO: 86564 - protein, 254 aa, Arabidopsis thaliana; identical to SEQ ID NO: 23581
  peptide (1)..(254): Ceres Seq. ID no. 12691600
  misc_feature (1)..(254): Homolog of NCBI NO: 15230433 NR Description: flavanone 3-hydroxylase (FH3); protein id: supported by cDNA: 36653., supported by cDNA: gi_16226799, by cDNA: gi_16604532 [Arabidopsis thaliana]
  misc_feature (1)..(254): Homolog of NCBI NO: 1002803 NR Description: flavanone 3-hydroxylase
  misc_feature (1)..(254): Homolog of NCBI NO: 21593152 NR Description: flavanone 3-hydroxylase FH3 [Arabidopsis thaliana]
  misc_feature (1)..(254): Homolog of NCBI NO: 12578949 NR Description: flavanone-3-hydroxylase [Arabidopsis thaliana]
  misc_feature (1)..(254): Homolog of NCBI NO: 12578915 NR Description: flavanone-3-hydroxylase [Arabidopsis thaliana]
  misc_feature (1)..(254): Homolog of NCBI NO: 729506 NR Description: Naringenin,2-oxoglutarate 3-dioxygenase
  misc_feature (1)..(254): Homolog of NCBI NO: 12578929 NR Description: flavanone-3-hydroxylase [Arabidopsis thaliana]
  misc_feature (1)..(254): Homolog of NCBI NO: 12578935 NR Description: flavanone-3-hydroxylase [Arabidopsis thaliana]
  misc_feature (1)..(246): Homolog of NCBI NO: 24740452 NR Description: flavanone-3-hydroxylase [Arabidopsis thaliana]
  misc_feature (1)..(254): Homolog of NCBI NO: 12578941 NR Description: flavanone-3-hydroxylase [Arabidopsis thaliana]

SEQ ID NO: 86565 - DNA, 1241 bp, Arabidopsis thaliana
  misc_feature (1)..(1241): Ceres Seq. ID no. 12691709
  misc_feature: MA Experiment ID: 108576 Result: Up-regulated in Transcription
  misc_feature: MA Experiment 108576 PARAMETER Experiment Name: At_42deg_Heat_cDNA_P Parameter: Temperature (deg C) Value: 42 vs. 22
  misc_feature: MA Experiment 108576 PARAMETER Experiment Name: At_42deg_Heat_cDNA_P Parameter: Timepoint (hr) Value: 1
  misc_feature: MA Experiment 108576 PARAMETER Experiment Name: At_42deg_Heat_cDNA_P Parameter: Tissue Value: Aerial
  misc_feature: MA Experiment ID: 20000180 Result: Down-regulated in Transcription
  misc_feature: MA Experiment 20000180 PARAMETER Experiment Name: At_Germinating_Seeds_P Parameter: Age (hr) Value: 24 vs. 0
  misc_feature: MA Experiment 20000180 PARAMETER Experiment Name: At_Germinating_Seeds_P Parameter: Tissue Value: Germinating Seeds
aaagacaaatatataacaattgaaacacatgtgtgttatcaggagaatttgtatgttttgaggaggtgtgcatcatccgtctatcaataccctgacaaggaaaaccctaattttttttggcccaaagggttttatactttaatctcatactccgattcattgtcgaaaaacgatgatgcataattcaaccgaagaatcggaatgggaggtgagacctggtggtatgctcgtccaacgaagagacgacaccgcttcctccgaccacaaacctctccaggatcccgactctgcttccgccgcttttgctcaaaccatcagaatcactgtttctcatggctcatcgcaccacgatcttcatatttctgctcacgccactttcggggatgtaaagaaagctcttgttcagaaaactggattggaagctagtgaattgaagatcttgttcagaggagttgagagagatgatgctgaacaattgcaagctgctggtgttaaggatgcgtctaagcttgttgttgttgttgaggatacgaataagagagtggaacaacagcctcctgtggtaactaaagagatggaaaaagctattgctgctgttaacgcggttacaggagaggtcgataagctctcggatagagttgttgctttagaagttgctgtgaatggagggacgcaagttgcggtgcgggagtttgacatggctgcagagcttcttatgaggcagctgctcaaattggatggcattgaggctgaaggggacgctaaagtacagcgtaaggctgaggtacgtagaatccaaaacttgcaggaggctgtggataagttgaaggcaagatgttcaaatccgtttgtggatcagagcaaagctgcagctgtaagcactgagtgggaatcgttcggaaacggtgtcggaagcttgaaccctcctccgccagcttcgccttcggccaatgtaactcaagattgggagaaatttgactgacattttagtactgctacgttgccttggaaaaaaatgcttattgaaactgtttatctttttgattattgttaaatattggaaaacgaccatcgtctttatcttctaatgtatagatatattatatatagtatcggaaatctacatctctgttcgttatgttggaataatccctgggaatagtctttgatgtctctcagtctctgtcgtgcctaattggcttatgtcgtagtactaaagattatggctacgagttttggag

SEQ ID NO: 86566 - protein, 269 aa, Arabidopsis thaliana
  peptide (1)..(269): Ceres Seq. ID no. 12691710
  misc_feature (138)..(219): Pfam Name: BAG domain Pfam Description: BAG domain
  misc_feature (1)..(269): Homolog of NCBI NO: 15231035 NR Description: putative protein; protein id: At3g51780.1, by cDNA: 21630., supported by cDNA: gi_19699282 [Arabidopsis
  misc_feature (1)..(269): Homolog of NCBI NO: 19699283 NR Description: At3g51780/ORF3 [Arabidopsis thaliana]
  misc_feature (2)..(269): Homolog of NCBI NO: 21554254 NR Description: unknown [Arabidopsis thaliana]
  misc_feature (8)..(269): Homolog of NCBI NO: 34907972 NR Description: P0446G04.18 [Oryza sativa (japonica
  misc_feature (8)..(221): Homolog of NCBI NO: 25553557 NR Description: OSJNBa0038F22.4 [Oryza sativa (japonica
  misc_feature (8)..(221): Homolog of NCBI NO: 34898024 NR Description: ESTs AU082174(S13676),AU032395(R3986) correspond a region of the predicted gene.~Similar to Arabidopsis thaliana
  misc_feature (1)..(232): Homolog of NCBI NO: 21537107 NR Description: unknown [Arabidopsis thaliana]
  misc_feature (1)..(232): Homolog of NCBI NO: 15240726 NR Description: putative protein; protein id: At5g07220.1, by cDNA: 12022., supported by cDNA: gi_16226482 [Arabidopsis
  misc_feature (12)..(223): Homolog of NCBI NO: 15242267 NR Description: putative protein; protein id: At5g52060.1 thaliana] >gi|10177741|dbj|BAB11054.1| contains similarity to
  misc_feature (7)..(242): Homolog of NCBI NO: 6624711 NR Description: hypothetical protein [Oryza sativa (indica
MMHNSTEESEWEVRPGGMLVQRRDDTASSDHKPLQDPDSASAAFAQTIRITVSHGSSHHDLHISAHATFGDVKKALVQKTGLEASELKILFRGVERDDAEQLQAAGVKDASKLVVVVEDTNKRVEQQPPVVTKEMEKAIAAVNAVTGEVDKLSDRVVALEVAVNGGTQVAVREFDMAAELLMRQLLKLDGIEAEGDAKVQRKAEVRRIQNLQEAVDKLKARCSNPFVDQSKAAAVSTEWESFGNGVGSLNPPPPASPSANVTQDWEKFD

SEQ ID NO: 86567 - protein, 268 aa, Arabidopsis thaliana
  peptide (1)..(268): Ceres Seq. ID no. 12691711
  misc_feature (137)..(218): Pfam Name: BAG domain Pfam Description: BAG domain
  misc_feature (1)..(268): Homolog of NCBI NO: 15231035 NR Description: putative protein; protein id: At3g51780.1, by cDNA: 21630., supported by cDNA: gi_19699282 [Arabidopsis
  misc_feature (1)..(268): Homolog of NCBI NO: 19699283 NR Description: At3g51780/ORF3 [Arabidopsis thaliana]
  misc_feature (1)..(268): Homolog of NCBI NO: 21554254 NR Description: unknown [Arabidopsis thaliana]
  misc_feature (7)..(268): Homolog of NCBI NO: 34907972 NR Description: P0446G04.18 [Oryza sativa (japonica
  misc_feature (7)..(220): Homolog of NCBI NO: 25553557 NR Description: OSJNBa0038F22.4 [Oryza sativa (japonica
  misc_feature (7)..(220): Homolog of NCBI NO: 34898024 NR Description: ESTs AU082174(S13676),AU032395(R3986) correspond a region of the predicted gene.~Similar to Arabidopsis thaliana
  misc_feature (1)..(231): Homolog of NCBI NO: 21537107 NR Description: unknown [Arabidopsis thaliana]
  misc_feature (1)..(231): Homolog of NCBI NO: 15240726 NR Description: putative protein; protein id: At5g07220.1, by cDNA: 12022., supported by cDNA: gi_16226482 [Arabidopsis
  misc_feature (11)..(222): Homolog of NCBI NO: 15242267 NR Description: putative protein; protein id: At5g52060.1 thaliana] >gi|10177741|dbj|BAB11054.1| contains similarity to
  misc_feature (6)..(241): Homolog of NCBI NO: 6624711 NR Description: hypothetical protein [Oryza sativa (indica
MHNSTEESEWEVRPGGMLVQRRDDTASSDHKPLQDPDSASAAFAQTIRITVSHGSSHHDLHISAHATFGDVKKALVQKTGLEASELKILFRGVERDDAEQLQAAGVKDASKLVVVVEDTNKRVEQQPPVVTKEMEKAIAAVNAVTGEVDKLSDRVVALEVAVNGGTQVAVREFDMAAELLMRQLLKLDGIEAEGDAKVQRKAEVRRIQNLQEAVDKLKARCSNPFVDQSKAAAVSTEWESFGNGVGSLNPPPPASPSANVTQDWEKFD

SEQ ID NO: 86568 - protein, 252 aa, Arabidopsis thaliana
  peptide (1)..(252): Ceres Seq. ID no. 12691712
  misc_feature (121)..(202): Pfam Name: BAG domain Pfam Description: BAG domain
  misc_feature (1)..(252): Homolog of NCBI NO: 15231035 NR Description: putative protein; protein id: At3g51780.1, by cDNA: 21630., supported by cDNA: gi_19699282 [Arabidopsis
  misc_feature (1)..(252): Homolog of NCBI NO: 19699283 NR Description: At3g51780/ORF3 [Arabidopsis thaliana]
  misc_feature (1)..(252): Homolog of NCBI NO: 21554254 NR Description: unknown [Arabidopsis thaliana]
  misc_feature (1)..(252): Homolog of NCBI NO: 34907972 NR Description: P0446G04.18 [Oryza sativa (japonica
  misc_feature (1)..(204): Homolog of NCBI NO: 25553557 NR Description: OSJNBa0038F22.4 [Oryza sativa (japonica
  misc_feature (1)..(204): Homolog of NCBI NO: 34898024 NR Description: ESTs AU082174(S13676),AU032395(R3986) correspond a region of the predicted gene.~Similar to Arabidopsis thaliana
  misc_feature (1)..(215): Homolog of NCBI NO: 21537107 NR Description: unknown [Arabidopsis thaliana]
  misc_feature (1)..(215): Homolog of NCBI NO: 15240726 NR Description: putative protein; protein id: At5g07220.1, by cDNA: 12022., supported by cDNA: gi_16226482 [Arabidopsis
  misc_feature (1)..(206): Homolog of NCBI NO: 15242267 NR Description: putative protein; protein id: At5g52060.1 thaliana] >gi|10177741|dbj|BAB11054.1| contains similarity to
  misc_feature (1)..(225): Homolog of NCBI NO: 6624711 NR Description: hypothetical protein [Oryza sativa (indica
MLVQRRDDTASSDHKPLQDPDSASAAFAQTIRITVSHGSSHHDLHISAHATFGDVKKALVQKTGLEASELKILFRGVERDDAEQLQAAGVKDASKLVVVVEDTNKRVEQQPPVVTKEMEKAIAAVNAVTGEVDKLSDRVVALEVAVNGGTQVAVREFDMAAELLMRQLLKLDGIEAEGDAKVQRKAEVRRIQNLQEAVDKLKARCSNPFVDQSKAAAVSTEWESFGNGVGSLNPPPPASPSANVTQDWEKFD

SEQ ID NO: 86569 - DNA, 2052 bp, Arabidopsis thaliana
  misc_feature (1)..(2052): Ceres Seq. ID no. 12691754
  misc_feature: MA Experiment ID: 20000451 Result: Up-regulated in Transcription
  misc_feature: MA Experiment 20000451 PARAMETER Experiment Name: At_CS6879_Shoots-Roots_P Parameter: Age (day) Value: 14
  misc_feature: MA Experiment 20000451 PARAMETER Experiment Name: At_CS6879_Shoots-Roots_P Parameter: Organism Value: A. thaliana
  misc_feature: MA Experiment 20000451 PARAMETER Experiment Name: At_CS6879_Shoots-Roots_P Parameter: Plant Line Value: CS6879 vs. WS
  misc_feature: MA Experiment 20000451 PARAMETER Experiment Name: At_CS6879_Shoots-Roots_P Parameter: Tissue Value: Roots
atgtcggctagagctcatcctgtggacgatgacggagagatttccccggtggaaagatcttccccgcggcaagcaaatacaccgtatgtccacaaagtcgaagttcctcctaagcaaaaccttttcaatgagttcatgtacacttttaaagaaactttcttccacgatgatcctctaaggcatttcaaggaccagtcaaaatccaaaaagctcatgctcggtatccagtccgtctttccggttatcgagtggggaagaaaatataatcttaagttgtttcgcggcgatcttattgccggtttaaccatagccagtctctgcattcctcaggatattggatatgcaaagctcgcgagtcttgaccctaagtatggtctatattcaagttttgttcctccgttggtgtacgcatgtatgggaagctcaaaggatatagcgattggacccgttgcagtggtttcactcctattaggtactctgcttcgtgctgagatcgaccccaacacaaaccctaatgaatatctccgcttagccttcacctccacgttctttgccggtgtcactcaagcagcactcggattcttcagattgggtttcttgatcgatttcttgtcccacgcggcggtggtaggtttcatgggcggagcagccatcaccattgcgctgcaacagctcaaaggcttcctaggaatcaataagttcacaaagaaaaccgatatcatcgcggttctttcttccgtaatcagctcagcccatcacggagtaaagagtctttcaatcactctgtttttagtatctttcactctttatgtatcttcaccgtttgatatcaaatgcttgcagtggaattggcagacaatactcattagtgcatcgttcttgatcttccttctcatctccaagtttatcgggaagagaaacaagaaactgttttggattccagctattgctccgttagtatctgtcatcatttcaaccttcttcgtctacataacccgagccgacaagaaaggagttcagatagtgaaacatcttgacaaaggtctgaacccttcttctttgcgtctaatatatttctcgggcgattaccttctcaagggcttccgcataggcgttgtctcaggcatggttgccttgacggaagctgtagcgataggaagaacatttgcagcaatgaaagactaccaaatcgatggtaacaaagagatggtagcattaggagcaatgaacgtaatcggttcaatgacctcttgctatgtatccaccggttctttctcaagatccgccgtcaactttatggccggatgtcaaacggcagtctccaacatcatcatgtccattgtcgtcctcttaacgcttctcttcctcactcctcttttcaaatacacacccaacgcaattcttgcagcgatcatcatcaacgctgtgattcctttggttgacgttaatgctaccattttgatcttcaagatcgataagctcgattttgttgcttgtatgggggctttttttggtgtcatctttgtatccgtagagattggccttctaatagccgtggggatatcttttgccaagatacttttgcaagttacgagacctaggacagcgattcttggaaagataccagggacttcggtttacaggaatatcaatcagtatcctgaagcgactaggattccgggagttttgacaattcgtgttgactccgcgatttacttctccaactccaattatgttagggaaaggattcaaagatggttgacagatgaagaagagatggtggaagctgcaagattgcctaggatccagtttcttatcatcgaaatgtcacctgttacggacatcgatactagtggtattcacgccttagaagacttgtataagtctctccaaaaacgagacattcagttggttctagcgaatccaggaccgccggtcataaataagctacatgtttctcactttgcggacttgataggacacgacaaaatctttctgacggtggctgaggccgtggattcttgctcccctaaactgtccgacgaggtctga

SEQ ID NO: 86570 - protein, 683 aa, Arabidopsis thaliana
  peptide (1)..(683): Ceres Seq. ID no. 12691755
  misc_feature (553)..(671): Pfam Name: STAS domain Pfam Description: STAS domain
  misc_feature (282)..(683): Homolog of NCBI NO: 18411776 NR Description: high affinity sulphate transporter, putative; id: At1g78000.1, supported by cDNA: gi_14245726 [Arabidopsis >gi|7768660|dbj|BAA95484.1| sulfate transporter [Arabidopsis
  misc_feature (1)..(254): Homolog of NCBI NO: 18411776 NR Description: high affinity sulphate transporter, putative; id: At1g78000.1, supported by cDNA: gi_14245726 [Arabidopsis >gi|7768660|dbj|BAA95484.1| sulfate transporter [Arabidopsis
  misc_feature (282)..(679): Homolog of NCBI NO: 14484936 NR Description: high affinity sulfate transporter [Lycopersicon
  misc_feature (13)..(302): Homolog of NCBI NO: 14484936 NR Description: high affinity sulfate transporter [Lycopersicon
  misc_feature (282)..(679): Homolog of NCBI NO: 13487715 NR Description: sulfate transporter 1 [Lycopersicon esculentum]
  misc_feature (5)..(302): Homolog of NCBI NO: 13487715 NR Description: sulfate transporter 1 [Lycopersicon esculentum]
  misc_feature (282)..(679): Homolog of NCBI NO: 11907976 NR Description: high affinity sulfate transporter type 1 [Solanum
  misc_feature (1)..(302): Homolog of NCBI NO: 11907976 NR Description: high affinity sulfate transporter type 1 [Solanum
  misc_feature (282)..(682): Homolog of NCBI NO: 37572944 NR Description: putative high affinity sulfate transporter [Oryza
  misc_feature (6)..(309): Homolog of NCBI NO: 37572944 NR Description: putative high affinity sulfate transporter [Oryza
MSARAHPVDDDGEISPVERSSPRQANTPYVHKVEVPPKQNLFNEFMYTFKETFFHDDPLRHFKDQSKSKKLMLGIQSVFPVIEWGRKYNLKLFRGDLIAGLTIASLCIPQDIGYAKLASLDPKYGLYSSFVPPLVYACMGSSKDIAIGPVAVVSLLLGTLLRAEIDPNTNPNEYLRLAFTSTFFAGVTQAALGFFRLGFLIDFLSHAAVVGFMGGAAITIALQQLKGFLGINKFTKKTDIIAVLSSVISSAHHGVKSLSITLFLVSFTLYVSSPFDIKCLQWNWQTILISASFLIFLLISKFIGKRNKKLFWIPAIAPLVSVIISTFFVYITRADKKGVQIVKHLDKGLNPSSLRLIYFSGDYLLKGFRIGVVSGMVALTEAVAIGRTFAAMKDYQIDGNKEMVALGAMNVIGSMTSCYVSTGSFSRSAVNFMAGCQTAVSNIIMSIVVLLTLLFLTPLFKYTPNAILAAIIINAVIPLVDVNATILIFKIDKLDFVACMGAFFGVIFVSVEIGLLIAVGISFAKILLQVTRPRTAILGKIPGTSVYRNINQYPEATRIPGVLTIRVDSAIYFSNSNYVRERIQRWLTDEEEMVEAARLPRIQFLIIEMSPVTDIDTSGIHALEDLYKSLQKRDIQLVLANPGPPVINKLHVSHFADLIGHDKIFLTVAEAVDSCSPKLSDEV

SEQ ID NO: 86571 - protein, 638 aa, Arabidopsis thaliana
  peptide (1)..(638): Ceres Seq. ID no. 12691756
  misc_feature (508)..(626): Pfam Name: STAS domain Pfam Description: STAS domain
  misc_feature (237)..(638): Homolog of NCBI NO: 18411776 NR Description: high affinity sulphate transporter, putative; id: At1g78000.1, supported by cDNA: gi_14245726 [Arabidopsis >gi|7768660|dbj|BAA95484.1| sulfate transporter [Arabidopsis
  misc_feature (1)..(209): Homolog of NCBI NO: 18411776 NR Description: high affinity sulphate transporter, putative; id: At1g78000.1, supported by cDNA: gi_14245726 [Arabidopsis >gi|7768660|dbj|BAA95484.1| sulfate transporter [Arabidopsis
  misc_feature (237)..(634): Homolog of NCBI NO: 14484936 NR Description: high affinity sulfate transporter [Lycopersicon
  misc_feature (1)..(257): Homolog of NCBI NO: 14484936 NR Description: high affinity sulfate transporter [Lycopersicon
  misc_feature (237)..(634): Homolog of NCBI NO: 13487715 NR Description: sulfate transporter 1 [Lycopersicon esculentum]
  misc_feature (1)..(257): Homolog of NCBI NO: 13487715 NR Description: sulfate transporter 1 [Lycopersicon esculentum]
  misc_feature (237)..(634): Homolog of NCBI NO: 11907976 NR Description: high affinity sulfate transporter type 1 [Solanum
  misc_feature (1)..(257): Homolog of NCBI NO: 11907976 NR Description: high affinity sulfate transporter type 1 [Solanum
  misc_feature (237)..(637): Homolog of NCBI NO: 37572944 NR Description: putative high affinity sulfate transporter [Oryza
  misc_feature (1)..(264): Homolog of NCBI NO: 37572944 NR Description: putative high affinity sulfate transporter [Oryza
MYTFKETFFHDDPLRHFKDQSKSKKLMLGIQSVFPVIEWGRKYNLKLFRGDLIAGLTIASLCIPQDIGYAKLASLDPKYGLYSSFVPPLVYACMGSSKDIAIGPVAVVSLLLGTLLRAEIDPNTNPNEYLRLAFTSTFFAGVTQAALGFFRLGFLIDFLSHAAVVGFMGGAAITIALQQLKGFLGINKFTKKTDIIAVLSSVISSAHHGVKSLSITLFLVSFTLYVSSPFDIKCLQWNWQTILISASFLIFLLISKFIGKRNKKLFWIPAIAPLVSVIISTFFVYITRADKKGVQIVKHLDKGLNPSSLRLIYFSGDYLLKGFRIGVVSGMVALTEAVAIGRTFAAMKDYQIDGNKEMVALGAMNVIGSMTSCYVSTGSFSRSAVNFMAGCQTAVSNIIMSIVVLLTLLFLTPLFKYTPNAILAAIIINAVIPLVDVNATILIFKIDKLDFVACMGAFFGVIFVSVEIGLLIAVGISFAKILLQVTRPRTAILGKIPGTSVYRNINQYPEATRIPGVLTIRVDSAIYFSNSNYVRERIQRWLTDEEEMVEAARLPRIQFLIIEMSPVTDIDTSGIHALEDLYKSLQKRDIQLVLANPGPPVINKLHVSHFADLIGHDKIFLTVAEAVDSCSPKLSDEV

SEQ ID NO: 86572 - protein, 612 aa, Arabidopsis thaliana
  peptide (1)..(612): Ceres Seq. ID no. 12691757
  misc_feature (482)..(600): Pfam Name: STAS domain Pfam Description: STAS domain
  misc_feature (211)..(612): Homolog of NCBI NO: 18411776 NR Description: high affinity sulphate transporter, putative; id: At1g78000.1, supported by cDNA: gi_14245726 [Arabidopsis >gi|7768660|dbj|BAA95484.1| sulfate transporter [Arabidopsis
  misc_feature (1)..(183): Homolog of NCBI NO: 18411776 NR Description: high affinity sulphate transporter, putative; id: At1g78000.1, supported by cDNA: gi_14245726 [Arabidopsis >gi|7768660|dbj|BAA95484.1| sulfate transporter [Arabidopsis
  misc_feature (211)..(608): Homolog of NCBI NO: 14484936 NR Description: high affinity sulfate transporter [Lycopersicon
  misc_feature (1)..(231): Homolog of NCBI NO: 14484936 NR Description: high affinity sulfate transporter [Lycopersicon
  misc_feature (211)..(608): Homolog of NCBI NO: 13487715 NR Description: sulfate transporter 1 [Lycopersicon esculentum]
  misc_feature (1)..(231): Homolog of NCBI NO: 13487715 NR Description: sulfate transporter 1 [Lycopersicon esculentum]
  misc_feature (211)..(608): Homolog of NCBI NO: 11907976 NR Description: high affinity sulfate transporter type 1 [Solanum
  misc_feature (1)..(231): Homolog of NCBI NO: 11907976 NR Description: high affinity sulfate transporter type 1 [Solanum
  misc_feature (211)..(611): Homolog of NCBI NO: 37572944 NR Description: putative high affinity sulfate transporter [Oryza
  misc_feature (1)..(238): Homolog of NCBI NO: 37572944 NR Description: putative high affinity sulfate transporter [Oryza
MLGIQSVFPVIEWGRKYNLKLFRGDLIAGLTIASLCIPQDIGYAKLASLDPKYGLYSSFVPPLVYACMGSSKDIAIGPVAVVSLLLGTLLRAEIDPNTNPNEYLRLAFTSTFFAGVTQAALGFFRLGFLIDFLSHAAVVGFMGGAAITIALQQLKGFLGINKFTKKTDIIAVLSSVISSAHHGVKSLSITLFLVSFTLYVSSPFDIKCLQWNWQTILISASFLIFLLISKFIGKRNKKLFWIPAIAPLVSVIISTFFVYITRADKKGVQIVKHLDKGLNPSSLRLIYFSGDYLLKGFRIGVVSGMVALTEAVAIGRTFAAMKDYQIDGNKEMVALGAMNVIGSMTSCYVSTGSFSRSAVNFMAGCQTAVSNIIMSIVVLLTLLFLTPLFKYTPNAILAAIIINAVIPLVDVNATILIFKIDKLDFVACMGAFFGVIFVSVEIGLLIAVGISFAKILLQVTRPRTAILGKIPGTSVYRNINQYPEATRIPGVLTIRVDSAIYFSNSNYVRERIQRWLTDEEEMVEAARLPRIQFLIIEMSPVTDIDTSGIHALEDLYKSLQKRDIQLVLANPGPPVINKLHVSHFADLIGHDKIFLTVAEAVDSCSPKLSDEV

SEQ ID NO: 86573 - DNA, 987 bp, Arabidopsis thaliana
  misc_feature (1)..(987): Ceres Seq. ID no. 12691758
  misc_feature: MA Experiment ID: 20000314 Result: Up-regulated in Transcription
  misc_feature: MA Experiment 20000314 PARAMETER Experiment Name: At_14day_Shoots-Roots_Sub_P Parameter: Age (day) Value: 14
  misc_feature: MA Experiment 20000314 PARAMETER Experiment Name: At_14day_Shoots-Roots_Sub_P Parameter: Organism Value: A. thaliana
  misc_feature: MA Experiment 20000314 PARAMETER Experiment Name: At_14day_Shoots-Roots_Sub_P Parameter: Plant Line Value: WS
  misc_feature: MA Experiment 20000314 PARAMETER Experiment Name: At_14day_Shoots-Roots_Sub_P Parameter: Tissue Value: Roots vs. Whole Plant
  misc_feature: MA Experiment ID: 20000355 Result: Up-regulated in Transcription
  misc_feature: MA Experiment 20000355 PARAMETER Experiment Name: At_Siliques_Sub_P Parameter: Age (day) Value: 21
  misc_feature: MA Experiment 20000355 PARAMETER Experiment Name: At_Siliques_Sub_P Parameter: Organism Value: A. thaliana
  misc_feature: MA Experiment 20000355 PARAMETER Experiment Name: At_Siliques_Sub_P Parameter: Plant Line Value: WS
  misc_feature: MA Experiment 20000355 PARAMETER Experiment Name: At_Siliques_Sub_P Parameter: Tissue Value: Less Than 5mm Siliques vs. Whole Plant
  misc_feature: MA Experiment ID: 20000440 Result: Up-regulated in Transcription
  misc_feature: MA Experiment 20000440 PARAMETER Experiment Name: At_Closed-Flower__Sub_P Parameter: Tissue Value: Closed Flower vs. Whole Plant
  misc_feature: MA Experiment ID: 20001806 Result: Up-regulated in Transcription
  misc_feature: MA Experiment 20001806 PARAMETER Experiment Name: At_50mM_NH4NO3_L-to-H_Sub_P Parameter: Timepoint (hr) Value: 4
  misc_feature: MA Experiment 20001806 PARAMETER Experiment Name: At_50mM_NH4NO3_L-to-H_Sub_P Parameter: Tissue Value: Leaf
  misc_feature: MA Experiment 20001806 PARAMETER Experiment Name: At_50mM_NH4NO3_L-to-H_Sub_P Parameter: Treatment Value: 50mM NH4NO3 vs 100mM Mannitol
atggctactgctacgtctcaccaatcagtcgtttcatttgcttctctccggtcttctccttcttctacaatctctcaatgtggattcaagatcgattcttcactgagctttacatcgaaaaagacaaacttttgcaagattaaagcaatggcatcatcagtttcttatgacaacactctcttgtctccttccaagacaatccctgacaattctcaaaagaaatcaaatgaagcagctttgatattgattaggcatggagaatctttatggaacgagaagaatctttttactggttgtgttgatgtgccattgactgagaaaggtgttgaagaagctattgaagcagggaagaggattagtaacattcctgttgatgttatctttacatcttctttgattcgtgctcagatgactgcaatgcttgctatgattcaacaccgtcgtaagaaggtaccgatcatcttgcacgatgaaagcgaacaggcgaaaacttggagtcaagtttttagtgatgagactaaaaaccaatccattcctgtcatacctgcttggtatggagaattacaaggtcttaacaagcaagaaacagccgagagatatgggaaagagcaagttcacgaatggcgtaggagttatgatattcctcctcccaaaggagagagtttggagatgtgtgctgagagagcagtagcttattttcaggacaatatcgaaccgaagcttgcagctggaaagaacgtaatgatagctgctcacgggaactcgctgcggtctatcattatgtatcttgacaaattgacttgccaggaggtgataagtctagagctatcgacaggtatacctcttctctacatattcaaagaaggcaaattcatgaagcggggaagcccggttggtccaacagaagctggtgtttatgcttataccaagagattggctcaatacagacagaagctagaggacgatagtgaagtactctgtgcctga

SEQ ID NO: 86574 - protein, 328 aa, Arabidopsis thaliana
  peptide (1)..(328): Ceres Seq. ID no. 12691759
  misc_feature (78)..(294): Pfam Name: Phosphoglycerate mutase family Pfam Description: Phosphoglycerate mutase family
  misc_feature (1)..(328): Homolog of NCBI NO: 18395083 NR Description: expressed protein; protein id: At1g22170.1, by cDNA: 33490. [Arabidopsis thaliana] >gi|25511655|pir||C86354
  misc_feature (1)..(328): Homolog of NCBI NO: 21539557 NR Description: unknown protein [Arabidopsis thaliana]
  misc_feature (1)..(328): Homolog of NCBI NO: 21618275 NR Description: unknown [Arabidopsis thaliana]
  misc_feature (1)..(320): Homolog of NCBI NO: 25405021 NR Description: protein F28K19.26 [imported] - Arabidopsis >gi|6573769|gb|AAF17689.1|AC009243_16 F28K19.26 [Arabidopsis
  misc_feature (137)..(320): Homolog of NCBI NO: 15218201 NR Description: phosphoglycerate mutase, putative; protein id: [Arabidopsis thaliana] >gi|26451923|dbj|BAC43054.1| unknown [Arabidopsis thaliana] >gi|28372948|gb|AAO39956.1| At1g78050
  misc_feature (78)..(299): Homolog of NCBI NO: 29840659 NR Description: phosphoglycerate mutase [Chlamydophila caviae >gi|29835009|gb|AAP05643.1| phosphoglycerate mutase
  misc_feature (78)..(293): Homolog of NCBI NO: 15618772 NR Description: Phosphoglycerate Mutase [Chlamydophila pneumoniae >gi|16752176|ref|NP_445543.1| phosphoglycerate mutase
  misc_feature (78)..(293): Homolog of NCBI NO: 15836396 NR Description: phosphoglycerate mutase [Chlamydophila pneumoniae
  misc_feature (80)..(299): Homolog of NCBI NO: 15834720 NR Description: phosphoglycerate mutase [Chlamydia muridarum]
  misc_feature (80)..(299): Homolog of NCBI NO: 15605455 NR Description: Phosphoglycerate Mutase [Chlamydia trachomatis]
MATATSHQSVVSFASLRSSPSSTISQCGFKIDSSLSFTSKKTNFCKIKAMASSVSYDNTLLSPSKTIPDNSQKKSNEAALILIRHGESLWNEKNLFTGCVDVPLTEKGVEEAIEAGKRISNIPVDVIFTSSLIRAQMTAMLAMIQHRRKKVPIILHDESEQAKTWSQVFSDETKNQSIPVIPAWYGELQGLNKQETAERYGKEQVHEWRRSYDIPPPKGESLEMCAERAVAYFQDNIEPKLAAGKNVMIAAHGNSLRSIIMYLDKLTCQEVISLELSTGIPLLYIFKEGKFMKRGSPVGPTEAGVYAYTKRLAQYRQKLEDDSEVLCA

SEQ ID NO: 86575 - protein, 279 aa, Arabidopsis thaliana
  peptide (1)..(279): Ceres Seq. ID no. 12691760
  misc_feature (29)..(245): Pfam Name: Phosphoglycerate mutase family Pfam Description: Phosphoglycerate mutase family
  misc_feature (1)..(279): Homolog of NCBI NO: 18395083 NR Description: expressed protein; protein id: At1g22170.1, by cDNA: 33490. [Arabidopsis thaliana] >gi|25511655|pir||C86354
  misc_feature (1)..(279): Homolog of NCBI NO: 21539557 NR Description: unknown protein [Arabidopsis thaliana]
  misc_feature (1)..(279): Homolog of NCBI NO: 21618275 NR Description: unknown [Arabidopsis thaliana]
  misc_feature (1)..(271): Homolog of NCBI NO: 25405021 NR Description: protein F28K19.26 [imported] - Arabidopsis >gi|6573769|gb|AAF17689.1|AC009243_16 F28K19.26 [Arabidopsis
  misc_feature (88)..(271): Homolog of NCBI NO: 15218201 NR Description: phosphoglycerate mutase, putative; protein id: [Arabidopsis thaliana] >gi|26451923|dbj|BAC43054.1| unknown [Arabidopsis thaliana] >gi|28372948|gb|AAO39956.1| At1g78050
  misc_feature (29)..(250): Homolog of NCBI NO: 29840659 NR Description: phosphoglycerate mutase [Chlamydophila caviae >gi|29835009|gb|AAP05643.1| phosphoglycerate mutase
  misc_feature (29)..(244): Homolog of NCBI NO: 15618772 NR Description: Phosphoglycerate Mutase [Chlamydophila pneumoniae >gi|16752176|ref|NP_445543.1| phosphoglycerate mutase
  misc_feature (29)..(244): Homolog of NCBI NO: 15836396 NR Description: phosphoglycerate mutase [Chlamydophila pneumoniae
  misc_feature (31)..(250): Homolog of NCBI NO: 15834720 NR Description: phosphoglycerate mutase [Chlamydia muridarum]
  misc_feature (31)..(250): Homolog of NCBI NO: 15605455 NR Description: Phosphoglycerate Mutase [Chlamydia trachomatis]
MASSVSYDNTLLSPSKTIPDNSQKKSNEAALILIRHGESLWNEKNLFTGCVDVPLTEKGVEEAIEAGKRISNIPVDVIFTSSLIRAQMTAMLAMIQHRRKKVPIILHDESEQAKTWSQVFSDETKNQSIPVIPAWYGELQGLNKQETAERYGKEQVHEWRRSYDIPPPKGESLEMCAERAVAYFQDNIEPKLAAGKNVMIAAHGNSLRSIIMYLDKLTCQEVISLELSTGIPLLYIFKEGKFMKRGSPVGPTEAGVYAYTKRLAQYRQKLEDDSEVLCA

SEQ ID NO: 86576 - protein, 192 aa, Arabidopsis thaliana
  peptide (1)..(192): Ceres Seq. ID no. 12691761
  misc_feature (1)..(158): Pfam Name: Phosphoglycerate mutase family Pfam Description: Phosphoglycerate mutase family
  misc_feature (1)..(192): Homolog of NCBI NO: 18395083 NR Description: expressed protein; protein id: At1g22170.1, by cDNA: 33490. [Arabidopsis thaliana] >gi|25511655|pir||C86354
  misc_feature (1)..(192): Homolog of NCBI NO: 21539557 NR Description: unknown protein [Arabidopsis thaliana]
  misc_feature (1)..(192): Homolog of NCBI NO: 21618275 NR Description: unknown [Arabidopsis thaliana]
  misc_feature (1)..(184): Homolog of NCBI NO: 25405021 NR Description: protein F28K19.26 [imported] - Arabidopsis >gi|6573769|gb|AAF17689.1|AC009243_16 F28K19.26 [Arabidopsis
  misc_feature (1)..(184): Homolog of NCBI NO: 15218201 NR Description: phosphoglycerate mutase, putative; protein id: [Arabidopsis thaliana] >gi|26451923|dbj|BAC43054.1| unknown [Arabidopsis thaliana] >gi|28372948|gb|AAO39956.1| At1g78050
  misc_feature (1)..(163): Homolog of NCBI NO: 29840659 NR Description: phosphoglycerate mutase [Chlamydophila caviae >gi|29835009|gb|AAP05643.1| phosphoglycerate mutase
  misc_feature (1)..(157): Homolog of NCBI NO: 15618772 NR Description: Phosphoglycerate Mutase [Chlamydophila pneumoniae >gi|16752176|ref|NP_445543.1| phosphoglycerate mutase
  misc_feature (1)..(157): Homolog of NCBI NO: 15836396 NR Description: phosphoglycerate mutase [Chlamydophila pneumoniae
  misc_feature (1)..(163): Homolog of NCBI NO: 15834720 NR Description: phosphoglycerate mutase [Chlamydia muridarum]
  misc_feature (1)..(163): Homolog of NCBI NO: 15605455 NR Description: Phosphoglycerate Mutase [Chlamydia trachomatis]
MTAMLAMIQHRRKKVPIILHDESEQAKTWSQVFSDETKNQSIPVIPAWYGELQGLNKQETAERYGKEQVHEWRRSYDIPPPKGESLEMCAERAVAYFQDNIEPKLAAGKNVMIAAHGNSLRSIIMYLDKLTCQEVISLELSTGIPLLYIFKEGKFMKRGSPVGPTEAGVYAYTKRLAQYRQKLEDDSEVLCA

SEQ ID NO: 86577 - DNA, 2685 bp, Arabidopsis thaliana
  misc_feature (1)..(2685): Ceres Seq. ID no. 12691812
  misc_feature: MA Experiment ID: 20000173 Result: Down-regulated in Transcription
  misc_feature: MA Experiment 20000173 PARAMETER Experiment Name: At_42deg_Heat_P Parameter: Age (day) Value: 14
  misc_feature: MA Experiment 20000173 PARAMETER Experiment Name: At_42deg_Heat_P Parameter: Organism Value: A. thaliana
  misc_feature: MA Experiment 20000173 PARAMETER Experiment Name: At_42deg_Heat_P Parameter: Plant Line Value: WS
  misc_feature: MA Experiment 20000173 PARAMETER Experiment Name: At_42deg_Heat_P Parameter: Temperature (deg C) Value: 42 vs. 22
  misc_feature: MA Experiment 20000173 PARAMETER Experiment Name: At_42deg_Heat_P Parameter: Timepoint (hr) Value: 6
  misc_feature: MA Experiment 20000173 PARAMETER Experiment Name: At_42deg_Heat_P Parameter: Tissue Value: Aerial
  misc_feature: MA Experiment ID: 20000184 Result: Down-regulated in Transcription
  misc_feature: MA Experiment 20000184 PARAMETER Experiment Name: At_Shoots__P Parameter: Age (day) Value: 7
  misc_feature: MA Experiment 20000184 PARAMETER Experiment Name: At_Shoots__P Parameter: Tissue Value: Shoots vs. Whole Plant
atggcgaaatcggaaaactcaacgacttcgactttctcttctttcgccaacaagattcaaccgtccaacgatgcagagtccgatcccgattcgtatgccctcgagaaattcaaactctacgaaaccagagcgaggttttatctagtagggagtgataggaataaaagattcttcagagtgttgaagattgatcgttcagagccatctgagcttaatattagtgaagatcctgttgtatattcgcctcaagagatcaagagtctgcttcagcgtatcgctgaaggcaatcgtgccacgggaggattggcttttgtggccaaagtctatggaattgctggttgtgctaagtttatggagtcatactatttagttttggttacaaaacggcgacagattggatgtatatgcgggcatgcgatatatgctattgatgaaagtcaaatgatcagtgttccacatgcaactattcaatctgatgttgcgaattccaaaactgaactaaggtacaagaagcttctgtcaagtgtagatttgacaaaagatttcttctacagttacacttaccctataatgcaaagcttgcaaaagaatgttctatcatctggtgaggaagggatgccttatgataacatattcgtatggaattcgtatctgacgcagcctattcgatcaaggtgcaacaacactatttggacactggcattagttcatgggcactttaagcagataagactatcaatatatggaagagacttcagtgttactttagtctccagacgttctcgacattttgcaggcacacgttacttgaaaaggggagtgaatgatcgtggaagggttgcaaatgatgttgaaacagaacaacttgttcttgatgatgaagctggatcatgcaaaggaaaaatgagctcagtggtgcagatgcgagggtcaattccactcttttggtcacaagaggcctccagatttagtcctaagcctgatatcttcttacagaggtatgaccctacatatgagtcaaccaaaatgcattttgaagacctggtgaatcgatatgggaatccgatcattgtgctcaacttaattaagacagttgagaaaaggccaagggaaatggtgctaagacgtgagtttgcgaatgctgtgggttatctaaattcaatttttcgtgaagaaaatcatctcaaattcatccactgggatttccataaatttgcgaagagcaagtcggcgaatgtattggctgttttgggtgctgtagcaagcgaagcccttgatttgactggattatatttcagcggcaaggaaccttctctgcgtgatctaagagcttactctgcggaactttcaaggggtgagagtgcaaatgatatacttagtgctcttgctaatcgagagaaagagatgaagctaacccaacaaaaaaaagacgagggaactaattcttcagctcctcgttaccaaagtggtgttctgcgtactaactgtatcgattgcttggatcgaacaaatgtagcacagtatgcatatggtttggctgctttaggccggcagctgcatgcaatgggtttgagcgatacacctaagatcgaccctgacagtagcatagctgctgcacttatggatatgtaccagagcatgggagatgcccttgcacaacaatatggcggctcagctgctcataacactgttttcccagaaaggcaggggaaatggaaggccacgacacagtctagagagtttctcaagtctatcaaacgatactacagcaatacctacactgatggcgaaaagcaagacgccataaacttattcttgggctactttcaacctcaggaagggaaacctgcgctctgggagctggattctgattactatctccatgtttcagggattggagatgatattttcccagatatcggggtccagtccattgctaaacctatgagtggtattggagtcaatcttgcaccagtgccagctttcagagacgacttctcgcggaagaagctgacatcgtttgacaaactgatagagcagacatgcagttcaataaagaacgtgaggctttgtagtgagacagaccaaaggccaggtggcaacactggaagcactggtgtggctcctgatgcagctgagattcaactcaagagccccaattggctgtttggttcaagaaagcccgaagagagtagctctgccacaaaatctggtgcagacgatagtgagaaaggagtaacctcgactgagagagtcaacgatttctgcaacttggactggctttctaagtccgaccgtcatcaaggagatatcttccaaaggtatctatcgattacatcaaccaatgaagccaatggttggtatggtggcactctcctcggtgaccaagatgaaaacagcgaaatttacagacattacgcccaattctgtcagtgtccagcgatggaaccatttgagaacgatcatgagtttgaacagaactttgcggaagttctccgcatgaacacaatcgatgtaatggacattgaagaagaagaaacggagatggaaagcgatttcaatgaatacactcagatcggtagcgatctcgggatcattccaatgcaatgcaaacactttgctagtgatccttgttggctagccagatggcttgtcggagatgataaggtcccgaaggtcatttaa

SEQ ID NO: 86578 - protein, 894 aa, Arabidopsis thaliana
  peptide (1)..(894): Ceres Seq. ID no. 12691813
  misc_feature (108)..(414): Pfam Name: SacI homology domain Pfam Description: SacI homology domain
  misc_feature (22)..(694): Homolog of NCBI NO: 18400310 NR Description: Expressed protein; protein id: At3g14205.1, by cDNA: gi_15215805, supported by cDNA: gi_20334797 [Arabidopsis >gi|15215806|gb|AAK91448.1| At3g14201 [Arabidopsis thaliana]
  misc_feature (34)..(650): Homolog of NCBI NO: 15217295 NR Description: Putative phosphoinositide phosphatase [Oryza
  misc_feature (22)..(624): Homolog of NCBI NO: 22331537 NR Description: putative protein; protein id: At3g43220.1,
  misc_feature (22)..(606): Homolog of NCBI NO: 20453210 NR Description: AT3g43220/F7K15_70 [Arabidopsis thaliana]
  misc_feature (185)..(624): Homolog of NCBI NO: 11357847 NR Description: hypothetical protein F7K15.70 - Arabidopsis >gi|7649362|emb|CAB89043.1| putative protein [Arabidopsis
  misc_feature (22)..(169): Homolog of NCBI NO: 11357847 NR Description: hypothetical protein F7K15.70 - Arabidopsis >gi|7649362|emb|CAB89043.1| putative protein [Arabidopsis
  misc_feature (30)..(636): Homolog of NCBI NO: 22329625 NR Description: unknown protein; protein id: At1g17340.1, by cDNA: gi_20147340 [Arabidopsis thaliana] At1g17340/F28G4_6 [Arabidopsis thaliana]
  misc_feature (22)..(440): Homolog of NCBI NO: 9294649 NR Description: gb|AAC25523.1~gene_id:MAG2.20~similar to unknown
  misc_feature (137)..(636): Homolog of NCBI NO: 25513722 NR Description: F28G4.21 protein - Arabidopsis thaliana
  misc_feature (202)..(431): Homolog of NCBI NO: 19527220 NR Description: expressed sequence AI326867 [Mus musculus] Similar to KIAA0274 gene product [Mus musculus]
MAKSENSTTSTFSSFANKIQPSNDAESDPDSYALEKFKLYETRARFYLVGSDRNKRFFRVLKIDRSEPSELNISEDPVVYSPQEIKSLLQRIAEGNRATGGLAFVAKVYGIAGCAKFMESYYLVLVTKRRQIGCICGHAIYAIDESQMISVPHATIQSDVANSKTELRYKKLLSSVDLTKDFFYSYTYPIMQSLQKNVLSSGEEGMPYDNIFVWNSYLTQPIRSRCNNTIWTLALVHGHFKQIRLSIYGRDFSVTLVSRRSRHFAGTRYLKRGVNDRGRVANDVETEQLVLDDEAGSCKGKMSSVVQMRGSIPLFWSQEASRFSPKPDIFLQRYDPTYESTKMHFEDLVNRYGNPIIVLNLIKTVEKRPREMVLRREFANAVGYLNSIFREENHLKFIHWDFHKFAKSKSANVLAVLGAVASEALDLTGLYFSGKEPSLRDLRAYSAELSRGESANDILSALANREKEMKLTQQKKDEGTNSSAPRYQSGVLRTNCIDCLDRTNVAQYAYGLAALGRQLHAMGLSDTPKIDPDSSIAAALMDMYQSMGDALAQQYGGSAAHNTVFPERQGKWKATTQSREFLKSIKRYYSNTYTDGEKQDAINLFLGYFQPQEGKPALWELDSDYYLHVSGIGDDIFPDIGVQSIAKPMSGIGVNLAPVPAFRDDFSRKKLTSFDKLIEQTCSSIKNVRLCSETDQRPGGNTGSTGVAPDAAEIQLKSPNWLFGSRKPEESSSATKSGADDSEKGVTSTERVNDFCNLDWLSKSDRHQGDIFQRYLSITSTNEANGWYGGTLLGDQDENSEIYRHYAQFCQCPAMEPFENDHEFEQNFAEVLRMNTIDVMDIEEEETEMESDFNEYTQIGSDLGIIPMQCKHFASDPCWLARWLVGDDKVPKVI

SEQ ID NO: 86579 - protein, 777 aa, Arabidopsis thaliana
  peptide (1)..(777): Ceres Seq. ID no. 12691814
  misc_feature (1)..(297): Pfam Name: SacI homology domain Pfam Description: SacI homology domain
  misc_feature (1)..(577): Homolog of NCBI NO: 18400310 NR Description: Expressed protein; protein id: At3g14205.1, by cDNA: gi_15215805, supported by cDNA: gi_20334797 [Arabidopsis >gi|15215806|gb|AAK91448.1| At3g14201 [Arabidopsis thaliana]
  misc_feature (1)..(533): Homolog of NCBI NO: 15217295 NR Description: Putative phosphoinositide phosphatase [Oryza
  misc_feature (1)..(507): Homolog of NCBI NO: 22331537 NR Description: putative protein; protein id: At3g43220.1,
  misc_feature (1)..(489): Homolog of NCBI NO: 20453210 NR Description: AT3g43220/F7K15_70 [Arabidopsis thaliana]
  misc_feature (68)..(507): Homolog of NCBI NO: 11357847 NR Description: hypothetical protein F7K15.70 - Arabidopsis >gi|7649362|emb|CAB89043.1| putative protein [Arabidopsis
  misc_feature (1)..(52): Homolog of NCBI NO: 11357847 NR Description: hypothetical protein F7K15.70 - Arabidopsis >gi|7649362|emb|CAB89043.1| putative protein [Arabidopsis
  misc_feature (1)..(519): Homolog of NCBI NO: 22329625 NR Description: unknown protein; protein id: At1g17340.1, by cDNA: gi_20147340 [Arabidopsis thaliana] At1g17340/F28G4_6 [Arabidopsis thaliana]
  misc_feature (1)..(323): Homolog of NCBI NO: 9294649 NR Description: gb|AAC25523.1~gene_id:MAG2.20~similar to unknown
  misc_feature (20)..(519): Homolog of NCBI NO: 25513722 NR Description: F28G4.21 protein - Arabidopsis thaliana
  misc_feature (85)..(314): Homolog of NCBI NO: 19527220 NR Description: expressed sequence AI326867 [Mus musculus] Similar to KIAA0274 gene product [Mus musculus]
MESYYLVLVTKRRQIGCICGHAIYAIDESQMISVPHATIQSDVANSKTELRYKKLLSSVDLTKDFFYSYTYPIMQSLQKNVLSSGEEGMPYDNIFVWNSYLTQPIRSRCNNTIWTLALVHGHFKQIRLSIYGRDFSVTLVSRRSRHFAGTRYLKRGVNDRGRVANDVETEQLVLDDEAGSCKGKMSSVVQMRGSIPLFWSQEASRFSPKPDIFLQRYDPTYESTKMHFEDLVNRYGNPIIVLNLIKTVEKRPREMVLRREFANAVGYLNSIFREENHLKFIHWDFHKFAKSKSANVLAVLGAVASEALDLTGLYFSGKEPSLRDLRAYSAELSRGESANDILSALANREKEMKLTQQKKDEGTNSSAPRYQSGVLRTNCIDCLDRTNVAQYAYGLAALGRQLHAMGLSDTPKIDPDSSIAAALMDMYQSMGDALAQQYGGSAAHNTVFPERQGKWKATTQSREFLKSIKRYYSNTYTDGEKQDAINLFLGYFQPQEGKPALWELDSDYYLHVSGIGDDIFPDIGVQSIAKPMSGIGVNLAPVPAFRDDFSRKKLTSFDKLIEQTCSSIKNVRLCSETDQRPGGNTGSTGVAPDAAEIQLKSPNWLFGSRKPEESSSATKSGADDSEKGVTSTERVNDFCNLDWLSKSDRHQGDIFQRYLSITSTNEANGWYGGTLLGDQDENSEIYRHYAQFCQCPAMEPFENDHEFEQNFAEVLRMNTIDVMDIEEEETEMESDFNEYTQIGSDLGIIPMQCKHFASDPCWLARWLVGDDKVPKVI

SEQ ID NO: 86580 - protein, 747 aa, Arabidopsis thaliana
  peptide (1)..(747): Ceres Seq. ID no. 12691815
  misc_feature (1)..(267): Pfam Name: SacI homology domain Pfam Description: SacI homology domain
  misc_feature (1)..(547): Homolog of NCBI NO: 18400310 NR Description: Expressed protein; protein id: At3g14205.1, by cDNA: gi_15215805, supported by cDNA: gi_20334797 [Arabidopsis >gi|15215806|gb|AAK91448.1| At3g14201 [Arabidopsis thaliana]
  misc_feature (1)..(503): Homolog of NCBI NO: 15217295 NR Description: Putative phosphoinositide phosphatase [Oryza
  misc_feature (1)..(477): Homolog of NCBI NO: 22331537 NR Description: putative protein; protein id: At3g43220.1,
  misc_feature (1)..(459): Homolog of NCBI NO: 20453210 NR Description: AT3g43220/F7K15_70 [Arabidopsis thaliana]
  misc_feature (38)..(477): Homolog of NCBI NO: 11357847 NR Description: hypothetical protein F7K15.70 - Arabidopsis >gi|7649362|emb|CAB89043.1| putative protein [Arabidopsis
  misc_feature (1)..(22): Homolog of NCBI NO: 11357847 NR Description: hypothetical protein F7K15.70 - Arabidopsis >gi|7649362|emb|CAB89043.1| putative protein [Arabidopsis
  misc_feature (1)..(489): Homolog of NCBI NO: 22329625 NR Description: unknown protein; protein id: At1g17340.1, by cDNA: gi_20147340 [Arabidopsis thaliana] At1g17340/F28G4_6 [Arabidopsis thaliana]
  misc_feature (1)..(293): Homolog of NCBI NO: 9294649 NR Description: gb|AAC25523.1~gene_id:MAG2.20~similar to unknown
  misc_feature (1)..(489): Homolog of NCBI NO: 25513722 NR Description: F28G4.21 protein - Arabidopsis thaliana
  misc_feature (55)..(284): Homolog of NCBI NO: 19527220 NR Description: expressed sequence AI326867 [Mus musculus] Similar to KIAA0274 gene product [Mus musculus]
MISVPHATIQSDVANSKTELRYKKLLSSVDLTKDFFYSYTYPIMQSLQKNVLSSGEEGMPYDNIFVWNSYLTQPIRSRCNNTIWTLALVHGHFKQIRLSIYGRDFSVTLVSRRSRHFAGTRYLKRGVNDRGRVANDVETEQLVLDDEAGSCKGKMSSVVQMRGSIPLFWSQEASRFSPKPDIFLQRYDPTYESTKMHFEDLVNRYGNPIIVLNLIKTVEKRPREMVLRREFANAVGYLNSIFREENHLKFIHWDFHKFAKSKSANVLAVLGAVASEALDLTGLYFSGKEPSLRDLRAYSAELSRGESANDILSALANREKEMKLTQQKKDEGTNSSAPRYQSGVLRTNCIDCLDRTNVAQYAYGLAALGRQLHAMGLSDTPKIDPDSSIAAALMDMYQSMGDALAQQYGGSAAHNTVFPERQGKWKATTQSREFLKSIKRYYSNTYTDGEKQDAINLFLGYFQPQEGKPALWELDSDYYLHVSGIGDDIFPDIGVQSIAKPMSGIGVNLAPVPAFRDDFSRKKLTSFDKLIEQTCSSIKNVRLCSETDQRPGGNTGSTGVAPDAAEIQLKSPNWLFGSRKPEESSSATKSGADDSEKGVTSTERVNDFCNLDWLSKSDRHQGDIFQRYLSITSTNEANGWYGGTLLGDQDENSEIYRHYAQFCQCPAMEPFENDHEFEQNFAEVLRMNTIDVMDIEEEETEMESDFNEYTQIGSDLGIIPMQCKHFASDPCWLARWLVGDDKVPKVI

SEQ ID NO: 86581 - DNA, 1155 bp, Arabidopsis thaliana
  misc_feature (1)..(1155): Ceres Seq. ID no. 12691822
atggaagctgatttctctccatcagtgactacggtggaaaccggagtggtttatgtagctgagcctctcaacgcttgccgaaacttgaggaataaaccggagcagagcccttatggtacttcccctcttgtgttgatcataagaggaggctgcagttttgagtacaaagtcagaaacgcgcagagaagcggtttcaaggctgccattgtctatgacaatgtggaccgcaacttcttatccgcaatggggggagactcggacggtataaagattcaagcggtttttgtgatgaagagagccggagaaatgctcaagaagtacgcgggttcggaggaaatggaagtcatgttggttcctcctaatacagaggactcggtgtggtcattgtacgcttccatagcattgatcttgtcgctggctattttttgtgttatggttacttgtgtcttcttctatagatattgctcaacaattagaaactctacatctcaattcaatgggatgtgccgtagaacggtgaaagcaatgccgagtgttacattcacttgtgcaaaaatagacaacactacaggtttctcttgcgctatctgccttgaagactacattgttggagacaagctcagggtcttaccttgcagtcacaagtttcatgtcgcttgcgtagactcgtggcttatatcatggagaacgttttgtccagtgtgtaaacgggatgcgagaacgaccgcagatgagccactagctacagagagcacaccgtttctcagttcttccattgcaacatcatctctagtgtgtatagactctcctcctttgggatcctcagtttctttctctccagcgcatgtgagctcgtccttcattcatcaatttgtcaggtcttcgccaatgaatggcagccgtatctcagagaatcttaggcgacaagcctcaccattacagtcatcatcacagcgatcacacctctctatgaagtcttcccattcactgggttattcgaccatgtcacctctcaacgcgatgggcatgtcaccataccggccatacccaagcaatgcatcgcctggattattcagttcaacaaatcatctgctttccaattatacagcaaatacattctctcatttcgcctctgcacactcgcttccggactag

SEQ ID NO: 86582 - protein, 384 aa, Arabidopsis thaliana; identical to SEQ ID NO: 72641
  peptide (1)..(384): Ceres Seq. ID no. 12691823
  misc_feature (7)..(108): Pfam Name: PA domain Pfam Description: PA domain
  misc_feature (1)..(384): Homolog of NCBI NO: 15219930 NR Description: putative RING zinc finger protein; protein id:
  misc_feature (1)..(337): Homolog of NCBI NO: 7487358 NR Description: hypothetical protein T22J18.16 - Arabidopsis >gi|3287691|gb|AAC25519.1|AAC25519 Contains similarity to RING finger protein gb|X95455 from Gallus gallus. [Arabidopsis
  misc_feature (1)..(379): Homolog of NCBI NO: 22330577 NR Description: unknown protein; protein id: At1g71980.1, by cDNA: gi_17529199 [Arabidopsis thaliana] unknown protein [Arabidopsis thaliana]
  misc_feature (1)..(379): Homolog of NCBI NO: 25406132 NR Description: unknown protein F17M19.13 [imported] -
  misc_feature (215)..(384): Homolog of NCBI NO: 7487358 NR Description: hypothetical protein T22J18.16 - Arabidopsis >gi|3287691|gb|AAC25519.1|AAC25519 Contains similarity to RING finger protein gb|X95455 from Gallus gallus. [Arabidopsis
  misc_feature (1)..(379): Homolog of NCBI NO: 6942149 NR Description: ReMembR-H2 protein JR702 [Arabidopsis thaliana]
  misc_feature (1)..(372): Homolog of NCBI NO: 19071633 NR Description: putative integral membrane protein [Oryza sativa
  misc_feature (1)..(346): Homolog of NCBI NO: 38637053 NR Description: putative ReMembR-H2 protein [Oryza sativa
  misc_feature (1)..(369): Homolog of NCBI NO: 15233945 NR Description: putative protein; protein id: At4g09560.1
  misc_feature (1)..(258): Homolog of NCBI NO: 15219670 NR Description: integral membrane protein, putative; protein id:

SEQ ID NO: 86583 - protein, 303 aa, Arabidopsis thaliana; identical to SEQ ID NO: 72642
  peptide (1)..(303): Ceres Seq. ID no. 12691824
  misc_feature (113)..(154): Pfam Name: Zinc finger, C3HC4 type (RING finger) Pfam Description: Zinc finger, C3HC4 type (RING finger)
  misc_feature (1)..(303): Homolog of NCBI NO: 15219930 NR Description: putative RING zinc finger protein; protein id:
  misc_feature (1)..(256): Homolog of NCBI NO: 7487358 NR Description: hypothetical protein T22J18.16 - Arabidopsis >gi|3287691|gb|AAC25519.1|AAC25519 Contains similarity to RING finger protein gb|X95455 from Gallus gallus. [Arabidopsis
  misc_feature (1)..(298): Homolog of NCBI NO: 22330577 NR Description: unknown protein; protein id: At1g71980.1, by cDNA: gi_17529199 [Arabidopsis thaliana] unknown protein [Arabidopsis thaliana]
  misc_feature (1)..(298): Homolog of NCBI NO: 25406132 NR Description: unknown protein F17M19.13 [imported] -
  misc_feature (134)..(303): Homolog of NCBI NO: 7487358 NR Description: hypothetical protein T22J18.16 - Arabidopsis >gi|3287691|gb|AAC25519.1|AAC25519 Contains similarity to RING finger protein gb|X95455 from Gallus gallus. [Arabidopsis
  misc_feature (1)..(298): Homolog of NCBI NO: 6942149 NR Description: ReMembR-H2 protein JR702 [Arabidopsis thaliana]
  misc_feature (1)..(291): Homolog of NCBI NO: 19071633 NR Description: putative integral membrane protein [Oryza sativa
  misc_feature (1)..(265): Homolog of NCBI NO: 38637053 NR Description: putative ReMembR-H2 protein [Oryza sativa
  misc_feature (1)..(288): Homolog of NCBI NO: 15233945 NR Description: putative protein; protein id: At4g09560.1
  misc_feature (1)..(177): Homolog of NCBI NO: 15219670 NR Description: integral membrane protein, putative; protein id:

SEQ ID NO: 86584 - protein, 288 aa, Arabidopsis thaliana
  peptide (1)..(288): Ceres Seq. ID no. 12691825
  misc_feature (98)..(139): Pfam Name: Zinc finger, C3HC4 type (RING finger) Pfam Description: Zinc finger, C3HC4 type (RING finger)
  misc_feature (1)..(288): Homolog of NCBI NO: 15219930 NR Description: putative RING zinc finger protein; protein id:
  misc_feature (1)..(241): Homolog of NCBI NO: 7487358 NR Description: hypothetical protein T22J18.16 - Arabidopsis >gi|3287691|gb|AAC25519.1|AAC25519 Contains similarity to RING finger protein gb|X95455 from Gallus gallus. [Arabidopsis
  misc_feature (1)..(283): Homolog of NCBI NO: 22330577 NR Description: unknown protein; protein id: At1g71980.1, by cDNA: gi_17529199 [Arabidopsis thaliana] unknown protein [Arabidopsis thaliana]
  misc_feature (1)..(283): Homolog of NCBI NO: 25406132 NR Description: unknown protein F17M19.13 [imported] -
  misc_feature (119)..(288): Homolog of NCBI NO: 7487358 NR Description: hypothetical protein T22J18.16 - Arabidopsis >gi|3287691|gb|AAC25519.1|AAC25519 Contains similarity to RING finger protein gb|X95455 from Gallus gallus. [Arabidopsis
  misc_feature (1)..(283): Homolog of NCBI NO: 6942149 NR Description: ReMembR-H2 protein JR702 [Arabidopsis thaliana]
  misc_feature (1)..(276): Homolog of NCBI NO: 19071633 NR Description: putative integral membrane protein [Oryza sativa
  misc_feature (1)..(250): Homolog of NCBI NO: 38637053 NR Description: putative ReMembR-H2 protein [Oryza sativa
  misc_feature (1)..(273): Homolog of NCBI NO: 15233945 NR Description: putative protein; protein id: At4g09560.1
  misc_feature (1)..(162): Homolog of NCBI NO: 15219670 NR Description: integral membrane protein, putative; protein id:
MKRAGEMLKKYAGSEEMEVMLVPPNTEDSVWSLYASIALILSLAIFCVMVTCVFFYRYCSTIRNSTSQFNGMCRRTVKAMPSVTFTCAKIDNTTGFSCAICLEDYIVGDKLRVLPCSHKFHVACVDSWLISWRTFCPVCKRDARTTADEPLATESTPFLSSSIATSSLVCIDSPPLGSSVSFSPAHVSSSFIHQFVRSSPMNGSRISENLRRQASPLQSSSQRSHLSMKSSHSLGYSTMSPLNAMGMSPYRPYPSNASPGLFSSTNHLLSNYTANTFSHFASAHSLPD

SEQ ID NO: 86585 - DNA, 1497 bp, Arabidopsis thaliana
  misc_feature (1)..(1497): Ceres Seq. ID no. 12691874
  misc_feature: MA Experiment ID: 20001451 Result: Down-regulated in Transcription
  misc_feature: MA Experiment 20001451 PARAMETER Experiment Name: At_Far-red-induction_P Parameter: Age (day) Value: 7
  misc_feature: MA Experiment 20001451 PARAMETER Experiment Name: At_Far-red-induction_P Parameter: Light Value: Far-red vs. White
  misc_feature: MA Experiment 20001451 PARAMETER Experiment Name: At_Far-red-induction_P Parameter: Organism Value: A. thaliana
  misc_feature: MA Experiment 20001451 PARAMETER Experiment Name: At_Far-red-induction_P Parameter: Plant Line Value: Columbia
  misc_feature: MA Experiment 20001451 PARAMETER Experiment Name: At_Far-red-induction_P Parameter: Timepoint (hr) Value: 24
  misc_feature: MA Experiment 20001451 PARAMETER Experiment Name: At_Far-red-induction_P Parameter: Tissue Value: Whole Plant
aaaaaaaaactaaaccctagaatgcgtatcgctttctttgacctgaatgtgcaatcaaactcctcttagatctatggctctcgattcttccggaaaacaacctgagcagcagcaacaacaacaaccacgagcctcctctggaaacggcgaggcaagattgaagcttcggagaacccctaatgaagaacatgagcctgagaactatgaagatctacctttggactatagtccttctctgttcacctctcttgagcgttacttacctgagcagcttctcaattccacacgaatcgataaagctagtttcatgagagaccttcttctccgatattcccctgatactgagcgagttcgggttctgaggcataaagaatacagagacaaaatcatgtcttcttaccaacgtctgcatggagagatctatactcttgaccctagtagtttctttgcgccatcgtttcttggagcttttagtcggaagtcagagccgaatttcagaagtagtatggttgaatcttatcctgggattttcacttttgaaatgtttaaaccacagttttgtgaaatgttattagcagaggttgaacatatggagaaatgggtttatgattcaagatccacaataatgagacctaatacgatgaacaatttcggtgttgtccttgatgattttggctttgatagcatgcttcagaagttggttgatgactttattagtcctatagctcaagttctgttcccggaagtctgtggaacctctttagattctcaccatggctatattgttgaatatggaaaagatagggatgttgatcttgggtttcatgtggatgactcagaagttagtttaaatgtctgcttgggtaaacaattctctggcggggagctgtattttcgaggggtgagatgtgataagcatgtgaattccgatagcactgaaaaggaagtttatgattactctcatgtacctggtcacgccattcttcatcgtggacgtcatcgccatggtgctagagctacaacttctggacaccgagccaacttgattttgtggtgtagaagctcaacttttcgagagatgaagaattatcagagagatttctcaggttggtgtggaggatgcaaacttgataaacagagaaggcagcgtgattcgattaatgcaactaaagagatactagcaaggaaagctgcagagaagacacttgttgagctggcttcaaaatcatgtgccgagtaaacaaaaacaagaatatgtcaaatacctcatcttctttgtaccattccagtggctatgtgtatatagagaggcaagttaaatcgtttgtttgtaagcaagcattagatacctttgtcaaaggtaaattttgttccatttttcagattgctgcctgtaacaataaatttcttagaggagtgaaggcaaatgaaatacacaaatgttatctcttggagaatttgagaatgttggaagtttttggaagtaaaaatgtttgt

SEQ ID NO: 86586 - protein, 397 aa, Arabidopsis thaliana
  peptide (1)..(397): Ceres Seq. ID no. 12691875
  misc_feature (240)..(339): Pfam Name: 2OG-Fe(II) oxygenase superfamily Pfam Description: 2OG-Fe(II) oxygenase superfamily
  misc_feature (9)..(228): Homolog of NCBI NO: 25518648 NR Description: hypothetical protein F19G10.9 [imported] - thaliana >gi|2462828|gb|AAB72163.1| hypothetical protein
  misc_feature (220)..(397): Homolog of NCBI NO: 25518648 NR Description: hypothetical protein F19G10.9 [imported] - thaliana >gi|2462828|gb|AAB72163.1| hypothetical protein
  misc_feature (10)..(228): Homolog of NCBI NO: 15219973 NR Description: unknown protein; protein id: At1g22950.1
  misc_feature (220)..(397): Homolog of NCBI NO: 15219973 NR Description: unknown protein; protein id: At1g22950.1
  misc_feature (39)..(378): Homolog of NCBI NO: 18401806 NR Description: expressed protein; protein id: At3g18210.1, by cDNA: gi_14423467 [Arabidopsis thaliana] gb|AAB72163.1~gene_id:MRC8.21~strong similarity to unknown
  misc_feature (28)..(387): Homolog of NCBI NO: 34914494 NR Description: B1080D07.28 [Oryza sativa (japonica
  misc_feature (39)..(381): Homolog of NCBI NO: 15239932 NR Description: putative protein; protein id: At5g43660.1
  misc_feature (10)..(382): Homolog of NCBI NO: 15221946 NR Description: unknown protein; protein id: At1g48740.1 thaliana] >gi|12597814|gb|AAG60125.1|AC073555_9 unknown protein
  misc_feature (229)..(375): Homolog of NCBI NO: 15221938 NR Description: unknown protein; protein id: At1g48700.1 thaliana] >gi|12597823|gb|AAG60134.1|AC073555_18 unknown protein
  misc_feature (76)..(202): Homolog of NCBI NO: 15221938 NR Description: unknown protein; protein id: At1g48700.1 thaliana] >gi|12597823|gb|AAG60134.1|AC073555_18 unknown protein
MCNQTPLRSMALDSSGKQPEQQQQQQPRASSGNGEARLKLRRTPNEEHEPENYEDLPLDYSPSLFTSLERYLPEQLLNSTRIDKASFMRDLLLRYSPDTERVRVLRHKEYRDKIMSSYQRLHGEIYTLDPSSFFAPSFLGAFSRKSEPNFRSSMVESYPGIFTFEMFKPQFCEMLLAEVEHMEKWVYDSRSTIMRPNTMNNFGVVLDDFGFDSMLQKLVDDFISPIAQVLFPEVCGTSLDSHHGYIVEYGKDRDVDLGFHVDDSEVSLNVCLGKQFSGGELYFRGVRCDKHVNSDSTEKEVYDYSHVPGHAILHRGRHRHGARATTSGHRANLILWCRSSTFREMKNYQRDFSGWCGGCKLDKQRRQRDSINATKEILARKAAEKTLVELASKSCAE

SEQ ID NO: 86587 - protein, 388 aa, Arabidopsis thaliana
  peptide (1)..(388): Ceres Seq. ID no. 12691876
  misc_feature (231)..(330): Pfam Name: 2OG-Fe(II) oxygenase superfamily Pfam Description: 2OG-Fe(II) oxygenase superfamily
  misc_feature (1)..(219): Homolog of NCBI NO: 25518648 NR Description: hypothetical protein F19G10.9 [imported] - thaliana >gi|2462828|gb|AAB72163.1| hypothetical protein
  misc_feature (211)..(388): Homolog of NCBI NO: 25518648 NR Description: hypothetical protein F19G10.9 [imported] - thaliana >gi|2462828|gb|AAB72163.1| hypothetical protein
  misc_feature (1)..(219): Homolog of NCBI NO: 15219973 NR Description: unknown protein; protein id: At1g22950.1
  misc_feature (211)..(388): Homolog of NCBI NO: 15219973 NR Description: unknown protein; protein id: At1g22950.1
  misc_feature (30)..(369): Homolog of NCBI NO: 18401806 NR Description: expressed protein; protein id: At3g18210.1, by cDNA: gi_14423467 [Arabidopsis thaliana] gb|AAB72163.1~gene_id:MRC8.21~strong similarity to unknown
  misc_feature (19)..(378): Homolog of NCBI NO: 34914494 NR Description: B1080D07.28 [Oryza sativa (japonica
  misc_feature (30)..(372): Homolog of NCBI NO: 15239932 NR Description: putative protein; protein id: At5g43660.1
  misc_feature (1)..(373): Homolog of NCBI NO: 15221946 NR Description: unknown protein; protein id: At1g48740.1 thaliana] >gi|12597814|gb|AAG60125.1|AC073555_9 unknown protein
  misc_feature (220)..(366): Homolog of NCBI NO: 15221938 NR Description: unknown protein; protein id: At1g48700.1 thaliana] >gi|12597823|gb|AAG60134.1|AC073555_18 unknown protein
  misc_feature (67)..(193): Homolog of NCBI NO: 15221938 NR Description: unknown protein; protein id: At1g48700.1 thaliana] >gi|12597823|gb|AAG60134.1|AC073555_18 unknown protein
MALDSSGKQPEQQQQQQPRASSGNGEARLKLRRTPNEEHEPENYEDLPLDYSPSLFTSLERYLPEQLLNSTRIDKASFMRDLLLRYSPDTERVRVLRHKEYRDKIMSSYQRLHGEIYTLDPSSFFAPSFLGAFSRKSEPNFRSSMVESYPGIFTFEMFKPQFCEMLLAEVEHMEKWVYDSRSTIMRPNTMNNFGVVLDDFGFDSMLQKLVDDFISPIAQVLFPEVCGTSLDSHHGYIVEYGKDRDVDLGFHVDDSEVSLNVCLGKQFSGGELYFRGVRCDKHVNSDSTEKEVYDYSHVPGHAILHRGRHRHGARATTSGHRANLILWCRSSTFREMKNYQRDFSGWCGGCKLDKQRRQRDSINATKEILARKAAEKTLVELASKSCAE

SEQ ID NO: 86588 - protein, 310 aa, Arabidopsis thaliana; identical to SEQ ID NO: 23612
  peptide (1)..(310): Ceres Seq. ID no. 12691877
  misc_feature (153)..(252): Pfam Name: 2OG-Fe(II) oxygenase superfamily Pfam Description: 2OG-Fe(II) oxygenase superfamily
  misc_feature (1)..(141): Homolog of NCBI NO: 25518648 NR Description: hypothetical protein F19G10.9 [imported] - thaliana >gi|2462828|gb|AAB72163.1| hypothetical protein
  misc_feature (133)..(310): Homolog of NCBI NO: 25518648 NR Description: hypothetical protein F19G10.9 [imported] - thaliana >gi|2462828|gb|AAB72163.1| hypothetical protein
  misc_feature (1)..(141): Homolog of NCBI NO: 15219973 NR Description: unknown protein; protein id: At1g22950.1
  misc_feature (133)..(310): Homolog of NCBI NO: 15219973 NR Description: unknown protein; protein id: At1g22950.1
  misc_feature (1)..(291): Homolog of NCBI NO: 18401806 NR Description: expressed protein; protein id: At3g18210.1, by cDNA: gi_14423467 [Arabidopsis thaliana] gb|AAB72163.1~gene_id:MRC8.21~strong similarity to unknown
  misc_feature (1)..(300): Homolog of NCBI NO: 34914494 NR Description: B1080D07.28 [Oryza sativa (japonica
  misc_feature (1)..(294): Homolog of NCBI NO: 15239932 NR Description: putative protein; protein id: At5g43660.1
  misc_feature (1)..(295): Homolog of NCBI NO: 15221946 NR Description: unknown protein; protein id: At1g48740.1 thaliana] >gi|12597814|gb|AAG60125.1|AC073555_9 unknown protein
  misc_feature (142)..(288): Homolog of NCBI NO: 15221938 NR Description: unknown protein; protein id: At1g48700.1 thaliana] >gi|12597823|gb|AAG60134.1|AC073555_18 unknown protein
  misc_feature (1)..(115): Homolog of NCBI NO: 15221938 NR Description: unknown protein; protein id: At1g48700.1 thaliana] >gi|12597823|gb|AAG60134.1|AC073555_18 unknown protein

SEQ ID NO: 86589 - DNA, 3900 bp, Arabidopsis thaliana
  misc_feature (1)..(3900): Ceres Seq. ID no. 12691904
  misc_feature: MA Experiment ID: 20000171 Result: Up-regulated in Transcription
  misc_feature: MA Experiment 20000171 PARAMETER Experiment Name: At_42deg_Heat_P Parameter: Age (day) Value: 14
  misc_feature: MA Experiment 20000171 PARAMETER Experiment Name: At_42deg_Heat_P Parameter: Organism Value: A. thaliana
  misc_feature: MA Experiment 20000171 PARAMETER Experiment Name: At_42deg_Heat_P Parameter: Plant Line Value: WS
  misc_feature: MA Experiment 20000171 PARAMETER Experiment Name: At_42deg_Heat_P Parameter: Temperature (deg C) Value: 42 vs. 22
  misc_feature: MA Experiment 20000171 PARAMETER Experiment Name: At_42deg_Heat_P Parameter: Timepoint (hr) Value: 1
  misc_feature: MA Experiment 20000171 PARAMETER Experiment Name: At_42deg_Heat_P Parameter: Tissue Value: Aerial
  misc_feature: MA Experiment ID: 20000173 Result: Up-regulated in Transcription
  misc_feature: MA Experiment 20000173 PARAMETER Experiment Name: At_42deg_Heat_P Parameter: Age (day) Value: 14
  misc_feature: MA Experiment 20000173 PARAMETER Experiment Name: At_42deg_Heat_P Parameter: Organism Value: A. thaliana
  misc_feature: MA Experiment 20000173 PARAMETER Experiment Name: At_42deg_Heat_P Parameter: Plant Line Value: WS
  misc_feature: MA Experiment 20000173 PARAMETER Experiment Name: At_42deg_Heat_P Parameter: Temperature (deg C) Value: 42 vs. 22
  misc_feature: MA Experiment 20000173 PARAMETER Experiment Name: At_42deg_Heat_P Parameter: Timepoint (hr) Value: 6
  misc_feature: MA Experiment 20000173 PARAMETER Experiment Name: At_42deg_Heat_P Parameter: Tissue Value: Aerial
  misc_feature: MA Experiment ID: 20000234 Result: Up-regulated in Transcription
  misc_feature: MA Experiment 20000234 PARAMETER Experiment Name: At_Siliques_P Parameter: Age (day) Value: 21
  misc_feature: MA Experiment 20000234 PARAMETER Experiment Name: At_Siliques_P Parameter: Organism Value: A. thaliana
  misc_feature: MA Experiment 20000234 PARAMETER Experiment Name: At_Siliques_P Parameter: Plant Line Value: WS
  misc_feature: MA Experiment 20000234 PARAMETER Experiment Name: At_Siliques_P Parameter: Tissue Value: Less Than 5mm Siliques vs. Whole Plant
  misc_feature: MA Experiment ID: 20000235 Result: Up-regulated in Transcription
  misc_feature: MA Experiment 20000235 PARAMETER Experiment Name: At_Siliques_P Parameter: Age (day) Value: 21
  misc_feature: MA Experiment 20000235 PARAMETER Experiment Name: At_Siliques_P Parameter: Organism Value: A. thaliana
  misc_feature: MA Experiment 20000235 PARAMETER Experiment Name: At_Siliques_P Parameter: Plant Line Value: WS
  misc_feature: MA Experiment 20000235 PARAMETER Experiment Name: At_Siliques_P Parameter: Tissue Value: 5-10mm Siliques vs. Whole Plant
  misc_feature: MA Experiment ID: 20000264 Result: Up-regulated in Transcription
  misc_feature: MA Experiment 20000264 PARAMETER Experiment Name: At_Open_Flower_P Parameter: Age (day) Value: 21
  misc_feature: MA Experiment 20000264 PARAMETER Experiment Name: At_Open_Flower_P Parameter: Plant Line Value: WS
  misc_feature: MA Experiment 20000264 PARAMETER Experiment Name: At_Open_Flower_P Parameter: Tissue Value: Open Flower vs. Whole Plant
  misc_feature: MA Experiment ID: 20000794 Result: Up-regulated in Transcription
  misc_feature: MA Experiment 20000794 PARAMETER Experiment Name: At_Petals_P Parameter: Age (day) Value: 23-25 days
  misc_feature: MA Experiment 20000794 PARAMETER Experiment Name: At_Petals_P Parameter: Plant Line Value: WS
  misc_feature: MA Experiment 20000794 PARAMETER Experiment Name: At_Petals_P Parameter: Tissue Value: Petals vs. Whole plant
  misc_feature: MA Experiment ID: 20001248 Result: Down-regulated in Transcription
  misc_feature: MA Experiment 20001248 PARAMETER Experiment Name: At_Far-red-induction_P Parameter: Age (day) Value: 7
  misc_feature: MA Experiment 20001248 PARAMETER Experiment Name: At_Far-red-induction_P Parameter: Light Value: Far-red vs. White
  misc_feature: MA Experiment 20001248 PARAMETER Experiment Name: At_Far-red-induction_P Parameter: Organism Value: A. thaliana
  misc_feature: MA Experiment 20001248 PARAMETER Experiment Name: At_Far-red-induction_P Parameter: Plant Line Value: Columbia
  misc_feature: MA Experiment 20001248 PARAMETER Experiment Name: At_Far-red-induction_P Parameter: Timepoint (hr) Value: 4
  misc_feature: MA Experiment 20001248 PARAMETER Experiment Name: At_Far-red-induction_P Parameter: Tissue Value: Whole Plant
  misc_feature: MA Experiment ID: 20001450 Result: Down-regulated in Transcription
  misc_feature: MA Experiment 20001450 PARAMETER Experiment Name: At_Far-red-induction_P Parameter: Age (day) Value: 7
  misc_feature: MA Experiment 20001450 PARAMETER Experiment Name: At_Far-red-induction_P Parameter: Light Value: Far-red vs. White
  misc_feature: MA Experiment 20001450 PARAMETER Experiment Name: At_Far-red-induction_P Parameter: Organism Value: A. thaliana
  misc_feature: MA Experiment 20001450 PARAMETER Experiment Name: At_Far-red-induction_P Parameter: Plant Line Value: Columbia
  misc_feature: MA Experiment 20001450 PARAMETER Experiment Name: At_Far-red-induction_P Parameter: Timepoint (hr) Value: 8
  misc_feature: MA Experiment 20001450 PARAMETER Experiment Name: At_Far-red-induction_P Parameter: Tissue Value: Whole Plant
atggatccaattgaatcagtggagtacaatggctttgaaactaccaatggtaactctcacaacgacgaccatggttggaagaaagtagtgtacccaaaacgtaaccggaagcaaaaaccggcggatcaagcggcggcgacgaagaatggtgtcaccgggaatctaattcccaatggtactttatccaatggaggaggcaacgtcttccgttctcttgaggagcaagctgaaggtcgtcatctacagatcctcgccgcgaagaaagcttccgatacggcggatgtgtcggacgggggaagatctaaatggcgatctaacgggtacggcgacgaagggtatgattttgatgacagcgacagtgaaatcgcggtggggaaggagaatttgaaagcggaggaagttaagaaaccgaaggttaagaaggtgaagaagcctaaggttactttagctgaagctgctgctaagattgatgtatctaatctcgcagctttcctcgttgaagcttcgattccactttctcatattcctgaagcagtgtataagacatcagctgattggattaaccaacgtcccattgaggcacttggagcctttgtattgtggggcttggattgtattcttgctgacttggctgtacaacaaggaggtgtcaagggtggtaagaaaggagcacaacaggcttcttcgaaatctcaggttgcgatatttgtggcggtagcaatggttttgcgtaagaaacctgatgctttaactaatatattgccaactttgagggagaatcccaagtatcagggacaggataagcttccagttacagtttggatgatggctcaggcctcccaaggtgatatatcagtaggcttgtactcgtgggctcacaacttgttaccggtggtcagtagcaagagttgcaatcctcagtcaagggatctcattcttcagttggttgagaggatcttgtccaacccgaaggcccggaccatacttgtaaatggggctgttaggaagggagagcgattgattccacctccttcgtttgagatcttggttcgacttacattccctgcatcttccgcaagagtgaaggagaatctttataccgacaatttgaaagccagtgttgctgttcttaaaaagctcattggcgagtggaaggagcgttctgtcaagctgactcctgctgaaaccctcactctcaaccaaacaatgaagagcttgaggcaaaagaacgaggaagctcttactgagggaggtaatggtgtaagccagtccctatacaaagacgcagacaagtactgcaaggtgatcgctgggaaactctccagtggtggctgcatcaaaagtatagctaccactgctgcacttctagctgctactggttttgctggtgctgctgctctgtctgccaaccctgaggctatagcttacctaaagaacctgtttatcagagaaaaggttagaacttttgaagaatcagatagcttcttcacagaaggaacgttcgaattgattcgcttcttaatgtcactctctacaatagcttctggtatcggcgttctcgagcttccttgtttgcgtctgttaccaatctcaagcacccaaatccagtttctcactgttgaagctagaaaacaatctagaagaataagacgcgagcgctccttcagcccttttccagtacttattcaatcgaaccgtcgtcttcgtcatggtttctcagagctcaattcgagttttgatcgttccaacagtggagaaactggttccgataccactcttaaagatggtgaagaagtgaggagtgaaagctcttcaggtgttggtgatagctatgtgggcttgtttgtgggaatgctcggtttggacaacgatcctcttgatagagagcaggcgatagagacgctatggaagtactctttgggtggaaagaaatgtattgatgcgataatgcagtttcatggttgtttgaatctaattgtcaatcttctcaagtctgagtccagctccgcctgtgaagctgctgctgggcttatacggtctatagcttctgtgaatctgtacagagaatccgttgctgagagtggagcgttggaagagataaccgctctactgagccgaccttcgctagctacagtggtgaaagaacaatgcatatgtgctctgtggaatctgactgtggatgaagaaattagggagaaggttgctgactttgatatccttaggctactcattagtttccttgaagatgatgatgtaaacgtaaaggaagcagctggtggcgtcttggccaatctagcccttagccgctcgactcacaagattctggttgaagtaggagtcataccaaaactggcaaaattgttgaaagccgataatacagaaaacaaagggtctaaagttattagaaaagaagcaagaaatgtgcttttggagctagccaaagacgaatactacagaattctcgtcattgaggagggagttgtacccattcccataattggtgcagacgcttataagtccttcagaccggatttgtattcttggcctagtttaccagatggtataaatattgagcagacagcaaaagctccttcaagatttggtgcctctgagctgctccttggtttaaatgttgacaagaatgttgacgacgtagatgaagccaaaatgaaagcaatagttgggaggacaaatcagcagttccttgcccgtattggagcaattgaatttgagaaggaaattaagtccgaagggccagggaaatctcagcagcttacccttcttccttgtgtagatggtgtggctcgattagtcttgattcttggattggcagatgaattggcagctacaagagctgcagagtcaattgctgatgcatctatcaacgaggatatgcgggtttctttcatggaagccggagctgtaaagcctttggttcagcttttagccaacaacaacaaagagactgttaaattacccgtcatccgtgccttgaaaaatttatcacttagaagtattaattactcaaaacatcggatgggaatgaacagaaaggaagttctggacgctgctgttttttctcggctcgtccagattgcgaaaacagcctctccgaacctgctaagaaacgcaatctctgtcatcgagtttggtataatcagtaatccaaacatggacacgatcatctccaaggatatcacaactgttcttgatcttgctctccggcagaaagtcctggaagcatacaatactttttatggaaatgcagaacctgagaatgaagctgaggagttagagaaacatctgcttaagctagaagaagctggtttgacgatttccgctgcttcaaggctactgacaaaacttcttgactccgagtcctttcgccaaacaatagataccgcggtcttcatagaattagtaaggaagatcctaagatcaagcctccctctacactacaaagactgggttgccgcttgtcttgtcaaactcaccgctctctcctctccctctcaatccctcaacaatccgatcaatcttgaggtaactctgtacaaaacgatcccgagcctcgtggaacaaatgagcttttcctcatcaccagaaacgaaagaagcagcggttttagaactgaacaagatagtctccgagggagttccagaatctatccaaacacttgcttcacaaggaggtatcgaaccgctggttaagcttcttgaagaaaggaacgagcggtgcgttgaagcgagtttgtcagtattgtacaacttaaccatggacagtgagaaccacacagccatcataagagcaggagctgtaccagtattgagacgtatcgttatgtctcaacgaccacaatgggagaaagctcttcggttactcagaaatttacccgtttaa

SEQ ID NO: 86590 - protein, 1299 aa, Arabidopsis thaliana
  peptide (1)..(1299): Ceres Seq. ID no. 12691905
  misc_feature (684)..(726): Pfam Name: Armadillo/beta-catenin-like repeat Pfam Description: Armadillo/beta-catenin-like repeat
  misc_feature (1)..(434): Homolog of NCBI NO: 15220663 NR Description: unknown protein; protein id: At1g23170.1
  misc_feature (165)..(398): Homolog of NCBI NO: 15223242 NR Description: unknown protein; protein id: At1g70770.1
  misc_feature (1)..(189): Homolog of NCBI NO: 15223242 NR Description: unknown protein; protein id: At1g70770.1
  misc_feature (154)..(432): Homolog of NCBI NO: 34895518 NR Description: unnamed protein product [Oryza sativa (japonica group)] >gi|9558458|dbj|BAB03379.1| unnamed protein product
  misc_feature (24)..(169): Homolog of NCBI NO: 34895518 NR Description: unnamed protein product [Oryza sativa (japonica group)] >gi|9558458|dbj|BAB03379.1| unnamed protein product
  misc_feature (363)..(480): Homolog of NCBI NO: 15223242 NR Description: unknown protein; protein id: At1g70770.1
  misc_feature (363)..(492): Homolog of NCBI NO: 15220663 NR Description: unknown protein; protein id: At1g23170.1
  misc_feature (170)..(380): Homolog of NCBI NO: 6671944 NR Description: unknown protein [Arabidopsis thaliana]
  misc_feature (170)..(380): Homolog of NCBI NO: 18399392 NR Description: expressed protein; protein id: At3g11880.1, by cDNA: gi_16226859 [Arabidopsis thaliana]
  misc_feature (352)..(461): Homolog of NCBI NO: 34895518 NR Description: unnamed protein product [Oryza sativa (japonica group)] >gi|9558458|dbj|BAB03379.1| unnamed protein product
MDPIESVEYNGFETTNGNSHNDDHGWKKVVYPKRNRKQKPADQAAATKNGVTGNLIPNGTLSNGGGNVFRSLEEQAEGRHLQILAAKKASDTADVSDGGRSKWRSNGYGDEGYDFDDSDSEIAVGKENLKAEEVKKPKVKKVKKPKVTLAEAAAKIDVSNLAAFLVEASIPLSHIPEAVYKTSADWINQRPIEALGAFVLWGLDCILADLAVQQGGVKGGKKGAQQASSKSQVAIFVAVAMVLRKKPDALTNILPTLRENPKYQGQDKLPVTVWMMAQASQGDISVGLYSWAHNLLPVVSSKSCNPQSRDLILQLVERILSNPKARTILVNGAVRKGERLIPPPSFEILVRLTFPASSARVKENLYTDNLKASVAVLKKLIGEWKERSVKLTPAETLTLNQTMKSLRQKNEEALTEGGNGVSQSLYKDADKYCKVIAGKLSSGGCIKSIATTAALLAATGFAGAAALSANPEAIAYLKNLFIREKVRTFEESDSFFTEGTFELIRFLMSLSTIASGIGVLELPCLRLLPISSTQIQFLTVEARKQSRRIRRERSFSPFPVLIQSNRRLRHGFSELNSSFDRSNSGETGSDTTLKDGEEVRSESSSGVGDSYVGLFVGMLGLDNDPLDREQAIETLWKYSLGGKKCIDAIMQFHGCLNLIVNLLKSESSSACEAAAGLIRSIASVNLYRESVAESGALEEITALLSRPSLATVVKEQCICALWNLTVDEEIREKVADFDILRLLISFLEDDDVNVKEAAGGVLANLALSRSTHKILVEVGVIPKLAKLLKADNTENKGSKVIRKEARNVLLELAKDEYYRILVIEEGVVPIPIIGADAYKSFRPDLYSWPSLPDGINIEQTAKAPSRFGASELLLGLNVDKNVDDVDEAKMKAIVGRTNQQFLARIGAIEFEKEIKSEGPGKSQQLTLLPCVDGVARLVLILGLADELAATRAAESIADASINEDMRVSFMEAGAVKPLVQLLANNNKETVKLPVIRALKNLSLRSINYSKHRMGMNRKEVLDAAVFSRLVQIAKTASPNLLRNAISVIEFGIISNPNMDTIISKDITTVLDLALRQKVLEAYNTFYGNAEPENEAEELEKHLLKLEEAGLTISAASRLLTKLLDSESFRQTIDTAVFIELVRKILRSSLPLHYKDWVAACLVKLTALSSPSQSLNNPINLEVTLYKTIPSLVEQMSFSSSPETKEAAVLELNKIVSEGVPESIQTLASQGGIEPLVKLLEERNERCVEASLSVLYNLTMDSENHTAIIRAGAVPVLRRIVMSQRPQWEKALRLLRNLPV

SEQ ID NO: 86591 - protein, 1059 aa, Arabidopsis thaliana
  peptide (1)..(1059): Ceres Seq. ID no. 12691906
  misc_feature (444)..(486): Pfam Name: Armadillo/beta-catenin-like repeat Pfam Description: Armadillo/beta-catenin-like repeat
  misc_feature (1)..(194): Homolog of NCBI NO: 15220663 NR Description: unknown protein; protein id: At1g23170.1
  misc_feature (1)..(158): Homolog of NCBI NO: 15223242 NR Description: unknown protein; protein id: At1g70770.1
  misc_feature (1)..(192): Homolog of NCBI NO: 34895518 NR Description: unnamed protein product [Oryza sativa (japonica group)] >gi|9558458|dbj|BAB03379.1| unnamed protein product
  misc_feature (123)..(240): Homolog of NCBI NO: 15223242 NR Description: unknown protein; protein id: At1g70770.1
  misc_feature (123)..(252): Homolog of NCBI NO: 15220663 NR Description: unknown protein; protein id: At1g23170.1
  misc_feature (1)..(140): Homolog of NCBI NO: 6671944 NR Description: unknown protein [Arabidopsis thaliana]
  misc_feature (1)..(140): Homolog of NCBI NO: 18399392 NR Description: expressed protein; protein id: At3g11880.1, by cDNA: gi_16226859 [Arabidopsis thaliana]
  misc_feature (112)..(221): Homolog of NCBI NO: 34895518 NR Description: unnamed protein product [Oryza sativa (japonica group)] >gi|9558458|dbj|BAB03379.1| unnamed protein product
  misc_feature (63)..(218): Homolog of NCBI NO: 18399392 NR Description: expressed protein; protein id: At3g11880.1, by cDNA: gi_16226859 [Arabidopsis thaliana]
  misc_feature (63)..(218): Homolog of NCBI NO: 6671944 NR Description: unknown protein [Arabidopsis thaliana]
MVLRKKPDALTNILPTLRENPKYQGQDKLPVTVWMMAQASQGDISVGLYSWAHNLLPVVSSKSCNPQSRDLILQLVERILSNPKARTILVNGAVRKGERLIPPPSFEILVRLTFPASSARVKENLYTDNLKASVAVLKKLIGEWKERSVKLTPAETLTLNQTMKSLRQKNEEALTEGGNGVSQSLYKDADKYCKVIAGKLSSGGCIKSIATTAALLAATGFAGAAALSANPEAIAYLKNLFIREKVRTFEESDSFFTEGTFELIRFLMSLSTIASGIGVLELPCLRLLPISSTQIQFLTVEARKQSRRIRRERSFSPFPVLIQSNRRLRHGFSELNSSFDRSNSGETGSDTTLKDGEEVRSESSSGVGDSYVGLFVGMLGLDNDPLDREQAIETLWKYSLGGKKCIDAIMQFHGCLNLIVNLLKSESSSACEAAAGLIRSIASVNLYRESVAESGALEEITALLSRPSLATVVKEQCICALWNLTVDEEIREKVADFDILRLLISFLEDDDVNVKEAAGGVLANLALSRSTHKILVEVGVIPKLAKLLKADNTENKGSKVIRKEARNVLLELAKDEYYRILVIEEGVVPIPIIGADAYKSFRPDLYSWPSLPDGINIEQTAKAPSRFGASELLLGLNVDKNVDDVDEAKMKAIVGRTNQQFLARIGAIEFEKEIKSEGPGKSQQLTLLPCVDGVARLVLILGLADELAATRAAESIADASINEDMRVSFMEAGAVKPLVQLLANNNKETVKLPVIRALKNLSLRSINYSKHRMGMNRKEVLDAAVFSRLVQIAKTASPNLLRNAISVIEFGIISNPNMDTIISKDITTVLDLALRQKVLEAYNTFYGNAEPENEAEELEKHLLKLEEAGLTISAASRLLTKLLDSESFRQTIDTAVFIELVRKILRSSLPLHYKDWVAACLVKLTALSSPSQSLNNPINLEVTLYKTIPSLVEQMSFSSSPETKEAAVLELNKIVSEGVPESIQTLASQGGIEPLVKLLEERNERCVEASLSVLYNLTMDSENHTAIIRAGAVPVLRRIVMSQRPQWEKALRLLRNLPV

SEQ ID NO: 86592 - protein, 1025 aa, Arabidopsis thaliana
  peptide (1)..(1025): Ceres Seq. ID no. 12691907
  misc_feature (410)..(452): Pfam Name: Armadillo/beta-catenin-like repeat Pfam Description: Armadillo/beta-catenin-like repeat
  misc_feature (1)..(160): Homolog of NCBI NO: 15220663 NR Description: unknown protein; protein id: At1g23170.1
  misc_feature (1)..(124): Homolog of NCBI NO: 15223242 NR Description: unknown protein; protein id: At1g70770.1
  misc_feature (1)..(158): Homolog of NCBI NO: 34895518 NR Description: unnamed protein product [Oryza sativa (japonica group)] >gi|9558458|dbj|BAB03379.1| unnamed protein product
  misc_feature (89)..(206): Homolog of NCBI NO: 15223242 NR Description: unknown protein; protein id: At1g70770.1
  misc_feature (89)..(218): Homolog of NCBI NO: 15220663 NR Description: unknown protein; protein id: At1g23170.1
  misc_feature (1)..(106): Homolog of NCBI NO: 6671944 NR Description: unknown protein [Arabidopsis thaliana]
  misc_feature (1)..(106): Homolog of NCBI NO: 18399392 NR Description: expressed protein; protein id: At3g11880.1, by cDNA: gi_16226859 [Arabidopsis thaliana]
  misc_feature (78)..(187): Homolog of NCBI NO: 34895518 NR Description: unnamed protein product [Oryza sativa (japonica group)] >gi|9558458|dbj|BAB03379.1| unnamed protein product
  misc_feature (29)..(184): Homolog of NCBI NO: 18399392 NR Description: expressed protein; protein id: At3g11880.1, by cDNA: gi_16226859 [Arabidopsis thaliana]
  misc_feature (29)..(184): Homolog of NCBI NO: 6671944 NR Description: unknown protein [Arabidopsis thaliana]
MMAQASQGDISVGLYSWAHNLLPVVSSKSCNPQSRDLILQLVERILSNPKARTILVNGAVRKGERLIPPPSFEILVRLTFPASSARVKENLYTDNLKASVAVLKKLIGEWKERSVKLTPAETLTLNQTMKSLRQKNEEALTEGGNGVSQSLYKDADKYCKVIAGKLSSGGCIKSIATTAALLAATGFAGAAALSANPEAIAYLKNLFIREKVRTFEESDSFFTEGTFELIRFLMSLSTIASGIGVLELPCLRLLPISSTQIQFLTVEARKQSRRIRRERSFSPFPVLIQSNRRLRHGFSELNSSFDRSNSGETGSDTTLKDGEEVRSESSSGVGDSYVGLFVGMLGLDNDPLDREQAIETLWKYSLGGKKCIDAIMQFHGCLNLIVNLLKSESSSACEAAAGLIRSIASVNLYRESVAESGALEEITALLSRPSLATVVKEQCICALWNLTVDEEIREKVADFDILRLLISFLEDDDVNVKEAAGGVLANLALSRSTHKILVEVGVIPKLAKLLKADNTENKGSKVIRKEARNVLLELAKDEYYRILVIEEGVVPIPIIGADAYKSFRPDLYSWPSLPDGINIEQTAKAPSRFGASELLLGLNVDKNVDDVDEAKMKAIVGRTNQQFLARIGAIEFEKEIKSEGPGKSQQLTLLPCVDGVARLVLILGLADELAATRAAESIADASINEDMRVSFMEAGAVKPLVQLLANNNKETVKLPVIRALKNLSLRSINYSKHRMGMNRKEVLDAAVFSRLVQIAKTASPNLLRNAISVIEFGIISNPNMDTIISKDITTVLDLALRQKVLEAYNTFYGNAEPENEAEELEKHLLKLEEAGLTISAASRLLTKLLDSESFRQTIDTAVFIELVRKILRSSLPLHYKDWVAACLVKLTALSSPSQSLNNPINLEVTLYKTIPSLVEQMSFSSSPETKEAAVLELNKIVSEGVPESIQTLASQGGIEPLVKLLEERNERCVEASLSVLYNLTMDSENHTAIIRAGAVPVLRRIVMSQRPQWEKALRLLRNLPV

SEQ ID NO: 86593 - DNA, 569 bp, Arabidopsis thaliana
  misc_feature (1)..(569): Ceres Seq. ID no. 12691930
  misc_feature: MA Experiment ID: 108434 Result: Up-regulated in Transcription
  misc_feature: MA Experiment 108434 PARAMETER Experiment Name: At_Root_Tips_cDNA_P Parameter: Tissue Value: Root Tips
  misc_feature: MA Experiment ID: 108462 Result: Down-regulated in Transcription
  misc_feature: MA Experiment 108462 PARAMETER Experiment Name: At_Germinating_Seeds_cDNA_P Parameter: Age (day) Value: 2 vs. 0
  misc_feature: MA Experiment 108462 PARAMETER Experiment Name: At_Germinating_Seeds_cDNA_P Parameter: Tissue Value: Germinating Seeds
  misc_feature: MA Experiment ID: 108463 Result: Down-regulated in Transcription
  misc_feature: MA Experiment 108463 PARAMETER Experiment Name: At_Germinating_Seeds_cDNA_P Parameter: Age (day) Value: 3 vs. 0
  misc_feature: MA Experiment 108463 PARAMETER Experiment Name: At_Germinating_Seeds_cDNA_P Parameter: Tissue Value: Germinating Seeds
  misc_feature: MA Experiment ID: 108464 Result: Down-regulated in Transcription
  misc_feature: MA Experiment 108464 PARAMETER Experiment Name: At_Germinating_Seeds_cDNA_P Parameter: Age (day) Value: 4 vs. 0
  misc_feature: MA Experiment 108464 PARAMETER Experiment Name: At_Germinating_Seeds_cDNA_P Parameter: Tissue Value: Germinating Seeds
  misc_feature: MA Experiment ID: 108573 Result: Down-regulated in Transcription
  misc_feature: MA Experiment 108573 PARAMETER Experiment Name: At_Drought_cDNA_P Parameter: Timepoint (hr) Value: 6
  misc_feature: MA Experiment 108573 PARAMETER Experiment Name: At_Drought_cDNA_P Parameter: Tissue Value: Aerial
  misc_feature: MA Experiment 108573 PARAMETER Experiment Name: At_Drought_cDNA_P Parameter: Treatment Value: Drought vs. No Drought
  misc_feature: MA Experiment ID: 20001558 Result: Up-regulated in Transcription
  misc_feature: MA Experiment 20001558 PARAMETER Experiment Name: At_Drought_Soil_Dry_P Parameter: Age (day) Value: 27
  misc_feature: MA Experiment 20001558 PARAMETER Experiment Name: At_Drought_Soil_Dry_P Parameter: Organism Value: A. thaliana
  misc_feature: MA Experiment 20001558 PARAMETER Experiment Name: At_Drought_Soil_Dry_P Parameter: Plant Line Value: WS
  misc_feature: MA Experiment 20001558 PARAMETER Experiment Name: At_Drought_Soil_Dry_P Parameter: Post Timepoint (hr) Value: 6
  misc_feature: MA Experiment 20001558 PARAMETER Experiment Name: At_Drought_Soil_Dry_P Parameter: Post-Treatment Value: Re-Water vs. No Drought
  misc_feature: MA Experiment 20001558 PARAMETER Experiment Name: At_Drought_Soil_Dry_P Parameter: Timepoint (day) Value: 13
  misc_feature: MA Experiment 20001558 PARAMETER Experiment Name: At_Drought_Soil_Dry_P Parameter: Treatment Value: Drought vs. No Drought
  misc_feature: MA Experiment ID: 20001560 Result: Up-regulated in Transcription
  misc_feature: MA Experiment 20001560 PARAMETER Experiment Name: At_Drought_Soil_Dry_P Parameter: Age (day) Value: 28
  misc_feature: MA Experiment 20001560 PARAMETER Experiment Name: At_Drought_Soil_Dry_P Parameter: Organism Value: A. thaliana
  misc_feature: MA Experiment 20001560 PARAMETER Experiment Name: At_Drought_Soil_Dry_P Parameter: Plant Line Value: WS
  misc_feature: MA Experiment 20001560 PARAMETER Experiment Name: At_Drought_Soil_Dry_P Parameter: Post Timepoint (hr) Value: None
  misc_feature: MA Experiment 20001560 PARAMETER Experiment Name: At_Drought_Soil_Dry_P Parameter: Post-Treatment Value: None
  misc_feature: MA Experiment 20001560 PARAMETER Experiment Name: At_Drought_Soil_Dry_P Parameter: Timepoint (day) Value: 14
  misc_feature: MA Experiment 20001560 PARAMETER Experiment Name: At_Drought_Soil_Dry_P Parameter: Treatment Value: Drought vs. No Drought
  misc_feature: MA Experiment ID: 20001757 Result: Up-regulated in Transcription
  misc_feature: MA Experiment 20001757 PARAMETER Experiment Name: At_50mM_NH4NO3_L-to-H_P Parameter: Timepoint (hr) Value: 6
  misc_feature: MA Experiment 20001757 PARAMETER Experiment Name: At_50mM_NH4NO3_L-to-H_P Parameter: Tissue Value: Leaf
  misc_feature: MA Experiment 20001757 PARAMETER Experiment Name: At_50mM_NH4NO3_L-to-H_P Parameter: Treatment Value: 50mM NH4NO3 vs 100mM Mannitol
aaaaccctagatctgatactaaaatggcgacggcgttgaagaagaacagaaagaagagaggtcacgtcagcgccggacatggacgtatcggtaagcaccgtaagcatcccggaggtcgtggaaacgcaggaggtatgcatcaccacaggatcctcttcgacaagtaccatccaggttacttcgggaaagttggtatgaggtatttccacaagcttcgtaacaagttcttttgcccaatcgtgaacctggacaagctatggtcacttgttcctgaagacgtgaaggcgaaatcgagcaaggataatgttccgttgatcgatgtgacgcagcatggtttcttcaaggttttggggaaaggtcatttgcctgagaacaaacctttcgttgtgaaggctaagcttatctctaagactgctgagaagaagattaaggaagctggtggtgctgttgttctcactgcttagttttttttttcaattcagtctctttttaatttatttcatgttattgaactcagctttgttggattttggaatcagagatcttttaatctatggtattggattata

SEQ ID NO: 86594 - protein, 153 aa, Arabidopsis thaliana
  peptide (1)..(153): Ceres Seq. ID no. 12691931
  misc_feature (114)..(147): Pfam Name: Ribosomal protein L15 Pfam Description: Ribosomal protein L15
  misc_feature (8)..(153): Homolog of NCBI NO: 15220698 NR Description: 60s ribosomal protein l27a.; protein id: supported by cDNA: 23092., supported by cDNA: gi_13194819, by cDNA: gi_13265579, supported by cDNA: gi_15294177 [Arabidopsis
  misc_feature (8)..(153): Homolog of NCBI NO: 15223190 NR Description: 60S ribosomal protein L27A; protein id: supported by cDNA: 15789., supported by cDNA: gi_14517369, by cDNA: gi_15081671, supported by cDNA: gi_20147176 [Arabidopsis
  misc_feature (8)..(153): Homolog of NCBI NO: 21553702 NR Description: 60S ribosomal protein L27A [Arabidopsis thaliana]
  misc_feature (8)..(153): Homolog of NCBI NO: 7959355 NR Description: 60S ribosomal protein L27a [Panax ginseng]
  misc_feature (8)..(153): Homolog of NCBI NO: 3608481 NR Description: ribosomal protein L27a [Petunia x hybrida]
  misc_feature (8)..(153): Homolog of NCBI NO: 23237917 NR Description: putative 60S ribosomal protein L27a [Oryza sativa
  misc_feature (8)..(153): Homolog of NCBI NO: 30017566 NR Description: putative ribosomal protein L27a [Oryza sativa
  misc_feature (10)..(153): Homolog of NCBI NO: 22758850 NR Description: ribosomal protein L22 [Argopecten irradians]
  misc_feature (8)..(153): Homolog of NCBI NO: 23612262 NR Description: 60S ribosomal protein L27a, putative [Plasmodium
  misc_feature (8)..(153): Homolog of NCBI NO: 132846 NR Description: 60S RIBOSOMAL PROTEIN L27A >gi|71190|pir||R5RTLA
NPRSDTKMATALKKNRKKRGHVSAGHGRIGKHRKHPGGRGNAGGMHHHRILFDKYHPGYFGKVGMRYFHKLRNKFFCPIVNLDKLWSLVPEDVKAKSSKDNVPLIDVTQHGFFKVLGKGHLPENKPFVVKAKLISKTAEKKIKEAGGAVVLTA

SEQ ID NO: 86595 - protein, 146 aa, Arabidopsis thaliana; identical to SEQ ID NO: 35436
  peptide (1)..(146): Ceres Seq. ID no. 12691932
  misc_feature (107)..(140): Pfam Name: Ribosomal protein L15 Pfam Description: Ribosomal protein L15
  misc_feature (1)..(146): Homolog of NCBI NO: 15220698 NR Description: 60s ribosomal protein l27a.; protein id: supported by cDNA: 23092., supported by cDNA: gi_13194819, by cDNA: gi_13265579, supported by cDNA: gi_15294177 [Arabidopsis
  misc_feature (1)..(146): Homolog of NCBI NO: 15223190 NR Description: 60S ribosomal protein L27A; protein id: supported by cDNA: 15789., supported by cDNA: gi_14517369, by cDNA: gi_15081671, supported by cDNA: gi_20147176 [Arabidopsis
  misc_feature (1)..(146): Homolog of NCBI NO: 21553702 NR Description: 60S ribosomal protein L27A [Arabidopsis thaliana]
  misc_feature (1)..(146): Homolog of NCBI NO: 7959355 NR Description: 60S ribosomal protein L27a [Panax ginseng]
  misc_feature (1)..(146): Homolog of NCBI NO: 3608481 NR Description: ribosomal protein L27a [Petunia x hybrida]
  misc_feature (1)..(146): Homolog of NCBI NO: 23237917 NR Description: putative 60S ribosomal protein L27a [Oryza sativa
  misc_feature (1)..(146): Homolog of NCBI NO: 30017566 NR Description: putative ribosomal protein L27a [Oryza sativa
  misc_feature (3)..(146): Homolog of NCBI NO: 22758850 NR Description: ribosomal protein L22 [Argopecten irradians]
  misc_feature (1)..(146): Homolog of NCBI NO: 23612262 NR Description: 60S ribosomal protein L27a, putative [Plasmodium
  misc_feature (1)..(146): Homolog of NCBI NO: 132846 NR Description: 60S RIBOSOMAL PROTEIN L27A >gi|71190|pir||R5RTLA

SEQ ID NO: 86596 - protein, 109 aa, Arabidopsis thaliana; identical to SEQ ID NO: 35437
  peptide (1)..(109): Ceres Seq. ID no. 12691933
  misc_feature (70)..(103): Pfam Name: Ribosomal protein L15 Pfam Description: Ribosomal protein L15
  misc_feature (1)..(109): Homolog of NCBI NO: 15220698 NR Description: 60s ribosomal protein l27a.; protein id: supported by cDNA: 23092., supported by cDNA: gi_13194819, by cDNA: gi_13265579, supported by cDNA: gi_15294177 [Arabidopsis
  misc_feature (1)..(109): Homolog of NCBI NO: 15223190 NR Description: 60S ribosomal protein L27A; protein id: supported by cDNA: 15789., supported by cDNA: gi_14517369, by cDNA: gi_15081671, supported by cDNA: gi_20147176 [Arabidopsis
  misc_feature (1)..(109): Homolog of NCBI NO: 21553702 NR Description: 60S ribosomal protein L27A [Arabidopsis thaliana]
  misc_feature (1)..(109): Homolog of NCBI NO: 7959355 NR Description: 60S ribosomal protein L27a [Panax ginseng]
  misc_feature (1)..(109): Homolog of NCBI NO: 3608481 NR Description: ribosomal protein L27a [Petunia x hybrida]
  misc_feature (1)..(109): Homolog of NCBI NO: 23237917 NR Description: putative 60S ribosomal protein L27a [Oryza sativa
  misc_feature (1)..(109): Homolog of NCBI NO: 30017566 NR Description: putative ribosomal protein L27a [Oryza sativa
  misc_feature (1)..(109): Homolog of NCBI NO: 22758850 NR Description: ribosomal protein L22 [Argopecten irradians]
  misc_feature (1)..(109): Homolog of NCBI NO: 23612262 NR Description: 60S ribosomal protein L27a, putative [Plasmodium
  misc_feature (1)..(109): Homolog of NCBI NO: 132846 NR Description: 60S RIBOSOMAL PROTEIN L27A >gi|71190|pir||R5RTLA

SEQ ID NO: 86597 - DNA, 1790 bp, Arabidopsis thaliana
  misc_feature (1)..(1790): Ceres Seq. ID no. 12691942
  misc_feature: MA Experiment ID: 108435 Result: Down-regulated in Transcription
  misc_feature: MA Experiment 108435 PARAMETER Experiment Name: At_stm_Mutants_cDNA_P Parameter: Plant Line Value: wt Landsburg vs stm
  misc_feature: MA Experiment 108435 PARAMETER Experiment Name: At_stm_Mutants_cDNA_P Parameter: Tissue Value: Shoot Apical Meristem Region
  misc_feature: MA Experiment ID: 108461 Result: Up-regulated in Transcription
  misc_feature: MA Experiment 108461 PARAMETER Experiment Name: At_Germinating_Seeds_cDNA_P Parameter: Age (day) Value: 1 vs. 0
  misc_feature: MA Experiment 108461 PARAMETER Experiment Name: At_Germinating_Seeds_cDNA_P Parameter: Tissue Value: Germinating Seeds
  misc_feature: MA Experiment ID: 108462 Result: Up-regulated in Transcription
  misc_feature: MA Experiment 108462 PARAMETER Experiment Name: At_Germinating_Seeds_cDNA_P Parameter: Age (day) Value: 2 vs. 0
  misc_feature: MA Experiment 108462 PARAMETER Experiment Name: At_Germinating_Seeds_cDNA_P Parameter: Tissue Value: Germinating Seeds
  misc_feature: MA Experiment ID: 108463 Result: Up-regulated in Transcription
  misc_feature: MA Experiment 108463 PARAMETER Experiment Name: At_Germinating_Seeds_cDNA_P Parameter: Age (day) Value: 3 vs. 0
  misc_feature: MA Experiment 108463 PARAMETER Experiment Name: At_Germinating_Seeds_cDNA_P Parameter: Tissue Value: Germinating Seeds
  misc_feature: MA Experiment ID: 108464 Result: Up-regulated in Transcription
  misc_feature: MA Experiment 108464 PARAMETER Experiment Name: At_Germinating_Seeds_cDNA_P Parameter: Age (day) Value: 4 vs. 0
  misc_feature: MA Experiment 108464 PARAMETER Experiment Name: At_Germinating_Seeds_cDNA_P Parameter: Tissue Value: Germinating Seeds
  misc_feature: MA Experiment ID: 108488 Result: Up-regulated in Transcription
  misc_feature: MA Experiment ID: 108577 Result: Up-regulated in Transcription
  misc_feature: MA Experiment 108577 PARAMETER Experiment Name: At_42deg_Heat_cDNA_P Parameter: Temperature (deg C) Value: 42 vs. 22
  misc_feature: MA Experiment 108577 PARAMETER Experiment Name: At_42deg_Heat_cDNA_P Parameter: Timepoint (hr) Value: 6
  misc_feature: MA Experiment 108577 PARAMETER Experiment Name: At_42deg_Heat_cDNA_P Parameter: Tissue Value: Aerial
  misc_feature: MA Experiment ID: 108594 Result: Down-regulated in Transcription
  misc_feature: MA Experiment 108594 PARAMETER Experiment Name: At_Ler-rhl_Root_cDNA_P Parameter: Plant Line Value: null
  misc_feature: MA Experiment ID: 20000088 Result: Down-regulated in Transcription
  misc_feature: MA Experiment 20000088 PARAMETER Experiment Name: At_100uM_ABA_Mutants_cDNA_P Parameter: Plant Line Value: Landsberg
  misc_feature: MA Experiment 20000088 PARAMETER Experiment Name: At_100uM_ABA_Mutants_cDNA_P Parameter: Timepoint (hr) Value: 6
  misc_feature: MA Experiment 20000088 PARAMETER Experiment Name: At_100uM_ABA_Mutants_cDNA_P Parameter: Tissue Value: Aerial
  misc_feature: MA Experiment 20000088 PARAMETER Experiment Name: At_100uM_ABA_Mutants_cDNA_P Parameter: Treatment Value: 100uM ABA vs. No Treatment
  misc_feature: MA Experiment ID: 20000113 Result: Up-regulated in Transcription
  misc_feature: MA Experiment 20000113 PARAMETER Experiment Name: At_42deg_Heat_cDNA_P Parameter: Temperature (deg C) Value: 42 vs. 22
  misc_feature: MA Experiment 20000113 PARAMETER Experiment Name: At_42deg_Heat_cDNA_P Parameter: Timepoint (hr) Value: 8
  misc_feature: MA Experiment 20000113 PARAMETER Experiment Name: At_42deg_Heat_cDNA_P Parameter: Tissue Value: Aerial
  misc_feature: MA Experiment ID: 20000117 Result: Down-regulated in Transcription
  misc_feature: MA Experiment 20000117 PARAMETER Experiment Name: At_100uM_ABA_Mutants_cDNA_P Parameter: Plant Line Value: Columbia
  misc_feature: MA Experiment 20000117 PARAMETER Experiment Name: At_100uM_ABA_Mutants_cDNA_P Parameter: Timepoint (hr) Value: 6
  misc_feature: MA Experiment 20000117 PARAMETER Experiment Name: At_100uM_ABA_Mutants_cDNA_P Parameter: Tissue Value: Aerial
  misc_feature: MA Experiment 20000117 PARAMETER Experiment Name: At_100uM_ABA_Mutants_cDNA_P Parameter: Treatment Value: 100uM ABA vs. No Treatment
  misc_feature: MA Experiment ID: 20000180 Result: Up-regulated in Transcription
  misc_feature: MA Experiment 20000180 PARAMETER Experiment Name: At_Germinating_Seeds_P Parameter: Age (hr) Value: 24 vs. 0
  misc_feature: MA Experiment 20000180 PARAMETER Experiment Name: At_Germinating_Seeds_P Parameter: Tissue Value: Germinating Seeds
  misc_feature: MA Experiment ID: 20000185 Result: Down-regulated in Transcription
  misc_feature: MA Experiment 20000185 PARAMETER Experiment Name: At_Roots__P Parameter: Age (day) Value: 7 vs. 21
  misc_feature: MA Experiment 20000185 PARAMETER Experiment Name: At_Roots__P Parameter: Organism Value: A. thaliana
  misc_feature: MA Experiment 20000185 PARAMETER Experiment Name: At_Roots__P Parameter: Tissue Value: Roots vs. Whole Plant
  misc_feature: MA Experiment ID: 20000264 Result: Down-regulated in Transcription
  misc_feature: MA Experiment 20000264 PARAMETER Experiment Name: At_Open_Flower_P Parameter: Age (day) Value: 21
  misc_feature: MA Experiment 20000264 PARAMETER Experiment Name: At_Open_Flower_P Parameter: Plant Line Value: WS
  misc_feature: MA Experiment 20000264 PARAMETER Experiment Name: At_Open_Flower_P Parameter: Tissue Value: Open Flower vs. Whole Plant
  misc_feature: MA Experiment ID: 20000286 Result: Down-regulated in Transcription
  misc_feature: MA Experiment 20000286 PARAMETER Experiment Name: At_Open_Flower_P Parameter: Age (day) Value: 21
  misc_feature: MA Experiment 20000286 PARAMETER Experiment Name: At_Open_Flower_P Parameter: Plant Line Value: WS
  misc_feature: MA Experiment 20000286 PARAMETER Experiment Name: At_Open_Flower_P Parameter: Tissue Value: Half Open vs. Whole Plant
  misc_feature: MA Experiment ID: 20000308 Result: Down-regulated in Transcription
  misc_feature: MA Experiment 20000308 PARAMETER Experiment Name: At_100mM_NaCl__P Parameter: Age (day) Value: 17
  misc_feature: MA Experiment 20000308 PARAMETER Experiment Name: At_100mM_NaCl__P Parameter: Organism Value: A. thaliana
  misc_feature: MA Experiment 20000308 PARAMETER Experiment Name: At_100mM_NaCl__P Parameter: Plant Line Value: WS
  misc_feature: MA Experiment 20000308 PARAMETER Experiment Name: At_100mM_NaCl__P Parameter: Timepoint (hr) Value: 72
  misc_feature: MA Experiment 20000308 PARAMETER Experiment Name: At_100mM_NaCl__P Parameter: Tissue Value: Whole Plant
  misc_feature: MA Experiment 20000308 PARAMETER Experiment Name: At_100mM_NaCl__P Parameter: Treatment Value: 100mM NaCl vs. No Treatment
  misc_feature: MA Experiment ID: 20000438 Result: Up-regulated in Transcription
  misc_feature: MA Experiment 20000438 PARAMETER Experiment Name: At_Shoots__P Parameter: Age (day) Value: 14
  misc_feature: MA Experiment 20000438 PARAMETER Experiment Name: At_Shoots__P Parameter: Tissue Value: Shoots vs. Whole Plant
  misc_feature: MA Experiment ID: 20000439 Result: Down-regulated in Transcription
  misc_feature: MA Experiment 20000439 PARAMETER Experiment Name: At_Roots__P Parameter: Age (day) Value: 14 vs. 21
  misc_feature: MA Experiment 20000439 PARAMETER Experiment Name: At_Roots__P Parameter: Organism Value: A. thaliana
  misc_feature: MA Experiment 20000439 PARAMETER Experiment Name: At_Roots__P Parameter: Tissue Value: Roots vs. Whole Plant
  misc_feature: MA Experiment ID: 20000794 Result: Down-regulated in Transcription
  misc_feature: MA Experiment 20000794 PARAMETER Experiment Name: At_Petals_P Parameter: Age (day) Value: 23-25 days
  misc_feature: MA Experiment 20000794 PARAMETER Experiment Name: At_Petals_P Parameter: Plant Line Value: WS
  misc_feature: MA Experiment 20000794 PARAMETER Experiment Name: At_Petals_P Parameter: Tissue Value: Petals vs. Whole plant
  misc_feature: MA Experiment ID: 20001557 Result: Down-regulated in Transcription
  misc_feature: MA Experiment 20001557 PARAMETER Experiment Name: At_Drought_Soil_Dry_P Parameter: Age (day) Value: 27
  misc_feature: MA Experiment 20001557 PARAMETER Experiment Name: At_Drought_Soil_Dry_P Parameter: Organism Value: A. thaliana
  misc_feature: MA Experiment 20001557 PARAMETER Experiment Name: At_Drought_Soil_Dry_P Parameter: Plant Line Value: WS
  misc_feature: MA Experiment 20001557 PARAMETER Experiment Name: At_Drought_Soil_Dry_P Parameter: Post Timepoint (hr) Value: 3
  misc_feature: MA Experiment 20001557 PARAMETER Experiment Name: At_Drought_Soil_Dry_P Parameter: Post-Treatment Value: Re-Water vs. No Drought
  misc_feature: MA Experiment 20001557 PARAMETER Experiment Name: At_Drought_Soil_Dry_P Parameter: Timepoint (day) Value: 13
  misc_feature: MA Experiment 20001557 PARAMETER Experiment Name: At_Drought_Soil_Dry_P Parameter: Treatment Value: Drought vs. No Drought
  misc_feature: MA Experiment ID: 20001560 Result: Down-regulated in Transcription
  misc_feature: MA Experiment 20001560 PARAMETER Experiment Name: At_Drought_Soil_Dry_P Parameter: Age (day) Value: 28
  misc_feature: MA Experiment 20001560 PARAMETER Experiment Name: At_Drought_Soil_Dry_P Parameter: Organism Value: A. thaliana
  misc_feature: MA Experiment 20001560 PARAMETER Experiment Name: At_Drought_Soil_Dry_P Parameter: Plant Line Value: WS
  misc_feature: MA Experiment 20001560 PARAMETER Experiment Name: At_Drought_Soil_Dry_P Parameter: Post Timepoint (hr) Value: None
  misc_feature: MA Experiment 20001560 PARAMETER Experiment Name: At_Drought_Soil_Dry_P Parameter: Post-Treatment Value: None
  misc_feature: MA Experiment 20001560 PARAMETER Experiment Name: At_Drought_Soil_Dry_P Parameter: Timepoint (day) Value: 14
  misc_feature: MA Experiment 20001560 PARAMETER Experiment Name: At_Drought_Soil_Dry_P Parameter: Treatment Value: Drought vs. No Drought
  misc_feature: MA Experiment ID: 20001905 Result: Down-regulated in Transcription
  misc_feature: MA Experiment 20001905 PARAMETER Experiment Name: At_Drought_Reproduction_P Parameter: Age (day) Value: 40
  misc_feature: MA Experiment 20001905 PARAMETER Experiment Name: At_Drought_Reproduction_P Parameter: Organism Value: A. thaliana
  misc_feature: MA Experiment 20001905 PARAMETER Experiment Name: At_Drought_Reproduction_P Parameter: Plant Line Value: WS
  misc_feature: MA Experiment 20001905 PARAMETER Experiment Name: At_Drought_Reproduction_P Parameter: Timepoint (day) Value: 10
  misc_feature: MA Experiment 20001905 PARAMETER Experiment Name: At_Drought_Reproduction_P Parameter: Tissue Value: Rosettes
  misc_feature: MA Experiment 20001905 PARAMETER Experiment Name: At_Drought_Reproduction_P Parameter: Treatment Value: Drought vs. No Drought
aactctccccactctttgccttgcccttggctctagaaccgaacgtgactctccagatagacttttggagtcacaacattgagtttgaagaggagggaagaagtgagctagggattggttcagagtgaacataaatggctctcaaggcattagactacgatactctgaatgaaaacgtcaagaagtgtcagtatgccgtaagaggtgaactttatctccgagcttctgagctgcagaaagaaggcaaaaagattattttcacaaacgttgggaaccctcatgctttaggacagaagccattgacatttcctcgccaggtggttgcgctttgccaagctccgtttctactagatgacccaaatgttggaatgctatttccagctgatgctattgcaagagctaaacattatctttccttgacttcaggcggtttaggtgcttacagtgattcaagaggccttccaggagttaggaaagaggttgctgagttcattcaacggcgtgatgggtatccaagtgacccagaactcatctttctcactgatggagctagcaaaggtgtgatgcaaatcttgaattgtgttatacgcggtaatggagatgggattctagttccggttccacagtatccactttactcagctaccatatcactgttaggtggtactcttgttccttactatcttgatgagtctgaaaactggggacttgatgttgctaaccttcgacaatccgttgctcaggctcgttctcaagggataacagtaagggcaatggtgatcattaaccctgggaacccaactggccagtgtctaagcgaagctaacataagagagatattgaagttctgttataacgagaaactggttcttctgggagacgaggtttatcagcagaacatataccaggatgagcgtccctttatcagctccaagaaggttttgatggaaatgggttcgccgttcagcaaggaagttcagcttgtatcttttcacacagtctctaaaggatattggggtgaatgtggacagcgaggtggatactttgagatgaccaacctccctccaagggttgttgaggagatatacaaggttgcatcaattgccctcagccctaatgtctctgcgcaaatctttatgggtttgatggttaatcctccaaagcctggagacatttcatatgaccagttcgcccgtgaaagcaaggggattcttgaatctttgagaagaagagcaaggctcatgacagatggattcaacagctgcaaaaacgtcgtgtgcaatttcacagaaggtgcaatgtattcgtttcctcaaatacggttaccaacgggagctctccaagctgcaaaacaagctggaaaagtgccagacgttttctactgtctcaagctcttagaagccacaggaatctccacagtacctggctctggatttggacagaaagaaggtgtgttccatctgaggacaacaatcctgccagcagaagatgagatgccggagatcatggatagcttcaagaagttcaacgacgagttcatgactcagtatgataataactttggttattcgaaaatgtgattacttcttcttctgaacgactattgtgttctgctacactctttaaagctaaatctctgtagtacactctttctctttgccctattctataaaccatatctctctctttgtgtctcttttttttgggtgtaaactctctcttgtgtctctatttctattttcaattggaaactgattaagatcttttctcaatgaaatgaagtttaggcc

SEQ ID NO: 86598 - protein, 481 aa, Arabidopsis thaliana; identical to SEQ ID NO: 28645
  peptide (1)..(481): Ceres Seq. ID no. 12691943
  misc_feature (118)..(465): Pfam Name: Aminotransferase class I and II Pfam Description: Aminotransferase class I and II
  misc_feature (1)..(481): Homolog of NCBI NO: 30688330 NR Description: alanine aminotransferase -related [Arabidopsis
  misc_feature (1)..(481): Homolog of NCBI NO: 16604499 NR Description: At1g23310/F26F24_4 [Arabidopsis thaliana]
  misc_feature (1)..(481): Homolog of NCBI NO: 13430566 NR Description: putative alanine aminotransferase [Arabidopsis
  misc_feature (1)..(481): Homolog of NCBI NO: 15223186 NR Description: putative alanine aminotransferase; protein id: supported by cDNA: 120310., supported by cDNA: gi_14334913, by cDNA: gi_17104534 [Arabidopsis thaliana]
  misc_feature (1)..(481): Homolog of NCBI NO: 21537112 NR Description: putative alanine aminotransferase [Arabidopsis
  misc_feature (4)..(481): Homolog of NCBI NO: 29569153 NR Description: alanine aminotransferase [Oryza sativa (indica
  misc_feature (4)..(481): Homolog of NCBI NO: 34899390 NR Description: putative alanine aminotransferase [Oryza sativa
  misc_feature (103)..(481): Homolog of NCBI NO: 14596229 NR Description: alanine aminotransferase-like protein
  misc_feature (4)..(472): Homolog of NCBI NO: 7434113 NR Description: alanine transaminase (EC 2.6.1.2) - Chlamydomonas
  misc_feature (1)..(472): Homolog of NCBI NO: 37533928 NR Description: putative alanine aminotransferase [Oryza sativa

SEQ ID NO: 86599 - protein, 403 aa, Arabidopsis thaliana; identical to SEQ ID NO: 28646
  peptide (1)..(403): Ceres Seq. ID no. 12691944
  misc_feature (40)..(387): Pfam Name: Aminotransferase class I and II Pfam Description: Aminotransferase class I and II
  misc_feature (1)..(403): Homolog of NCBI NO: 30688330 NR Description: alanine aminotransferase -related [Arabidopsis
  misc_feature (1)..(403): Homolog of NCBI NO: 16604499 NR Description: At1g23310/F26F24_4 [Arabidopsis thaliana]
  misc_feature (1)..(403): Homolog of NCBI NO: 13430566 NR Description: putative alanine aminotransferase [Arabidopsis
  misc_feature (1)..(403): Homolog of NCBI NO: 15223186 NR Description: putative alanine aminotransferase; protein id: supported by cDNA: 120310., supported by cDNA: gi_14334913, by cDNA: gi_17104534 [Arabidopsis thaliana]
  misc_feature (1)..(403): Homolog of NCBI NO: 21537112 NR Description: putative alanine aminotransferase [Arabidopsis
  misc_feature (1)..(403): Homolog of NCBI NO: 29569153 NR Description: alanine aminotransferase [Oryza sativa (indica
  misc_feature (1)..(403): Homolog of NCBI NO: 34899390 NR Description: putative alanine aminotransferase [Oryza sativa
  misc_feature (25)..(403): Homolog of NCBI NO: 14596229 NR Description: alanine aminotransferase-like protein
  misc_feature (1)..(394): Homolog of NCBI NO: 7434113 NR Description: alanine transaminase (EC 2.6.1.2) - Chlamydomonas
  misc_feature (1)..(394): Homolog of NCBI NO: 37533928 NR Description: putative alanine aminotransferase [Oryza sativa

SEQ ID NO: 86600 - protein, 338 aa, Arabidopsis thaliana; identical to SEQ ID NO: 28647
  peptide (1)..(338): Ceres Seq. ID no. 12691945
  misc_feature (1)..(322): Pfam Name: Aminotransferase class I and II Pfam Description: Aminotransferase class I and II
  misc_feature (1)..(338): Homolog of NCBI NO: 30688330 NR Description: alanine aminotransferase -related [Arabidopsis
  misc_feature (1)..(338): Homolog of NCBI NO: 16604499 NR Description: At1g23310/F26F24_4 [Arabidopsis thaliana]
  misc_feature (1)..(338): Homolog of NCBI NO: 13430566 NR Description: putative alanine aminotransferase [Arabidopsis
  misc_feature (1)..(338): Homolog of NCBI NO: 15223186 NR Description: putative alanine aminotransferase; protein id: supported by cDNA: 120310., supported by cDNA: gi_14334913, by cDNA: gi_17104534 [Arabidopsis thaliana]
  misc_feature (1)..(338): Homolog of NCBI NO: 21537112 NR Description: putative alanine aminotransferase [Arabidopsis
  misc_feature (1)..(338): Homolog of NCBI NO: 29569153 NR Description: alanine aminotransferase [Oryza sativa (indica
  misc_feature (1)..(338): Homolog of NCBI NO: 34899390 NR Description: putative alanine aminotransferase [Oryza sativa
  misc_feature (1)..(338): Homolog of NCBI NO: 14596229 NR Description: alanine aminotransferase-like protein
  misc_feature (1)..(329): Homolog of NCBI NO: 7434113 NR Description: alanine transaminase (EC 2.6.1.2) - Chlamydomonas
  misc_feature (1)..(329): Homolog of NCBI NO: 37533928 NR Description: putative alanine aminotransferase [Oryza sativa

SEQ ID NO: 86601 - DNA, 1275 bp, Arabidopsis thaliana
  misc_feature (1)..(1275): Ceres Seq. ID no. 12691965
  misc_feature: MA Experiment ID: 20000185 Result: Down-regulated in Transcription
  misc_feature: MA Experiment 20000185 PARAMETER Experiment Name: At_Roots__P Parameter: Age (day) Value: 7 vs. 21
  misc_feature: MA Experiment 20000185 PARAMETER Experiment Name: At_Roots__P Parameter: Organism Value: A. thaliana
  misc_feature: MA Experiment 20000185 PARAMETER Experiment Name: At_Roots__P Parameter: Tissue Value: Roots vs. Whole Plant
  misc_feature: MA Experiment ID: 20000439 Result: Down-regulated in Transcription
  misc_feature: MA Experiment 20000439 PARAMETER Experiment Name: At_Roots__P Parameter: Age (day) Value: 14 vs. 21
  misc_feature: MA Experiment 20000439 PARAMETER Experiment Name: At_Roots__P Parameter: Organism Value: A. thaliana
  misc_feature: MA Experiment 20000439 PARAMETER Experiment Name: At_Roots__P Parameter: Tissue Value: Roots vs. Whole Plant
atgccgagaccgtggactgggaaagcaccgttgaagaaatcgaagaagaagattccattgtttgattcttttaatccaccgccggcgggaaaatctggagttaagtatgtagaaatgcctgggccgttaccgtttgggaggtatccaaaggaaggaatgaatagagaagaggttttaggagagccattgaagagatgggagaaaggaatgttgattaagcctcatatgcatgataatcgtcaggttaatttgggtagagatggatttacacataatatgttggaattgatacattcgcattggaagagacgacgtgtttgtaaagttcgatgtaaaggagttcctactgtggatatgaataacgtgtgtcgtgttcttgaggaaaagacaggaggagagatcattcatagagttggaggtgtggtgtaccttttcaggggtaggaattacaattaccgtacacgtccgcagtacccattgatgttgtggaaaccagcagctcctgtttatccaaagcttattcaagaagttcctgaaggattgacgaaagaggaagctcatgagttcagggtgaagggaaagtctcttaggcctatatgcaagttgtctaaaaatggagtttacgtgtcgctagtcaaagatgtgagggatgcctttgaactgagttcattggtgaaagtcgactgcccagggcttgaaccaagtgattataagaaaattggcgctaagctcaaggagttagttccttgtgtgcttctgtctttcgatgatgagcaaatactcatgtggagaggacgagaatggaagtcgcggtttgtagacaatcctctaattccaagcctttctgagaccaacacaacgaacgaacttgatccctcagacaaacctagtgaagaacaaactgtggctaatccaagtacaacgatctcaagccccaaaatgatctcgctctggcaacgagcgttggaatcgtcgaaggctgtgattcttgaagagcttgacctcggtccagacgatctattgaagaaggtggaagagttagaaggcacttcactggctgcagaacacacttacacagctatggtcttgtcaaatactgatggtgcagcagaggattacgtggatgaaaaggaccggtccgaagagtattatagtgacatagacgatgactttgatgacgagtgttccgatgatgagtcgctagatccggttggtccagtgggatctttacccgttgacaagatagttaggaagttgagggaaagactaaaatag

SEQ ID NO: 86602 - protein, 424 aa, Arabidopsis thaliana
  peptide (1)..(424): Ceres Seq. ID no. 12691966
  misc_feature (63)..(146): Pfam Name: CRS1 / YhbY domain Pfam Description: CRS1 / YhbY domain
  misc_feature (1)..(424): Homolog of NCBI NO: 22329751 NR Description: unknown protein; protein id: At1g23400.1, by cDNA: gi_17065311 [Arabidopsis thaliana] F28C11.4 [Arabidopsis thaliana]
  misc_feature (1)..(423): Homolog of NCBI NO: 30349369 NR Description: CRS2-associated factor 2 [Zea mays]
  misc_feature (2)..(207): Homolog of NCBI NO: 34905354 NR Description: OJ1126_G08.1 [Oryza sativa (japonica
  misc_feature (204)..(270): Homolog of NCBI NO: 34905354 NR Description: OJ1126_G08.1 [Oryza sativa (japonica
  misc_feature (2)..(316): Homolog of NCBI NO: 30349367 NR Description: CRS2-associated factor 1 [Zea mays]
  misc_feature (1)..(305): Homolog of NCBI NO: 18399222 NR Description: expressed protein; protein id: At2g20020.1, by cDNA: gi_15028050 [Arabidopsis thaliana] unknown protein [Arabidopsis thaliana]
  misc_feature (1)..(398): Homolog of NCBI NO: 34894714 NR Description: P0426D06.23 [Oryza sativa (japonica
  misc_feature (55)..(300): Homolog of NCBI NO: 40253285 NR Description: putative CRS2-associated factor 1 [Oryza sativa
  misc_feature (55)..(269): Homolog of NCBI NO: 22329043 NR Description: hypothetical protein; protein id: At4g31010.1, by cDNA: gi_18176014, supported by cDNA: gi_20465408 [Arabidopsis >gi|18176015|gb|AAL59968.1| unknown protein [Arabidopsis
  misc_feature (55)..(266): Homolog of NCBI NO: 15240416 NR Description: putative protein; protein id: At5g54890.1 thaliana] >gi|9758269|dbj|BAB08768.1|
MPRPWTGKAPLKKSKKKIPLFDSFNPPPAGKSGVKYVEMPGPLPFGRYPKEGMNREEVLGEPLKRWEKGMLIKPHMHDNRQVNLGRDGFTHNMLELIHSHWKRRRVCKVRCKGVPTVDMNNVCRVLEEKTGGEIIHRVGGVVYLFRGRNYNYRTRPQYPLMLWKPAAPVYPKLIQEVPEGLTKEEAHEFRVKGKSLRPICKLSKNGVYVSLVKDVRDAFELSSLVKVDCPGLEPSDYKKIGAKLKELVPCVLLSFDDEQILMWRGREWKSRFVDNPLIPSLSETNTTNELDPSDKPSEEQTVANPSTTISSPKMISLWQRALESSKAVILEELDLGPDDLLKKVEELEGTSLAAEHTYTAMVLSNTDGAAEDYVDEKDRSEEYYSDIDDDFDDECSDDESLDPVGPVGSLPVDKIVRKLRERLK

SEQ ID NO: 86603 - protein, 386 aa, Arabidopsis thaliana
  peptide (1)..(386): Ceres Seq. ID no. 12691967
  misc_feature (25)..(108): Pfam Name: CRS1 / YhbY domain Pfam Description: CRS1 / YhbY domain
  misc_feature (1)..(386): Homolog of NCBI NO: 22329751 NR Description: unknown protein; protein id: At1g23400.1, by cDNA: gi_17065311 [Arabidopsis thaliana] F28C11.4 [Arabidopsis thaliana]
  misc_feature (1)..(385): Homolog of NCBI NO: 30349369 NR Description: CRS2-associated factor 2 [Zea mays]
  misc_feature (1)..(169): Homolog of NCBI NO: 34905354 NR Description: OJ1126_G08.1 [Oryza sativa (japonica
  misc_feature (166)..(232): Homolog of NCBI NO: 34905354 NR Description: OJ1126_G08.1 [Oryza sativa (japonica
  misc_feature (1)..(278): Homolog of NCBI NO: 30349367 NR Description: CRS2-associated factor 1 [Zea mays]
  misc_feature (1)..(267): Homolog of NCBI NO: 18399222 NR Description: expressed protein; protein id: At2g20020.1, by cDNA: gi_15028050 [Arabidopsis thaliana] unknown protein [Arabidopsis thaliana]
  misc_feature (1)..(360): Homolog of NCBI NO: 34894714 NR Description: P0426D06.23 [Oryza sativa (japonica
  misc_feature (17)..(262): Homolog of NCBI NO: 40253285 NR Description: putative CRS2-associated factor 1 [Oryza sativa
  misc_feature (17)..(231): Homolog of NCBI NO: 22329043 NR Description: hypothetical protein; protein id: At4g31010.1, by cDNA: gi_18176014, supported by cDNA: gi_20465408 [Arabidopsis >gi|18176015|gb|AAL59968.1| unknown protein [Arabidopsis
  misc_feature (17)..(228): Homolog of NCBI NO: 15240416 NR Description: putative protein; protein id: At5g54890.1 thaliana] >gi|9758269|dbj|BAB08768.1|
MPGPLPFGRYPKEGMNREEVLGEPLKRWEKGMLIKPHMHDNRQVNLGRDGFTHNMLELIHSHWKRRRVCKVRCKGVPTVDMNNVCRVLEEKTGGEIIHRVGGVVYLFRGRNYNYRTRPQYPLMLWKPAAPVYPKLIQEVPEGLTKEEAHEFRVKGKSLRPICKLSKNGVYVSLVKDVRDAFELSSLVKVDCPGLEPSDYKKIGAKLKELVPCVLLSFDDEQILMWRGREWKSRFVDNPLIPSLSETNTTNELDPSDKPSEEQTVANPSTTISSPKMISLWQRALESSKAVILEELDLGPDDLLKKVEELEGTSLAAEHTYTAMVLSNTDGAAEDYVDEKDRSEEYYSDIDDDFDDECSDDESLDPVGPVGSLPVDKIVRKLRERLK

SEQ ID NO: 86604 - protein, 372 aa, Arabidopsis thaliana
  peptide (1)..(372): Ceres Seq. ID no. 12691968
  misc_feature (11)..(94): Pfam Name: CRS1 / YhbY domain Pfam Description: CRS1 / YhbY domain
  misc_feature (1)..(372): Homolog of NCBI NO: 22329751 NR Description: unknown protein; protein id: At1g23400.1, by cDNA: gi_17065311 [Arabidopsis thaliana] F28C11.4 [Arabidopsis thaliana]
  misc_feature (1)..(371): Homolog of NCBI NO: 30349369 NR Description: CRS2-associated factor 2 [Zea mays]
  misc_feature (1)..(155): Homolog of NCBI NO: 34905354 NR Description: OJ1126_G08.1 [Oryza sativa (japonica
  misc_feature (152)..(218): Homolog of NCBI NO: 34905354 NR Description: OJ1126_G08.1 [Oryza sativa (japonica
  misc_feature (1)..(264): Homolog of NCBI NO: 30349367 NR Description: CRS2-associated factor 1 [Zea mays]
  misc_feature (1)..(253): Homolog of NCBI NO: 18399222 NR Description: expressed protein; protein id: At2g20020.1, by cDNA: gi_15028050 [Arabidopsis thaliana] unknown protein [Arabidopsis thaliana]
  misc_feature (1)..(346): Homolog of NCBI NO: 34894714 NR Description: P0426D06.23 [Oryza sativa (japonica
  misc_feature (3)..(248): Homolog of NCBI NO: 40253285 NR Description: putative CRS2-associated factor 1 [Oryza sativa
  misc_feature (3)..(217): Homolog of NCBI NO: 22329043 NR Description: hypothetical protein; protein id: At4g31010.1, by cDNA: gi_18176014, supported by cDNA: gi_20465408 [Arabidopsis >gi|18176015|gb|AAL59968.1| unknown protein [Arabidopsis
  misc_feature (3)..(214): Homolog of NCBI NO: 15240416 NR Description: putative protein; protein id: At5g54890.1 thaliana] >gi|9758269|dbj|BAB08768.1|
MNREEVLGEPLKRWEKGMLIKPHMHDNRQVNLGRDGFTHNMLELIHSHWKRRRVCKVRCKGVPTVDMNNVCRVLEEKTGGEIIHRVGGVVYLFRGRNYNYRTRPQYPLMLWKPAAPVYPKLIQEVPEGLTKEEAHEFRVKGKSLRPICKLSKNGVYVSLVKDVRDAFELSSLVKVDCPGLEPSDYKKIGAKLKELVPCVLLSFDDEQILMWRGREWKSRFVDNPLIPSLSETNTTNELDPSDKPSEEQTVANPSTTISSPKMISLWQRALESSKAVILEELDLGPDDLLKKVEELEGTSLAAEHTYTAMVLSNTDGAAEDYVDEKDRSEEYYSDIDDDFDDECSDDESLDPVGPVGSLPVDKIVRKLRERLK

SEQ ID NO: 86605 - DNA, 2742 bp, Arabidopsis thaliana
  misc_feature (1)..(2742): Ceres Seq. ID no. 12692025
  misc_feature: MA Experiment ID: 20000307 Result: Up-regulated in Transcription
  misc_feature: MA Experiment 20000307 PARAMETER Experiment Name: At_Germinating_Seeds_Sub_P Parameter: Age (hr) Value: 24 vs. 0
  misc_feature: MA Experiment 20000307 PARAMETER Experiment Name: At_Germinating_Seeds_Sub_P Parameter: Organism Value: A. thaliana
  misc_feature: MA Experiment 20000307 PARAMETER Experiment Name: At_Germinating_Seeds_Sub_P Parameter: Plant Line Value: WS
  misc_feature: MA Experiment 20000307 PARAMETER Experiment Name: At_Germinating_Seeds_Sub_P Parameter: Tissue Value: Germinating Seeds
  misc_feature: MA Experiment ID: 20000314 Result: Up-regulated in Transcription
  misc_feature: MA Experiment 20000314 PARAMETER Experiment Name: At_14day_Shoots-Roots_Sub_P Parameter: Age (day) Value: 14
  misc_feature: MA Experiment 20000314 PARAMETER Experiment Name: At_14day_Shoots-Roots_Sub_P Parameter: Organism Value: A. thaliana
  misc_feature: MA Experiment 20000314 PARAMETER Experiment Name: At_14day_Shoots-Roots_Sub_P Parameter: Plant Line Value: WS
  misc_feature: MA Experiment 20000314 PARAMETER Experiment Name: At_14day_Shoots-Roots_Sub_P Parameter: Tissue Value: Roots vs. Whole Plant
atggggcgttctgcccatcttgtttatgctcttggttttattatcatggccacaatggttgctgcgtcttatgagccctacacgtatagctcaccaccaccaccattgtatgactctcctacaccaaaggttgactataagtctccaccacctccatacgtttacagttctccaccacctccactatcgtattcgccatctcccaaggtagactacaagtctccaccacctccatatgtttacagctctccaccaccaccatattactcaccatcccctaaagtcgaatacaaatccccaccacctccatatgtttatagttctccaccaccaccatattactcaccctcacctaaagtagattacaagtctccaccaccaccgtatgtttacagctccccaccaccaccatactattcaccttctccaaagcccacatacaaatcaccaccacctccatatgtttacaattctccaccaccaccatactactcaccatcccctaaggtcgaatacaaatctccaccacctccatacgtctatagctctccacccccaccatactactcaccctcacctaaagtagattataagtctccaccaccaccgtatgtttacaactctccaccaccaccatactattcaccttctccaaaacccacatacaagtccccaccaccaccatatatttacagctctccaccaccaccatactattctccttctcctaaaccagtatacaaatctccaccaccaccatacgtctattcctctccaccaccaccatactattcaccttctcctaaaccagcatacaaatctccaccaccaccgtatgtttatagctctccacctcctccatactactcgccttctcctaaacccatatacaagtctccaccaccaccgtacgtctacaactctcctccaccaccatactactctccttctccaaaaccggcatacaaatctccaccaccaccatacgtatacagctttccacctcctccatactactcgccttctcctaaacccgtatacaagtctccaccaccaccatacgtctacaactctcctccaccaccatactactctccttctccaaaaccggcatacaaatctccaccaccaccatacgtatacagctctccaccaccaccatactactcgccttctcctaaaccaacatacaaatctccaccaccaccatatgtttatagctctccacctcctccatactactcgccttctcctaaacccgtatacaagtctccaccaccaccgtacatctacaactctccaccaccaccatactactccccttcacctaaaccatcatacaaatccccaccaccaccatatgtttacagctctccaccaccaccatattactcgccttctcctaagcttacatacaaatcctcaccaccaccctatgtttacagctctccaccaccaccatattactctccttctcctaaggttgtatacaaatctccaccaccaccatatgtttacagctctccaccaccaccatactactccccttcacctaaaccatcatacaaatccccaccaccaccgtacgtctataactctccacctcctccttactactctccttcacctaaggtcatatacaaatcgccaccacacccacatgtatgtgtttgtcccccacctccaccatgctactctcattctccaaagattgagtacaaatccccaccaacaccatatgtttaccactcaccacctcccccaccttattattcgccttcgcctaaacctgcatataaatcttcaccaccaccttacgtctacagctctccaccaccaccatattactcacctgctcctaagcccgtatacaaatctccaccaccaccatacgtgtacaactccccaccaccaccatattactcaccatcccctaaacctacatacaaatctccaccaccaccatatgtatacagctctccaccaccaccatattactcacctactcctaaacctacatacaaatctccaccacccccatatgtctacagttccccaccaccaccatattactcgccttctcctaagccaacatacaaatccccaccaccaccatacgtctacagttctccaccaccaccatattactcacctgctcctaagcccacatacaaatctccaccaccaccatacgtttacagctccccaccaccaccatactactcgccttcccctaagcctacatacaaatctccaccacctccatatgtatatagctctccacctccaccaccttattactctccttctccaaaggttgagtacaaatctccgccaccaccatatgtctacagttctcctcccccaccatattactctccttctccaaaggttgagtacaaatctcctcctccaccgtatgtttatagttctccacctccaccaccatattactctccttctccaaaggttgagtacaaatcccctccaccaccgtatgtctacagctccccaccaccacccacgtattattctccttctccaaaggttgaatacaaatctccaccacctccatatgtctacaactctccacctccaccggcgtattactctccatctccaaagattgagtacaaatctccacctccaccatatgtctacagttctccaccaccaccatcatattctccttctccaaaagctgaatacaaatctcctcctcccccatccttatattactaa

SEQ ID NO: 86606 - protein, 913 aa, Arabidopsis thaliana
  peptide (1)..(913): Ceres Seq. ID no. 12692026
  misc_feature (100)..(412): Pfam Name: Formin Homology 2 Domain Pfam Description: Formin Homology 2 Domain
  misc_feature (53)..(641): Homolog of NCBI NO: 15239790 NR Description: putative protein; protein id: At5g49080.1 thaliana] >gi|10176941|dbj|BAB10090.1|
  misc_feature (104)..(691): Homolog of NCBI NO: 15239790 NR Description: putative protein; protein id: At5g49080.1 thaliana] >gi|10176941|dbj|BAB10090.1|
  misc_feature (79)..(666): Homolog of NCBI NO: 15239790 NR Description: putative protein; protein id: At5g49080.1 thaliana] >gi|10176941|dbj|BAB10090.1|
  misc_feature (25)..(585): Homolog of NCBI NO: 15239790 NR Description: putative protein; protein id: At5g49080.1 thaliana] >gi|10176941|dbj|BAB10090.1|
  misc_feature (129)..(716): Homolog of NCBI NO: 15239790 NR Description: putative protein; protein id: At5g49080.1 thaliana] >gi|10176941|dbj|BAB10090.1|
  misc_feature (322)..(912): Homolog of NCBI NO: 15239790 NR Description: putative protein; protein id: At5g49080.1 thaliana] >gi|10176941|dbj|BAB10090.1|
  misc_feature (279)..(864): Homolog of NCBI NO: 15239790 NR Description: putative protein; protein id: At5g49080.1 thaliana] >gi|10176941|dbj|BAB10090.1|
  misc_feature (304)..(890): Homolog of NCBI NO: 15239790 NR Description: putative protein; protein id: At5g49080.1 thaliana] >gi|10176941|dbj|BAB10090.1|
  misc_feature (154)..(741): Homolog of NCBI NO: 15239790 NR Description: putative protein; protein id: At5g49080.1 thaliana] >gi|10176941|dbj|BAB10090.1|
  misc_feature (254)..(838): Homolog of NCBI NO: 15239790 NR Description: putative protein; protein id: At5g49080.1 thaliana] >gi|10176941|dbj|BAB10090.1|
MGRSAHLVYALGFIIMATMVAASYEPYTYSSPPPPLYDSPTPKVDYKSPPPPYVYSSPPPPLSYSPSPKVDYKSPPPPYVYSSPPPPYYSPSPKVEYKSPPPPYVYSSPPPPYYSPSPKVDYKSPPPPYVYSSPPPPYYSPSPKPTYKSPPPPYVYNSPPPPYYSPSPKVEYKSPPPPYVYSSPPPPYYSPSPKVDYKSPPPPYVYNSPPPPYYSPSPKPTYKSPPPPYIYSSPPPPYYSPSPKPVYKSPPPPYVYSSPPPPYYSPSPKPAYKSPPPPYVYSSPPPPYYSPSPKPIYKSPPPPYVYNSPPPPYYSPSPKPAYKSPPPPYVYSFPPPPYYSPSPKPVYKSPPPPYVYNSPPPPYYSPSPKPAYKSPPPPYVYSSPPPPYYSPSPKPTYKSPPPPYVYSSPPPPYYSPSPKPVYKSPPPPYIYNSPPPPYYSPSPKPSYKSPPPPYVYSSPPPPYYSPSPKLTYKSSPPPYVYSSPPPPYYSPSPKVVYKSPPPPYVYSSPPPPYYSPSPKPSYKSPPPPYVYNSPPPPYYSPSPKVIYKSPPHPHVCVCPPPPPCYSHSPKIEYKSPPTPYVYHSPPPPPYYSPSPKPAYKSSPPPYVYSSPPPPYYSPAPKPVYKSPPPPYVYNSPPPPYYSPSPKPTYKSPPPPYVYSSPPPPYYSPTPKPTYKSPPPPYVYSSPPPPYYSPSPKPTYKSPPPPYVYSSPPPPYYSPAPKPTYKSPPPPYVYSSPPPPYYSPSPKPTYKSPPPPYVYSSPPPPPYYSPSPKVEYKSPPPPYVYSSPPPPYYSPSPKVEYKSPPPPYVYSSPPPPPYYSPSPKVEYKSPPPPYVYSSPPPPTYYSPSPKVEYKSPPPPYVYNSPPPPAYYSPSPKIEYKSPPPPYVYSSPPPPSYSPSPKAEYKSPPPPSLYY

SEQ ID NO: 86607 - protein, 898 aa, Arabidopsis thaliana
  peptide (1)..(898): Ceres Seq. ID no. 12692027
  misc_feature (85)..(397): Pfam Name: Formin Homology 2 Domain Pfam Description: Formin Homology 2 Domain
  misc_feature (38)..(626): Homolog of NCBI NO: 15239790 NR Description: putative protein; protein id: At5g49080.1 thaliana] >gi|10176941|dbj|BAB10090.1|
  misc_feature (89)..(676): Homolog of NCBI NO: 15239790 NR Description: putative protein; protein id: At5g49080.1 thaliana] >gi|10176941|dbj|BAB10090.1|
  misc_feature (64)..(651): Homolog of NCBI NO: 15239790 NR Description: putative protein; protein id: At5g49080.1 thaliana] >gi|10176941|dbj|BAB10090.1|
  misc_feature (10)..(570): Homolog of NCBI NO: 15239790 NR Description: putative protein; protein id: At5g49080.1 thaliana] >gi|10176941|dbj|BAB10090.1|
  misc_feature (114)..(701): Homolog of NCBI NO: 15239790 NR Description: putative protein; protein id: At5g49080.1 thaliana] >gi|10176941|dbj|BAB10090.1|
  misc_feature (307)..(897): Homolog of NCBI NO: 15239790 NR Description: putative protein; protein id: At5g49080.1 thaliana] >gi|10176941|dbj|BAB10090.1|
  misc_feature (264)..(849): Homolog of NCBI NO: 15239790 NR Description: putative protein; protein id: At5g49080.1 thaliana] >gi|10176941|dbj|BAB10090.1|
  misc_feature (289)..(875): Homolog of NCBI NO: 15239790 NR Description: putative protein; protein id: At5g49080.1 thaliana] >gi|10176941|dbj|BAB10090.1|
  misc_feature (139)..(726): Homolog of NCBI NO: 15239790 NR Description: putative protein; protein id: At5g49080.1 thaliana] >gi|10176941|dbj|BAB10090.1|
  misc_feature (239)..(823): Homolog of NCBI NO: 15239790 NR Description: putative protein; protein id: At5g49080.1 thaliana] >gi|10176941|dbj|BAB10090.1|
MATMVAASYEPYTYSSPPPPLYDSPTPKVDYKSPPPPYVYSSPPPPLSYSPSPKVDYKSPPPPYVYSSPPPPYYSPSPKVEYKSPPPPYVYSSPPPPYYSPSPKVDYKSPPPPYVYSSPPPPYYSPSPKPTYKSPPPPYVYNSPPPPYYSPSPKVEYKSPPPPYVYSSPPPPYYSPSPKVDYKSPPPPYVYNSPPPPYYSPSPKPTYKSPPPPYIYSSPPPPYYSPSPKPVYKSPPPPYVYSSPPPPYYSPSPKPAYKSPPPPYVYSSPPPPYYSPSPKPIYKSPPPPYVYNSPPPPYYSPSPKPAYKSPPPPYVYSFPPPPYYSPSPKPVYKSPPPPYVYNSPPPPYYSPSPKPAYKSPPPPYVYSSPPPPYYSPSPKPTYKSPPPPYVYSSPPPPYYSPSPKPVYKSPPPPYIYNSPPPPYYSPSPKPSYKSPPPPYVYSSPPPPYYSPSPKLTYKSSPPPYVYSSPPPPYYSPSPKVVYKSPPPPYVYSSPPPPYYSPSPKPSYKSPPPPYVYNSPPPPYYSPSPKVIYKSPPHPHVCVCPPPPPCYSHSPKIEYKSPPTPYVYHSPPPPPYYSPSPKPAYKSSPPPYVYSSPPPPYYSPAPKPVYKSPPPPYVYNSPPPPYYSPSPKPTYKSPPPPYVYSSPPPPYYSPTPKPTYKSPPPPYVYSSPPPPYYSPSPKPTYKSPPPPYVYSSPPPPYYSPAPKPTYKSPPPPYVYSSPPPPYYSPSPKPTYKSPPPPYVYSSPPPPPYYSPSPKVEYKSPPPPYVYSSPPPPYYSPSPKVEYKSPPPPYVYSSPPPPPYYSPSPKVEYKSPPPPYVYSSPPPPTYYSPSPKVEYKSPPPPYVYNSPPPPAYYSPSPKIEYKSPPPPYVYSSPPPPSYSPSPKAEYKSPPPPSLYY

SEQ ID NO: 86608 - protein, 895 aa, Arabidopsis thaliana; identical to SEQ ID NO: 72150
  peptide (1)..(895): Ceres Seq. ID no. 12692028
  misc_feature (82)..(394): Pfam Name: Formin Homology 2 Domain Pfam Description: Formin Homology 2 Domain
  misc_feature (35)..(623): Homolog of NCBI NO: 15239790 NR Description: putative protein; protein id: At5g49080.1 thaliana] >gi|10176941|dbj|BAB10090.1|
  misc_feature (86)..(673): Homolog of NCBI NO: 15239790 NR Description: putative protein; protein id: At5g49080.1 thaliana] >gi|10176941|dbj|BAB10090.1|
  misc_feature (61)..(648): Homolog of NCBI NO: 15239790 NR Description: putative protein; protein id: At5g49080.1 thaliana] >gi|10176941|dbj|BAB10090.1|
  misc_feature (7)..(567): Homolog of NCBI NO: 15239790 NR Description: putative protein; protein id: At5g49080.1 thaliana] >gi|10176941|dbj|BAB10090.1|
  misc_feature (111)..(698): Homolog of NCBI NO: 15239790 NR Description: putative protein; protein id: At5g49080.1 thaliana] >gi|10176941|dbj|BAB10090.1|
  misc_feature (304)..(894): Homolog of NCBI NO: 15239790 NR Description: putative protein; protein id: At5g49080.1 thaliana] >gi|10176941|dbj|BAB10090.1|
  misc_feature (261)..(846): Homolog of NCBI NO: 15239790 NR Description: putative protein; protein id: At5g49080.1 thaliana] >gi|10176941|dbj|BAB10090.1|
  misc_feature (286)..(872): Homolog of NCBI NO: 15239790 NR Description: putative protein; protein id: At5g49080.1 thaliana] >gi|10176941|dbj|BAB10090.1|
  misc_feature (136)..(723): Homolog of NCBI NO: 15239790 NR Description: putative protein; protein id: At5g49080.1 thaliana] >gi|10176941|dbj|BAB10090.1|
  misc_feature (236)..(820): Homolog of NCBI NO: 15239790 NR Description: putative protein; protein id: At5g49080.1 thaliana] >gi|10176941|dbj|BAB10090.1|

SEQ ID NO: 86609 - protein, 710 aa, Arabidopsis thaliana; identical to SEQ ID NO: 72151
  peptide (1)..(710): Ceres Seq. ID no. 12692029
  misc_feature (1)..(62): Pfam Name: Plasmodium histidine-rich protein (HRPII/III) Pfam Description: Plasmodium histidine-rich protein (HRPII/III)
  misc_feature (268)..(338): Homolog of NCBI NO: 30699212 NR Description: extensin family protein [Arabidopsis thaliana]
  misc_feature (228)..(291): Homolog of NCBI NO: 30699212 NR Description: extensin family protein [Arabidopsis thaliana]
  misc_feature (176)..(229): Homolog of NCBI NO: 30699212 NR Description: extensin family protein [Arabidopsis thaliana]
  misc_feature (233)..(330): Homolog of NCBI NO: 30699212 NR Description: extensin family protein [Arabidopsis thaliana]
  misc_feature (93)..(158): Homolog of NCBI NO: 30699212 NR Description: extensin family protein [Arabidopsis thaliana]
  misc_feature (218)..(271): Homolog of NCBI NO: 30699212 NR Description: extensin family protein [Arabidopsis thaliana]
  misc_feature (405)..(435): Homolog of NCBI NO: 30699212 NR Description: extensin family protein [Arabidopsis thaliana]
  misc_feature (494)..(544): Homolog of NCBI NO: 30699212 NR Description: extensin family protein [Arabidopsis thaliana]
  misc_feature (55)..(114): Homolog of NCBI NO: 30699212 NR Description: extensin family protein [Arabidopsis thaliana]
  misc_feature (193)..(239): Homolog of NCBI NO: 30699212 NR Description: extensin family protein [Arabidopsis thaliana]

SEQ ID NO: 86610 - DNA, 1593 bp, Arabidopsis thaliana
  misc_feature (1)..(1593): Ceres Seq. ID no. 12692033
  misc_feature: MA Experiment ID: 20000182 Result: Up-regulated in Transcription
  misc_feature: MA Experiment 20000182 PARAMETER Experiment Name: At_2mM_SA_P Parameter: Age (day) Value: 14
  misc_feature: MA Experiment 20000182 PARAMETER Experiment Name: At_2mM_SA_P Parameter: Organism Value: A. thaliana
  misc_feature: MA Experiment 20000182 PARAMETER Experiment Name: At_2mM_SA_P Parameter: Plant Line Value: WS
  misc_feature: MA Experiment 20000182 PARAMETER Experiment Name: At_2mM_SA_P Parameter: Timepoint (hr) Value: 6
  misc_feature: MA Experiment 20000182 PARAMETER Experiment Name: At_2mM_SA_P Parameter: Tissue Value: Aerial
  misc_feature: MA Experiment 20000182 PARAMETER Experiment Name: At_2mM_SA_P Parameter: Treatment Value: 2mM SA vs. No Treatment
  misc_feature: MA Experiment ID: 20000527 Result: Down-regulated in Transcription
  misc_feature: MA Experiment 20000527 PARAMETER Experiment Name: At_10percent_PEG_P Parameter: Age (day) Value: 20
  misc_feature: MA Experiment 20000527 PARAMETER Experiment Name: At_10percent_PEG_P Parameter: Organism Value: A. thaliana
  misc_feature: MA Experiment 20000527 PARAMETER Experiment Name: At_10percent_PEG_P Parameter: Plant Line Value: WS
  misc_feature: MA Experiment 20000527 PARAMETER Experiment Name: At_10percent_PEG_P Parameter: Timepoint (day) Value: 20
  misc_feature: MA Experiment 20000527 PARAMETER Experiment Name: At_10percent_PEG_P Parameter: Tissue Value: Whole Plant
  misc_feature: MA Experiment 20000527 PARAMETER Experiment Name: At_10percent_PEG_P Parameter: Treatment Value: 10percent PEG vs. No Treatment
atggcttctaactatgataagcttacttcttcgagagtagccatcatcggtgctggtgttagcggattagcagccgctaagaacttagttcatcacaacccgaccgtattcgaagcctcggattcagtcggaggtgtttggaggagctgcacttacgagacgactaaattacaatcggctcgagtcgattacgagttctccgactttccatggcccaataatagagatgacacaactttcccaccttaccttgagatattagattacttggaatcttatgccaaacattttgatcttctcaaattcatgaagtttggctctaaggtcatcgaagtaaggttcatcggtgatggcgaaactcctcagatggttgaccttggtgcttacggcaacttgttgcccggaaaacctgtatgggaagttgctgttcagatcggagattctggagatattcagtggcatgcatttgagttcgtggttgtgtgtaccgggaaatacggcgacgttccaagaataccagcttttccggcaaagaaagggccggagatgtttcaaggaaaagtaatgcattcgatggattactgcaagttagagaaagaagaagcttctactctcctcagtggcaaaaaagtagccgtcatcggcttcaagaaatccgccattgatttggctttagagtctgctttagctaatcaaggggaaggaggaaaagcttgcacaatggtggtgagaacaactcattgggggatcccacattattgggtgtggggcttaccattcttcttgttctactcttcgagagcttctcagttcctccatgataggcctaaccaaagcttccttagaactctcttttgcctcctcttctctcttctgcgtgccgtagtttccaagttcatcgaatcatatgttttatggaagctacctcttgagaaatatggtctaaaaccaaaccattctttcgaggaagactatgcttcttgtcaaatggcgatcataccggagaatttctttgaggaagcggataaagggatgatccggtttaagaaatcatcaaaatggtggttttatgaagaagggattgtgtttgaagatgggacgacattagaagctgatgttgtgatacttgctactggttatgatggcaagaagaagctcaaagctattgttcctgaacctttccgaacttggcttgagtttccaagcggtgtcatgcctttatacaggggaacaatccatccattgataccaaacatgggtttcgtaggatacgtccaaagcagctcgaacttacacacatcagagctacgttcaatgtggctaagccggctagtggatgagaaattcagattaccaagcaaagagaagatgttggatcaattcttaaaagaaatggaagtgacgagaaactcaagcagattctacaaacgtcattgcatttccacgttcagcatccaacatgctgatgatatgtgcaacgacatgggactcaatccttggcgtaaatccaacttcctccttgaagcttttagtccttatggttctcaagattaccgactcggtcaagaagaaaaagaagatatgactgcttaa

SEQ ID NO: 86611 - protein, 530 aa, Arabidopsis thaliana
  peptide (1)..(530): Ceres Seq. ID no. 12692034
  misc_feature (15)..(114): Pfam Name: Pyridine nucleotide-disulphide oxidoreductase Pfam Description: Pyridine nucleotide-disulphide oxidoreductase
  misc_feature (1)..(530): Homolog of NCBI NO: 25513456 NR Description: T29M8.12 protein - Arabidopsis thaliana
  misc_feature (156)..(530): Homolog of NCBI NO: 15221981 NR Description: unknown protein; protein id: At1g19250.1
  misc_feature (1)..(151): Homolog of NCBI NO: 15221981 NR Description: unknown protein; protein id: At1g19250.1
  misc_feature (9)..(254): Homolog of NCBI NO: 15242332 NR Description: dimethylaniline monooxygenase
  misc_feature (265)..(499): Homolog of NCBI NO: 15242332 NR Description: dimethylaniline monooxygenase
  misc_feature (12)..(519): Homolog of NCBI NO: 24960753 NR Description: Hypothetical protein [Oryza sativa (japonica
  misc_feature (8)..(518): Homolog of NCBI NO: 38344126 NR Description: OSJNBb0072N21.5 [Oryza sativa (japonica
  misc_feature (8)..(518): Homolog of NCBI NO: 38344124 NR Description: OSJNBb0072N21.3 [Oryza sativa (japonica
  misc_feature (139)..(512): Homolog of NCBI NO: 23012092 NR Description: hypothetical protein [Magnetospirillum
  misc_feature (135)..(518): Homolog of NCBI NO: 27381830 NR Description: blr6719 [Bradyrhizobium japonicum]
MASNYDKLTSSRVAIIGAGVSGLAAAKNLVHHNPTVFEASDSVGGVWRSCTYETTKLQSARVDYEFSDFPWPNNRDDTTFPPYLEILDYLESYAKHFDLLKFMKFGSKVIEVRFIGDGETPQMVDLGAYGNLLPGKPVWEVAVQIGDSGDIQWHAFEFVVVCTGKYGDVPRIPAFPAKKGPEMFQGKVMHSMDYCKLEKEEASTLLSGKKVAVIGFKKSAIDLALESALANQGEGGKACTMVVRTTHWGIPHYWVWGLPFFLFYSSRASQFLHDRPNQSFLRTLFCLLFSLLRAVVSKFIESYVLWKLPLEKYGLKPNHSFEEDYASCQMAIIPENFFEEADKGMIRFKKSSKWWFYEEGIVFEDGTTLEADVVILATGYDGKKKLKAIVPEPFRTWLEFPSGVMPLYRGTIHPLIPNMGFVGYVQSSSNLHTSELRSMWLSRLVDEKFRLPSKEKMLDQFLKEMEVTRNSSRFYKRHCISTFSIQHADDMCNDMGLNPWRKSNFLLEAFSPYGSQDYRLGQEEKEDMTA

SEQ ID NO: 86612 - protein, 428 aa, Arabidopsis thaliana
  peptide (1)..(428): Ceres Seq. ID no. 12692035
  misc_feature (170)..(278): Pfam Name: Pyridine nucleotide-disulphide oxidoreductase Pfam Description: Pyridine nucleotide-disulphide oxidoreductase
  misc_feature (1)..(428): Homolog of NCBI NO: 25513456 NR Description: T29M8.12 protein - Arabidopsis thaliana
  misc_feature (54)..(428): Homolog of NCBI NO: 15221981 NR Description: unknown protein; protein id: At1g19250.1
  misc_feature (1)..(49): Homolog of NCBI NO: 15221981 NR Description: unknown protein; protein id: At1g19250.1
  misc_feature (1)..(152): Homolog of NCBI NO: 15242332 NR Description: dimethylaniline monooxygenase
  misc_feature (163)..(397): Homolog of NCBI NO: 15242332 NR Description: dimethylaniline monooxygenase
  misc_feature (1)..(417): Homolog of NCBI NO: 24960753 NR Description: Hypothetical protein [Oryza sativa (japonica
  misc_feature (1)..(416): Homolog of NCBI NO: 38344126 NR Description: OSJNBb0072N21.5 [Oryza sativa (japonica
  misc_feature (1)..(416): Homolog of NCBI NO: 38344124 NR Description: OSJNBb0072N21.3 [Oryza sativa (japonica
  misc_feature (37)..(410): Homolog of NCBI NO: 23012092 NR Description: hypothetical protein [Magnetospirillum
  misc_feature (33)..(416): Homolog of NCBI NO: 27381830 NR Description: blr6719 [Bradyrhizobium japonicum]
MKFGSKVIEVRFIGDGETPQMVDLGAYGNLLPGKPVWEVAVQIGDSGDIQWHAFEFVVVCTGKYGDVPRIPAFPAKKGPEMFQGKVMHSMDYCKLEKEEASTLLSGKKVAVIGFKKSAIDLALESALANQGEGGKACTMVVRTTHWGIPHYWVWGLPFFLFYSSRASQFLHDRPNQSFLRTLFCLLFSLLRAVVSKFIESYVLWKLPLEKYGLKPNHSFEEDYASCQMAIIPENFFEEADKGMIRFKKSSKWWFYEEGIVFEDGTTLEADVVILATGYDGKKKLKAIVPEPFRTWLEFPSGVMPLYRGTIHPLIPNMGFVGYVQSSSNLHTSELRSMWLSRLVDEKFRLPSKEKMLDQFLKEMEVTRNSSRFYKRHCISTFSIQHADDMCNDMGLNPWRKSNFLLEAFSPYGSQDYRLGQEEKEDMTA

SEQ ID NO: 86613 - protein, 408 aa, Arabidopsis thaliana
  peptide (1)..(408): Ceres Seq. ID no. 12692036
  misc_feature (150)..(258): Pfam Name: Pyridine nucleotide-disulphide oxidoreductase Pfam Description: Pyridine nucleotide-disulphide oxidoreductase
  misc_feature (1)..(408): Homolog of NCBI NO: 25513456 NR Description: T29M8.12 protein - Arabidopsis thaliana
  misc_feature (34)..(408): Homolog of NCBI NO: 15221981 NR Description: unknown protein; protein id: At1g19250.1
  misc_feature (1)..(29): Homolog of NCBI NO: 15221981 NR Description: unknown protein; protein id: At1g19250.1
  misc_feature (1)..(132): Homolog of NCBI NO: 15242332 NR Description: dimethylaniline monooxygenase
  misc_feature (143)..(377): Homolog of NCBI NO: 15242332 NR Description: dimethylaniline monooxygenase
  misc_feature (1)..(397): Homolog of NCBI NO: 24960753 NR Description: Hypothetical protein [Oryza sativa (japonica
  misc_feature (1)..(396): Homolog of NCBI NO: 38344126 NR Description: OSJNBb0072N21.5 [Oryza sativa (japonica
  misc_feature (1)..(396): Homolog of NCBI NO: 38344124 NR Description: OSJNBb0072N21.3 [Oryza sativa (japonica
  misc_feature (17)..(390): Homolog of NCBI NO: 23012092 NR Description: hypothetical protein [Magnetospirillum
  misc_feature (13)..(396): Homolog of NCBI NO: 27381830 NR Description: blr6719 [Bradyrhizobium japonicum]
MVDLGAYGNLLPGKPVWEVAVQIGDSGDIQWHAFEFVVVCTGKYGDVPRIPAFPAKKGPEMFQGKVMHSMDYCKLEKEEASTLLSGKKVAVIGFKKSAIDLALESALANQGEGGKACTMVVRTTHWGIPHYWVWGLPFFLFYSSRASQFLHDRPNQSFLRTLFCLLFSLLRAVVSKFIESYVLWKLPLEKYGLKPNHSFEEDYASCQMAIIPENFFEEADKGMIRFKKSSKWWFYEEGIVFEDGTTLEADVVILATGYDGKKKLKAIVPEPFRTWLEFPSGVMPLYRGTIHPLIPNMGFVGYVQSSSNLHTSELRSMWLSRLVDEKFRLPSKEKMLDQFLKEMEVTRNSSRFYKRHCISTFSIQHADDMCNDMGLNPWRKSNFLLEAFSPYGSQDYRLGQEEKEDMTA

SEQ ID NO: 86614 - DNA, 2247 bp, Arabidopsis thaliana
  misc_feature (1)..(2247): Ceres Seq. ID no. 12692041
  misc_feature: MA Experiment ID: 20001451 Result: Down-regulated in Transcription
  misc_feature: MA Experiment 20001451 PARAMETER Experiment Name: At_Far-red-induction_P Parameter: Age (day) Value: 7
  misc_feature: MA Experiment 20001451 PARAMETER Experiment Name: At_Far-red-induction_P Parameter: Light Value: Far-red vs. White
  misc_feature: MA Experiment 20001451 PARAMETER Experiment Name: At_Far-red-induction_P Parameter: Organism Value: A. thaliana
  misc_feature: MA Experiment 20001451 PARAMETER Experiment Name: At_Far-red-induction_P Parameter: Plant Line Value: Columbia
  misc_feature: MA Experiment 20001451 PARAMETER Experiment Name: At_Far-red-induction_P Parameter: Timepoint (hr) Value: 24
  misc_feature: MA Experiment 20001451 PARAMETER Experiment Name: At_Far-red-induction_P Parameter: Tissue Value: Whole Plant
atgatactgaaagtttatgcagagaagggtttggttaagaatgctttacatgtgtttgacaacatgggaaactatggaagaattcctagtttgttgtcttgtaatagcttgttgagcaatttggtcaggaaaggggaaaactttgtggctttacatgtttatgatcagatgattagctttgaggtttctccggatgtgtttacttgcagtattgttgttaatgcttattgtagaagtgggaatgtggataaagccatggtatttgcgaaagaaacggagagttcattgggtttggagctgaatgtggtaacttacaatagtttgatcaatgggtatgctatgatcggagatgttgagggaatgacaagagtgttgcggttgatgtctgagagaggggtttctaggaacgttgttacgtatacttcgttgattaagggttactgcaaaaagggtttgatggaagaagcggaacatgtgtttgaattgctaaaggaaaagaaacttgttgcggatcagcatatgtacggtgtgttgatggatggatattgtcgtactggtcaaatccgtgatgctgttagggttcatgataatatgattgagataggcgtaagaacaaatactaccatttgtaactccttgatcaatgggtactgcaaatctggtcaattagttgaagcggaacaaatattttctcggatgaacgattggagcttgaaaccagatcatcacacgtacaatacccttgtggatgggtattgcagggctggttatgttgacgaggctttaaagctttgtgatcaaatgtgccaaaaagaagttgtaccaacagttatgacttacaatattctgcttaaaggttatagtaggattggtgcttttcatgatgttttgagcctttggaagatgatgcttaaaagaggcgtaaacgccgatgagattagttgtagcaccctactcgaagcattgttcaagcttggcgattttaatgaagctatgaagctgtgggagaatgtcttagcaagaggtctattgactgatacgataacattaaatgtaatgatcagtggatgtaagccagctgtgcaaacatatcaagcgttgagccatgggtattataaagtcggaaatttgaaagaagcctttgcggttaaagagtatatggaaaggaaaggaatcttccccaccatagagatgtataacactctgatatctggtgctttcaaatatagacacttgaataaagtagcggatcttgtgatcgagctacgcgcaagaggattaactcctactgttgctacatatggtgctctcatcaccggctggtgcaatattggaatgatagataaagcctacgctacatgtttcgaaatgatagagaaagggattaccttaaatgtgaatatttgcagcaagattgcaaatagtttgtttcgtcttgataagattgatgaggcttgtttgctattgcagaagattgtggattttgatctgcttcttcccggttaccagagcttgaaagagtttcttgaggccagtgctacgacgtgtcttaaaacacaaaaaatcgctgagtctgtcgagaatagcacccctaagaagctcttagttcccaataacattgtttacaatgttgctatcgcaggtctctgtaaagctgggaaactcgaggatgctcgaaaactcttctcggatttactatcaagtgataggtttattccagacgaatacacatacacgatcctaattcacggatgtgctattgctggtgatataaacaaagcctttaccctgagggatgagatggctctaaaaggtattatcccgaacattgttacatacaacgctttgataaaaggcttgtgcaagttgggtaatgtagatcgtgctcagaggcttttacataagcttccacagaagggcataactcctaatgctattacctataacacattaattgatggactagttaaaagtggtaatgttgctgaagctatgcgtttaaaagaaaaaatgattgagaaaggcttggttagagggtccgataaacagggggatgttgacataccaaaggaggtggttttggatccggaagttaaattggggagcacaggagtgatcgaaatgaactcaaatgagctttatgatgttaggagagtttctgaagcagtagtttatatagtaaaggccaaacgatcgatattagtcactggtctttttgataagctgatcaaccgatcaaaccagtaa

SEQ ID NO: 86615 - protein, 748 aa, Arabidopsis thaliana
  peptide (1)..(748): Ceres Seq. ID no. 12692042
  misc_feature (243)..(277): Pfam Name: PPR repeat Pfam Description: PPR repeat
  misc_feature (2)..(724): Homolog of NCBI NO: 15220984 NR Description: hypothetical protein; protein id: At1g19290.1
  misc_feature (29)..(724): Homolog of NCBI NO: 8778411 NR Description: F18O14.1 [Arabidopsis thaliana]
  misc_feature (1)..(676): Homolog of NCBI NO: 15220984 NR Description: hypothetical protein; protein id: At1g19290.1
  misc_feature (57)..(676): Homolog of NCBI NO: 8778411 NR Description: F18O14.1 [Arabidopsis thaliana]
  misc_feature (2)..(664): Homolog of NCBI NO: 33146978 NR Description: putative pentatricopeptide (PPR)
  misc_feature (2)..(678): Homolog of NCBI NO: 15231338 NR Description: hypothetical protein; protein id: At3g06920.1 thaliana] >gi|6728999|gb|AAF26996.1|AC016827_7 hypothetical
  misc_feature (12)..(676): Homolog of NCBI NO: 6630464 NR Description: F23N19.4 [Arabidopsis thaliana]
  misc_feature (2)..(629): Homolog of NCBI NO: 34900768 NR Description: hypothetical protein~similar to Arabidopsis
  misc_feature (33)..(676): Homolog of NCBI NO: 34895906 NR Description: P0030H07.18 [Oryza sativa (japonica
  misc_feature (13)..(672): Homolog of NCBI NO: 8777358 NR Description: salt-inducible protein-like [Arabidopsis thaliana]
MILKVYAEKGLVKNALHVFDNMGNYGRIPSLLSCNSLLSNLVRKGENFVALHVYDQMISFEVSPDVFTCSIVVNAYCRSGNVDKAMVFAKETESSLGLELNVVTYNSLINGYAMIGDVEGMTRVLRLMSERGVSRNVVTYTSLIKGYCKKGLMEEAEHVFELLKEKKLVADQHMYGVLMDGYCRTGQIRDAVRVHDNMIEIGVRTNTTICNSLINGYCKSGQLVEAEQIFSRMNDWSLKPDHHTYNTLVDGYCRAGYVDEALKLCDQMCQKEVVPTVMTYNILLKGYSRIGAFHDVLSLWKMMLKRGVNADEISCSTLLEALFKLGDFNEAMKLWENVLARGLLTDTITLNVMISGCKPAVQTYQALSHGYYKVGNLKEAFAVKEYMERKGIFPTIEMYNTLISGAFKYRHLNKVADLVIELRARGLTPTVATYGALITGWCNIGMIDKAYATCFEMIEKGITLNVNICSKIANSLFRLDKIDEACLLLQKIVDFDLLLPGYQSLKEFLEASATTCLKTQKIAESVENSTPKKLLVPNNIVYNVAIAGLCKAGKLEDARKLFSDLLSSDRFIPDEYTYTILIHGCAIAGDINKAFTLRDEMALKGIIPNIVTYNALIKGLCKLGNVDRAQRLLHKLPQKGITPNAITYNTLIDGLVKSGNVAEAMRLKEKMIEKGLVRGSDKQGDVDIPKEVVLDPEVKLGSTGVIEMNSNELYDVRRVSEAVVYIVKAKRSILVTGLFDKLINRSNQ

SEQ ID NO: 86616 - protein, 727 aa, Arabidopsis thaliana
  peptide (1)..(727): Ceres Seq. ID no. 12692043
  misc_feature (222)..(256): Pfam Name: PPR repeat Pfam Description: PPR repeat
  misc_feature (1)..(703): Homolog of NCBI NO: 15220984 NR Description: hypothetical protein; protein id: At1g19290.1
  misc_feature (8)..(703): Homolog of NCBI NO: 8778411 NR Description: F18O14.1 [Arabidopsis thaliana]
  misc_feature (1)..(655): Homolog of NCBI NO: 15220984 NR Description: hypothetical protein; protein id: At1g19290.1
  misc_feature (36)..(655): Homolog of NCBI NO: 8778411 NR Description: F18O14.1 [Arabidopsis thaliana]
  misc_feature (1)..(643): Homolog of NCBI NO: 33146978 NR Description: putative pentatricopeptide (PPR)
  misc_feature (1)..(657): Homolog of NCBI NO: 15231338 NR Description: hypothetical protein; protein id: At3g06920.1 thaliana] >gi|6728999|gb|AAF26996.1|AC016827_7 hypothetical
  misc_feature (1)..(655): Homolog of NCBI NO: 6630464 NR Description: F23N19.4 [Arabidopsis thaliana]
  misc_feature (1)..(608): Homolog of NCBI NO: 34900768 NR Description: hypothetical protein~similar to Arabidopsis
  misc_feature (12)..(655): Homolog of NCBI NO: 34895906 NR Description: P0030H07.18 [Oryza sativa (japonica
  misc_feature (1)..(651): Homolog of NCBI NO: 8777358 NR Description: salt-inducible protein-like [Arabidopsis thaliana]
MGNYGRIPSLLSCNSLLSNLVRKGENFVALHVYDQMISFEVSPDVFTCSIVVNAYCRSGNVDKAMVFAKETESSLGLELNVVTYNSLINGYAMIGDVEGMTRVLRLMSERGVSRNVVTYTSLIKGYCKKGLMEEAEHVFELLKEKKLVADQHMYGVLMDGYCRTGQIRDAVRVHDNMIEIGVRTNTTICNSLINGYCKSGQLVEAEQIFSRMNDWSLKPDHHTYNTLVDGYCRAGYVDEALKLCDQMCQKEVVPTVMTYNILLKGYSRIGAFHDVLSLWKMMLKRGVNADEISCSTLLEALFKLGDFNEAMKLWENVLARGLLTDTITLNVMISGCKPAVQTYQALSHGYYKVGNLKEAFAVKEYMERKGIFPTIEMYNTLISGAFKYRHLNKVADLVIELRARGLTPTVATYGALITGWCNIGMIDKAYATCFEMIEKGITLNVNICSKIANSLFRLDKIDEACLLLQKIVDFDLLLPGYQSLKEFLEASATTCLKTQKIAESVENSTPKKLLVPNNIVYNVAIAGLCKAGKLEDARKLFSDLLSSDRFIPDEYTYTILIHGCAIAGDINKAFTLRDEMALKGIIPNIVTYNALIKGLCKLGNVDRAQRLLHKLPQKGITPNAITYNTLIDGLVKSGNVAEAMRLKEKMIEKGLVRGSDKQGDVDIPKEVVLDPEVKLGSTGVIEMNSNELYDVRRVSEAVVYIVKAKRSILVTGLFDKLINRSNQ

SEQ ID NO: 86617 - protein, 692 aa, Arabidopsis thaliana
  peptide (1)..(692): Ceres Seq. ID no. 12692044
  misc_feature (187)..(221): Pfam Name: PPR repeat Pfam Description: PPR repeat
  misc_feature (1)..(668): Homolog of NCBI NO: 15220984 NR Description: hypothetical protein; protein id: At1g19290.1
  misc_feature (1)..(668): Homolog of NCBI NO: 8778411 NR Description: F18O14.1 [Arabidopsis thaliana]
  misc_feature (1)..(620): Homolog of NCBI NO: 15220984 NR Description: hypothetical protein; protein id: At1g19290.1
  misc_feature (1)..(620): Homolog of NCBI NO: 8778411 NR Description: F18O14.1 [Arabidopsis thaliana]
  misc_feature (1)..(608): Homolog of NCBI NO: 33146978 NR Description: putative pentatricopeptide (PPR)
  misc_feature (1)..(622): Homolog of NCBI NO: 15231338 NR Description: hypothetical protein; protein id: At3g06920.1 thaliana] >gi|6728999|gb|AAF26996.1|AC016827_7 hypothetical
  misc_feature (1)..(620): Homolog of NCBI NO: 6630464 NR Description: F23N19.4 [Arabidopsis thaliana]
  misc_feature (1)..(573): Homolog of NCBI NO: 34900768 NR Description: hypothetical protein~similar to Arabidopsis
  misc_feature (1)..(620): Homolog of NCBI NO: 34895906 NR Description: P0030H07.18 [Oryza sativa (japonica
  misc_feature (1)..(616): Homolog of NCBI NO: 8777358 NR Description: salt-inducible protein-like [Arabidopsis thaliana]
MISFEVSPDVFTCSIVVNAYCRSGNVDKAMVFAKETESSLGLELNVVTYNSLINGYAMIGDVEGMTRVLRLMSERGVSRNVVTYTSLIKGYCKKGLMEEAEHVFELLKEKKLVADQHMYGVLMDGYCRTGQIRDAVRVHDNMIEIGVRTNTTICNSLINGYCKSGQLVEAEQIFSRMNDWSLKPDHHTYNTLVDGYCRAGYVDEALKLCDQMCQKEVVPTVMTYNILLKGYSRIGAFHDVLSLWKMMLKRGVNADEISCSTLLEALFKLGDFNEAMKLWENVLARGLLTDTITLNVMISGCKPAVQTYQALSHGYYKVGNLKEAFAVKEYMERKGIFPTIEMYNTLISGAFKYRHLNKVADLVIELRARGLTPTVATYGALITGWCNIGMIDKAYATCFEMIEKGITLNVNICSKIANSLFRLDKIDEACLLLQKIVDFDLLLPGYQSLKEFLEASATTCLKTQKIAESVENSTPKKLLVPNNIVYNVAIAGLCKAGKLEDARKLFSDLLSSDRFIPDEYTYTILIHGCAIAGDINKAFTLRDEMALKGIIPNIVTYNALIKGLCKLGNVDRAQRLLHKLPQKGITPNAITYNTLIDGLVKSGNVAEAMRLKEKMIEKGLVRGSDKQGDVDIPKEVVLDPEVKLGSTGVIEMNSNELYDVRRVSEAVVYIVKAKRSILVTGLFDKLINRSNQ

SEQ ID NO: 86618 - DNA, 2520 bp, Arabidopsis thaliana
  misc_feature (1)..(2520): Ceres Seq. ID no. 12692056
  misc_feature: MA Experiment ID: 20000180 Result: Up-regulated in Transcription
  misc_feature: MA Experiment 20000180 PARAMETER Experiment Name: At_Germinating_Seeds_P Parameter: Age (hr) Value: 24 vs. 0
  misc_feature: MA Experiment 20000180 PARAMETER Experiment Name: At_Germinating_Seeds_P Parameter: Tissue Value: Germinating Seeds
  misc_feature: MA Experiment ID: 20000184 Result: Up-regulated in Transcription
  misc_feature: MA Experiment 20000184 PARAMETER Experiment Name: At_Shoots__P Parameter: Age (day) Value: 7
  misc_feature: MA Experiment 20000184 PARAMETER Experiment Name: At_Shoots__P Parameter: Tissue Value: Shoots vs. Whole Plant
  misc_feature: MA Experiment ID: 20000213 Result: Up-regulated in Transcription
  misc_feature: MA Experiment 20000213 PARAMETER Experiment Name: At_4deg_Cold_P Parameter: Timepoint (hr) Value: 2
  misc_feature: MA Experiment ID: 20000227 Result: Down-regulated in Transcription
  misc_feature: MA Experiment 20000227 PARAMETER Experiment Name: At_Root-Tips-vs-Tops_P Parameter: Tissue Value: Root Tips vs. Root Tops
  misc_feature: MA Experiment ID: 20000264 Result: Up-regulated in Transcription
  misc_feature: MA Experiment 20000264 PARAMETER Experiment Name: At_Open_Flower_P Parameter: Age (day) Value: 21
  misc_feature: MA Experiment 20000264 PARAMETER Experiment Name: At_Open_Flower_P Parameter: Plant Line Value: WS
  misc_feature: MA Experiment 20000264 PARAMETER Experiment Name: At_Open_Flower_P Parameter: Tissue Value: Open Flower vs. Whole Plant
  misc_feature: MA Experiment ID: 20000265 Result: Up-regulated in Transcription
  misc_feature: MA Experiment 20000265 PARAMETER Experiment Name: At_Open_Flower_P Parameter: Age (day) Value: 21
  misc_feature: MA Experiment 20000265 PARAMETER Experiment Name: At_Open_Flower_P Parameter: Plant Line Value: WS
  misc_feature: MA Experiment 20000265 PARAMETER Experiment Name: At_Open_Flower_P Parameter: Tissue Value: Closed Flower vs. Whole Plant
  misc_feature: MA Experiment ID: 20000286 Result: Up-regulated in Transcription
  misc_feature: MA Experiment 20000286 PARAMETER Experiment Name: At_Open_Flower_P Parameter: Age (day) Value: 21
  misc_feature: MA Experiment 20000286 PARAMETER Experiment Name: At_Open_Flower_P Parameter: Plant Line Value: WS
  misc_feature: MA Experiment 20000286 PARAMETER Experiment Name: At_Open_Flower_P Parameter: Tissue Value: Half Open vs. Whole Plant
  misc_feature: MA Experiment ID: 20000438 Result: Up-regulated in Transcription
  misc_feature: MA Experiment 20000438 PARAMETER Experiment Name: At_Shoots__P Parameter: Age (day) Value: 14
  misc_feature: MA Experiment 20000438 PARAMETER Experiment Name: At_Shoots__P Parameter: Tissue Value: Shoots vs. Whole Plant
  misc_feature: MA Experiment ID: 20000495 Result: Down-regulated in Transcription
  misc_feature: MA Experiment 20000495 PARAMETER Experiment Name: At_Guard_Cells_P Parameter: Harvest Date Value: 8/2/2002
  misc_feature: MA Experiment 20000495 PARAMETER Experiment Name: At_Guard_Cells_P Parameter: Organism Value: A. thaliana
  misc_feature: MA Experiment 20000495 PARAMETER Experiment Name: At_Guard_Cells_P Parameter: Tissue Value: Guard Cells vs. Leaves
  misc_feature: MA Experiment ID: 20000794 Result: Up-regulated in Transcription
  misc_feature: MA Experiment 20000794 PARAMETER Experiment Name: At_Petals_P Parameter: Age (day) Value: 23-25 days
  misc_feature: MA Experiment 20000794 PARAMETER Experiment Name: At_Petals_P Parameter: Plant Line Value: WS
  misc_feature: MA Experiment 20000794 PARAMETER Experiment Name: At_Petals_P Parameter: Tissue Value: Petals vs. Whole plant
  misc_feature: MA Experiment ID: 20001247 Result: Up-regulated in Transcription
  misc_feature: MA Experiment 20001247 PARAMETER Experiment Name: At_Far-red-induction_P Parameter: Age (day) Value: 7
  misc_feature: MA Experiment 20001247 PARAMETER Experiment Name: At_Far-red-induction_P Parameter: Light Value: Far-red vs. White
  misc_feature: MA Experiment 20001247 PARAMETER Experiment Name: At_Far-red-induction_P Parameter: Organism Value: A. thaliana
  misc_feature: MA Experiment 20001247 PARAMETER Experiment Name: At_Far-red-induction_P Parameter: Plant Line Value: Columbia
  misc_feature: MA Experiment 20001247 PARAMETER Experiment Name: At_Far-red-induction_P Parameter: Timepoint (hr) Value: 1
  misc_feature: MA Experiment 20001247 PARAMETER Experiment Name: At_Far-red-induction_P Parameter: Tissue Value: Whole Plant
  misc_feature: MA Experiment ID: 20001248 Result: Down-regulated in Transcription
  misc_feature: MA Experiment 20001248 PARAMETER Experiment Name: At_Far-red-induction_P Parameter: Age (day) Value: 7
  misc_feature: MA Experiment 20001248 PARAMETER Experiment Name: At_Far-red-induction_P Parameter: Light Value: Far-red vs. White
  misc_feature: MA Experiment 20001248 PARAMETER Experiment Name: At_Far-red-induction_P Parameter: Organism Value: A. thaliana
  misc_feature: MA Experiment 20001248 PARAMETER Experiment Name: At_Far-red-induction_P Parameter: Plant Line Value: Columbia
  misc_feature: MA Experiment 20001248 PARAMETER Experiment Name: At_Far-red-induction_P Parameter: Timepoint (hr) Value: 4
  misc_feature: MA Experiment 20001248 PARAMETER Experiment Name: At_Far-red-induction_P Parameter: Tissue Value: Whole Plant
  misc_feature: MA Experiment ID: 20001557 Result: Down-regulated in Transcription
  misc_feature: MA Experiment 20001557 PARAMETER Experiment Name: At_Drought_Soil_Dry_P Parameter: Age (day) Value: 27
  misc_feature: MA Experiment 20001557 PARAMETER Experiment Name: At_Drought_Soil_Dry_P Parameter: Organism Value: A. thaliana
  misc_feature: MA Experiment 20001557 PARAMETER Experiment Name: At_Drought_Soil_Dry_P Parameter: Plant Line Value: WS
  misc_feature: MA Experiment 20001557 PARAMETER Experiment Name: At_Drought_Soil_Dry_P Parameter: Post Timepoint (hr) Value: 3
  misc_feature: MA Experiment 20001557 PARAMETER Experiment Name: At_Drought_Soil_Dry_P Parameter: Post-Treatment Value: Re-Water vs. No Drought
  misc_feature: MA Experiment 20001557 PARAMETER Experiment Name: At_Drought_Soil_Dry_P Parameter: Timepoint (day) Value: 13
  misc_feature: MA Experiment 20001557 PARAMETER Experiment Name: At_Drought_Soil_Dry_P Parameter: Treatment Value: Drought vs. No Drought
  misc_feature: MA Experiment ID: 20001558 Result: Down-regulated in Transcription
  misc_feature: MA Experiment 20001558 PARAMETER Experiment Name: At_Drought_Soil_Dry_P Parameter: Age (day) Value: 27
  misc_feature: MA Experiment 20001558 PARAMETER Experiment Name: At_Drought_Soil_Dry_P Parameter: Organism Value: A. thaliana
  misc_feature: MA Experiment 20001558 PARAMETER Experiment Name: At_Drought_Soil_Dry_P Parameter: Plant Line Value: WS
  misc_feature: MA Experiment 20001558 PARAMETER Experiment Name: At_Drought_Soil_Dry_P Parameter: Post Timepoint (hr) Value: 6
  misc_feature: MA Experiment 20001558 PARAMETER Experiment Name: At_Drought_Soil_Dry_P Parameter: Post-Treatment Value: Re-Water vs. No Drought
  misc_feature: MA Experiment 20001558 PARAMETER Experiment Name: At_Drought_Soil_Dry_P Parameter: Timepoint (day) Value: 13
  misc_feature: MA Experiment 20001558 PARAMETER Experiment Name: At_Drought_Soil_Dry_P Parameter: Treatment Value: Drought vs. No Drought
  misc_feature: MA Experiment ID: 20001560 Result: Down-regulated in Transcription
  misc_feature: MA Experiment 20001560 PARAMETER Experiment Name: At_Drought_Soil_Dry_P Parameter: Age (day) Value: 28
  misc_feature: MA Experiment 20001560 PARAMETER Experiment Name: At_Drought_Soil_Dry_P Parameter: Organism Value: A. thaliana
  misc_feature: MA Experiment 20001560 PARAMETER Experiment Name: At_Drought_Soil_Dry_P Parameter: Plant Line Value: WS
  misc_feature: MA Experiment 20001560 PARAMETER Experiment Name: At_Drought_Soil_Dry_P Parameter: Post Timepoint (hr) Value: None
  misc_feature: MA Experiment 20001560 PARAMETER Experiment Name: At_Drought_Soil_Dry_P Parameter: Post-Treatment Value: None
  misc_feature: MA Experiment 20001560 PARAMETER Experiment Name: At_Drought_Soil_Dry_P Parameter: Timepoint (day) Value: 14
  misc_feature: MA Experiment 20001560 PARAMETER Experiment Name: At_Drought_Soil_Dry_P Parameter: Treatment Value: Drought vs. No Drought
gaggcatcacaacagataaagtcttgaactttgatcaagaattctaaacggagtttttgctcttctcgtcggtgaaagaaaaatcgagatgggttcaactccgttttgctactctatcaatccatctccatcaaagcttgatttcacgaggacccatgtgtttagtcctgtttctaaacagttttacttagatttatcatcgttttccggaaaacccggaggagtatctgggtttaggagccgtcgagctttgctcggagtaaaggcggcgacggcgttagttgagaaggaggagaagagagaggcggtgacggagaagaagaagaaatcgagggttttagttgccggaggtggaatcggaggattggtgtttgctttagcggctaagaagaaaggattcgatgtgttagtgtttgagaaagatttgagtgctataagaggagaaggaaaatacagaggcccgattcaaatacagagcaacgctttagctgctttggaagctattgatattgaagttgctgaacaagttatggaagctgggtgtatcactggtgatcggattaacggtctcgttgatggtatctctggtacttggtatgtaaagtttgatactttcactcctgcggcgtcacggggacttcctgtgactagagtaattagtagaatgactctgcagcagattctagcacgtgcggttggagaagatgtgattagaaacgagagtaatgttgttgattttgaagattctggagataaggttactgtggtactcgagaatggtcaacgctatgaaggtgatctgcttgtgggtgcagatggcatttggtctaaggtgagaaataatttgtttggccgtagtgaagctacttattcaggctacacttgttacacggggattgcagattttataccagcggatatcgagtctgttggctaccgggttttcttgggacacaaacagtactttgtttcttcggatgttggtggtggaaaaatgcaatggtatgcatttcacgaggaaccagctggtggggctgatgctccaaatggtatgaagaaaaggttgtttgaaatatttgacggttggtgcgacaatgtactcgacttgttgcatgcgactgaggaggaagccattctgagaagagatatttatgatagaagtcctggttttacttggggtaaagggcgtgttacgctgctcggggattctatccatgcgatgcagccaaatatgggtcaaggtggatgcatggccattgaggatagttttcaactagcattggagcttgatgaagcatggaaacagagtgttgaaacgactacacctgttgatgttgtttcctctttgaaaagatatgaggaatctagaagactgagagtcgctattatccatgcaatggcgaggatggctgcaattatggcttccacttacaaagcatacttaggtgttgggcttggtcctctgtctttcttgacaaagtttagagtaccacatccaggaagagttggtggtagattcttcgttgacattgctatgccatcgatgcttgactgggtccttggaggtaacaggttagttctatctgtgagttttatctaaagagaacttgatttgacagacctgtaaagccaactcgtttacacgcttttgcagtgaaaaactccaaggaaggccacctagttgcagactcactgacaaagccgatgaccggcttcgagagtggtttgaagatgacgatgctcttgaacgtactataaagggagagtatgtactcacaaatctgaattcgacatttagttccattatatttcttcacctacctaacaaaaaaacggccttgctctctatactgctttggtctgagtctgagtcttaatttctttgcagatggtatctaattccacacggcgacgattgttgcgtttcggaaacattatgtctaaccaaagatgaagatcaaccttgcatcgtcggaagcgaaccagatcaagattttcctggaatgcgcattgtgatcccttcgtctcaggtttcgaagatgcatgctcgtgtgatttacaaagacggagctttcttcttgatggatcttcgaagcgaacacggaacctatgtgaccgataacgaaggaagaagatatagagcaacaccgaattttcccgcgcggtttagatcgtccgacatcatcgagtttggttcagataagaaggcggcgtttagggtgaaagtaatcaggaaaactccgaaatcgacgaggaagaatgagagtaacaacgataaattacttcagacagcttgaaataagtaaaccgatggtgaaattaagtaattttaatcggtttggcagataatttgagtagtaattttctcaaaagaaaaaaaatctgctttcagctattccttgcatgacaatgtatatataggtctgaaacaaaatataaattatacaagacattaatcttcatttcttcaacttccaggcaacaataatctaattttgattactaaaaggtaattatatt

SEQ ID NO: 86619 - protein, 503 aa, Arabidopsis thaliana
  peptide (1)..(503): Ceres Seq. ID no. 12692057
  misc_feature (235)..(439): Pfam Name: Monooxygenase Pfam Description: Monooxygenase
  misc_feature (1)..(494): Homolog of NCBI NO: 30698274 NR Description: zeaxanthin epoxidase precursor (LOS6/ABA1)(ZEP)
  misc_feature (1)..(503): Homolog of NCBI NO: 19698915 NR Description: zeaxanthin epoxidase precursor [Arabidopsis >gi|27311909|gb|AAO00920.1| zeaxanthin epoxidase precursor
  misc_feature (1)..(494): Homolog of NCBI NO: 17402597 NR Description: zeaxanthin epoxidase [Citrus unshiu]
  misc_feature (78)..(494): Homolog of NCBI NO: 9857294 NR Description: CpABA1 [Vigna unguiculata]
  misc_feature (1)..(494): Homolog of NCBI NO: 5902706 NR Description: Zeaxanthin epoxidase, chloroplast precursor
  misc_feature (1)..(494): Homolog of NCBI NO: 5902708 NR Description: Zeaxanthin epoxidase, chloroplast precursor >gi|3264757|gb|AAC24582.1| zeaxanthin epoxidase [Prunus >gi|5360186|gb|AAD42899.1|AF159948_1 zeaxanthin epoxidase [Prunus
  misc_feature (1)..(494): Homolog of NCBI NO: 5902707 NR Description: Zeaxanthin epoxidase, chloroplast precursor
  misc_feature (56)..(494): Homolog of NCBI NO: 28883203 NR Description: zeaxanthin epoxidase precursor [Chlamydomonas sp.
  misc_feature (60)..(494): Homolog of NCBI NO: 28629442 NR Description: zeaxanthin epoxidase precursor [Chlamydomonas >gi|28883201|gb|AAO48940.1| zeaxanthin epoxidase precursor
  misc_feature (274)..(373): Homolog of NCBI NO: 30523256 NR Description: zeoxanthin epoxidase [Poncirus trifoliata]
MGSTPFCYSINPSPSKLDFTRTHVFSPVSKQFYLDLSSFSGKPGGVSGFRSRRALLGVKAATALVEKEEKREAVTEKKKKSRVLVAGGGIGGLVFALAAKKKGFDVLVFEKDLSAIRGEGKYRGPIQIQSNALAALEAIDIEVAEQVMEAGCITGDRINGLVDGISGTWYVKFDTFTPAASRGLPVTRVISRMTLQQILARAVGEDVIRNESNVVDFEDSGDKVTVVLENGQRYEGDLLVGADGIWSKVRNNLFGRSEATYSGYTCYTGIADFIPADIESVGYRVFLGHKQYFVSSDVGGGKMQWYAFHEEPAGGADAPNGMKKRLFEIFDGWCDNVLDLLHATEEEAILRRDIYDRSPGFTWGKGRVTLLGDSIHAMQPNMGQGGCMAIEDSFQLALELDEAWKQSVETTTPVDVVSSLKRYEESRRLRVAIIHAMARMAAIMASTYKAYLGVGLGPLSFLTKFRVPHPGRVGGRFFVDIAMPSMLDWVLGGNRLVLSVSFI

SEQ ID NO: 86620 - protein, 356 aa, Arabidopsis thaliana
  peptide (1)..(356): Ceres Seq. ID no. 12692058
  misc_feature (88)..(292): Pfam Name: Monooxygenase Pfam Description: Monooxygenase
  misc_feature (1)..(347): Homolog of NCBI NO: 30698274 NR Description: zeaxanthin epoxidase precursor (LOS6/ABA1)(ZEP)
  misc_feature (1)..(356): Homolog of NCBI NO: 19698915 NR Description: zeaxanthin epoxidase precursor [Arabidopsis >gi|27311909|gb|AAO00920.1| zeaxanthin epoxidase precursor
  misc_feature (1)..(347): Homolog of NCBI NO: 17402597 NR Description: zeaxanthin epoxidase [Citrus unshiu]
  misc_feature (1)..(347): Homolog of NCBI NO: 9857294 NR Description: CpABA1 [Vigna unguiculata]
  misc_feature (1)..(347): Homolog of NCBI NO: 5902706 NR Description: Zeaxanthin epoxidase, chloroplast precursor
  misc_feature (1)..(347): Homolog of NCBI NO: 5902708 NR Description: Zeaxanthin epoxidase, chloroplast precursor >gi|3264757|gb|AAC24582.1| zeaxanthin epoxidase [Prunus >gi|5360186|gb|AAD42899.1|AF159948_1 zeaxanthin epoxidase [Prunus
  misc_feature (1)..(347): Homolog of NCBI NO: 5902707 NR Description: Zeaxanthin epoxidase, chloroplast precursor
  misc_feature (1)..(347): Homolog of NCBI NO: 28883203 NR Description: zeaxanthin epoxidase precursor [Chlamydomonas sp.
  misc_feature (1)..(347): Homolog of NCBI NO: 28629442 NR Description: zeaxanthin epoxidase precursor [Chlamydomonas >gi|28883201|gb|AAO48940.1| zeaxanthin epoxidase precursor
  misc_feature (127)..(226): Homolog of NCBI NO: 30523256 NR Description: zeoxanthin epoxidase [Poncirus trifoliata]
MEAGCITGDRINGLVDGISGTWYVKFDTFTPAASRGLPVTRVISRMTLQQILARAVGEDVIRNESNVVDFEDSGDKVTVVLENGQRYEGDLLVGADGIWSKVRNNLFGRSEATYSGYTCYTGIADFIPADIESVGYRVFLGHKQYFVSSDVGGGKMQWYAFHEEPAGGADAPNGMKKRLFEIFDGWCDNVLDLLHATEEEAILRRDIYDRSPGFTWGKGRVTLLGDSIHAMQPNMGQGGCMAIEDSFQLALELDEAWKQSVETTTPVDVVSSLKRYEESRRLRVAIIHAMARMAAIMASTYKAYLGVGLGPLSFLTKFRVPHPGRVGGRFFVDIAMPSMLDWVLGGNRLVLSVSFI

SEQ ID NO: 86621 - protein, 311 aa, Arabidopsis thaliana
  peptide (1)..(311): Ceres Seq. ID no. 12692059
  misc_feature (43)..(247): Pfam Name: Monooxygenase Pfam Description: Monooxygenase
  misc_feature (1)..(302): Homolog of NCBI NO: 30698274 NR Description: zeaxanthin epoxidase precursor (LOS6/ABA1)(ZEP)
  misc_feature (1)..(311): Homolog of NCBI NO: 19698915 NR Description: zeaxanthin epoxidase precursor [Arabidopsis >gi|27311909|gb|AAO00920.1| zeaxanthin epoxidase precursor
  misc_feature (1)..(302): Homolog of NCBI NO: 17402597 NR Description: zeaxanthin epoxidase [Citrus unshiu]
  misc_feature (1)..(302): Homolog of NCBI NO: 9857294 NR Description: CpABA1 [Vigna unguiculata]
  misc_feature (1)..(302): Homolog of NCBI NO: 5902706 NR Description: Zeaxanthin epoxidase, chloroplast precursor
  misc_feature (1)..(302): Homolog of NCBI NO: 5902708 NR Description: Zeaxanthin epoxidase, chloroplast precursor >gi|3264757|gb|AAC24582.1| zeaxanthin epoxidase [Prunus >gi|5360186|gb|AAD42899.1|AF159948_1 zeaxanthin epoxidase [Prunus
  misc_feature (1)..(302): Homolog of NCBI NO: 5902707 NR Description: Zeaxanthin epoxidase, chloroplast precursor
  misc_feature (1)..(302): Homolog of NCBI NO: 28883203 NR Description: zeaxanthin epoxidase precursor [Chlamydomonas sp.
  misc_feature (1)..(302): Homolog of NCBI NO: 28629442 NR Description: zeaxanthin epoxidase precursor [Chlamydomonas >gi|28883201|gb|AAO48940.1| zeaxanthin epoxidase precursor
  misc_feature (82)..(181): Homolog of NCBI NO: 30523256 NR Description: zeoxanthin epoxidase [Poncirus trifoliata]
MTLQQILARAVGEDVIRNESNVVDFEDSGDKVTVVLENGQRYEGDLLVGADGIWSKVRNNLFGRSEATYSGYTCYTGIADFIPADIESVGYRVFLGHKQYFVSSDVGGGKMQWYAFHEEPAGGADAPNGMKKRLFEIFDGWCDNVLDLLHATEEEAILRRDIYDRSPGFTWGKGRVTLLGDSIHAMQPNMGQGGCMAIEDSFQLALELDEAWKQSVETTTPVDVVSSLKRYEESRRLRVAIIHAMARMAAIMASTYKAYLGVGLGPLSFLTKFRVPHPGRVGGRFFVDIAMPSMLDWVLGGNRLVLSVSFI

SEQ ID NO: 86622 - DNA, 3855 bp, Arabidopsis thaliana
  misc_feature (1)..(3855): Ceres Seq. ID no. 12692167
  misc_feature: MA Experiment ID: 20000328 Result: Up-regulated in Transcription
  misc_feature: MA Experiment 20000328 PARAMETER Experiment Name: At_42deg_Heat_Sub_P Parameter: Age (day) Value: 14
  misc_feature: MA Experiment 20000328 PARAMETER Experiment Name: At_42deg_Heat_Sub_P Parameter: Organism Value: A. thaliana
  misc_feature: MA Experiment 20000328 PARAMETER Experiment Name: At_42deg_Heat_Sub_P Parameter: Plant Line Value: WS
  misc_feature: MA Experiment 20000328 PARAMETER Experiment Name: At_42deg_Heat_Sub_P Parameter: Temperature (deg C) Value: 42 vs. 22
  misc_feature: MA Experiment 20000328 PARAMETER Experiment Name: At_42deg_Heat_Sub_P Parameter: Timepoint (hr) Value: 6
  misc_feature: MA Experiment 20000328 PARAMETER Experiment Name: At_42deg_Heat_Sub_P Parameter: Tissue Value: Aerial
  misc_feature: MA Experiment ID: 20000347 Result: Up-regulated in Transcription
  misc_feature: MA Experiment 20000347 PARAMETER Experiment Name: At_2mM_SA_Sub_P Parameter: Age (day) Value: 14
  misc_feature: MA Experiment 20000347 PARAMETER Experiment Name: At_2mM_SA_Sub_P Parameter: Organism Value: A. thaliana
  misc_feature: MA Experiment 20000347 PARAMETER Experiment Name: At_2mM_SA_Sub_P Parameter: Plant Line Value: WS
  misc_feature: MA Experiment 20000347 PARAMETER Experiment Name: At_2mM_SA_Sub_P Parameter: Timepoint (hr) Value: 6
  misc_feature: MA Experiment 20000347 PARAMETER Experiment Name: At_2mM_SA_Sub_P Parameter: Tissue Value: Aerial
  misc_feature: MA Experiment 20000347 PARAMETER Experiment Name: At_2mM_SA_Sub_P Parameter: Treatment Value: 2mM SA vs. No Treatment
  misc_feature: MA Experiment ID: 20000348 Result: Up-regulated in Transcription
  misc_feature: MA Experiment 20000348 PARAMETER Experiment Name: At_100uM_ABA_Sub_P Parameter: Age (day) Value: 14
  misc_feature: MA Experiment 20000348 PARAMETER Experiment Name: At_100uM_ABA_Sub_P Parameter: Organism Value: A. thaliana
  misc_feature: MA Experiment 20000348 PARAMETER Experiment Name: At_100uM_ABA_Sub_P Parameter: Plant Line Value: WS
  misc_feature: MA Experiment 20000348 PARAMETER Experiment Name: At_100uM_ABA_Sub_P Parameter: Timepoint (hr) Value: 1
  misc_feature: MA Experiment 20000348 PARAMETER Experiment Name: At_100uM_ABA_Sub_P Parameter: Tissue Value: Aerial
  misc_feature: MA Experiment 20000348 PARAMETER Experiment Name: At_100uM_ABA_Sub_P Parameter: Treatment Value: 100uM ABA vs. No Treatment
  misc_feature: MA Experiment ID: 20000349 Result: Up-regulated in Transcription
  misc_feature: MA Experiment 20000349 PARAMETER Experiment Name: At_100uM_ABA_Sub_P Parameter: Age (day) Value: 14
  misc_feature: MA Experiment 20000349 PARAMETER Experiment Name: At_100uM_ABA_Sub_P Parameter: Organism Value: A. thaliana
  misc_feature: MA Experiment 20000349 PARAMETER Experiment Name: At_100uM_ABA_Sub_P Parameter: Plant Line Value: WS
  misc_feature: MA Experiment 20000349 PARAMETER Experiment Name: At_100uM_ABA_Sub_P Parameter: Timepoint (hr) Value: 6
  misc_feature: MA Experiment 20000349 PARAMETER Experiment Name: At_100uM_ABA_Sub_P Parameter: Tissue Value: Aerial
  misc_feature: MA Experiment 20000349 PARAMETER Experiment Name: At_100uM_ABA_Sub_P Parameter: Treatment Value: 100uM ABA vs. No Treatment
atgatttcgaaagatcaccttcatcatctggatcctctgggtacaaccaaatcgtaccacatgaatacctccaccgtatcgccgccgtctccggcatcatcaatttcgttgtcgcaatcggcgtggctggaggttcgtttgttctacgtccgtatcgctccttgcgtcgttgagaacgtccctgacttcctcaccctccgtcaccctcgtcgcgaaaccggtgcttctcttgaggttaacggcgttcgcgttccttcgtcgcagacggcgtcgcttaaactccgccgtgacagagtcgaccgggaatcgtcggaggtgacttacgtgagcactgagaccgttcgcgttaccggatgcgttgatttcgaggtttatgataacgaggatatggtcttgtgtgggaacctagatagaatcgaaggtgcttggaacaatggaactgtgagtgatcccaagactggatggggcatggattgttacattgctatgggaaacggacacgtgtcaggtccttctgcctctgtgtttttccagccaaagtttggagtctcgtctccgtccgtcgaggtttatatagctggttgttgtggtggtgtcccggtgatattgaccaagacgattcaggcgagtccgaggaggaaggtggctaggcacgtgacactcgacgctatccctgaggatgaggaagttggcaaagagcaagacattggtaccattggtgatgaattggcccgtcaaagcaaagtacagatgatggaatcagaagttgatgaatacgatgactcagatatgaaaatggcacagagatattaccctgaaggaatgtacgttgatgaggatggtcagctctcatggttcaatgcaggagtcagagtcggagttgggataggccttgggatgtgtcttggtgtaggcattggagttggattactcatgcgttcgtatcaagcaacaactagtaaccttcgtaggagcgagaagaaggaggagatgagcaagatccgttcgtctgcgacaatgccacatcgcgaccagccgtcaccggcgtcgcctcacgtcgttacactcaactgtatagaggattgtgcgctcgagcaagactccctcgccggcgttgctggtgtcgaatacgtcccgctcagccgcatcgccgatggtaagatcgagtccgccaccgccgttctcctccattccctcgcgtatcttccacgagcagctcaacgccgactccgtcctcaccagctcattctctgccttggctctgctgatcgcgctgtcgattcgactctcgccgccgacctaggtctccgacttgtccatgtagatacttcacgagccgaggaaatcgcggataccgtcatggcgctcatccttggactccttcgacggacgcatttactctcgcgacacgctctatcggcgtctggttggctcggatcgcttcagcctctttgccggggaatgagacggtgccgtggtatggttttgggtatcgttggcagatctgtatcggctcggtatttagctagtagaagcttggctttcaagatgagtgtgctctacttcgatgtcccagagggagatgaagaacgaatcaggccctcgagattcccacgtgctgctcgaagaatggatacattgaatgatcttctagcagcaagtgatgtcatttcgctacattgtgcattaacaaatgacacggttcagatactcaatgcagagtgtttgcagcatataaaacctggggcttttcttgtaaatactggaagctgccagctgttggatgattgtgctgtgaaacaacttctaattgatggcactatagctggctgcgcccttgacggtgctgaaggtccacaatggatggaagcatgggtgaaggaaatgccaaatgtgttaattctacctcgcagtgcagattacagtgaggaagtatggatggagataagggagaaggctatctctatcttgcattcatttttcttagatggtgtaattccaagtaacactgtttctgatgaggaagttgaggaaagtgaagcaagtgaagaagaagaacaatcacctagcaaacacgagaaattagcaatagtggaatccaccagtaggcaacagggagaaagtactctcaccagcactgagatcgtacgtagagaggctagtgagttaaaagaatctctgagccctggtcagcaacacgtttctcaaaatactgccgtaaaacctgaaggaagacgtagcagatccggtaagaaagccaaaaagagacattcacagcaaaaatacatgcaaaaaacggatggttcctcagggttaaatgaagaaagtacttcacgaagagatgatattgctatgagtgacacagaagaagtattaagttccagttctagatgtgcttctcctgaagattccagaagtaggaaaacacctcttgaagtaatgcaagagtcttccccaaatcagcttgtaatgtcaagtaagaagttcattggaaagtcaagtgagctactgaaagatggatatgtagtagccttgtatgcgaaagacctctcgggcctccacgtttccaggcaaagaacgaaaaacggtggctggttcctcgatactttgtccaatgtatccaaacgagatcctgctgcacaattcattatcgcatacagaaacaaggacactgttggtctgagatcatttgctgctggtgggaagttactgcagatcaatagaagaatggagtttgtgtttgctagccatagttttgacgtgtgggagagttggagtctagaaggttctctggacgaatgtcggcttgttaactgcaggaattcctctgcggtgttggacgttcgtgtggagatattggcaatggtaggagacgatgaaacatccgatgagcttgtcttagagggacgtttgttgttgttttctgggtctggtcgtgatgaactcgaaagcattgtgtgtttgggaactttgtgtgtgttgtcgagttttatggtgactgtaaaccctagccaagctcattgtttgcctatgaaaatgagtctaccgggtttcaatactcttccccacacggcaacaacgataccggtttccatacggagcaataggacgatgtcgttttttgaggatccaacaaagaaggttagaaagccttacactatcaccaaatctagagagaactggacggagcaagaacacgacaagttccttgaagcccttcatctatttgaccgggattggaagaaaataaaggcctttgttggatcaaaaacagtgatacagatacgaagccacgcacagaagtactttctcaaagttcagaagaatgggactaaagaacatctcccacctcctcgaccaaagaggaaagccaatcacccatatccacaaaaagctcctaaatttactctttcttcttcaaacgcattatttcaacatgactacttatacaacactaattcacatccggtgattagcaccacccgtaagcatggattagtgcattgcgatgttagtataccaagttctgttatcaaagaggaatttggtgtctcagagaactgttgcagcactagtagtagtagagataagcagaggactagaatcgttacagagacaaatgaccaagaaagttgtggaaagccacatagagtggcgccaaatttcgctgaagtttacaattttataggaagtgtgtttgatcctaaaacaacaggtcatgtcaagagattaaaggaaatggatccaataaatcttgagacggttctcttactgatgaaaaatttatctgtaaacctgacgagtcccgagtttgatgaacaacggaagttgatatcatcttacaacgccagttag

SEQ ID NO: 86623 - protein, 1284 aa, Arabidopsis thaliana
  peptide (1)..(1284): Ceres Seq. ID no. 12692168
  misc_feature (1058)..(1103): Pfam Name: Myb-like DNA-binding domain Pfam Description: Myb-like DNA-binding domain
  misc_feature (324)..(959): Homolog of NCBI NO: 28804252 NR Description: angustifolia [Ipomoea nil]
  misc_feature (351)..(906): Homolog of NCBI NO: 20330742 NR Description: Putative C-terminal binding protein [Oryza sativa
  misc_feature (905)..(960): Homolog of NCBI NO: 20330742 NR Description: Putative C-terminal binding protein [Oryza sativa
  misc_feature (1)..(324): Homolog of NCBI NO: 18378846 NR Description: expressed protein; protein id: At1g01500.1, by cDNA: 6115. [Arabidopsis thaliana] >gi|27311811|gb|AAO00871.1|
  misc_feature (1022)..(1282): Homolog of NCBI NO: 30696221 NR Description: myb family transcription factor [Arabidopsis
  misc_feature (1022)..(1282): Homolog of NCBI NO: 30696225 NR Description: myb family transcription factor [Arabidopsis >gi|25082907|gb|AAN72013.1| putative protein [Arabidopsis
  misc_feature (1042)..(1282): Homolog of NCBI NO: 30680926 NR Description: myb family transcription factor [Arabidopsis >gi|20268705|gb|AAM14056.1| unknown protein [Arabidopsis >gi|21689883|gb|AAM67502.1| unknown protein [Arabidopsis
  misc_feature (1042)..(1143): Homolog of NCBI NO: 6682239 NR Description: putative MYB-related protein [Arabidopsis
  misc_feature (327)..(653): Homolog of NCBI NO: 11933131 NR Description: CtBP1 [Danio rerio]
  misc_feature (327)..(653): Homolog of NCBI NO: 40254690 NR Description: C-terminal binding protein 1 [Danio rerio]
MISKDHLHHLDPLGTTKSYHMNTSTVSPPSPASSISLSQSAWLEVRLFYVRIAPCVVENVPDFLTLRHPRRETGASLEVNGVRVPSSQTASLKLRRDRVDRESSEVTYVSTETVRVTGCVDFEVYDNEDMVLCGNLDRIEGAWNNGTVSDPKTGWGMDCYIAMGNGHVSGPSASVFFQPKFGVSSPSVEVYIAGCCGGVPVILTKTIQASPRRKVARHVTLDAIPEDEEVGKEQDIGTIGDELARQSKVQMMESEVDEYDDSDMKMAQRYYPEGMYVDEDGQLSWFNAGVRVGVGIGLGMCLGVGIGVGLLMRSYQATTSNLRRSEKKEEMSKIRSSATMPHRDQPSPASPHVVTLNCIEDCALEQDSLAGVAGVEYVPLSRIADGKIESATAVLLHSLAYLPRAAQRRLRPHQLILCLGSADRAVDSTLAADLGLRLVHVDTSRAEEIADTVMALILGLLRRTHLLSRHALSASGWLGSLQPLCRGMRRCRGMVLGIVGRSVSARYLASRSLAFKMSVLYFDVPEGDEERIRPSRFPRAARRMDTLNDLLAASDVISLHCALTNDTVQILNAECLQHIKPGAFLVNTGSCQLLDDCAVKQLLIDGTIAGCALDGAEGPQWMEAWVKEMPNVLILPRSADYSEEVWMEIREKAISILHSFFLDGVIPSNTVSDEEVEESEASEEEEQSPSKHEKLAIVESTSRQQGESTLTSTEIVRREASELKESLSPGQQHVSQNTAVKPEGRRSRSGKKAKKRHSQQKYMQKTDGSSGLNEESTSRRDDIAMSDTEEVLSSSSRCASPEDSRSRKTPLEVMQESSPNQLVMSSKKFIGKSSELLKDGYVVALYAKDLSGLHVSRQRTKNGGWFLDTLSNVSKRDPAAQFIIAYRNKDTVGLRSFAAGGKLLQINRRMEFVFASHSFDVWESWSLEGSLDECRLVNCRNSSAVLDVRVEILAMVGDDETSDELVLEGRLLLFSGSGRDELESIVCLGTLCVLSSFMVTVNPSQAHCLPMKMSLPGFNTLPHTATTIPVSIRSNRTMSFFEDPTKKVRKPYTITKSRENWTEQEHDKFLEALHLFDRDWKKIKAFVGSKTVIQIRSHAQKYFLKVQKNGTKEHLPPPRPKRKANHPYPQKAPKFTLSSSNALFQHDYLYNTNSHPVISTTRKHGLVHCDVSIPSSVIKEEFGVSENCCSTSSSRDKQRTRIVTETNDQESCGKPHRVAPNFAEVYNFIGSVFDPKTTGHVKRLKEMDPINLETVLLLMKNLSVNLTSPEFDEQRKLISSYNAS

SEQ ID NO: 86624 - protein, 1264 aa, Arabidopsis thaliana
  peptide (1)..(1264): Ceres Seq. ID no. 12692169
  misc_feature (1038)..(1083): Pfam Name: Myb-like DNA-binding domain Pfam Description: Myb-like DNA-binding domain
  misc_feature (304)..(939): Homolog of NCBI NO: 28804252 NR Description: angustifolia [Ipomoea nil]
  misc_feature (331)..(886): Homolog of NCBI NO: 20330742 NR Description: Putative C-terminal binding protein [Oryza sativa
  misc_feature (885)..(940): Homolog of NCBI NO: 20330742 NR Description: Putative C-terminal binding protein [Oryza sativa
  misc_feature (1)..(304): Homolog of NCBI NO: 18378846 NR Description: expressed protein; protein id: At1g01500.1, by cDNA: 6115. [Arabidopsis thaliana] >gi|27311811|gb|AAO00871.1|
  misc_feature (1002)..(1262): Homolog of NCBI NO: 30696221 NR Description: myb family transcription factor [Arabidopsis
  misc_feature (1002)..(1262): Homolog of NCBI NO: 30696225 NR Description: myb family transcription factor [Arabidopsis >gi|25082907|gb|AAN72013.1| putative protein [Arabidopsis
  misc_feature (1022)..(1262): Homolog of NCBI NO: 30680926 NR Description: myb family transcription factor [Arabidopsis >gi|20268705|gb|AAM14056.1| unknown protein [Arabidopsis >gi|21689883|gb|AAM67502.1| unknown protein [Arabidopsis
  misc_feature (1022)..(1123): Homolog of NCBI NO: 6682239 NR Description: putative MYB-related protein [Arabidopsis
  misc_feature (307)..(633): Homolog of NCBI NO: 11933131 NR Description: CtBP1 [Danio rerio]
  misc_feature (307)..(633): Homolog of NCBI NO: 40254690 NR Description: C-terminal binding protein 1 [Danio rerio]
MNTSTVSPPSPASSISLSQSAWLEVRLFYVRIAPCVVENVPDFLTLRHPRRETGASLEVNGVRVPSSQTASLKLRRDRVDRESSEVTYVSTETVRVTGCVDFEVYDNEDMVLCGNLDRIEGAWNNGTVSDPKTGWGMDCYIAMGNGHVSGPSASVFFQPKFGVSSPSVEVYIAGCCGGVPVILTKTIQASPRRKVARHVTLDAIPEDEEVGKEQDIGTIGDELARQSKVQMMESEVDEYDDSDMKMAQRYYPEGMYVDEDGQLSWFNAGVRVGVGIGLGMCLGVGIGVGLLMRSYQATTSNLRRSEKKEEMSKIRSSATMPHRDQPSPASPHVVTLNCIEDCALEQDSLAGVAGVEYVPLSRIADGKIESATAVLLHSLAYLPRAAQRRLRPHQLILCLGSADRAVDSTLAADLGLRLVHVDTSRAEEIADTVMALILGLLRRTHLLSRHALSASGWLGSLQPLCRGMRRCRGMVLGIVGRSVSARYLASRSLAFKMSVLYFDVPEGDEERIRPSRFPRAARRMDTLNDLLAASDVISLHCALTNDTVQILNAECLQHIKPGAFLVNTGSCQLLDDCAVKQLLIDGTIAGCALDGAEGPQWMEAWVKEMPNVLILPRSADYSEEVWMEIREKAISILHSFFLDGVIPSNTVSDEEVEESEASEEEEQSPSKHEKLAIVESTSRQQGESTLTSTEIVRREASELKESLSPGQQHVSQNTAVKPEGRRSRSGKKAKKRHSQQKYMQKTDGSSGLNEESTSRRDDIAMSDTEEVLSSSSRCASPEDSRSRKTPLEVMQESSPNQLVMSSKKFIGKSSELLKDGYVVALYAKDLSGLHVSRQRTKNGGWFLDTLSNVSKRDPAAQFIIAYRNKDTVGLRSFAAGGKLLQINRRMEFVFASHSFDVWESWSLEGSLDECRLVNCRNSSAVLDVRVEILAMVGDDETSDELVLEGRLLLFSGSGRDELESIVCLGTLCVLSSFMVTVNPSQAHCLPMKMSLPGFNTLPHTATTIPVSIRSNRTMSFFEDPTKKVRKPYTITKSRENWTEQEHDKFLEALHLFDRDWKKIKAFVGSKTVIQIRSHAQKYFLKVQKNGTKEHLPPPRPKRKANHPYPQKAPKFTLSSSNALFQHDYLYNTNSHPVISTTRKHGLVHCDVSIPSSVIKEEFGVSENCCSTSSSRDKQRTRIVTETNDQESCGKPHRVAPNFAEVYNFIGSVFDPKTTGHVKRLKEMDPINLETVLLLMKNLSVNLTSPEFDEQRKLISSYNAS

SEQ ID NO: 86625 - protein, 1155 aa, Arabidopsis thaliana
  peptide (1)..(1155): Ceres Seq. ID no. 12692170
  misc_feature (929)..(974): Pfam Name: Myb-like DNA-binding domain Pfam Description: Myb-like DNA-binding domain
  misc_feature (195)..(830): Homolog of NCBI NO: 28804252 NR Description: angustifolia [Ipomoea nil]
  misc_feature (222)..(777): Homolog of NCBI NO: 20330742 NR Description: Putative C-terminal binding protein [Oryza sativa
  misc_feature (776)..(831): Homolog of NCBI NO: 20330742 NR Description: Putative C-terminal binding protein [Oryza sativa
  misc_feature (1)..(195): Homolog of NCBI NO: 18378846 NR Description: expressed protein; protein id: At1g01500.1, by cDNA: 6115. [Arabidopsis thaliana] >gi|27311811|gb|AAO00871.1|
  misc_feature (893)..(1153): Homolog of NCBI NO: 30696221 NR Description: myb family transcription factor [Arabidopsis
  misc_feature (893)..(1153): Homolog of NCBI NO: 30696225 NR Description: myb family transcription factor [Arabidopsis >gi|25082907|gb|AAN72013.1| putative protein [Arabidopsis
  misc_feature (913)..(1153): Homolog of NCBI NO: 30680926 NR Description: myb family transcription factor [Arabidopsis >gi|20268705|gb|AAM14056.1| unknown protein [Arabidopsis >gi|21689883|gb|AAM67502.1| unknown protein [Arabidopsis
  misc_feature (913)..(1014): Homolog of NCBI NO: 6682239 NR Description: putative MYB-related protein [Arabidopsis
  misc_feature (198)..(524): Homolog of NCBI NO: 11933131 NR Description: CtBP1 [Danio rerio]
  misc_feature (198)..(524): Homolog of NCBI NO: 40254690 NR Description: C-terminal binding protein 1 [Danio rerio]
MVLCGNLDRIEGAWNNGTVSDPKTGWGMDCYIAMGNGHVSGPSASVFFQPKFGVSSPSVEVYIAGCCGGVPVILTKTIQASPRRKVARHVTLDAIPEDEEVGKEQDIGTIGDELARQSKVQMMESEVDEYDDSDMKMAQRYYPEGMYVDEDGQLSWFNAGVRVGVGIGLGMCLGVGIGVGLLMRSYQATTSNLRRSEKKEEMSKIRSSATMPHRDQPSPASPHVVTLNCIEDCALEQDSLAGVAGVEYVPLSRIADGKIESATAVLLHSLAYLPRAAQRRLRPHQLILCLGSADRAVDSTLAADLGLRLVHVDTSRAEEIADTVMALILGLLRRTHLLSRHALSASGWLGSLQPLCRGMRRCRGMVLGIVGRSVSARYLASRSLAFKMSVLYFDVPEGDEERIRPSRFPRAARRMDTLNDLLAASDVISLHCALTNDTVQILNAECLQHIKPGAFLVNTGSCQLLDDCAVKQLLIDGTIAGCALDGAEGPQWMEAWVKEMPNVLILPRSADYSEEVWMEIREKAISILHSFFLDGVIPSNTVSDEEVEESEASEEEEQSPSKHEKLAIVESTSRQQGESTLTSTEIVRREASELKESLSPGQQHVSQNTAVKPEGRRSRSGKKAKKRHSQQKYMQKTDGSSGLNEESTSRRDDIAMSDTEEVLSSSSRCASPEDSRSRKTPLEVMQESSPNQLVMSSKKFIGKSSELLKDGYVVALYAKDLSGLHVSRQRTKNGGWFLDTLSNVSKRDPAAQFIIAYRNKDTVGLRSFAAGGKLLQINRRMEFVFASHSFDVWESWSLEGSLDECRLVNCRNSSAVLDVRVEILAMVGDDETSDELVLEGRLLLFSGSGRDELESIVCLGTLCVLSSFMVTVNPSQAHCLPMKMSLPGFNTLPHTATTIPVSIRSNRTMSFFEDPTKKVRKPYTITKSRENWTEQEHDKFLEALHLFDRDWKKIKAFVGSKTVIQIRSHAQKYFLKVQKNGTKEHLPPPRPKRKANHPYPQKAPKFTLSSSNALFQHDYLYNTNSHPVISTTRKHGLVHCDVSIPSSVIKEEFGVSENCCSTSSSRDKQRTRIVTETNDQESCGKPHRVAPNFAEVYNFIGSVFDPKTTGHVKRLKEMDPINLETVLLLMKNLSVNLTSPEFDEQRKLISSYNAS

SEQ ID NO: 86626 - DNA, 1419 bp, Arabidopsis thaliana
  misc_feature (1)..(1419): Ceres Seq. ID no. 12692173
  misc_feature: MA Experiment ID: 108576 Result: Up-regulated in Transcription
  misc_feature: MA Experiment 108576 PARAMETER Experiment Name: At_42deg_Heat_cDNA_P Parameter: Temperature (deg C) Value: 42 vs. 22
  misc_feature: MA Experiment 108576 PARAMETER Experiment Name: At_42deg_Heat_cDNA_P Parameter: Timepoint (hr) Value: 1
  misc_feature: MA Experiment 108576 PARAMETER Experiment Name: At_42deg_Heat_cDNA_P Parameter: Tissue Value: Aerial
  misc_feature: MA Experiment ID: 108595 Result: Down-regulated in Transcription
  misc_feature: MA Experiment 108595 PARAMETER Experiment Name: At_Ler-pi_Ovule_cDNA_P Parameter: Plant Line Value: null
  misc_feature: MA Experiment ID: 20000179 Result: Up-regulated in Transcription
  misc_feature: MA Experiment 20000179 PARAMETER Experiment Name: At_Germinating_Seeds_P Parameter: Age (hr) Value: 6 vs. 0
  misc_feature: MA Experiment 20000179 PARAMETER Experiment Name: At_Germinating_Seeds_P Parameter: Tissue Value: Germinating Seeds
  misc_feature: MA Experiment ID: 20000180 Result: Up-regulated in Transcription
  misc_feature: MA Experiment 20000180 PARAMETER Experiment Name: At_Germinating_Seeds_P Parameter: Age (hr) Value: 24 vs. 0
  misc_feature: MA Experiment 20000180 PARAMETER Experiment Name: At_Germinating_Seeds_P Parameter: Tissue Value: Germinating Seeds
  misc_feature: MA Experiment ID: 20000227 Result: Up-regulated in Transcription
  misc_feature: MA Experiment 20000227 PARAMETER Experiment Name: At_Root-Tips-vs-Tops_P Parameter: Tissue Value: Root Tips vs. Root Tops
  misc_feature: MA Experiment ID: 20000264 Result: Down-regulated in Transcription
  misc_feature: MA Experiment 20000264 PARAMETER Experiment Name: At_Open_Flower_P Parameter: Age (day) Value: 21
  misc_feature: MA Experiment 20000264 PARAMETER Experiment Name: At_Open_Flower_P Parameter: Plant Line Value: WS
  misc_feature: MA Experiment 20000264 PARAMETER Experiment Name: At_Open_Flower_P Parameter: Tissue Value: Open Flower vs. Whole Plant
  misc_feature: MA Experiment ID: 20000265 Result: Down-regulated in Transcription
  misc_feature: MA Experiment 20000265 PARAMETER Experiment Name: At_Open_Flower_P Parameter: Age (day) Value: 21
  misc_feature: MA Experiment 20000265 PARAMETER Experiment Name: At_Open_Flower_P Parameter: Plant Line Value: WS
  misc_feature: MA Experiment 20000265 PARAMETER Experiment Name: At_Open_Flower_P Parameter: Tissue Value: Closed Flower vs. Whole Plant
  misc_feature: MA Experiment ID: 20000286 Result: Down-regulated in Transcription
  misc_feature: MA Experiment 20000286 PARAMETER Experiment Name: At_Open_Flower_P Parameter: Age (day) Value: 21
  misc_feature: MA Experiment 20000286 PARAMETER Experiment Name: At_Open_Flower_P Parameter: Plant Line Value: WS
  misc_feature: MA Experiment 20000286 PARAMETER Experiment Name: At_Open_Flower_P Parameter: Tissue Value: Half Open vs. Whole Plant
  misc_feature: MA Experiment ID: 20000438 Result: Down-regulated in Transcription
  misc_feature: MA Experiment 20000438 PARAMETER Experiment Name: At_Shoots__P Parameter: Age (day) Value: 14
  misc_feature: MA Experiment 20000438 PARAMETER Experiment Name: At_Shoots__P Parameter: Tissue Value: Shoots vs. Whole Plant
  misc_feature: MA Experiment ID: 20000794 Result: Down-regulated in Transcription
  misc_feature: MA Experiment 20000794 PARAMETER Experiment Name: At_Petals_P Parameter: Age (day) Value: 23-25 days
  misc_feature: MA Experiment 20000794 PARAMETER Experiment Name: At_Petals_P Parameter: Plant Line Value: WS
  misc_feature: MA Experiment 20000794 PARAMETER Experiment Name: At_Petals_P Parameter: Tissue Value: Petals vs. Whole plant
  misc_feature: MA Experiment ID: 20001556 Result: Down-regulated in Transcription
  misc_feature: MA Experiment 20001556 PARAMETER Experiment Name: At_Drought_Soil_Dry_P Parameter: Age (day) Value: 26
  misc_feature: MA Experiment 20001556 PARAMETER Experiment Name: At_Drought_Soil_Dry_P Parameter: Organism Value: A. thaliana
  misc_feature: MA Experiment 20001556 PARAMETER Experiment Name: At_Drought_Soil_Dry_P Parameter: Plant Line Value: WS
  misc_feature: MA Experiment 20001556 PARAMETER Experiment Name: At_Drought_Soil_Dry_P Parameter: Post Timepoint (hr) Value: None
  misc_feature: MA Experiment 20001556 PARAMETER Experiment Name: At_Drought_Soil_Dry_P Parameter: Post-Treatment Value: None
  misc_feature: MA Experiment 20001556 PARAMETER Experiment Name: At_Drought_Soil_Dry_P Parameter: Timepoint (day) Value: 12
  misc_feature: MA Experiment 20001556 PARAMETER Experiment Name: At_Drought_Soil_Dry_P Parameter: Treatment Value: Drought vs. No Drought
  misc_feature: MA Experiment ID: 20001757 Result: Down-regulated in Transcription
  misc_feature: MA Experiment 20001757 PARAMETER Experiment Name: At_50mM_NH4NO3_L-to-H_P Parameter: Timepoint (hr) Value: 6
  misc_feature: MA Experiment 20001757 PARAMETER Experiment Name: At_50mM_NH4NO3_L-to-H_P Parameter: Tissue Value: Leaf
  misc_feature: MA Experiment 20001757 PARAMETER Experiment Name: At_50mM_NH4NO3_L-to-H_P Parameter: Treatment Value: 50mM NH4NO3 vs 100mM Mannitol
  misc_feature: MA Experiment ID: 20001773 Result: Up-regulated in Transcription
  misc_feature: MA Experiment 20001773 PARAMETER Experiment Name: At_Far-red-enriched-adult_P Parameter: Age (day) Value: 30
  misc_feature: MA Experiment 20001773 PARAMETER Experiment Name: At_Far-red-enriched-adult_P Parameter: Light Value: Far-red enriched vs. White
  misc_feature: MA Experiment 20001773 PARAMETER Experiment Name: At_Far-red-enriched-adult_P Parameter: Organism Value: A. thaliana
  misc_feature: MA Experiment 20001773 PARAMETER Experiment Name: At_Far-red-enriched-adult_P Parameter: Plant Line Value: Columbia
  misc_feature: MA Experiment 20001773 PARAMETER Experiment Name: At_Far-red-enriched-adult_P Parameter: Timepoint (hr) Value: 48
  misc_feature: MA Experiment 20001773 PARAMETER Experiment Name: At_Far-red-enriched-adult_P Parameter: Tissue Value: Aerial
  misc_feature: MA Experiment ID: 20001904 Result: Up-regulated in Transcription
  misc_feature: MA Experiment 20001904 PARAMETER Experiment Name: At_Drought_Reproduction_P Parameter: Age (day) Value: 37
  misc_feature: MA Experiment 20001904 PARAMETER Experiment Name: At_Drought_Reproduction_P Parameter: Organism Value: A. thaliana
  misc_feature: MA Experiment 20001904 PARAMETER Experiment Name: At_Drought_Reproduction_P Parameter: Plant Line Value: WS
  misc_feature: MA Experiment 20001904 PARAMETER Experiment Name: At_Drought_Reproduction_P Parameter: Timepoint (day) Value: 7
  misc_feature: MA Experiment 20001904 PARAMETER Experiment Name: At_Drought_Reproduction_P Parameter: Tissue Value: Rosettes
  misc_feature: MA Experiment 20001904 PARAMETER Experiment Name: At_Drought_Reproduction_P Parameter: Treatment Value: Drought vs. No Drought
  misc_feature: MA Experiment ID: 20001905 Result: Up-regulated in Transcription
  misc_feature: MA Experiment 20001905 PARAMETER Experiment Name: At_Drought_Reproduction_P Parameter: Age (day) Value: 40
  misc_feature: MA Experiment 20001905 PARAMETER Experiment Name: At_Drought_Reproduction_P Parameter: Organism Value: A. thaliana
  misc_feature: MA Experiment 20001905 PARAMETER Experiment Name: At_Drought_Reproduction_P Parameter: Plant Line Value: WS
  misc_feature: MA Experiment 20001905 PARAMETER Experiment Name: At_Drought_Reproduction_P Parameter: Timepoint (day) Value: 10
  misc_feature: MA Experiment 20001905 PARAMETER Experiment Name: At_Drought_Reproduction_P Parameter: Tissue Value: Rosettes
  misc_feature: MA Experiment 20001905 PARAMETER Experiment Name: At_Drought_Reproduction_P Parameter: Treatment Value: Drought vs. No Drought
gaagttcagacacctaggactataagtagacgatctcttattgtcttgtcttctcatcagacagacatcagatcagaagattttggtttcaagctcttcttctacgattccccgaagcttctggattgagatctctctctcaagcaatggcagctacaagtgagaaacagaacaccacaaagcctcctccttctccttctcctctccgcaattccaagttttgtcagcccaatatgaggatcttgatctctggaggagctggcttcattggttctcacttggttgataagcttatggaaaatgagaagaatgaggtggttgttgctgataactatttcactggctcaaaagaaaacctcaagaagtggatcggtcaccccaggtttgaacttattcgtcacgatgttaccgagcctttgttgatcgaggttgatcggatttaccatcttgcttgtcctgcctctcctatcttctacaaatacaaccctgttaagacaatcaagaccaatgtgattggtacactcaacatgctcggtcttgccaagcgtgttggagcaagaattttactaacctcaacctctgaagtgtatggagatcctctcatccaccctcaaccagagagctactggggaaatgtcaaccctattggggttcggagttgctatgacgaaggcaagcgggtagccgaaaccttgatgtttgactaccacagacaacatggcattgaaatccgcattgctagaatcttcaacacatatggtcctcgaatgaacatcgatgatgggcgtgttgtgagcaacttcattgctcaagcactccggggtgaggcattgacagttcagaaaccggggacacagacccgcagtttctgttatgtctccgacatggtggatggacttatccgtcttatggaaggcaatgatactggccctatcaacatcggtaacccaggtgagttcacaatggtggaactggctgagacggttaaggagcttattaacccaagcatagagataaagatggtggagaacacaccagatgatccaagacagaggaaaccagacattagtaaagccaaagaagtgttgggttgggagccaaaggtgaagctcagagaaggacttcctctcatggaagaagatttccgactaaggcttaacgtcccaagaaactaaaaccacaagaaaacacagacggttttgagttcacgagagttgtcagctgttgagttatatgatgatgctattatactacaaagtggtgggtttttgtttggtctcatgtgttattcatattgcttttgttcgtagaaaaataagttgggaatgggtctccttgtgaggaatggctcttctttgtttttcagtatattgtggtatggttattatttgtgtggttttaatgaaatttgttcactta

SEQ ID NO: 86627 - protein, 342 aa, Arabidopsis thaliana; identical to SEQ ID NO: 27948
  peptide (1)..(342): Ceres Seq. ID no. 12692174
  misc_feature (32)..(338): Pfam Name: NAD dependent epimerase/dehydratase family Pfam Description: NAD dependent epimerase/dehydratase family
  misc_feature (1)..(342): Homolog of NCBI NO: 15237853 NR Description: dTDP-glucose 4-6-dehydratase - like protein; id: At5g59290.1, supported by cDNA: 6701., supported by cDNA: supported by cDNA: gi_14595665, supported by cDNA: gi_20334715
  misc_feature (1)..(342): Homolog of NCBI NO: 14030703 NR Description: AT5g59290/mnc17_180 [Arabidopsis thaliana]
  misc_feature (3)..(342): Homolog of NCBI NO: 15231432 NR Description: dTDP-glucose 4-6-dehydratases-like protein; id: At3g46440.1, supported by cDNA: 31901., supported by cDNA:
  misc_feature (1)..(341): Homolog of NCBI NO: 15226950 NR Description: putative nucleotide-sugar dehydratase; protein At2g28760.1, supported by cDNA: gi_20466473 [Arabidopsis
  misc_feature (1)..(342): Homolog of NCBI NO: 13591616 NR Description: UDP-D-glucuronate carboxy-lyase [Pisum sativum]
  misc_feature (1)..(341): Homolog of NCBI NO: 11270075 NR Description: dTDPglucose 4,6-dehydratase (EC 4.2.1.46)
  misc_feature (4)..(341): Homolog of NCBI NO: 18447934 NR Description: UDP-glucuronic acid decarboxylase [Oryza sativa
  misc_feature (1)..(341): Homolog of NCBI NO: 11121508 NR Description: d-TDP-glucose dehydratase [Phragmites australis]
  misc_feature (79)..(342): Homolog of NCBI NO: 2351580 NR Description: thymidine diphospho-glucose 4-6-dehydratase
  misc_feature (30)..(337): Homolog of NCBI NO: 15227109 NR Description: putative dTDP-glucose 4-6-dehydratase; protein id:

SEQ ID NO: 86628 - protein, 313 aa, Arabidopsis thaliana; identical to SEQ ID NO: 27949
  peptide (1)..(313): Ceres Seq. ID no. 12692175
  misc_feature (3)..(309): Pfam Name: NAD dependent epimerase/dehydratase family Pfam Description: NAD dependent epimerase/dehydratase family
  misc_feature (1)..(313): Homolog of NCBI NO: 15237853 NR Description: dTDP-glucose 4-6-dehydratase - like protein; id: At5g59290.1, supported by cDNA: 6701., supported by cDNA: supported by cDNA: gi_14595665, supported by cDNA: gi_20334715
  misc_feature (1)..(313): Homolog of NCBI NO: 14030703 NR Description: AT5g59290/mnc17_180 [Arabidopsis thaliana]
  misc_feature (1)..(313): Homolog of NCBI NO: 15231432 NR Description: dTDP-glucose 4-6-dehydratases-like protein; id: At3g46440.1, supported by cDNA: 31901., supported by cDNA:
  misc_feature (1)..(312): Homolog of NCBI NO: 15226950 NR Description: putative nucleotide-sugar dehydratase; protein At2g28760.1, supported by cDNA: gi_20466473 [Arabidopsis
  misc_feature (1)..(313): Homolog of NCBI NO: 13591616 NR Description: UDP-D-glucuronate carboxy-lyase [Pisum sativum]
  misc_feature (1)..(312): Homolog of NCBI NO: 11270075 NR Description: dTDPglucose 4,6-dehydratase (EC 4.2.1.46)
  misc_feature (1)..(312): Homolog of NCBI NO: 18447934 NR Description: UDP-glucuronic acid decarboxylase [Oryza sativa
  misc_feature (1)..(312): Homolog of NCBI NO: 11121508 NR Description: d-TDP-glucose dehydratase [Phragmites australis]
  misc_feature (50)..(313): Homolog of NCBI NO: 2351580 NR Description: thymidine diphospho-glucose 4-6-dehydratase
  misc_feature (1)..(308): Homolog of NCBI NO: 15227109 NR Description: putative dTDP-glucose 4-6-dehydratase; protein id:

SEQ ID NO: 86629 - protein, 293 aa, Arabidopsis thaliana; identical to SEQ ID NO: 27578
  peptide (1)..(293): Ceres Seq. ID no. 12692176
  misc_feature (1)..(289): Pfam Name: NAD dependent epimerase/dehydratase family Pfam Description: NAD dependent epimerase/dehydratase family
  misc_feature (1)..(293): Homolog of NCBI NO: 15237853 NR Description: dTDP-glucose 4-6-dehydratase - like protein; id: At5g59290.1, supported by cDNA: 6701., supported by cDNA: supported by cDNA: gi_14595665, supported by cDNA: gi_20334715
  misc_feature (1)..(293): Homolog of NCBI NO: 14030703 NR Description: AT5g59290/mnc17_180 [Arabidopsis thaliana]
  misc_feature (1)..(293): Homolog of NCBI NO: 15231432 NR Description: dTDP-glucose 4-6-dehydratases-like protein; id: At3g46440.1, supported by cDNA: 31901., supported by cDNA:
  misc_feature (1)..(292): Homolog of NCBI NO: 15226950 NR Description: putative nucleotide-sugar dehydratase; protein At2g28760.1, supported by cDNA: gi_20466473 [Arabidopsis
  misc_feature (1)..(293): Homolog of NCBI NO: 13591616 NR Description: UDP-D-glucuronate carboxy-lyase [Pisum sativum]
  misc_feature (1)..(292): Homolog of NCBI NO: 11270075 NR Description: dTDPglucose 4,6-dehydratase (EC 4.2.1.46)
  misc_feature (1)..(292): Homolog of NCBI NO: 18447934 NR Description: UDP-glucuronic acid decarboxylase [Oryza sativa
  misc_feature (1)..(292): Homolog of NCBI NO: 11121508 NR Description: d-TDP-glucose dehydratase [Phragmites australis]
  misc_feature (30)..(293): Homolog of NCBI NO: 2351580 NR Description: thymidine diphospho-glucose 4-6-dehydratase
  misc_feature (1)..(288): Homolog of NCBI NO: 15227109 NR Description: putative dTDP-glucose 4-6-dehydratase; protein id:

SEQ ID NO: 86630 - DNA, 876 bp, Arabidopsis thaliana
  misc_feature (1)..(876): Ceres Seq. ID no. 12692222
atgttaacttctaaggaagatatattggtgaaagaaaacataaggataaccaaattcatttcttttcttttccctgaagttactattgagatgtgttttgctgacttattatgtggattaggttcgtacaaacacccgagttgtccaaggtcgaggaaattagttattccgctgcattgttcgttgaacatgcttgaaggagataccgggtgttccatctggccatcgagtctgtttctgtcagaatttgttttgtcatttccagagttattcgccaataaagcctgttttgaggttggttctggagttggtatggtcgggatttgccttgcacatgtaaaggccaaagaggtgatactaacagacggagatcttttaactttgtctaacatgaagcttaatttggagagaaatcacttaaactatgatgacgagtttctcaaacaacccggagaagctcagagtacacgagttaaatgcactcatcttccatgggaaactgcatcggaaagtgaactaagccaatatcgtccagatattgttctaggcgcagatgtaatctatgatccgtcatgtctccctcatctacttcgggtgctagtagcccttttaaagaacccacccaaaagaggaaatggctctctcgagactgaagacagagacacgacacaagaagaacacagtcccgcggtggcttatatcgcatctgtgatccgcaatgtagacacttttaatgtgtgcttgacacttgcagaccaaatggacctttccatcacagacgtgaccgcagaacttacgcctcgctttgagcttttaccatatatgcattcgtatgaccgctcaaccgttcggctcttctccatatcctccagataa

SEQ ID NO: 86631 - protein, 291 aa, Arabidopsis thaliana
  peptide (1)..(291): Ceres Seq. ID no. 12692223
  misc_feature (1)..(291): Homolog of NCBI NO: 15240919 NR Description: putative protein; protein id: At5g27400.1 thaliana] >gi|29029094|gb|AAO64926.1| At5g27400 [Arabidopsis
  misc_feature (70)..(288): Homolog of NCBI NO: 28829124 NR Description: similar to putative protein; protein id:
  misc_feature (67)..(200): Homolog of NCBI NO: 14585877 NR Description: hypothetical protein SB153 [Homo sapiens]
  misc_feature (67)..(200): Homolog of NCBI NO: 14603247 NR Description: Similar to RIKEN cDNA 5730409G15 gene [Homo
  misc_feature (67)..(200): Homolog of NCBI NO: 37541807 NR Description: similar to hypothetical protein FLJ10661 [Homo
  misc_feature (67)..(200): Homolog of NCBI NO: 30149259 NR Description: similar to CG7889-PA [Homo sapiens]
  misc_feature (67)..(203): Homolog of NCBI NO: 29835170 NR Description: Unknown (protein for MGC:59002) [Mus musculus]
  misc_feature (67)..(200): Homolog of NCBI NO: 37549678 NR Description: similar to CG7889-PA [Homo sapiens]
  misc_feature (67)..(200): Homolog of NCBI NO: 37543704 NR Description: similar to CG7889-PA [Homo sapiens]
  misc_feature (67)..(203): Homolog of NCBI NO: 26383095 NR Description: unnamed protein product [Mus musculus]
MLTSKEDILVKENIRITKFISFLFPEVTIEMCFADLLCGLGSYKHPSCPRSRKLVIPLHCSLNMLEGDTGCSIWPSSLFLSEFVLSFPELFANKACFEVGSGVGMVGICLAHVKAKEVILTDGDLLTLSNMKLNLERNHLNYDDEFLKQPGEAQSTRVKCTHLPWETASESELSQYRPDIVLGADVIYDPSCLPHLLRVLVALLKNPPKRGNGSLETEDRDTTQEEHSPAVAYIASVIRNVDTFNVCLTLADQMDLSITDVTAELTPRFELLPYMHSYDRSTVRLFSISSR

SEQ ID NO: 86632 - protein, 261 aa, Arabidopsis thaliana
  peptide (1)..(261): Ceres Seq. ID no. 12692224
  misc_feature (1)..(261): Homolog of NCBI NO: 15240919 NR Description: putative protein; protein id: At5g27400.1 thaliana] >gi|29029094|gb|AAO64926.1| At5g27400 [Arabidopsis
  misc_feature (40)..(258): Homolog of NCBI NO: 28829124 NR Description: similar to putative protein; protein id:
  misc_feature (37)..(170): Homolog of NCBI NO: 14585877 NR Description: hypothetical protein SB153 [Homo sapiens]
  misc_feature (37)..(170): Homolog of NCBI NO: 14603247 NR Description: Similar to RIKEN cDNA 5730409G15 gene [Homo
  misc_feature (37)..(170): Homolog of NCBI NO: 37541807 NR Description: similar to hypothetical protein FLJ10661 [Homo
  misc_feature (37)..(170): Homolog of NCBI NO: 30149259 NR Description: similar to CG7889-PA [Homo sapiens]
  misc_feature (37)..(173): Homolog of NCBI NO: 29835170 NR Description: Unknown (protein for MGC:59002) [Mus musculus]
  misc_feature (37)..(170): Homolog of NCBI NO: 37549678 NR Description: similar to CG7889-PA [Homo sapiens]
  misc_feature (37)..(170): Homolog of NCBI NO: 37543704 NR Description: similar to CG7889-PA [Homo sapiens]
  misc_feature (37)..(173): Homolog of NCBI NO: 26383095 NR Description: unnamed protein product [Mus musculus]
MCFADLLCGLGSYKHPSCPRSRKLVIPLHCSLNMLEGDTGCSIWPSSLFLSEFVLSFPELFANKACFEVGSGVGMVGICLAHVKAKEVILTDGDLLTLSNMKLNLERNHLNYDDEFLKQPGEAQSTRVKCTHLPWETASESELSQYRPDIVLGADVIYDPSCLPHLLRVLVALLKNPPKRGNGSLETEDRDTTQEEHSPAVAYIASVIRNVDTFNVCLTLADQMDLSITDVTAELTPRFELLPYMHSYDRSTVRLFSISSR

SEQ ID NO: 86633 - protein, 228 aa, Arabidopsis thaliana; identical to SEQ ID NO: 82155
  peptide (1)..(228): Ceres Seq. ID no. 12692225
  misc_feature (1)..(228): Homolog of NCBI NO: 15240919 NR Description: putative protein; protein id: At5g27400.1 thaliana] >gi|29029094|gb|AAO64926.1| At5g27400 [Arabidopsis
  misc_feature (7)..(225): Homolog of NCBI NO: 28829124 NR Description: similar to putative protein; protein id:
  misc_feature (4)..(137): Homolog of NCBI NO: 14585877 NR Description: hypothetical protein SB153 [Homo sapiens]
  misc_feature (4)..(137): Homolog of NCBI NO: 14603247 NR Description: Similar to RIKEN cDNA 5730409G15 gene [Homo
  misc_feature (4)..(137): Homolog of NCBI NO: 37541807 NR Description: similar to hypothetical protein FLJ10661 [Homo
  misc_feature (4)..(137): Homolog of NCBI NO: 30149259 NR Description: similar to CG7889-PA [Homo sapiens]
  misc_feature (4)..(140): Homolog of NCBI NO: 29835170 NR Description: Unknown (protein for MGC:59002) [Mus musculus]
  misc_feature (4)..(137): Homolog of NCBI NO: 37549678 NR Description: similar to CG7889-PA [Homo sapiens]
  misc_feature (4)..(137): Homolog of NCBI NO: 37543704 NR Description: similar to CG7889-PA [Homo sapiens]
  misc_feature (4)..(140): Homolog of NCBI NO: 26383095 NR Description: unnamed protein product [Mus musculus]

SEQ ID NO: 86634 - DNA, 849 bp, Arabidopsis thaliana
  misc_feature (1)..(849): Ceres Seq. ID no. 12692239
  misc_feature: MA Experiment ID: 20000171 Result: Up-regulated in Transcription
  misc_feature: MA Experiment 20000171 PARAMETER Experiment Name: At_42deg_Heat_P Parameter: Age (day) Value: 14
  misc_feature: MA Experiment 20000171 PARAMETER Experiment Name: At_42deg_Heat_P Parameter: Organism Value: A. thaliana
  misc_feature: MA Experiment 20000171 PARAMETER Experiment Name: At_42deg_Heat_P Parameter: Plant Line Value: WS
  misc_feature: MA Experiment 20000171 PARAMETER Experiment Name: At_42deg_Heat_P Parameter: Temperature (deg C) Value: 42 vs. 22
  misc_feature: MA Experiment 20000171 PARAMETER Experiment Name: At_42deg_Heat_P Parameter: Timepoint (hr) Value: 1
  misc_feature: MA Experiment 20000171 PARAMETER Experiment Name: At_42deg_Heat_P Parameter: Tissue Value: Aerial
  misc_feature: MA Experiment ID: 20000180 Result: Up-regulated in Transcription
  misc_feature: MA Experiment 20000180 PARAMETER Experiment Name: At_Germinating_Seeds_P Parameter: Age (hr) Value: 24 vs. 0
  misc_feature: MA Experiment 20000180 PARAMETER Experiment Name: At_Germinating_Seeds_P Parameter: Tissue Value: Germinating Seeds
atgatgatgtccggtggaagctacacgaacatcgatcaccagaaagtttctggatctgtacccgctgttccagatcctggacatgtcaccgtcaaattcgcagactcaaatctacaaacgtttcctccatctgctactcagggaaagatttctggtggtactaatcctcctcgagatgctgacgatacattttcgaggcctgtgaatggtactacagatgaacctcagtctagtggttggcttcatagattcactgttggtgcttacaagccttactttgatgtggacacttcagatgtcgtagagagactcaaagaatcgctctttccgtttagaggaacatttacggaaaagacagccaacaaccctgatttgtacgggccattctggatatgcacaacattgatctttgtagcagcatccataggaacatttgttacatacatagcacacaaattgaagaaacaggaatggaactacgatattaatctggtgacttggtctgcaggagttttctacggttatgtaactattgtccctctcgcattatacgttgttctcaagtacttctctgcaccatcaggcttagtccaactcttctgtctatacggatattccctattcgtcttcatccctgcattgtgtctctctgttgtgccattagagatcttcagatgggttattgcgggtttagctggattcatgtctgctacatttgtagcattgaatctcaaagcacatattaactctgcaggagagagatggttcttgattgtggtcagcatatttcttctacagctcgctctctcagtagtgctgaagctatatctgttcactgtcaccgtataa

SEQ ID NO: 86635 - protein, 282 aa, Arabidopsis thaliana
  peptide (1)..(282): Ceres Seq. ID no. 12692240
  misc_feature (93)..(258): Pfam Name: Yip1 domain Pfam Description: Yip1 domain
  misc_feature (1)..(282): Homolog of NCBI NO: 30690667 NR Description: expressed protein [Arabidopsis thaliana]
  misc_feature (1)..(282): Homolog of NCBI NO: 38564308 NR Description: At5g27490 [Arabidopsis thaliana]
  misc_feature (2)..(282): Homolog of NCBI NO: 30679454 NR Description: expressed protein [Arabidopsis thaliana] unknown protein [Arabidopsis thaliana]
  misc_feature (3)..(282): Homolog of NCBI NO: 6729038 NR Description: unknown protein [Arabidopsis thaliana]
  misc_feature (2)..(282): Homolog of NCBI NO: 34912560 NR Description: P0410E03.18 [Oryza sativa (japonica
  misc_feature (7)..(278): Homolog of NCBI NO: 30688039 NR Description: expressed protein [Arabidopsis thaliana] unknown protein [Arabidopsis thaliana]
  misc_feature (18)..(278): Homolog of NCBI NO: 40786465 NR Description: similar to RIKEN cDNA C030002N13 [Rattus >gi|38328251|gb|AAH62239.1| Similar to RIKEN cDNA C030002N13
  misc_feature (37)..(278): Homolog of NCBI NO: 40740298 NR Description: hypothetical protein AN4017.2 [Aspergillus
  misc_feature (84)..(278): Homolog of NCBI NO: 21704084 NR Description: RIKEN cDNA C030002N13 [Mus musculus] Similar to hypothetical protein [Mus musculus]
  misc_feature (84)..(278): Homolog of NCBI NO: 10092643 NR Description: hypothetical protein DJ167A19.1 [Homo sapiens]
MMMSGGSYTNIDHQKVSGSVPAVPDPGHVTVKFADSNLQTFPPSATQGKISGGTNPPRDADDTFSRPVNGTTDEPQSSGWLHRFTVGAYKPYFDVDTSDVVERLKESLFPFRGTFTEKTANNPDLYGPFWICTTLIFVAASIGTFVTYIAHKLKKQEWNYDINLVTWSAGVFYGYVTIVPLALYVVLKYFSAPSGLVQLFCLYGYSLFVFIPALCLSVVPLEIFRWVIAGLAGFMSATFVALNLKAHINSAGERWFLIVVSIFLLQLALSVVLKLYLFTVTV

SEQ ID NO: 86636 - protein, 281 aa, Arabidopsis thaliana
  peptide (1)..(281): Ceres Seq. ID no. 12692241
  misc_feature (92)..(257): Pfam Name: Yip1 domain Pfam Description: Yip1 domain
  misc_feature (1)..(281): Homolog of NCBI NO: 30690667 NR Description: expressed protein [Arabidopsis thaliana]
  misc_feature (1)..(281): Homolog of NCBI NO: 38564308 NR Description: At5g27490 [Arabidopsis thaliana]
  misc_feature (1)..(281): Homolog of NCBI NO: 30679454 NR Description: expressed protein [Arabidopsis thaliana] unknown protein [Arabidopsis thaliana]
  misc_feature (2)..(281): Homolog of NCBI NO: 6729038 NR Description: unknown protein [Arabidopsis thaliana]
  misc_feature (1)..(281): Homolog of NCBI NO: 34912560 NR Description: P0410E03.18 [Oryza sativa (japonica
  misc_feature (6)..(277): Homolog of NCBI NO: 30688039 NR Description: expressed protein [Arabidopsis thaliana] unknown protein [Arabidopsis thaliana]
  misc_feature (17)..(277): Homolog of NCBI NO: 40786465 NR Description: similar to RIKEN cDNA C030002N13 [Rattus >gi|38328251|gb|AAH62239.1| Similar to RIKEN cDNA C030002N13
  misc_feature (36)..(277): Homolog of NCBI NO: 40740298 NR Description: hypothetical protein AN4017.2 [Aspergillus
  misc_feature (83)..(277): Homolog of NCBI NO: 21704084 NR Description: RIKEN cDNA C030002N13 [Mus musculus] Similar to hypothetical protein [Mus musculus]
  misc_feature (83)..(277): Homolog of NCBI NO: 10092643 NR Description: hypothetical protein DJ167A19.1 [Homo sapiens]
MMSGGSYTNIDHQKVSGSVPAVPDPGHVTVKFADSNLQTFPPSATQGKISGGTNPPRDADDTFSRPVNGTTDEPQSSGWLHRFTVGAYKPYFDVDTSDVVERLKESLFPFRGTFTEKTANNPDLYGPFWICTTLIFVAASIGTFVTYIAHKLKKQEWNYDINLVTWSAGVFYGYVTIVPLALYVVLKYFSAPSGLVQLFCLYGYSLFVFIPALCLSVVPLEIFRWVIAGLAGFMSATFVALNLKAHINSAGERWFLIVVSIFLLQLALSVVLKLYLFTVTV

SEQ ID NO: 86637 - protein, 280 aa, Arabidopsis thaliana
  peptide (1)..(280): Ceres Seq. ID no. 12692242
  misc_feature (91)..(256): Pfam Name: Yip1 domain Pfam Description: Yip1 domain
  misc_feature (1)..(280): Homolog of NCBI NO: 30690667 NR Description: expressed protein [Arabidopsis thaliana]
  misc_feature (1)..(280): Homolog of NCBI NO: 38564308 NR Description: At5g27490 [Arabidopsis thaliana]
  misc_feature (1)..(280): Homolog of NCBI NO: 30679454 NR Description: expressed protein [Arabidopsis thaliana] unknown protein [Arabidopsis thaliana]
  misc_feature (1)..(280): Homolog of NCBI NO: 6729038 NR Description: unknown protein [Arabidopsis thaliana]
  misc_feature (1)..(280): Homolog of NCBI NO: 34912560 NR Description: P0410E03.18 [Oryza sativa (japonica
  misc_feature (5)..(276): Homolog of NCBI NO: 30688039 NR Description: expressed protein [Arabidopsis thaliana] unknown protein [Arabidopsis thaliana]
  misc_feature (16)..(276): Homolog of NCBI NO: 40786465 NR Description: similar to RIKEN cDNA C030002N13 [Rattus >gi|38328251|gb|AAH62239.1| Similar to RIKEN cDNA C030002N13
  misc_feature (35)..(276): Homolog of NCBI NO: 40740298 NR Description: hypothetical protein AN4017.2 [Aspergillus
  misc_feature (82)..(276): Homolog of NCBI NO: 21704084 NR Description: RIKEN cDNA C030002N13 [Mus musculus] Similar to hypothetical protein [Mus musculus]
  misc_feature (82)..(276): Homolog of NCBI NO: 10092643 NR Description: hypothetical protein DJ167A19.1 [Homo sapiens]
MSGGSYTNIDHQKVSGSVPAVPDPGHVTVKFADSNLQTFPPSATQGKISGGTNPPRDADDTFSRPVNGTTDEPQSSGWLHRFTVGAYKPYFDVDTSDVVERLKESLFPFRGTFTEKTANNPDLYGPFWICTTLIFVAASIGTFVTYIAHKLKKQEWNYDINLVTWSAGVFYGYVTIVPLALYVVLKYFSAPSGLVQLFCLYGYSLFVFIPALCLSVVPLEIFRWVIAGLAGFMSATFVALNLKAHINSAGERWFLIVVSIFLLQLALSVVLKLYLFTVTV

SEQ ID NO: 86638 - DNA, 2019 bp, Arabidopsis thaliana
  misc_feature (1)..(2019): Ceres Seq. ID no. 12692264
  misc_feature: MA Experiment ID: 20000234 Result: Up-regulated in Transcription
  misc_feature: MA Experiment 20000234 PARAMETER Experiment Name: At_Siliques_P Parameter: Age (day) Value: 21
  misc_feature: MA Experiment 20000234 PARAMETER Experiment Name: At_Siliques_P Parameter: Organism Value: A. thaliana
  misc_feature: MA Experiment 20000234 PARAMETER Experiment Name: At_Siliques_P Parameter: Plant Line Value: WS
  misc_feature: MA Experiment 20000234 PARAMETER Experiment Name: At_Siliques_P Parameter: Tissue Value: Less Than 5mm Siliques vs. Whole Plant
  misc_feature: MA Experiment ID: 20000264 Result: Up-regulated in Transcription
  misc_feature: MA Experiment 20000264 PARAMETER Experiment Name: At_Open_Flower_P Parameter: Age (day) Value: 21
  misc_feature: MA Experiment 20000264 PARAMETER Experiment Name: At_Open_Flower_P Parameter: Plant Line Value: WS
  misc_feature: MA Experiment 20000264 PARAMETER Experiment Name: At_Open_Flower_P Parameter: Tissue Value: Open Flower vs. Whole Plant
  misc_feature: MA Experiment ID: 20000265 Result: Up-regulated in Transcription
  misc_feature: MA Experiment 20000265 PARAMETER Experiment Name: At_Open_Flower_P Parameter: Age (day) Value: 21
  misc_feature: MA Experiment 20000265 PARAMETER Experiment Name: At_Open_Flower_P Parameter: Plant Line Value: WS
  misc_feature: MA Experiment 20000265 PARAMETER Experiment Name: At_Open_Flower_P Parameter: Tissue Value: Closed Flower vs. Whole Plant
  misc_feature: MA Experiment ID: 20000286 Result: Up-regulated in Transcription
  misc_feature: MA Experiment 20000286 PARAMETER Experiment Name: At_Open_Flower_P Parameter: Age (day) Value: 21
  misc_feature: MA Experiment 20000286 PARAMETER Experiment Name: At_Open_Flower_P Parameter: Plant Line Value: WS
  misc_feature: MA Experiment 20000286 PARAMETER Experiment Name: At_Open_Flower_P Parameter: Tissue Value: Half Open vs. Whole Plant
  misc_feature: MA Experiment ID: 20000437 Result: Down-regulated in Transcription
  misc_feature: MA Experiment 20000437 PARAMETER Experiment Name: At_Drought_P Parameter: Age (day) Value: 8
  misc_feature: MA Experiment 20000437 PARAMETER Experiment Name: At_Drought_P Parameter: Organism Value: A. thaliana
  misc_feature: MA Experiment 20000437 PARAMETER Experiment Name: At_Drought_P Parameter: Plant Line Value: WS
  misc_feature: MA Experiment 20000437 PARAMETER Experiment Name: At_Drought_P Parameter: Timepoint (hr) Value: 24
  misc_feature: MA Experiment 20000437 PARAMETER Experiment Name: At_Drought_P Parameter: Tissue Value: Whole Plant
  misc_feature: MA Experiment 20000437 PARAMETER Experiment Name: At_Drought_P Parameter: Treatment Value: Drought vs. No Drought
  misc_feature: MA Experiment ID: 20000495 Result: Up-regulated in Transcription
  misc_feature: MA Experiment 20000495 PARAMETER Experiment Name: At_Guard_Cells_P Parameter: Harvest Date Value: 8/2/2002
  misc_feature: MA Experiment 20000495 PARAMETER Experiment Name: At_Guard_Cells_P Parameter: Organism Value: A. thaliana
  misc_feature: MA Experiment 20000495 PARAMETER Experiment Name: At_Guard_Cells_P Parameter: Tissue Value: Guard Cells vs. Leaves
atgcctcaacgtgttttaatggaagctactaagcttggagctcttgaaaaacagtacttggaagagtcatcagagaggaaacgattatacaatgaagtgatcgaactcaagggaaatatcagagtcttttgcagatgcagacctctaaaccaagctgaaatagccaatggttgtgcttctgtagctgagtttgatacaacacaggaaaacgagctccagatactttcatctgattcctccaagaagcattttaaatttgaccatgtctttaagcctgacgatggccaagagactgtttttgcacagacaaaacctatagttacttcggtgctggatgggtataatgtctgcatatttgcctatggccaaacgggaactggcaagacatttaccatggagggaacaccagagaatagaggagtgaactataggaccttagaagaactatttcgctgttcagaaagcaaaagtcatctcatgaagtttgagctatcagttagcatgttggaggtttataatgagaagataagggacctcttggtagataactcaaaccagccccctaaaaagttggaggttaagcaatcagcagaagggacgcaagaagtcccaggattagtcgaagctcaagtttacaatacagatggagtgtgggatctgctcaagaaaggatatgctgttcgatctgtgggttcaactgctgcaaatgagcaaagcagccgctctcattgcttgctgcgagtgacagtgaagggagagaatttgataaatggtcagagaacgagaagtcatctttggttagtggacttggctggcagtgagcgagtaggaaaggtagaagttgaaggagaaaggctgaaagaatctcaatttatcaataagtcgctttcagcactcggtgatgttatctctgcccttgcatccaaaacaagccacattccttacagaaactcaaagctgacccatatgctgcaaaactctttgggtggagattgcaagacattaatgtttgtccagattagtccgagttctgccgatctaggagagaccctttgctccttgaactttgcaagtagagtccgaggaatcgaaagtggacctgcccgaaaacaggctgatgtctctgaactccttaagtcaaaacaaatggccgagaagctgaaacacgaggaaaaggaaacaaagaagctgcaggacaatgtgcagtcactacagctacgcctcactgctagagaacacatatgccgaggacttcaagataaggttcgagatctggaatttcaactagcagaagaaagaaagaccagaatcaagcaggagtcacgagctctagcaactgcatcatcaacaacaacaacaacatctagacatctgagagagacactaccgacaattatagagaaaaaaccgcctttggctccaacaagaatgcgaatgccactcagaaggatcacaaacttcatgccccaacaacaaccatctcagggtcattctaagagattctcagacacaacattcaaagagaataataacagcaacagaagatcatcatctatggacgtgaatacactaatgaaaccaagaagaagctccatcgcattcaggccagctcctgctccatcagccattgcttcaagcaataaaaccatcatgcccagaaggagagtctcaattgcaacgctaagaccagaaccatcatcattatcatctatggaaactccatcacgccctcctccttcattccgtggtgacccgagaaaggcaagatactctaaactcttctctccagaccgcaatctggtgactccgaatgcaatgaaaagcagcagattcatgaagagccctcttggaggaggaggcagctcgtggaagccaagccatccgacagtgattgcattgcagaagaaggcggtggtgtggagtccccttaagttcaagaacagaagaccttccctcgtagcgatacgatcttctgcttcttcttcttccgcctctgacttgcttcggagggaacaatag

SEQ ID NO: 86639 - protein, 672 aa, Arabidopsis thaliana
  peptide (1)..(672): Ceres Seq. ID no. 12692265
  misc_feature (1)..(425): Homolog of NCBI NO: 15240982 NR Description: kinesin-related protein; protein id: At5g27550.1
  misc_feature (4)..(577): Homolog of NCBI NO: 15218418 NR Description: kinesin-related protein; protein id: At1g72250.1
  misc_feature (15)..(440): Homolog of NCBI NO: 27476088 NR Description: Hypothetical protein [Oryza sativa (japonica
  misc_feature (15)..(435): Homolog of NCBI NO: 15227252 NR Description: kinesin-related protein; protein id: At2g22610.1
  misc_feature (25)..(401): Homolog of NCBI NO: 28393382 NR Description: putative kinesin [Arabidopsis thaliana]
  misc_feature (17)..(388): Homolog of NCBI NO: 18421069 NR Description: kinesin-related protein; protein id: At5g27000.1
  misc_feature (17)..(388): Homolog of NCBI NO: 11358474 NR Description: kinesin-like heavy chain [validated] -
  misc_feature (3)..(506): Homolog of NCBI NO: 30692267 NR Description: kinesin-related protein [Arabidopsis thaliana]
  misc_feature (3)..(506): Homolog of NCBI NO: 18201934 NR Description: kinesin-like protein heavy chain [Arabidopsis
  misc_feature (11)..(414): Homolog of NCBI NO: 12324217 NR Description: kinesin-related protein; 103921-99132
MPQRVLMEATKLGALEKQYLEESSERKRLYNEVIELKGNIRVFCRCRPLNQAEIANGCASVAEFDTTQENELQILSSDSSKKHFKFDHVFKPDDGQETVFAQTKPIVTSVLDGYNVCIFAYGQTGTGKTFTMEGTPENRGVNYRTLEELFRCSESKSHLMKFELSVSMLEVYNEKIRDLLVDNSNQPPKKLEVKQSAEGTQEVPGLVEAQVYNTDGVWDLLKKGYAVRSVGSTAANEQSSRSHCLLRVTVKGENLINGQRTRSHLWLVDLAGSERVGKVEVEGERLKESQFINKSLSALGDVISALASKTSHIPYRNSKLTHMLQNSLGGDCKTLMFVQISPSSADLGETLCSLNFASRVRGIESGPARKQADVSELLKSKQMAEKLKHEEKETKKLQDNVQSLQLRLTAREHICRGLQDKVRDLEFQLAEERKTRIKQESRALATASSTTTTTSRHLRETLPTIIEKKPPLAPTRMRMPLRRITNFMPQQQPSQGHSKRFSDTTFKENNNSNRRSSSMDVNTLMKPRRSSIAFRPAPAPSAIASSNKTIMPRRRVSIATLRPEPSSLSSMETPSRPPPSFRGDPRKARYSKLFSPDRNLVTPNAMKSSRFMKSPLGGGGSSWKPSHPTVIALQKKAVVWSPLKFKNRRPSLVAIRSSASSSSASDLLRREQ

SEQ ID NO: 86640 - protein, 666 aa, Arabidopsis thaliana
  peptide (1)..(666): Ceres Seq. ID no. 12692266
  misc_feature (1)..(419): Homolog of NCBI NO: 15240982 NR Description: kinesin-related protein; protein id: At5g27550.1
  misc_feature (1)..(571): Homolog of NCBI NO: 15218418 NR Description: kinesin-related protein; protein id: At1g72250.1
  misc_feature (9)..(434): Homolog of NCBI NO: 27476088 NR Description: Hypothetical protein [Oryza sativa (japonica
  misc_feature (9)..(429): Homolog of NCBI NO: 15227252 NR Description: kinesin-related protein; protein id: At2g22610.1
  misc_feature (19)..(395): Homolog of NCBI NO: 28393382 NR Description: putative kinesin [Arabidopsis thaliana]
  misc_feature (11)..(382): Homolog of NCBI NO: 18421069 NR Description: kinesin-related protein; protein id: At5g27000.1
  misc_feature (11)..(382): Homolog of NCBI NO: 11358474 NR Description: kinesin-like heavy chain [validated] -
  misc_feature (1)..(500): Homolog of NCBI NO: 30692267 NR Description: kinesin-related protein [Arabidopsis thaliana]
  misc_feature (1)..(500): Homolog of NCBI NO: 18201934 NR Description: kinesin-like protein heavy chain [Arabidopsis
  misc_feature (5)..(408): Homolog of NCBI NO: 12324217 NR Description: kinesin-related protein; 103921-99132
MEATKLGALEKQYLEESSERKRLYNEVIELKGNIRVFCRCRPLNQAEIANGCASVAEFDTTQENELQILSSDSSKKHFKFDHVFKPDDGQETVFAQTKPIVTSVLDGYNVCIFAYGQTGTGKTFTMEGTPENRGVNYRTLEELFRCSESKSHLMKFELSVSMLEVYNEKIRDLLVDNSNQPPKKLEVKQSAEGTQEVPGLVEAQVYNTDGVWDLLKKGYAVRSVGSTAANEQSSRSHCLLRVTVKGENLINGQRTRSHLWLVDLAGSERVGKVEVEGERLKESQFINKSLSALGDVISALASKTSHIPYRNSKLTHMLQNSLGGDCKTLMFVQISPSSADLGETLCSLNFASRVRGIESGPARKQADVSELLKSKQMAEKLKHEEKETKKLQDNVQSLQLRLTAREHICRGLQDKVRDLEFQLAEERKTRIKQESRALATASSTTTTTSRHLRETLPTIIEKKPPLAPTRMRMPLRRITNFMPQQQPSQGHSKRFSDTTFKENNNSNRRSSSMDVNTLMKPRRSSIAFRPAPAPSAIASSNKTIMPRRRVSIATLRPEPSSLSSMETPSRPPPSFRGDPRKARYSKLFSPDRNLVTPNAMKSSRFMKSPLGGGGSSWKPSHPTVIALQKKAVVWSPLKFKNRRPSLVAIRSSASSSSASDLLRREQ

SEQ ID NO: 86641 - protein, 541 aa, Arabidopsis thaliana
  peptide (1)..(541): Ceres Seq. ID no. 12692267
  misc_feature (1)..(294): Homolog of NCBI NO: 15240982 NR Description: kinesin-related protein; protein id: At5g27550.1
  misc_feature (1)..(446): Homolog of NCBI NO: 15218418 NR Description: kinesin-related protein; protein id: At1g72250.1
  misc_feature (1)..(309): Homolog of NCBI NO: 27476088 NR Description: Hypothetical protein [Oryza sativa (japonica
  misc_feature (1)..(304): Homolog of NCBI NO: 15227252 NR Description: kinesin-related protein; protein id: At2g22610.1
  misc_feature (1)..(270): Homolog of NCBI NO: 28393382 NR Description: putative kinesin [Arabidopsis thaliana]
  misc_feature (1)..(257): Homolog of NCBI NO: 18421069 NR Description: kinesin-related protein; protein id: At5g27000.1
  misc_feature (1)..(257): Homolog of NCBI NO: 11358474 NR Description: kinesin-like heavy chain [validated] -
  misc_feature (1)..(375): Homolog of NCBI NO: 30692267 NR Description: kinesin-related protein [Arabidopsis thaliana]
  misc_feature (1)..(375): Homolog of NCBI NO: 18201934 NR Description: kinesin-like protein heavy chain [Arabidopsis
  misc_feature (1)..(283): Homolog of NCBI NO: 12324217 NR Description: kinesin-related protein; 103921-99132
MEGTPENRGVNYRTLEELFRCSESKSHLMKFELSVSMLEVYNEKIRDLLVDNSNQPPKKLEVKQSAEGTQEVPGLVEAQVYNTDGVWDLLKKGYAVRSVGSTAANEQSSRSHCLLRVTVKGENLINGQRTRSHLWLVDLAGSERVGKVEVEGERLKESQFINKSLSALGDVISALASKTSHIPYRNSKLTHMLQNSLGGDCKTLMFVQISPSSADLGETLCSLNFASRVRGIESGPARKQADVSELLKSKQMAEKLKHEEKETKKLQDNVQSLQLRLTAREHICRGLQDKVRDLEFQLAEERKTRIKQESRALATASSTTTTTSRHLRETLPTIIEKKPPLAPTRMRMPLRRITNFMPQQQPSQGHSKRFSDTTFKENNNSNRRSSSMDVNTLMKPRRSSIAFRPAPAPSAIASSNKTIMPRRRVSIATLRPEPSSLSSMETPSRPPPSFRGDPRKARYSKLFSPDRNLVTPNAMKSSRFMKSPLGGGGSSWKPSHPTVIALQKKAVVWSPLKFKNRRPSLVAIRSSASSSSASDLLRREQ

SEQ ID NO: 86642 - DNA, 3033 bp, Arabidopsis thaliana
  misc_feature (1)..(3033): Ceres Seq. ID no. 12692277
  misc_feature: MA Experiment ID: 20001451 Result: Up-regulated in Transcription
  misc_feature: MA Experiment 20001451 PARAMETER Experiment Name: At_Far-red-induction_P Parameter: Age (day) Value: 7
  misc_feature: MA Experiment 20001451 PARAMETER Experiment Name: At_Far-red-induction_P Parameter: Light Value: Far-red vs. White
  misc_feature: MA Experiment 20001451 PARAMETER Experiment Name: At_Far-red-induction_P Parameter: Organism Value: A. thaliana
  misc_feature: MA Experiment 20001451 PARAMETER Experiment Name: At_Far-red-induction_P Parameter: Plant Line Value: Columbia
  misc_feature: MA Experiment 20001451 PARAMETER Experiment Name: At_Far-red-induction_P Parameter: Timepoint (hr) Value: 24
  misc_feature: MA Experiment 20001451 PARAMETER Experiment Name: At_Far-red-induction_P Parameter: Tissue Value: Whole Plant
atggcgcctactaggaagtcgaagagtgtgaacaagcgtttcaccaatgaagcgtctccagatatcaattttgggagcgcaagcaaaaccaagcaaagaaagaagaaattggctgataagctgggacctcagtggaccaaaagggagcttgtgcgtttctatgatgcttataggaagtatgtgggagactggaaaaaggtagctgctgcagtacggaataaccggtctgttgagatggtcgaaacactcttttgtatgaatcgggcatacttatccttgcccgagggaactgcttctgtagctggccttattgcaatgatgactgatcactacagcgtcatggaggggagcgaaagtgaaggagaagaccatgatgcttctgaggtaacgaggaaacatctgaagcgcaaacgtcctcaagttctgcctagtgattttcgagaagaagttgttccaccacattcagttgcatcagtagaaggatgtctctcattcttgaagcagacacaagcttatgaaaaaaggcaacgggccactggaaaacgtacacctcggtttcttgtcgcaattacacatgagagggatgatatagaagattttagtccaccaaataaaagagccaagaaacaacttgatgccgatgatgatgcatcaagaaggggaggagggtctccatacagaagaaaagaactcagtgaaatcacaccaactaggcttaggaaaacgtcacaagcacaggaagcacaattcaagcaccctgatagttccatgtttgagaatggggtgagagatagatggcataaaaagggagctgctgatagagatggtgccttgttgatggatatggaaggacttgttacccaaaaggaaaaaattgtgagagttgaagaagcagaaggaaattattctgatgatgatgatggattaggagctctgaagacattggctgaaatgtcagcttcactggctccggctggtttgttggaatcagaatcatctccacactgggaagaagaaagaaaaactaacaacgtggataagaaatctaacactctggaaaccgtgtcaacaagccatcacagagaaaaagcaaaacaagcaggactagaagataatctcctgcatgcaatttcagcccctgataaaagaaaaccgaagtctgtgccggaatccgttgatggtaatgttgtttccatcgaggagcttcgcacttcaagcagaaaacgtaaaccaaaggtgctagatgttgtagctccaaaagagtctacacaggacaaatctctatatactaaggaatcggctgaagttgatagtttgaagactcccgtcaaagcaagacgttctagtcaaggtccagcaaaacagctgaaaactgcaaagaccacggtagaatcttcttcagctagtgataagaaaataactggaccggatgcagtagtgccagctacacaagtttcagcttcgggtccagagactttgccacagaaaccaccaaacaggcgtaagataagtttgaagaaaagtttacaagaaagagctaaatctttagaaaccactcatgacaaaccacgtagtttcaaaaaactttcagaacatgaattactacaggagaagttgtcaaattgtctgtcatatccattggtacgtcgatggtgcatatatgaatggttctacagtgctattgactatccctggtttgcaaagatggagttcactgattatctaaatcatgtggggcttggtcacgctccaagacttactcgtgttgaatggagtgtcattaaaagttctctcggtagacctcggagattgtctcagagattcctacaggatgagcgggataaactccaagaatatcgtgagtctgtgagaaagcattatacagagctgcgtggatgtgctacgggagtgcttcatacagatttggcccgtcctttatcagtcgggaatagagtgattgccatccatcctaaaacacgggagattcgtgatggcaagattcttactgtggatcataacaagtgcaacgttctctttgatgaattgggtgtcgagttagttatggacattgactgcatgcctttaaatccattggaatacatgccagagggtctaaggaggcaaattgataagtgcttggctatatgcaaagaagcaaggcttaacagacacccaagctctgatgcatctgttctgttctctccttctgtgcttgaaaatgtcaacttttccatgaatcctcctcctgcgaaacaggatgatatcagagagccagttttgtatggtaaagtaatagcaaccaacactactgatcaatctatcgtaatcaatagcaaagtaacaggaacagaaattcaacggactctggcactgcagcatacttccgatgcgcagctacagaaattcttttctcatgattctgctttccaggaaatggagccagaaatgattgaaattgtcattgaatcaaagtcaatagcgcaagcaatggtggatgcagctataaaggctgcatcgtcggggaagaacaatgaagactcagagaatatggttcaccaagctttaagctccattggcgaacatcagccattagacaactctatagtgcctggtatcaagcatcaagagtataccaatggcagcttggatcatcattccttaaacacagcagagccgatgagtaacggtttcatctcacaggaaggatcaggaaaaaacaaaacaccaatgccttcagagcttatcacctcttgtgttgcatcttggctcatgatgcagatgatctcaaagaagcagtacccaccagcagatgtggctcagctaatggatacagtagtgaatgacttgcagccacggtgtccacagaatatgccgatatacagagaaattcaaacttgtatgggattgatcaagactcaaataatggctcttgatctgaaacctgaacagatacctgaaatatcgaaactcaaacggatacatgttcaatatcaggtttcaattaaatttgagaaccagcccgaacccgaatag

SEQ ID NO: 86643 - protein, 1010 aa, Arabidopsis thaliana
  peptide (1)..(1010): Ceres Seq. ID no. 12692278
  misc_feature (42)..(88): Pfam Name: Myb-like DNA-binding domain Pfam Description: Myb-like DNA-binding domain
  misc_feature (311)..(977): Homolog of NCBI NO: 15229976 NR Description: unknown protein; protein id: At3g05380.1 thaliana] >gi|7596773|gb|AAF64544.1| unknown protein [Arabidopsis
  misc_feature (311)..(977): Homolog of NCBI NO: 19347724 NR Description: unknown protein [Arabidopsis thaliana]
  misc_feature (1)..(216): Homolog of NCBI NO: 9294690 NR Description: gene_id:MHC9.11~unknown protein [Arabidopsis
  misc_feature (491)..(707): Homolog of NCBI NO: 9294690 NR Description: gene_id:MHC9.11~unknown protein [Arabidopsis
  misc_feature (316)..(708): Homolog of NCBI NO: 34903510 NR Description: P0001B06.7 [Oryza sativa (japonica
  misc_feature (1)..(285): Homolog of NCBI NO: 34903510 NR Description: P0001B06.7 [Oryza sativa (japonica
  misc_feature (910)..(977): Homolog of NCBI NO: 34903510 NR Description: P0001B06.7 [Oryza sativa (japonica
  misc_feature (1)..(502): Homolog of NCBI NO: 6729048 NR Description: unknown protein, 3' partial [Arabidopsis thaliana]
  misc_feature (1)..(502): Homolog of NCBI NO: 15229976 NR Description: unknown protein; protein id: At3g05380.1 thaliana] >gi|7596773|gb|AAF64544.1| unknown protein [Arabidopsis
  misc_feature (243)..(707): Homolog of NCBI NO: 15233065 NR Description: unknown protein; protein id: At3g21430.1
MAPTRKSKSVNKRFTNEASPDINFGSASKTKQRKKKLADKLGPQWTKRELVRFYDAYRKYVGDWKKVAAAVRNNRSVEMVETLFCMNRAYLSLPEGTASVAGLIAMMTDHYSVMEGSESEGEDHDASEVTRKHLKRKRPQVLPSDFREEVVPPHSVASVEGCLSFLKQTQAYEKRQRATGKRTPRFLVAITHERDDIEDFSPPNKRAKKQLDADDDASRRGGGSPYRRKELSEITPTRLRKTSQAQEAQFKHPDSSMFENGVRDRWHKKGAADRDGALLMDMEGLVTQKEKIVRVEEAEGNYSDDDDGLGALKTLAEMSASLAPAGLLESESSPHWEEERKTNNVDKKSNTLETVSTSHHREKAKQAGLEDNLLHAISAPDKRKPKSVPESVDGNVVSIEELRTSSRKRKPKVLDVVAPKESTQDKSLYTKESAEVDSLKTPVKARRSSQGPAKQLKTAKTTVESSSASDKKITGPDAVVPATQVSASGPETLPQKPPNRRKISLKKSLQERAKSLETTHDKPRSFKKLSEHELLQEKLSNCLSYPLVRRWCIYEWFYSAIDYPWFAKMEFTDYLNHVGLGHAPRLTRVEWSVIKSSLGRPRRLSQRFLQDERDKLQEYRESVRKHYTELRGCATGVLHTDLARPLSVGNRVIAIHPKTREIRDGKILTVDHNKCNVLFDELGVELVMDIDCMPLNPLEYMPEGLRRQIDKCLAICKEARLNRHPSSDASVLFSPSVLENVNFSMNPPPAKQDDIREPVLYGKVIATNTTDQSIVINSKVTGTEIQRTLALQHTSDAQLQKFFSHDSAFQEMEPEMIEIVIESKSIAQAMVDAAIKAASSGKNNEDSENMVHQALSSIGEHQPLDNSIVPGIKHQEYTNGSLDHHSLNTAEPMSNGFISQEGSGKNKTPMPSELITSCVASWLMMQMISKKQYPPADVAQLMDTVVNDLQPRCPQNMPIYREIQTCMGLIKTQIMALDLKPEQIPEISKLKRIHVQYQVSIKFENQPEPE

SEQ ID NO: 86644 - protein, 932 aa, Arabidopsis thaliana
  peptide (1)..(932): Ceres Seq. ID no. 12692279
  misc_feature (233)..(899): Homolog of NCBI NO: 15229976 NR Description: unknown protein; protein id: At3g05380.1 thaliana] >gi|7596773|gb|AAF64544.1| unknown protein [Arabidopsis
  misc_feature (233)..(899): Homolog of NCBI NO: 19347724 NR Description: unknown protein [Arabidopsis thaliana]
  misc_feature (1)..(138): Homolog of NCBI NO: 9294690 NR Description: gene_id:MHC9.11~unknown protein [Arabidopsis
  misc_feature (413)..(629): Homolog of NCBI NO: 9294690 NR Description: gene_id:MHC9.11~unknown protein [Arabidopsis
  misc_feature (238)..(630): Homolog of NCBI NO: 34903510 NR Description: P0001B06.7 [Oryza sativa (japonica
  misc_feature (1)..(207): Homolog of NCBI NO: 34903510 NR Description: P0001B06.7 [Oryza sativa (japonica
  misc_feature (832)..(899): Homolog of NCBI NO: 34903510 NR Description: P0001B06.7 [Oryza sativa (japonica
  misc_feature (1)..(424): Homolog of NCBI NO: 6729048 NR Description: unknown protein, 3' partial [Arabidopsis thaliana]
  misc_feature (1)..(424): Homolog of NCBI NO: 15229976 NR Description: unknown protein; protein id: At3g05380.1 thaliana] >gi|7596773|gb|AAF64544.1| unknown protein [Arabidopsis
  misc_feature (165)..(629): Homolog of NCBI NO: 15233065 NR Description: unknown protein; protein id: At3g21430.1
MVETLFCMNRAYLSLPEGTASVAGLIAMMTDHYSVMEGSESEGEDHDASEVTRKHLKRKRPQVLPSDFREEVVPPHSVASVEGCLSFLKQTQAYEKRQRATGKRTPRFLVAITHERDDIEDFSPPNKRAKKQLDADDDASRRGGGSPYRRKELSEITPTRLRKTSQAQEAQFKHPDSSMFENGVRDRWHKKGAADRDGALLMDMEGLVTQKEKIVRVEEAEGNYSDDDDGLGALKTLAEMSASLAPAGLLESESSPHWEEERKTNNVDKKSNTLETVSTSHHREKAKQAGLEDNLLHAISAPDKRKPKSVPESVDGNVVSIEELRTSSRKRKPKVLDVVAPKESTQDKSLYTKESAEVDSLKTPVKARRSSQGPAKQLKTAKTTVESSSASDKKITGPDAVVPATQVSASGPETLPQKPPNRRKISLKKSLQERAKSLETTHDKPRSFKKLSEHELLQEKLSNCLSYPLVRRWCIYEWFYSAIDYPWFAKMEFTDYLNHVGLGHAPRLTRVEWSVIKSSLGRPRRLSQRFLQDERDKLQEYRESVRKHYTELRGCATGVLHTDLARPLSVGNRVIAIHPKTREIRDGKILTVDHNKCNVLFDELGVELVMDIDCMPLNPLEYMPEGLRRQIDKCLAICKEARLNRHPSSDASVLFSPSVLENVNFSMNPPPAKQDDIREPVLYGKVIATNTTDQSIVINSKVTGTEIQRTLALQHTSDAQLQKFFSHDSAFQEMEPEMIEIVIESKSIAQAMVDAAIKAASSGKNNEDSENMVHQALSSIGEHQPLDNSIVPGIKHQEYTNGSLDHHSLNTAEPMSNGFISQEGSGKNKTPMPSELITSCVASWLMMQMISKKQYPPADVAQLMDTVVNDLQPRCPQNMPIYREIQTCMGLIKTQIMALDLKPEQIPEISKLKRIHVQYQVSIKFENQPEPE

SEQ ID NO: 86645 - protein, 925 aa, Arabidopsis thaliana
  peptide (1)..(925): Ceres Seq. ID no. 12692280
  misc_feature (226)..(892): Homolog of NCBI NO: 15229976 NR Description: unknown protein; protein id: At3g05380.1 thaliana] >gi|7596773|gb|AAF64544.1| unknown protein [Arabidopsis
  misc_feature (226)..(892): Homolog of NCBI NO: 19347724 NR Description: unknown protein [Arabidopsis thaliana]
  misc_feature (1)..(131): Homolog of NCBI NO: 9294690 NR Description: gene_id:MHC9.11~unknown protein [Arabidopsis
  misc_feature (406)..(622): Homolog of NCBI NO: 9294690 NR Description: gene_id:MHC9.11~unknown protein [Arabidopsis
  misc_feature (231)..(623): Homolog of NCBI NO: 34903510 NR Description: P0001B06.7 [Oryza sativa (japonica
  misc_feature (1)..(200): Homolog of NCBI NO: 34903510 NR Description: P0001B06.7 [Oryza sativa (japonica
  misc_feature (825)..(892): Homolog of NCBI NO: 34903510 NR Description: P0001B06.7 [Oryza sativa (japonica
  misc_feature (1)..(417): Homolog of NCBI NO: 6729048 NR Description: unknown protein, 3' partial [Arabidopsis thaliana]
  misc_feature (1)..(417): Homolog of NCBI NO: 15229976 NR Description: unknown protein; protein id: At3g05380.1 thaliana] >gi|7596773|gb|AAF64544.1| unknown protein [Arabidopsis
  misc_feature (158)..(622): Homolog of NCBI NO: 15233065 NR Description: unknown protein; protein id: At3g21430.1
MNRAYLSLPEGTASVAGLIAMMTDHYSVMEGSESEGEDHDASEVTRKHLKRKRPQVLPSDFREEVVPPHSVASVEGCLSFLKQTQAYEKRQRATGKRTPRFLVAITHERDDIEDFSPPNKRAKKQLDADDDASRRGGGSPYRRKELSEITPTRLRKTSQAQEAQFKHPDSSMFENGVRDRWHKKGAADRDGALLMDMEGLVTQKEKIVRVEEAEGNYSDDDDGLGALKTLAEMSASLAPAGLLESESSPHWEEERKTNNVDKKSNTLETVSTSHHREKAKQAGLEDNLLHAISAPDKRKPKSVPESVDGNVVSIEELRTSSRKRKPKVLDVVAPKESTQDKSLYTKESAEVDSLKTPVKARRSSQGPAKQLKTAKTTVESSSASDKKITGPDAVVPATQVSASGPETLPQKPPNRRKISLKKSLQERAKSLETTHDKPRSFKKLSEHELLQEKLSNCLSYPLVRRWCIYEWFYSAIDYPWFAKMEFTDYLNHVGLGHAPRLTRVEWSVIKSSLGRPRRLSQRFLQDERDKLQEYRESVRKHYTELRGCATGVLHTDLARPLSVGNRVIAIHPKTREIRDGKILTVDHNKCNVLFDELGVELVMDIDCMPLNPLEYMPEGLRRQIDKCLAICKEARLNRHPSSDASVLFSPSVLENVNFSMNPPPAKQDDIREPVLYGKVIATNTTDQSIVINSKVTGTEIQRTLALQHTSDAQLQKFFSHDSAFQEMEPEMIEIVIESKSIAQAMVDAAIKAASSGKNNEDSENMVHQALSSIGEHQPLDNSIVPGIKHQEYTNGSLDHHSLNTAEPMSNGFISQEGSGKNKTPMPSELITSCVASWLMMQMISKKQYPPADVAQLMDTVVNDLQPRCPQNMPIYREIQTCMGLIKTQIMALDLKPEQIPEISKLKRIHVQYQVSIKFENQPEPE

SEQ ID NO: 86646 - DNA, 2007 bp, Arabidopsis thaliana
  misc_feature (1)..(2007): Ceres Seq. ID no. 12692285
  misc_feature: MA Experiment ID: 20000265 Result: Up-regulated in Transcription
  misc_feature: MA Experiment 20000265 PARAMETER Experiment Name: At_Open_Flower_P Parameter: Age (day) Value: 21
  misc_feature: MA Experiment 20000265 PARAMETER Experiment Name: At_Open_Flower_P Parameter: Plant Line Value: WS
  misc_feature: MA Experiment 20000265 PARAMETER Experiment Name: At_Open_Flower_P Parameter: Tissue Value: Closed Flower vs. Whole Plant
  misc_feature: MA Experiment ID: 20000794 Result: Up-regulated in Transcription
  misc_feature: MA Experiment 20000794 PARAMETER Experiment Name: At_Petals_P Parameter: Age (day) Value: 23-25 days
  misc_feature: MA Experiment 20000794 PARAMETER Experiment Name: At_Petals_P Parameter: Plant Line Value: WS
  misc_feature: MA Experiment 20000794 PARAMETER Experiment Name: At_Petals_P Parameter: Tissue Value: Petals vs. Whole plant
atggctcacatggtgagagcgagctctggcctttcttacccggagagattctacgccgccgcatcgtacgtcggcctcgacggatctcaatcgtcggtcaaacaactcagctccaaattctccaacgatacctctttgcttctctacacgttgcaccagcaggctactctaggaccttgtagtattccaaaaccgagtgcgtggaatccagtagagcaaagcaaatggaaaagttggcaggggcttggaaccatgccctccattgaggcaatgcgtctatttgtgaaaatcttggaggaagcagatcctggttggtatccaaggacatctaactctgttcttgaccctgctgtacatgtccaaatcaatagcacaaaggctgagcctagttttgagagtggagcttcatttggtgagacaaagacgattacttctgaggatgggcgcttgacagaaacgcaagataaagatgtagttttggaagacccagatactgtttctgtgtataatcagtggactgcaccacgaacatcaggtcagccaccaaaagcccgatatcagcatggagcagcggttattcaagataagatgtatatgtatggtggaaaccacaacggccgttatctaggtgatcttcatgttctggatttaaaaaactggacttggtcaagagttgaaaccaaggttgtgactggatcacaggaaacatcatctccagcaaaactaactcactgtgctggtcattctttgataccatgggataaccagcttttgtctatcggtggtcatacaaaagatccttcagaatccatgccagtgatggtctttgatctacattgctgttcatggtcaatcttaaagacatacgggaagccaccgatttcgcgtggaggtcagtcagtgacccttgtgggaaaaagcttggtgatatttggtggccaggatgcaaagagatcgcttctgaacgatttgcatatacttgatttagataccatgacctgggaggaaattgatgccgtgggttctcctccaactccaaggtctgatcatgctgctgcagtgcacgctgagcgttaccttctaatctttggtggaggatcacatgcaacttgttttgatgatctgcacgtccttgatctgcaaactatggaatggtcaagacatacacaacaaggtgacgcaccaactccacgtgctggacacgctggtgtgacgattggggaaaattggtatattgttggtggtggagataacaaaagcggggcatctaagactgttgtattaaatatgtcaactcttgcatggtcagttgtcacttcagtccaagaacatgtacctctcgctagtgagggattgagtttagttgtgagctcatacaatggagaagacatagtggttgcttttggtggatacaacggacattacaacaatgaagtgaatgttcttaaaccaagccacaaatcaagcttgaaatccaagattatgggagcttctgctgtgccagatagtttttccgctgttaataacgccacgactagagatattgagtctgagatcaaggtgagccaagaaggcaaagtaagggaaattgtcatggataatgttaactccagattaaaggttgaaggaaaagccgaccgcattatcacaacccttaaatccgaaaaagaagaagtggaggcatcactcaacaaggaaaagatacaaactctccaactaaaggaagagttagcagagatagacacacgaaatacagagttatacaaggaacttcaatctgtgcggaaccaacttgcagcggaacaatcaaggtgtttcaaactagaggttgaagttgcagagctaagacaaaagcttcagacaatggaaacacttcaaaaggaactcgaactcctccaacgtcaaagagccgttgcgtctgaacaagccgccaccatgaacgccaaacgacaaagctctggtggcgtctggggttggctcgctggaactcctccgcctaaaacatga

SEQ ID NO: 86647 - protein, 668 aa, Arabidopsis thaliana
  peptide (1)..(668): Ceres Seq. ID no. 12692286
  misc_feature (22)..(104): Pfam Name: Acyl CoA binding protein Pfam Description: Acyl CoA binding protein
  misc_feature (4)..(667): Homolog of NCBI NO: 7596769 NR Description: unknown protein [Arabidopsis thaliana]
  misc_feature (4)..(667): Homolog of NCBI NO: 30679500 NR Description: acyl CoA binding protein (ACBP) family
  misc_feature (1)..(623): Homolog of NCBI NO: 22327105 NR Description: putative protein; protein id: At5g27630.1, by cDNA: gi_20260513 [Arabidopsis thaliana]
  misc_feature (7)..(668): Homolog of NCBI NO: 40714674 NR Description: putative transcription factor [Oryza sativa
  misc_feature (156)..(658): Homolog of NCBI NO: 15237715 NR Description: putative protein; protein id: At5g04420.1, by cDNA: gi_15724205 [Arabidopsis thaliana]
  misc_feature (156)..(658): Homolog of NCBI NO: 15724206 NR Description: AT5g04420/T32M21_20 [Arabidopsis thaliana]
  misc_feature (534)..(668): Homolog of NCBI NO: 22327105 NR Description: putative protein; protein id: At5g27630.1, by cDNA: gi_20260513 [Arabidopsis thaliana]
  misc_feature (144)..(547): Homolog of NCBI NO: 21950739 NR Description: RanGAP1 interacting protein [Arabidopsis thaliana]
  misc_feature (144)..(547): Homolog of NCBI NO: 30686896 NR Description: RanGAP1 interacting protein [Arabidopsis >gi|30686901|ref|NP_850846.1| RanGAP1 interacting protein
  misc_feature (172)..(565): Homolog of NCBI NO: 34905476 NR Description: P0682B08.13 [Oryza sativa (japonica
MAHMVRASSGLSYPERFYAAASYVGLDGSQSSVKQLSSKFSNDTSLLLYTLHQQATLGPCSIPKPSAWNPVEQSKWKSWQGLGTMPSIEAMRLFVKILEEADPGWYPRTSNSVLDPAVHVQINSTKAEPSFESGASFGETKTITSEDGRLTETQDKDVVLEDPDTVSVYNQWTAPRTSGQPPKARYQHGAAVIQDKMYMYGGNHNGRYLGDLHVLDLKNWTWSRVETKVVTGSQETSSPAKLTHCAGHSLIPWDNQLLSIGGHTKDPSESMPVMVFDLHCCSWSILKTYGKPPISRGGQSVTLVGKSLVIFGGQDAKRSLLNDLHILDLDTMTWEEIDAVGSPPTPRSDHAAAVHAERYLLIFGGGSHATCFDDLHVLDLQTMEWSRHTQQGDAPTPRAGHAGVTIGENWYIVGGGDNKSGASKTVVLNMSTLAWSVVTSVQEHVPLASEGLSLVVSSYNGEDIVVAFGGYNGHYNNEVNVLKPSHKSSLKSKIMGASAVPDSFSAVNNATTRDIESEIKVSQEGKVREIVMDNVNSRLKVEGKADRIITTLKSEKEEVEASLNKEKIQTLQLKEELAEIDTRNTELYKELQSVRNQLAAEQSRCFKLEVEVAELRQKLQTMETLQKELELLQRQRAVASEQAATMNAKRQSSGGVWGWLAGTPPPKT

SEQ ID NO: 86648 - protein, 665 aa, Arabidopsis thaliana
  peptide (1)..(665): Ceres Seq. ID no. 12692287
  misc_feature (19)..(101): Pfam Name: Acyl CoA binding protein Pfam Description: Acyl CoA binding protein
  misc_feature (1)..(664): Homolog of NCBI NO: 7596769 NR Description: unknown protein [Arabidopsis thaliana]
  misc_feature (1)..(664): Homolog of NCBI NO: 30679500 NR Description: acyl CoA binding protein (ACBP) family
  misc_feature (1)..(620): Homolog of NCBI NO: 22327105 NR Description: putative protein; protein id: At5g27630.1, by cDNA: gi_20260513 [Arabidopsis thaliana]
  misc_feature (4)..(665): Homolog of NCBI NO: 40714674 NR Description: putative transcription factor [Oryza sativa
  misc_feature (153)..(655): Homolog of NCBI NO: 15237715 NR Description: putative protein; protein id: At5g04420.1, by cDNA: gi_15724205 [Arabidopsis thaliana]
  misc_feature (153)..(655): Homolog of NCBI NO: 15724206 NR Description: AT5g04420/T32M21_20 [Arabidopsis thaliana]
  misc_feature (531)..(665): Homolog of NCBI NO: 22327105 NR Description: putative protein; protein id: At5g27630.1, by cDNA: gi_20260513 [Arabidopsis thaliana]
  misc_feature (141)..(544): Homolog of NCBI NO: 21950739 NR Description: RanGAP1 interacting protein [Arabidopsis thaliana]
  misc_feature (141)..(544): Homolog of NCBI NO: 30686896 NR Description: RanGAP1 interacting protein [Arabidopsis >gi|30686901|ref|NP_850846.1| RanGAP1 interacting protein
  misc_feature (169)..(562): Homolog of NCBI NO: 34905476 NR Description: P0682B08.13 [Oryza sativa (japonica
MVRASSGLSYPERFYAAASYVGLDGSQSSVKQLSSKFSNDTSLLLYTLHQQATLGPCSIPKPSAWNPVEQSKWKSWQGLGTMPSIEAMRLFVKILEEADPGWYPRTSNSVLDPAVHVQINSTKAEPSFESGASFGETKTITSEDGRLTETQDKDVVLEDPDTVSVYNQWTAPRTSGQPPKARYQHGAAVIQDKMYMYGGNHNGRYLGDLHVLDLKNWTWSRVETKVVTGSQETSSPAKLTHCAGHSLIPWDNQLLSIGGHTKDPSESMPVMVFDLHCCSWSILKTYGKPPISRGGQSVTLVGKSLVIFGGQDAKRSLLNDLHILDLDTMTWEEIDAVGSPPTPRSDHAAAVHAERYLLIFGGGSHATCFDDLHVLDLQTMEWSRHTQQGDAPTPRAGHAGVTIGENWYIVGGGDNKSGASKTVVLNMSTLAWSVVTSVQEHVPLASEGLSLVVSSYNGEDIVVAFGGYNGHYNNEVNVLKPSHKSSLKSKIMGASAVPDSFSAVNNATTRDIESEIKVSQEGKVREIVMDNVNSRLKVEGKADRIITTLKSEKEEVEASLNKEKIQTLQLKEELAEIDTRNTELYKELQSVRNQLAAEQSRCFKLEVEVAELRQKLQTMETLQKELELLQRQRAVASEQAATMNAKRQSSGGVWGWLAGTPPPKT

SEQ ID NO: 86649 - protein, 584 aa, Arabidopsis thaliana
  peptide (1)..(584): Ceres Seq. ID no. 12692288
  misc_feature (160)..(206): Pfam Name: Kelch motif Pfam Description: Kelch motif
  misc_feature (1)..(583): Homolog of NCBI NO: 7596769 NR Description: unknown protein [Arabidopsis thaliana]
  misc_feature (1)..(583): Homolog of NCBI NO: 30679500 NR Description: acyl CoA binding protein (ACBP) family
  misc_feature (1)..(539): Homolog of NCBI NO: 22327105 NR Description: putative protein; protein id: At5g27630.1, by cDNA: gi_20260513 [Arabidopsis thaliana]
  misc_feature (1)..(584): Homolog of NCBI NO: 40714674 NR Description: putative transcription factor [Oryza sativa
  misc_feature (72)..(574): Homolog of NCBI NO: 15237715 NR Description: putative protein; protein id: At5g04420.1, by cDNA: gi_15724205 [Arabidopsis thaliana]
  misc_feature (72)..(574): Homolog of NCBI NO: 15724206 NR Description: AT5g04420/T32M21_20 [Arabidopsis thaliana]
  misc_feature (450)..(584): Homolog of NCBI NO: 22327105 NR Description: putative protein; protein id: At5g27630.1, by cDNA: gi_20260513 [Arabidopsis thaliana]
  misc_feature (60)..(463): Homolog of NCBI NO: 21950739 NR Description: RanGAP1 interacting protein [Arabidopsis thaliana]
  misc_feature (60)..(463): Homolog of NCBI NO: 30686896 NR Description: RanGAP1 interacting protein [Arabidopsis >gi|30686901|ref|NP_850846.1| RanGAP1 interacting protein
  misc_feature (88)..(481): Homolog of NCBI NO: 34905476 NR Description: P0682B08.13 [Oryza sativa (japonica
MPSIEAMRLFVKILEEADPGWYPRTSNSVLDPAVHVQINSTKAEPSFESGASFGETKTITSEDGRLTETQDKDVVLEDPDTVSVYNQWTAPRTSGQPPKARYQHGAAVIQDKMYMYGGNHNGRYLGDLHVLDLKNWTWSRVETKVVTGSQETSSPAKLTHCAGHSLIPWDNQLLSIGGHTKDPSESMPVMVFDLHCCSWSILKTYGKPPISRGGQSVTLVGKSLVIFGGQDAKRSLLNDLHILDLDTMTWEEIDAVGSPPTPRSDHAAAVHAERYLLIFGGGSHATCFDDLHVLDLQTMEWSRHTQQGDAPTPRAGHAGVTIGENWYIVGGGDNKSGASKTVVLNMSTLAWSVVTSVQEHVPLASEGLSLVVSSYNGEDIVVAFGGYNGHYNNEVNVLKPSHKSSLKSKIMGASAVPDSFSAVNNATTRDIESEIKVSQEGKVREIVMDNVNSRLKVEGKADRIITTLKSEKEEVEASLNKEKIQTLQLKEELAEIDTRNTELYKELQSVRNQLAAEQSRCFKLEVEVAELRQKLQTMETLQKELELLQRQRAVASEQAATMNAKRQSSGGVWGWLAGTPPPKT

SEQ ID NO: 86650 - DNA, 865 bp, Arabidopsis thaliana
  misc_feature (1)..(865): Ceres Seq. ID no. 12692341
  misc_feature: MA Experiment ID: 108434 Result: Up-regulated in Transcription
  misc_feature: MA Experiment 108434 PARAMETER Experiment Name: At_Root_Tips_cDNA_P Parameter: Tissue Value: Root Tips
  misc_feature: MA Experiment ID: 108462 Result: Down-regulated in Transcription
  misc_feature: MA Experiment 108462 PARAMETER Experiment Name: At_Germinating_Seeds_cDNA_P Parameter: Age (day) Value: 2 vs. 0
  misc_feature: MA Experiment 108462 PARAMETER Experiment Name: At_Germinating_Seeds_cDNA_P Parameter: Tissue Value: Germinating Seeds
  misc_feature: MA Experiment ID: 108463 Result: Down-regulated in Transcription
  misc_feature: MA Experiment 108463 PARAMETER Experiment Name: At_Germinating_Seeds_cDNA_P Parameter: Age (day) Value: 3 vs. 0
  misc_feature: MA Experiment 108463 PARAMETER Experiment Name: At_Germinating_Seeds_cDNA_P Parameter: Tissue Value: Germinating Seeds
  misc_feature: MA Experiment ID: 108464 Result: Down-regulated in Transcription
  misc_feature: MA Experiment 108464 PARAMETER Experiment Name: At_Germinating_Seeds_cDNA_P Parameter: Age (day) Value: 4 vs. 0
  misc_feature: MA Experiment 108464 PARAMETER Experiment Name: At_Germinating_Seeds_cDNA_P Parameter: Tissue Value: Germinating Seeds
  misc_feature: MA Experiment ID: 108573 Result: Down-regulated in Transcription
  misc_feature: MA Experiment 108573 PARAMETER Experiment Name: At_Drought_cDNA_P Parameter: Timepoint (hr) Value: 6
  misc_feature: MA Experiment 108573 PARAMETER Experiment Name: At_Drought_cDNA_P Parameter: Tissue Value: Aerial
  misc_feature: MA Experiment 108573 PARAMETER Experiment Name: At_Drought_cDNA_P Parameter: Treatment Value: Drought vs. No Drought
  misc_feature: MA Experiment ID: 20000113 Result: Up-regulated in Transcription
  misc_feature: MA Experiment 20000113 PARAMETER Experiment Name: At_42deg_Heat_cDNA_P Parameter: Temperature (deg C) Value: 42 vs. 22
  misc_feature: MA Experiment 20000113 PARAMETER Experiment Name: At_42deg_Heat_cDNA_P Parameter: Timepoint (hr) Value: 8
  misc_feature: MA Experiment 20000113 PARAMETER Experiment Name: At_42deg_Heat_cDNA_P Parameter: Tissue Value: Aerial
  misc_feature: MA Experiment ID: 20000234 Result: Up-regulated in Transcription
  misc_feature: MA Experiment 20000234 PARAMETER Experiment Name: At_Siliques_P Parameter: Age (day) Value: 21
  misc_feature: MA Experiment 20000234 PARAMETER Experiment Name: At_Siliques_P Parameter: Organism Value: A. thaliana
  misc_feature: MA Experiment 20000234 PARAMETER Experiment Name: At_Siliques_P Parameter: Plant Line Value: WS
  misc_feature: MA Experiment 20000234 PARAMETER Experiment Name: At_Siliques_P Parameter: Tissue Value: Less Than 5mm Siliques vs. Whole Plant
  misc_feature: MA Experiment ID: 20000794 Result: Down-regulated in Transcription
  misc_feature: MA Experiment 20000794 PARAMETER Experiment Name: At_Petals_P Parameter: Age (day) Value: 23-25 days
  misc_feature: MA Experiment 20000794 PARAMETER Experiment Name: At_Petals_P Parameter: Plant Line Value: WS
  misc_feature: MA Experiment 20000794 PARAMETER Experiment Name: At_Petals_P Parameter: Tissue Value: Petals vs. Whole plant
  misc_feature: MA Experiment ID: 20001556 Result: Up-regulated in Transcription
  misc_feature: MA Experiment 20001556 PARAMETER Experiment Name: At_Drought_Soil_Dry_P Parameter: Age (day) Value: 26
  misc_feature: MA Experiment 20001556 PARAMETER Experiment Name: At_Drought_Soil_Dry_P Parameter: Organism Value: A. thaliana
  misc_feature: MA Experiment 20001556 PARAMETER Experiment Name: At_Drought_Soil_Dry_P Parameter: Plant Line Value: WS
  misc_feature: MA Experiment 20001556 PARAMETER Experiment Name: At_Drought_Soil_Dry_P Parameter: Post Timepoint (hr) Value: None
  misc_feature: MA Experiment 20001556 PARAMETER Experiment Name: At_Drought_Soil_Dry_P Parameter: Post-Treatment Value: None
  misc_feature: MA Experiment 20001556 PARAMETER Experiment Name: At_Drought_Soil_Dry_P Parameter: Timepoint (day) Value: 12
  misc_feature: MA Experiment 20001556 PARAMETER Experiment Name: At_Drought_Soil_Dry_P Parameter: Treatment Value: Drought vs. No Drought
  misc_feature: MA Experiment ID: 20001558 Result: Up-regulated in Transcription
  misc_feature: MA Experiment 20001558 PARAMETER Experiment Name: At_Drought_Soil_Dry_P Parameter: Age (day) Value: 27
  misc_feature: MA Experiment 20001558 PARAMETER Experiment Name: At_Drought_Soil_Dry_P Parameter: Organism Value: A. thaliana
  misc_feature: MA Experiment 20001558 PARAMETER Experiment Name: At_Drought_Soil_Dry_P Parameter: Plant Line Value: WS
  misc_feature: MA Experiment 20001558 PARAMETER Experiment Name: At_Drought_Soil_Dry_P Parameter: Post Timepoint (hr) Value: 6
  misc_feature: MA Experiment 20001558 PARAMETER Experiment Name: At_Drought_Soil_Dry_P Parameter: Post-Treatment Value: Re-Water vs. No Drought
  misc_feature: MA Experiment 20001558 PARAMETER Experiment Name: At_Drought_Soil_Dry_P Parameter: Timepoint (day) Value: 13
  misc_feature: MA Experiment 20001558 PARAMETER Experiment Name: At_Drought_Soil_Dry_P Parameter: Treatment Value: Drought vs. No Drought
  misc_feature: MA Experiment ID: 20001560 Result: Up-regulated in Transcription
  misc_feature: MA Experiment 20001560 PARAMETER Experiment Name: At_Drought_Soil_Dry_P Parameter: Age (day) Value: 28
  misc_feature: MA Experiment 20001560 PARAMETER Experiment Name: At_Drought_Soil_Dry_P Parameter: Organism Value: A. thaliana
  misc_feature: MA Experiment 20001560 PARAMETER Experiment Name: At_Drought_Soil_Dry_P Parameter: Plant Line Value: WS
  misc_feature: MA Experiment 20001560 PARAMETER Experiment Name: At_Drought_Soil_Dry_P Parameter: Post Timepoint (hr) Value: None
  misc_feature: MA Experiment 20001560 PARAMETER Experiment Name: At_Drought_Soil_Dry_P Parameter: Post-Treatment Value: None
  misc_feature: MA Experiment 20001560 PARAMETER Experiment Name: At_Drought_Soil_Dry_P Parameter: Timepoint (day) Value: 14
  misc_feature: MA Experiment 20001560 PARAMETER Experiment Name: At_Drought_Soil_Dry_P Parameter: Treatment Value: Drought vs. No Drought
  misc_feature: MA Experiment ID: 20001757 Result: Up-regulated in Transcription
  misc_feature: MA Experiment 20001757 PARAMETER Experiment Name: At_50mM_NH4NO3_L-to-H_P Parameter: Timepoint (hr) Value: 6
  misc_feature: MA Experiment 20001757 PARAMETER Experiment Name: At_50mM_NH4NO3_L-to-H_P Parameter: Tissue Value: Leaf
  misc_feature: MA Experiment 20001757 PARAMETER Experiment Name: At_50mM_NH4NO3_L-to-H_P Parameter: Treatment Value: 50mM NH4NO3 vs 100mM Mannitol
atgggtatcgatcttatcgcaggaggtaagagtaagaagaccaaaaggactgctcctaagtccgatgatgtctacctaaagcttctcgtcaagctttaccggtttttggtgaggagatctaacagcaacttcaatgctgtgattctgaaaaggcttttcatgagcaaagtcaacaaagctcctctttcactctctaggcttgtagagttcatgactggcaaggatgacaagattgctgtgttggttggaactatcactgatgatttgagagttcatgagattcctgccatgaaggttactgccttgaggtttactgagagggctagggctagaattgagaaagctggtggagagtgcttaacctttgaccagcttgctctcagagctccattgggacagaacacagttcttcttagaggaccaaagaactcgcgtgaagcagtgaagcatttcggacctgctcctggtgtgccacacagtaacactaagccatatgttaggcataagggaaggaagtttgagaaagctagaggaaagcgaaagagtcgtggattcaaggtctaagaagatgttttctggtttcgttttgcttggtttaagtatcgaagttttggtagggaacgctggttcctctttaccctgttccagactttgttttaagttctgtttttctattctcaagacaattggatattttgctttgtcttttaatcttactactattagctgcaatgagattttatctagaatttggatttgatcagtatttggagttcatagtatcattatggtctatttcgttttgtatttctcttccttggaaataaaatatctgtacatgagtattaaaatgtgtaaacaaccc

SEQ ID NO: 86651 - protein, 187 aa, Arabidopsis thaliana [sequence omitted]

SEQ ID NO: 86652 - protein, 134 aa, Arabidopsis thaliana; identical to SEQ ID NO: 29015
  peptide (1)..(134): Ceres Seq. ID no. 12692343
  misc_feature (1)..(134): Homolog of NCBI NO: 15241061 NR Description: 60S ribosomal protein - like; protein id: supported by cDNA: gi_15810152 [Arabidopsis thaliana] putative 60S ribosomal protein [Arabidopsis thaliana]
  misc_feature (1)..(134): Homolog of NCBI NO: 15230011 NR Description: putative 60S ribosomal protein L18; protein id: supported by cDNA: gi_14335089, supported by cDNA: gi_16974508, by cDNA: gi_606969 [Arabidopsis thaliana]
  misc_feature (1)..(134): Homolog of NCBI NO: 606970 NR Description: cytoplasmic ribosomal protein L18
  misc_feature (1)..(134): Homolog of NCBI NO: 34897628 NR Description: cytoplasmic ribosomal protein L18 [Oryza sativa]
  misc_feature (1)..(134): Homolog of NCBI NO: 34393858 NR Description: putative cytoplasmic ribosomal protein L18 [Oryza
  misc_feature (1)..(134): Homolog of NCBI NO: 6094021 NR Description: 60S RIBOSOMAL PROTEIN L18
  misc_feature (1)..(134): Homolog of NCBI NO: 7440855 NR Description: ribosomal protein L18, cytosolic - Arabidopsis
  misc_feature (1)..(110): Homolog of NCBI NO: 28798549 NR Description: 60S ribosomal protein [Medicago sativa]
  misc_feature (1)..(133): Homolog of NCBI NO: 28630356 NR Description: ribosomal protein L18 [Petromyzon marinus]
  misc_feature (1)..(133): Homolog of NCBI NO: 32450084 NR Description: Unknown (protein for MGC:64299) [Xenopus laevis]

SEQ ID NO: 86653 - protein, 117 aa, Arabidopsis thaliana
  peptide (1)..(117): Ceres Seq. ID no. 12692344
  misc_feature (1)..(117): Homolog of NCBI NO: 15241061 NR Description: 60S ribosomal protein - like; protein id: supported by cDNA: gi_15810152 [Arabidopsis thaliana] putative 60S ribosomal protein [Arabidopsis thaliana]
  misc_feature (1)..(117): Homolog of NCBI NO: 15230011 NR Description: putative 60S ribosomal protein L18; protein id: supported by cDNA: gi_14335089, supported by cDNA: gi_16974508, by cDNA: gi_606969 [Arabidopsis thaliana]
  misc_feature (1)..(117): Homolog of NCBI NO: 606970 NR Description: cytoplasmic ribosomal protein L18
  misc_feature (1)..(117): Homolog of NCBI NO: 34897628 NR Description: cytoplasmic ribosomal protein L18 [Oryza sativa]
  misc_feature (1)..(117): Homolog of NCBI NO: 34393858 NR Description: putative cytoplasmic ribosomal protein L18 [Oryza
  misc_feature (1)..(117): Homolog of NCBI NO: 6094021 NR Description: 60S RIBOSOMAL PROTEIN L18
  misc_feature (1)..(117): Homolog of NCBI NO: 7440855 NR Description: ribosomal protein L18, cytosolic - Arabidopsis
  misc_feature (1)..(93): Homolog of NCBI NO: 28798549 NR Description: 60S ribosomal protein [Medicago sativa]
  misc_feature (1)..(116): Homolog of NCBI NO: 28630356 NR Description: ribosomal protein L18 [Petromyzon marinus]
  misc_feature (1)..(116): Homolog of NCBI NO: 32450084 NR Description: Unknown (protein for MGC:64299) [Xenopus laevis]
MTGKDDKIAVLVGTITDDLRVHEIPAMKVTALRFTERARARIEKAGGECLTFDQLALRAPLGQNTVLLRGPKNSREAVKHFGPAPGVPHSNTKPYVRHKGRKFEKARGKRKSRGFKV

SEQ ID NO: 86654 - DNA, 2148 bp, Arabidopsis thaliana
  misc_feature (1)..(2148): Ceres Seq. ID no. 12692348
  misc_feature: MA Experiment ID: 20000264 Result: Up-regulated in Transcription
  misc_feature: MA Experiment 20000264 PARAMETER Experiment Name: At_Open_Flower_P Parameter: Age (day) Value: 21
  misc_feature: MA Experiment 20000264 PARAMETER Experiment Name: At_Open_Flower_P Parameter: Plant Line Value: WS
  misc_feature: MA Experiment 20000264 PARAMETER Experiment Name: At_Open_Flower_P Parameter: Tissue Value: Open Flower vs. Whole Plant
  misc_feature: MA Experiment ID: 20000265 Result: Up-regulated in Transcription
  misc_feature: MA Experiment 20000265 PARAMETER Experiment Name: At_Open_Flower_P Parameter: Age (day) Value: 21
  misc_feature: MA Experiment 20000265 PARAMETER Experiment Name: At_Open_Flower_P Parameter: Plant Line Value: WS
  misc_feature: MA Experiment 20000265 PARAMETER Experiment Name: At_Open_Flower_P Parameter: Tissue Value: Closed Flower vs. Whole Plant
  misc_feature: MA Experiment ID: 20000286 Result: Up-regulated in Transcription
  misc_feature: MA Experiment 20000286 PARAMETER Experiment Name: At_Open_Flower_P Parameter: Age (day) Value: 21
  misc_feature: MA Experiment 20000286 PARAMETER Experiment Name: At_Open_Flower_P Parameter: Plant Line Value: WS
  misc_feature: MA Experiment 20000286 PARAMETER Experiment Name: At_Open_Flower_P Parameter: Tissue Value: Half Open vs. Whole Plant
  misc_feature: MA Experiment ID: 20000794 Result: Up-regulated in Transcription
  misc_feature: MA Experiment 20000794 PARAMETER Experiment Name: At_Petals_P Parameter: Age (day) Value: 23-25 days
  misc_feature: MA Experiment 20000794 PARAMETER Experiment Name: At_Petals_P Parameter: Plant Line Value: WS
  misc_feature: MA Experiment 20000794 PARAMETER Experiment Name: At_Petals_P Parameter: Tissue Value: Petals vs. Whole plant
  misc_feature: MA Experiment ID: 20001911 Result: Up-regulated in Transcription
  misc_feature: MA Experiment 20001911 PARAMETER Experiment Name: At_Drought_Reproduction_P Parameter: Age (day) Value: 40
  misc_feature: MA Experiment 20001911 PARAMETER Experiment Name: At_Drought_Reproduction_P Parameter: Organism Value: A. thaliana
  misc_feature: MA Experiment 20001911 PARAMETER Experiment Name: At_Drought_Reproduction_P Parameter: Plant Line Value: WS
  misc_feature: MA Experiment 20001911 PARAMETER Experiment Name: At_Drought_Reproduction_P Parameter: Timepoint (day) Value: 10
  misc_feature: MA Experiment 20001911 PARAMETER Experiment Name: At_Drought_Reproduction_P Parameter: Tissue Value: Flowers
  misc_feature: MA Experiment 20001911 PARAMETER Experiment Name: At_Drought_Reproduction_P Parameter: Treatment Value: Drought vs. No Drought
atgtcatatggatacgacgatgaggatgcaaagaggaaaaagagatatgtaattatctctatctcctctgttcttttaatctccatggttgtcgctgttaccataggtgttagcgtcaacaagtccgataacgctggtgacgaagaaatcacaacttctgttaaagccatcaaagatgtttgtgcaccgacggattacaaagagacttgtgaggatacactaaggaaagatgcgaaggacacatcagacccgttggagctggtgaagacagcttttaacgcaacgatgaaacaaataagtgacgtggcaaagaagtcacaaactatgattgagctacaaaaggatccaagggcaaagatggcgttggatcaatgcaaggagctaatggattacgcaatcggtgagcttagtaagtcgtttgaagagttggggaagttcgagtttcataaagttgatgaggccttggttaagttgaggatttggcttagtgcgacgataagccatgagcaaacttgtcttgatgggtttcaagggacacaaggtaatgctggtgagacgataaagaaggcgttgaaaaccgcggtgcagttaacgcataacgggcttgcaatggttaccgaaatgtcgaattacttaggacaaatgcagattccggagatgaatagtagacggttgttgtcccaagagtttccttcgtggatggatgcgcgagcacgtaggctattgaacgctcctatgtccgaggtaaaacccgatatcgtggtggcgcaagacggaagtggtcagtacaagacgattaacgaggcattgaattttgtcccgaagaagaagaacacgactttcgtggttcatattaaggaaggaatctataaagagtatgttcaggtgaataggagcatgacacatctagttttcataggtgatggccccgacaaaactgtcatttctgcaatcgttggagatcatttcattgccaagaacattgccttcgagaacacagccggggcaataaagcatcaagcggttgctattagggttctagcagatgagtcaatattctacaattgtaaattcgatggttaccaagacactctatatgcacattcccaccgtcagttttaccgtgactgtactatctcgggcacaatcgattttctctttggagacgcagctgcggtattccaaaactgtactttactggtgagaaagccacttctaaaccaagcatgccccattacagcccatggacgtaaagatccgcgagaatccacgggatttgttctccaaggatgtacgattgttggcgaaccggattacttggcagtcaaggaacagagcaaaacttatcttggaagaccatggaaagagtattcaagaactatcatcatgaacacgttcataccagattttgttccgccggaaggatggcaaccgtggctcggcgaattcggtcttaacacacttttctactcggaggtgcagaacactgggccgggtgcagctatcacaaaacgggttacttggccaggaatcaagaagttgagtgatgaagaaatccttaaattcactccagctcaatacatccaaggtgacgcttggattcctggtaaaggtgttccgtacatcctaggtctttttagtggaaacggttccacaaattctaccgtaactggctctagtttgtcttctaacacaacagagtcatcagattcaccttcgacggtagtaactccttcaacttctccaccagctggtcatcttggttctccatcagatacaccttcatcggtagtgtctccttcaacttctctgccagctggtcaacttggtgccccaccggctacaccatcaatggtagtgtctccttcaacttctccaccagctggtcatcttggttccccatcagatacaccttcatcgttagtttctccttcaacttctccaccagctggtcatcttggttctccatcagatacaccttcatcggtagtgactccttcagcttctccttctacttcaccatcagcttctccttctgtttcaccatcagcttttccttctgcttcaccatcagcttcaccatcagcttctccttcagtttctccttctgcttcaccatcagcttctccacaaagctcaatcggttga

SEQ ID NO: 86655 - protein, 715 aa, Arabidopsis thaliana
  peptide (1)..(715): Ceres Seq. ID no. 12692349
  misc_feature (272)..(531): Pfam Name: Pectinesterase Pfam Description: Pectinesterase
  misc_feature (272)..(646): Homolog of NCBI NO: 26451784 NR Description: putative pectinesterase [Arabidopsis thaliana]
  misc_feature (1)..(316): Homolog of NCBI NO: 26451784 NR Description: putative pectinesterase [Arabidopsis thaliana]
  misc_feature (272)..(715): Homolog of NCBI NO: 15241079 NR Description: pectin methyl-esterase - like protein; protein
  misc_feature (1)..(399): Homolog of NCBI NO: 15241079 NR Description: pectin methyl-esterase - like protein; protein
  misc_feature (1)..(399): Homolog of NCBI NO: 15230019 NR Description: putative pectinesterase; protein id: At3g05610.1 thaliana] >gi|6714449|gb|AAF26136.1|AC011620_12 putative
  misc_feature (522)..(713): Homolog of NCBI NO: 15230019 NR Description: putative pectinesterase; protein id: At3g05610.1 thaliana] >gi|6714449|gb|AAF26136.1|AC011620_12 putative
  misc_feature (272)..(646): Homolog of NCBI NO: 15230019 NR Description: putative pectinesterase; protein id: At3g05610.1 thaliana] >gi|6714449|gb|AAF26136.1|AC011620_12 putative
  misc_feature (10)..(317): Homolog of NCBI NO: 6689892 NR Description: pectin methyl esterase [Solanum tuberosum]
  misc_feature (273)..(545): Homolog of NCBI NO: 6689892 NR Description: pectin methyl esterase [Solanum tuberosum]
  misc_feature (10)..(316): Homolog of NCBI NO: 8671350 NR Description: pectin methylesterase [Nicotiana tabacum]
MSYGYDDEDAKRKKRYVIISISSVLLISMVVAVTIGVSVNKSDNAGDEEITTSVKAIKDVCAPTDYKETCEDTLRKDAKDTSDPLELVKTAFNATMKQISDVAKKSQTMIELQKDPRAKMALDQCKELMDYAIGELSKSFEELGKFEFHKVDEALVKLRIWLSATISHEQTCLDGFQGTQGNAGETIKKALKTAVQLTHNGLAMVTEMSNYLGQMQIPEMNSRRLLSQEFPSWMDARARRLLNAPMSEVKPDIVVAQDGSGQYKTINEALNFVPKKKNTTFVVHIKEGIYKEYVQVNRSMTHLVFIGDGPDKTVISAIVGDHFIAKNIAFENTAGAIKHQAVAIRVLADESIFYNCKFDGYQDTLYAHSHRQFYRDCTISGTIDFLFGDAAAVFQNCTLLVRKPLLNQACPITAHGRKDPRESTGFVLQGCTIVGEPDYLAVKEQSKTYLGRPWKEYSRTIIMNTFIPDFVPPEGWQPWLGEFGLNTLFYSEVQNTGPGAAITKRVTWPGIKKLSDEEILKFTPAQYIQGDAWIPGKGVPYILGLFSGNGSTNSTVTGSSLSSNTTESSDSPSTVVTPSTSPPAGHLGSPSDTPSSVVSPSTSLPAGQLGAPPATPSMVVSPSTSPPAGHLGSPSDTPSSLVSPSTSPPAGHLGSPSDTPSSVVTPSASPSTSPSASPSVSPSAFPSASPSASPSASPSVSPSASPSASPQSSIG

SEQ ID NO: 86656 - protein, 687 aa, Arabidopsis thaliana
  peptide (1)..(687): Ceres Seq. ID no. 12692350
  misc_feature (244)..(503): Pfam Name: Pectinesterase Pfam Description: Pectinesterase
  misc_feature (244)..(618): Homolog of NCBI NO: 26451784 NR Description: putative pectinesterase [Arabidopsis thaliana]
  misc_feature (1)..(288): Homolog of NCBI NO: 26451784 NR Description: putative pectinesterase [Arabidopsis thaliana]
  misc_feature (244)..(687): Homolog of NCBI NO: 15241079 NR Description: pectin methyl-esterase - like protein; protein
  misc_feature (1)..(371): Homolog of NCBI NO: 15241079 NR Description: pectin methyl-esterase - like protein; protein
  misc_feature (1)..(371): Homolog of NCBI NO: 15230019 NR Description: putative pectinesterase; protein id: At3g05610.1 thaliana] >gi|6714449|gb|AAF26136.1|AC011620_12 putative
  misc_feature (494)..(685): Homolog of NCBI NO: 15230019 NR Description: putative pectinesterase; protein id: At3g05610.1 thaliana] >gi|6714449|gb|AAF26136.1|AC011620_12 putative
  misc_feature (244)..(618): Homolog of NCBI NO: 15230019 NR Description: putative pectinesterase; protein id: At3g05610.1 thaliana] >gi|6714449|gb|AAF26136.1|AC011620_12 putative
  misc_feature (1)..(289): Homolog of NCBI NO: 6689892 NR Description: pectin methyl esterase [Solanum tuberosum]
  misc_feature (245)..(517): Homolog of NCBI NO: 6689892 NR Description: pectin methyl esterase [Solanum tuberosum]
  misc_feature (1)..(288): Homolog of NCBI NO: 8671350 NR Description: pectin methylesterase [Nicotiana tabacum]
MVVAVTIGVSVNKSDNAGDEEITTSVKAIKDVCAPTDYKETCEDTLRKDAKDTSDPLELVKTAFNATMKQISDVAKKSQTMIELQKDPRAKMALDQCKELMDYAIGELSKSFEELGKFEFHKVDEALVKLRIWLSATISHEQTCLDGFQGTQGNAGETIKKALKTAVQLTHNGLAMVTEMSNYLGQMQIPEMNSRRLLSQEFPSWMDARARRLLNAPMSEVKPDIVVAQDGSGQYKTINEALNFVPKKKNTTFVVHIKEGIYKEYVQVNRSMTHLVFIGDGPDKTVISAIVGDHFIAKNIAFENTAGAIKHQAVAIRVLADESIFYNCKFDGYQDTLYAHSHRQFYRDCTISGTIDFLFGDAAAVFQNCTLLVRKPLLNQACPITAHGRKDPRESTGFVLQGCTIVGEPDYLAVKEQSKTYLGRPWKEYSRTIIMNTFIPDFVPPEGWQPWLGEFGLNTLFYSEVQNTGPGAAITKRVTWPGIKKLSDEEILKFTPAQYIQGDAWIPGKGVPYILGLFSGNGSTNSTVTGSSLSSNTTESSDSPSTVVTPSTSPPAGHLGSPSDTPSSVVSPSTSLPAGQLGAPPATPSMVVSPSTSPPAGHLGSPSDTPSSLVSPSTSPPAGHLGSPSDTPSSVVTPSASPSTSPSASPSVSPSAFPSASPSASPSASPSVSPSASPSASPQSSIG

SEQ ID NO: 86657 - protein, 620 aa, Arabidopsis thaliana
  peptide (1)..(620): Ceres Seq. ID no. 12692351
  misc_feature (177)..(436): Pfam Name: Pectinesterase Pfam Description: Pectinesterase
  misc_feature (177)..(551): Homolog of NCBI NO: 26451784 NR Description: putative pectinesterase [Arabidopsis thaliana]
  misc_feature (1)..(221): Homolog of NCBI NO: 26451784 NR Description: putative pectinesterase [Arabidopsis thaliana]
  misc_feature (177)..(620): Homolog of NCBI NO: 15241079 NR Description: pectin methyl-esterase - like protein; protein
  misc_feature (1)..(304): Homolog of NCBI NO: 15241079 NR Description: pectin methyl-esterase - like protein; protein
  misc_feature (1)..(304): Homolog of NCBI NO: 15230019 NR Description: putative pectinesterase; protein id: At3g05610.1 thaliana] >gi|6714449|gb|AAF26136.1|AC011620_12 putative
  misc_feature (427)..(618): Homolog of NCBI NO: 15230019 NR Description: putative pectinesterase; protein id: At3g05610.1 thaliana] >gi|6714449|gb|AAF26136.1|AC011620_12 putative
  misc_feature (177)..(551): Homolog of NCBI NO: 15230019 NR Description: putative pectinesterase; protein id: At3g05610.1 thaliana] >gi|6714449|gb|AAF26136.1|AC011620_12 putative
  misc_feature (1)..(222): Homolog of NCBI NO: 6689892 NR Description: pectin methyl esterase [Solanum tuberosum]
  misc_feature (178)..(450): Homolog of NCBI NO: 6689892 NR Description: pectin methyl esterase [Solanum tuberosum]
  misc_feature (1)..(221): Homolog of NCBI NO: 8671350 NR Description: pectin methylesterase [Nicotiana tabacum]
MKQISDVAKKSQTMIELQKDPRAKMALDQCKELMDYAIGELSKSFEELGKFEFHKVDEALVKLRIWLSATISHEQTCLDGFQGTQGNAGETIKKALKTAVQLTHNGLAMVTEMSNYLGQMQIPEMNSRRLLSQEFPSWMDARARRLLNAPMSEVKPDIVVAQDGSGQYKTINEALNFVPKKKNTTFVVHIKEGIYKEYVQVNRSMTHLVFIGDGPDKTVISAIVGDHFIAKNIAFENTAGAIKHQAVAIRVLADESIFYNCKFDGYQDTLYAHSHRQFYRDCTISGTIDFLFGDAAAVFQNCTLLVRKPLLNQACPITAHGRKDPRESTGFVLQGCTIVGEPDYLAVKEQSKTYLGRPWKEYSRTIIMNTFIPDFVPPEGWQPWLGEFGLNTLFYSEVQNTGPGAAITKRVTWPGIKKLSDEEILKFTPAQYIQGDAWIPGKGVPYILGLFSGNGSTNSTVTGSSLSSNTTESSDSPSTVVTPSTSPPAGHLGSPSDTPSSVVSPSTSLPAGQLGAPPATPSMVVSPSTSPPAGHLGSPSDTPSSLVSPSTSPPAGHLGSPSDTPSSVVTPSASPSTSPSASPSVSPSAFPSASPSASPSASPSVSPSASPSASPQSSIG

SEQ ID NO: 86658 - DNA, 579 bp, Arabidopsis thaliana
  misc_feature (1)..(579): Ceres Seq. ID no. 12692409
  misc_feature: MA Experiment ID: 108435 Result: Down-regulated in Transcription
  misc_feature: MA Experiment 108435 PARAMETER Experiment Name: At_stm_Mutants_cDNA_P Parameter: Plant Line Value: wt Landsburg vs stm
  misc_feature: MA Experiment 108435 PARAMETER Experiment Name: At_stm_Mutants_cDNA_P Parameter: Tissue Value: Shoot Apical Meristem Region
  misc_feature: MA Experiment ID: 108461 Result: Up-regulated in Transcription
  misc_feature: MA Experiment 108461 PARAMETER Experiment Name: At_Germinating_Seeds_cDNA_P Parameter: Age (day) Value: 1 vs. 0
  misc_feature: MA Experiment 108461 PARAMETER Experiment Name: At_Germinating_Seeds_cDNA_P Parameter: Tissue Value: Germinating Seeds
  misc_feature: MA Experiment ID: 108462 Result: Up-regulated in Transcription
  misc_feature: MA Experiment 108462 PARAMETER Experiment Name: At_Germinating_Seeds_cDNA_P Parameter: Age (day) Value: 2 vs. 0
  misc_feature: MA Experiment 108462 PARAMETER Experiment Name: At_Germinating_Seeds_cDNA_P Parameter: Tissue Value: Germinating Seeds
  misc_feature: MA Experiment ID: 108463 Result: Up-regulated in Transcription
  misc_feature: MA Experiment 108463 PARAMETER Experiment Name: At_Germinating_Seeds_cDNA_P Parameter: Age (day) Value: 3 vs. 0
  misc_feature: MA Experiment 108463 PARAMETER Experiment Name: At_Germinating_Seeds_cDNA_P Parameter: Tissue Value: Germinating Seeds
  misc_feature: MA Experiment ID: 108464 Result: Up-regulated in Transcription
  misc_feature: MA Experiment 108464 PARAMETER Experiment Name: At_Germinating_Seeds_cDNA_P Parameter: Age (day) Value: 4 vs. 0
  misc_feature: MA Experiment 108464 PARAMETER Experiment Name: At_Germinating_Seeds_cDNA_P Parameter: Tissue Value: Germinating Seeds
  misc_feature: MA Experiment ID: 108488 Result: Up-regulated in Transcription
  misc_feature: MA Experiment ID: 20000069 Result: Down-regulated in Transcription
  misc_feature: MA Experiment 20000069 PARAMETER Experiment Name: At_100uM_ABA_Mutants_cDNA_P Parameter: Plant Line Value: CS23
  misc_feature: MA Experiment 20000069 PARAMETER Experiment Name: At_100uM_ABA_Mutants_cDNA_P Parameter: Timepoint (hr) Value: 6
  misc_feature: MA Experiment 20000069 PARAMETER Experiment Name: At_100uM_ABA_Mutants_cDNA_P Parameter: Tissue Value: Aerial
  misc_feature: MA Experiment 20000069 PARAMETER Experiment Name: At_100uM_ABA_Mutants_cDNA_P Parameter: Treatment Value: 100uM ABA vs. No Treatment
  misc_feature: MA Experiment ID: 20000070 Result: Down-regulated in Transcription
  misc_feature: MA Experiment 20000070 PARAMETER Experiment Name: At_100uM_ABA_Mutants_cDNA_P Parameter: Plant Line Value: CS24
  misc_feature: MA Experiment 20000070 PARAMETER Experiment Name: At_100uM_ABA_Mutants_cDNA_P Parameter: Timepoint (hr) Value: 6
  misc_feature: MA Experiment 20000070 PARAMETER Experiment Name: At_100uM_ABA_Mutants_cDNA_P Parameter: Tissue Value: Aerial
  misc_feature: MA Experiment 20000070 PARAMETER Experiment Name: At_100uM_ABA_Mutants_cDNA_P Parameter: Treatment Value: 100uM ABA vs. No Treatment
  misc_feature: MA Experiment ID: 20000071 Result: Down-regulated in Transcription
  misc_feature: MA Experiment 20000071 PARAMETER Experiment Name: At_100uM_ABA_Mutants_cDNA_P Parameter: Plant Line Value: CS8104
  misc_feature: MA Experiment 20000071 PARAMETER Experiment Name: At_100uM_ABA_Mutants_cDNA_P Parameter: Timepoint (hr) Value: 6
  misc_feature: MA Experiment 20000071 PARAMETER Experiment Name: At_100uM_ABA_Mutants_cDNA_P Parameter: Tissue Value: Aerial
  misc_feature: MA Experiment 20000071 PARAMETER Experiment Name: At_100uM_ABA_Mutants_cDNA_P Parameter: Treatment Value: 100uM ABA vs. No Treatment
  misc_feature: MA Experiment ID: 20000072 Result: Down-regulated in Transcription
  misc_feature: MA Experiment 20000072 PARAMETER Experiment Name: At_100uM_ABA_Mutants_cDNA_P Parameter: Plant Line Value: CS8105
  misc_feature: MA Experiment 20000072 PARAMETER Experiment Name: At_100uM_ABA_Mutants_cDNA_P Parameter: Timepoint (hr) Value: 6
  misc_feature: MA Experiment 20000072 PARAMETER Experiment Name: At_100uM_ABA_Mutants_cDNA_P Parameter: Tissue Value: Aerial
  misc_feature: MA Experiment 20000072 PARAMETER Experiment Name: At_100uM_ABA_Mutants_cDNA_P Parameter: Treatment Value: 100uM ABA vs. No Treatment
  misc_feature: MA Experiment ID: 20000086 Result: Down-regulated in Transcription
  misc_feature: MA Experiment 20000086 PARAMETER Experiment Name: At_100uM_ABA_Mutants_cDNA_P Parameter: Plant Line Value: CS22
  misc_feature: MA Experiment 20000086 PARAMETER Experiment Name: At_100uM_ABA_Mutants_cDNA_P Parameter: Timepoint (hr) Value: 6
  misc_feature: MA Experiment 20000086 PARAMETER Experiment Name: At_100uM_ABA_Mutants_cDNA_P Parameter: Tissue Value: Aerial
  misc_feature: MA Experiment 20000086 PARAMETER Experiment Name: At_100uM_ABA_Mutants_cDNA_P Parameter: Treatment Value: 100uM ABA vs. No Treatment
  misc_feature: MA Experiment ID: 20000087 Result: Down-regulated in Transcription
  misc_feature: MA Experiment 20000087 PARAMETER Experiment Name: At_100uM_ABA_Mutants_cDNA_P Parameter: Plant Line Value: WS
  misc_feature: MA Experiment 20000087 PARAMETER Experiment Name: At_100uM_ABA_Mutants_cDNA_P Parameter: Timepoint (hr) Value: 6
  misc_feature: MA Experiment 20000087 PARAMETER Experiment Name: At_100uM_ABA_Mutants_cDNA_P Parameter: Tissue Value: Aerial
  misc_feature: MA Experiment 20000087 PARAMETER Experiment Name: At_100uM_ABA_Mutants_cDNA_P Parameter: Treatment Value: 100uM ABA vs. No Treatment
  misc_feature: MA Experiment ID: 20000088 Result: Down-regulated in Transcription
  misc_feature: MA Experiment 20000088 PARAMETER Experiment Name: At_100uM_ABA_Mutants_cDNA_P Parameter: Plant Line Value: Landsberg
  misc_feature: MA Experiment 20000088 PARAMETER Experiment Name: At_100uM_ABA_Mutants_cDNA_P Parameter: Timepoint (hr) Value: 6
  misc_feature: MA Experiment 20000088 PARAMETER Experiment Name: At_100uM_ABA_Mutants_cDNA_P Parameter: Tissue Value: Aerial
  misc_feature: MA Experiment 20000088 PARAMETER Experiment Name: At_100uM_ABA_Mutants_cDNA_P Parameter: Treatment Value: 100uM ABA vs. No Treatment
  misc_feature: MA Experiment ID: 20000090 Result: Down-regulated in Transcription
  misc_feature: MA Experiment ID: 20000117 Result: Down-regulated in Transcription
  misc_feature: MA Experiment 20000117 PARAMETER Experiment Name: At_100uM_ABA_Mutants_cDNA_P Parameter: Plant Line Value: Columbia
  misc_feature: MA Experiment 20000117 PARAMETER Experiment Name: At_100uM_ABA_Mutants_cDNA_P Parameter: Timepoint (hr) Value: 6
  misc_feature: MA Experiment 20000117 PARAMETER Experiment Name: At_100uM_ABA_Mutants_cDNA_P Parameter: Tissue Value: Aerial
  misc_feature: MA Experiment 20000117 PARAMETER Experiment Name: At_100uM_ABA_Mutants_cDNA_P Parameter: Treatment Value: 100uM ABA vs. No Treatment
atgagcgaagaacagctgcagaaacctatagattgtgctgatgtaaaaggagaggcagagaagatttcgacaacggagggaggcattaaggcggcggaggacaaagagaaaggtgttgtagccgaggcctccggtgaacaggcggagggagaagttaaccagaaaaaggtggtagctaatcctctgaaatcggaaggaaccataacaattggagaggctctagaggcagcggttctcacggcagggaataagccggtggagtggagtgacgcagccgccattcaagcggccgaggttagagctacggggcggaccaatatcatgcccggcggtgttgcggcttcagctcaatcagccgccactcttaatgctcgtatcggctctgacgataccaagactacgctagccgacgttctcactggagcgagtagcaaattaccatcggataaagcagcaacgagaaaggacgcagagggagtgactggcgccgagatgaggaacgatcctcatctcactacatacccaaccggtgtggctgcctctgtcgctgccgccgctcggatcaatcagtccaaatga

SEQ ID NO: 86659 - protein, 192 aa, Arabidopsis thaliana; identical to SEQ ID NO: 40339
  peptide (1)..(192): Ceres Seq. ID no. 12692410
  misc_feature (66)..(128): Pfam Name: Seed maturation protein Pfam Description: Seed maturation protein
  misc_feature (1)..(192): Homolog of NCBI NO: 15241107 NR Description: embryonic abundant protein - like; protein id: [Arabidopsis thaliana] >gi|26452310|dbj|BAC43241.1| putative
  misc_feature (26)..(191): Homolog of NCBI NO: 126078 NR Description: LATE EMBRYOGENESIS ABUNDANT PROTEIN D-34 (LEA
  misc_feature (26)..(190): Homolog of NCBI NO: 15228768 NR Description: LEA protein, putative; protein id: At3g22490.1 thaliana] >gi|11994281|dbj|BAB01464.1| seed maturation protein,
  misc_feature (19)..(190): Homolog of NCBI NO: 15228770 NR Description: LEA protein, putative; protein id: At3g22500.1, by cDNA: gi_15450430, supported by cDNA: gi_992920 [Arabidopsis >gi|11994283|dbj|BAB01466.1| LEA protein in group 5 [Arabidopsis
  misc_feature (19)..(190): Homolog of NCBI NO: 1526422 NR Description: LEA protein in group 5 [Arabidopsis thaliana]
  misc_feature (18)..(190): Homolog of NCBI NO: 82045 NR Description: embryonic protein ecp31 - carrot

SEQ ID NO: 86660 - DNA, 1114 bp, Arabidopsis thaliana
  misc_feature (1)..(1114): Ceres Seq. ID no. 12692413
  misc_feature: MA Experiment ID: 108434 Result: Up-regulated in Transcription
  misc_feature: MA Experiment 108434 PARAMETER Experiment Name: At_Root_Tips_cDNA_P Parameter: Tissue Value: Root Tips
  misc_feature: MA Experiment ID: 108461 Result: Up-regulated in Transcription
  misc_feature: MA Experiment 108461 PARAMETER Experiment Name: At_Germinating_Seeds_cDNA_P Parameter: Age (day) Value: 1 vs. 0
  misc_feature: MA Experiment 108461 PARAMETER Experiment Name: At_Germinating_Seeds_cDNA_P Parameter: Tissue Value: Germinating Seeds
  misc_feature: MA Experiment ID: 108463 Result: Up-regulated in Transcription
  misc_feature: MA Experiment 108463 PARAMETER Experiment Name: At_Germinating_Seeds_cDNA_P Parameter: Age (day) Value: 3 vs. 0
  misc_feature: MA Experiment 108463 PARAMETER Experiment Name: At_Germinating_Seeds_cDNA_P Parameter: Tissue Value: Germinating Seeds
  misc_feature: MA Experiment ID: 108464 Result: Up-regulated in Transcription
  misc_feature: MA Experiment 108464 PARAMETER Experiment Name: At_Germinating_Seeds_cDNA_P Parameter: Age (day) Value: 4 vs. 0
  misc_feature: MA Experiment 108464 PARAMETER Experiment Name: At_Germinating_Seeds_cDNA_P Parameter: Tissue Value: Germinating Seeds
  misc_feature: MA Experiment ID: 108489 Result: Down-regulated in Transcription
  misc_feature: MA Experiment ID: 20000070 Result: Down-regulated in Transcription
  misc_feature: MA Experiment 20000070 PARAMETER Experiment Name: At_100uM_ABA_Mutants_cDNA_P Parameter: Plant Line Value: CS24
  misc_feature: MA Experiment 20000070 PARAMETER Experiment Name: At_100uM_ABA_Mutants_cDNA_P Parameter: Timepoint (hr) Value: 6
  misc_feature: MA Experiment 20000070 PARAMETER Experiment Name: At_100uM_ABA_Mutants_cDNA_P Parameter: Tissue Value: Aerial
  misc_feature: MA Experiment 20000070 PARAMETER Experiment Name: At_100uM_ABA_Mutants_cDNA_P Parameter: Treatment Value: 100uM ABA vs. No Treatment
  misc_feature: MA Experiment ID: 20000072 Result: Down-regulated in Transcription
  misc_feature: MA Experiment 20000072 PARAMETER Experiment Name: At_100uM_ABA_Mutants_cDNA_P Parameter: Plant Line Value: CS8105
  misc_feature: MA Experiment 20000072 PARAMETER Experiment Name: At_100uM_ABA_Mutants_cDNA_P Parameter: Timepoint (hr) Value: 6
  misc_feature: MA Experiment 20000072 PARAMETER Experiment Name: At_100uM_ABA_Mutants_cDNA_P Parameter: Tissue Value: Aerial
  misc_feature: MA Experiment 20000072 PARAMETER Experiment Name: At_100uM_ABA_Mutants_cDNA_P Parameter: Treatment Value: 100uM ABA vs. No Treatment
  misc_feature: MA Experiment ID: 20000087 Result: Down-regulated in Transcription
  misc_feature: MA Experiment 20000087 PARAMETER Experiment Name: At_100uM_ABA_Mutants_cDNA_P Parameter: Plant Line Value: WS
  misc_feature: MA Experiment 20000087 PARAMETER Experiment Name: At_100uM_ABA_Mutants_cDNA_P Parameter: Timepoint (hr) Value: 6
  misc_feature: MA Experiment 20000087 PARAMETER Experiment Name: At_100uM_ABA_Mutants_cDNA_P Parameter: Tissue Value: Aerial
  misc_feature: MA Experiment 20000087 PARAMETER Experiment Name: At_100uM_ABA_Mutants_cDNA_P Parameter: Treatment Value: 100uM ABA vs. No Treatment
  misc_feature: MA Experiment ID: 20000088 Result: Down-regulated in Transcription
  misc_feature: MA Experiment 20000088 PARAMETER Experiment Name: At_100uM_ABA_Mutants_cDNA_P Parameter: Plant Line Value: Landsberg
  misc_feature: MA Experiment 20000088 PARAMETER Experiment Name: At_100uM_ABA_Mutants_cDNA_P Parameter: Timepoint (hr) Value: 6
  misc_feature: MA Experiment 20000088 PARAMETER Experiment Name: At_100uM_ABA_Mutants_cDNA_P Parameter: Tissue Value: Aerial
  misc_feature: MA Experiment 20000088 PARAMETER Experiment Name: At_100uM_ABA_Mutants_cDNA_P Parameter: Treatment Value: 100uM ABA vs. No Treatment
  misc_feature: MA Experiment ID: 20000090 Result: Down-regulated in Transcription
  misc_feature: MA Experiment ID: 20000111 Result: Down-regulated in Transcription
  misc_feature: MA Experiment 20000111 PARAMETER Experiment Name: At_42deg_Heat_cDNA_P Parameter: Temperature (deg C) Value: 42 vs. 22
  misc_feature: MA Experiment 20000111 PARAMETER Experiment Name: At_42deg_Heat_cDNA_P Parameter: Timepoint (hr) Value: 6
  misc_feature: MA Experiment 20000111 PARAMETER Experiment Name: At_42deg_Heat_cDNA_P Parameter: Tissue Value: Aerial
  misc_feature: MA Experiment ID: 20000113 Result: Down-regulated in Transcription
  misc_feature: MA Experiment 20000113 PARAMETER Experiment Name: At_42deg_Heat_cDNA_P Parameter: Temperature (deg C) Value: 42 vs. 22
  misc_feature: MA Experiment 20000113 PARAMETER Experiment Name: At_42deg_Heat_cDNA_P Parameter: Timepoint (hr) Value: 8
  misc_feature: MA Experiment 20000113 PARAMETER Experiment Name: At_42deg_Heat_cDNA_P Parameter: Tissue Value: Aerial
  misc_feature: MA Experiment ID: 20000185 Result: Up-regulated in Transcription
  misc_feature: MA Experiment 20000185 PARAMETER Experiment Name: At_Roots__P Parameter: Age (day) Value: 7 vs. 21
  misc_feature: MA Experiment 20000185 PARAMETER Experiment Name: At_Roots__P Parameter: Organism Value: A. thaliana
  misc_feature: MA Experiment 20000185 PARAMETER Experiment Name: At_Roots__P Parameter: Tissue Value: Roots vs. Whole Plant
  misc_feature: MA Experiment ID: 20000437 Result: Down-regulated in Transcription
  misc_feature: MA Experiment 20000437 PARAMETER Experiment Name: At_Drought_P Parameter: Age (day) Value: 8
  misc_feature: MA Experiment 20000437 PARAMETER Experiment Name: At_Drought_P Parameter: Organism Value: A. thaliana
  misc_feature: MA Experiment 20000437 PARAMETER Experiment Name: At_Drought_P Parameter: Plant Line Value: WS
  misc_feature: MA Experiment 20000437 PARAMETER Experiment Name: At_Drought_P Parameter: Timepoint (hr) Value: 24
  misc_feature: MA Experiment 20000437 PARAMETER Experiment Name: At_Drought_P Parameter: Tissue Value: Whole Plant
  misc_feature: MA Experiment 20000437 PARAMETER Experiment Name: At_Drought_P Parameter: Treatment Value: Drought vs. No Drought
  misc_feature: MA Experiment ID: 20000438 Result: Up-regulated in Transcription
  misc_feature: MA Experiment 20000438 PARAMETER Experiment Name: At_Shoots__P Parameter: Age (day) Value: 14
  misc_feature: MA Experiment 20000438 PARAMETER Experiment Name: At_Shoots__P Parameter: Tissue Value: Shoots vs. Whole Plant
  misc_feature: MA Experiment ID: 20000527 Result: Down-regulated in Transcription
  misc_feature: MA Experiment 20000527 PARAMETER Experiment Name: At_10percent_PEG_P Parameter: Age (day) Value: 20
  misc_feature: MA Experiment 20000527 PARAMETER Experiment Name: At_10percent_PEG_P Parameter: Organism Value: A. thaliana
  misc_feature: MA Experiment 20000527 PARAMETER Experiment Name: At_10percent_PEG_P Parameter: Plant Line Value: WS
  misc_feature: MA Experiment 20000527 PARAMETER Experiment Name: At_10percent_PEG_P Parameter: Timepoint (day) Value: 20
  misc_feature: MA Experiment 20000527 PARAMETER Experiment Name: At_10percent_PEG_P Parameter: Tissue Value: Whole Plant
  misc_feature: MA Experiment 20000527 PARAMETER Experiment Name: At_10percent_PEG_P Parameter: Treatment Value: 10percent PEG vs. No Treatment
  misc_feature: MA Experiment ID: 20000573 Result: Down-regulated in Transcription
  misc_feature: MA Experiment 20000573 PARAMETER Experiment Name: At_100uM_ABA_Mutants__P Parameter: Organism Value: A. thaliana
  misc_feature: MA Experiment 20000573 PARAMETER Experiment Name: At_100uM_ABA_Mutants__P Parameter: Plant Line Value: CS22 vs. Ler wt
  misc_feature: MA Experiment 20000573 PARAMETER Experiment Name: At_100uM_ABA_Mutants__P Parameter: Timepoint (hr) Value: N/A
  misc_feature: MA Experiment 20000573 PARAMETER Experiment Name: At_100uM_ABA_Mutants__P Parameter: Tissue Value: Whole Plant
  misc_feature: MA Experiment 20000573 PARAMETER Experiment Name: At_100uM_ABA_Mutants__P Parameter: Treatment Value: None
  misc_feature: MA Experiment ID: 20000574 Result: Down-regulated in Transcription
  misc_feature: MA Experiment 20000574 PARAMETER Experiment Name: At_100uM_ABA_Mutants__P Parameter: Organism Value: A. thaliana
  misc_feature: MA Experiment 20000574 PARAMETER Experiment Name: At_100uM_ABA_Mutants__P Parameter: Plant Line Value: CS23 vs. Ler wt
  misc_feature: MA Experiment 20000574 PARAMETER Experiment Name: At_100uM_ABA_Mutants__P Parameter: Timepoint (hr) Value: N/A
  misc_feature: MA Experiment 20000574 PARAMETER Experiment Name: At_100uM_ABA_Mutants__P Parameter: Tissue Value: Whole Plant
  misc_feature: MA Experiment 20000574 PARAMETER Experiment Name: At_100uM_ABA_Mutants__P Parameter: Treatment Value: None
  misc_feature: MA Experiment ID: 20000794 Result: Down-regulated in Transcription
  misc_feature: MA Experiment 20000794 PARAMETER Experiment Name: At_Petals_P Parameter: Age (day) Value: 23-25 days
  misc_feature: MA Experiment 20000794 PARAMETER Experiment Name: At_Petals_P Parameter: Plant Line Value: WS
  misc_feature: MA Experiment 20000794 PARAMETER Experiment Name: At_Petals_P Parameter: Tissue Value: Petals vs. Whole plant
  misc_feature: MA Experiment ID: 20001450 Result: Up-regulated in Transcription
  misc_feature: MA Experiment 20001450 PARAMETER Experiment Name: At_Far-red-induction_P Parameter: Age (day) Value: 7
  misc_feature: MA Experiment 20001450 PARAMETER Experiment Name: At_Far-red-induction_P Parameter: Light Value: Far-red vs. White
  misc_feature: MA Experiment 20001450 PARAMETER Experiment Name: At_Far-red-induction_P Parameter: Organism Value: A. thaliana
  misc_feature: MA Experiment 20001450 PARAMETER Experiment Name: At_Far-red-induction_P Parameter: Plant Line Value: Columbia
  misc_feature: MA Experiment 20001450 PARAMETER Experiment Name: At_Far-red-induction_P Parameter: Timepoint (hr) Value: 8
  misc_feature: MA Experiment 20001450 PARAMETER Experiment Name: At_Far-red-induction_P Parameter: Tissue Value: Whole Plant
  misc_feature: MA Experiment ID: 20001555 Result: Down-regulated in Transcription
  misc_feature: MA Experiment 20001555 PARAMETER Experiment Name: At_Drought_Soil_Dry_P Parameter: Age (day) Value: 24
  misc_feature: MA Experiment 20001555 PARAMETER Experiment Name: At_Drought_Soil_Dry_P Parameter: Organism Value: A. thaliana
  misc_feature: MA Experiment 20001555 PARAMETER Experiment Name: At_Drought_Soil_Dry_P Parameter: Plant Line Value: WS
  misc_feature: MA Experiment 20001555 PARAMETER Experiment Name: At_Drought_Soil_Dry_P Parameter: Post Timepoint (hr) Value: None
  misc_feature: MA Experiment 20001555 PARAMETER Experiment Name: At_Drought_Soil_Dry_P Parameter: Post-Treatment Value: None
  misc_feature: MA Experiment 20001555 PARAMETER Experiment Name: At_Drought_Soil_Dry_P Parameter: Timepoint (day) Value: 10
  misc_feature: MA Experiment 20001555 PARAMETER Experiment Name: At_Drought_Soil_Dry_P Parameter: Treatment Value: Drought vs. No Drought
  misc_feature: MA Experiment ID: 20001556 Result: Down-regulated in Transcription
  misc_feature: MA Experiment 20001556 PARAMETER Experiment Name: At_Drought_Soil_Dry_P Parameter: Age (day) Value: 26
  misc_feature: MA Experiment 20001556 PARAMETER Experiment Name: At_Drought_Soil_Dry_P Parameter: Organism Value: A. thaliana
  misc_feature: MA Experiment 20001556 PARAMETER Experiment Name: At_Drought_Soil_Dry_P Parameter: Plant Line Value: WS
  misc_feature: MA Experiment 20001556 PARAMETER Experiment Name: At_Drought_Soil_Dry_P Parameter: Post Timepoint (hr) Value: None
  misc_feature: MA Experiment 20001556 PARAMETER Experiment Name: At_Drought_Soil_Dry_P Parameter: Post-Treatment Value: None
  misc_feature: MA Experiment 20001556 PARAMETER Experiment Name: At_Drought_Soil_Dry_P Parameter: Timepoint (day) Value: 12
  misc_feature: MA Experiment 20001556 PARAMETER Experiment Name: At_Drought_Soil_Dry_P Parameter: Treatment Value: Drought vs. No Drought
  misc_feature: MA Experiment ID: 20001557 Result: Down-regulated in Transcription
  misc_feature: MA Experiment 20001557 PARAMETER Experiment Name: At_Drought_Soil_Dry_P Parameter: Age (day) Value: 27
  misc_feature: MA Experiment 20001557 PARAMETER Experiment Name: At_Drought_Soil_Dry_P Parameter: Organism Value: A. thaliana
  misc_feature: MA Experiment 20001557 PARAMETER Experiment Name: At_Drought_Soil_Dry_P Parameter: Plant Line Value: WS
  misc_feature: MA Experiment 20001557 PARAMETER Experiment Name: At_Drought_Soil_Dry_P Parameter: Post Timepoint (hr) Value: 3
  misc_feature: MA Experiment 20001557 PARAMETER Experiment Name: At_Drought_Soil_Dry_P Parameter: Post-Treatment Value: Re-Water vs. No Drought
  misc_feature: MA Experiment 20001557 PARAMETER Experiment Name: At_Drought_Soil_Dry_P Parameter: Timepoint (day) Value: 13
  misc_feature: MA Experiment 20001557 PARAMETER Experiment Name: At_Drought_Soil_Dry_P Parameter: Treatment Value: Drought vs. No Drought
  misc_feature: MA Experiment ID: 20001558 Result: Down-regulated in Transcription
  misc_feature: MA Experiment 20001558 PARAMETER Experiment Name: At_Drought_Soil_Dry_P Parameter: Age (day) Value: 27
  misc_feature: MA Experiment 20001558 PARAMETER Experiment Name: At_Drought_Soil_Dry_P Parameter: Organism Value: A. thaliana
  misc_feature: MA Experiment 20001558 PARAMETER Experiment Name: At_Drought_Soil_Dry_P Parameter: Plant Line Value: WS
  misc_feature: MA Experiment 20001558 PARAMETER Experiment Name: At_Drought_Soil_Dry_P Parameter: Post Timepoint (hr) Value: 6
  misc_feature: MA Experiment 20001558 PARAMETER Experiment Name: At_Drought_Soil_Dry_P Parameter: Post-Treatment Value: Re-Water vs. No Drought
  misc_feature: MA Experiment 20001558 PARAMETER Experiment Name: At_Drought_Soil_Dry_P Parameter: Timepoint (day) Value: 13
  misc_feature: MA Experiment 20001558 PARAMETER Experiment Name: At_Drought_Soil_Dry_P Parameter: Treatment Value: Drought vs. No Drought
  misc_feature: MA Experiment ID: 20001559 Result: Down-regulated in Transcription
  misc_feature: MA Experiment 20001559 PARAMETER Experiment Name: At_Drought_Soil_Dry_P Parameter: Age (day) Value: 28
  misc_feature: MA Experiment 20001559 PARAMETER Experiment Name: At_Drought_Soil_Dry_P Parameter: Organism Value: A. thaliana
  misc_feature: MA Experiment 20001559 PARAMETER Experiment Name: At_Drought_Soil_Dry_P Parameter: Plant Line Value: WS
  misc_feature: MA Experiment 20001559 PARAMETER Experiment Name: At_Drought_Soil_Dry_P Parameter: Post Timepoint (hr) Value: 29
  misc_feature: MA Experiment 20001559 PARAMETER Experiment Name: At_Drought_Soil_Dry_P Parameter: Post-Treatment Value: Re-Water vs. No Drought
  misc_feature: MA Experiment 20001559 PARAMETER Experiment Name: At_Drought_Soil_Dry_P Parameter: Timepoint (day) Value: 14
  misc_feature: MA Experiment 20001559 PARAMETER Experiment Name: At_Drought_Soil_Dry_P Parameter: Treatment Value: Drought vs. No Drought
  misc_feature: MA Experiment ID: 20001560 Result: Down-regulated in Transcription
  misc_feature: MA Experiment 20001560 PARAMETER Experiment Name: At_Drought_Soil_Dry_P Parameter: Age (day) Value: 28
  misc_feature: MA Experiment 20001560 PARAMETER Experiment Name: At_Drought_Soil_Dry_P Parameter: Organism Value: A. thaliana
  misc_feature: MA Experiment 20001560 PARAMETER Experiment Name: At_Drought_Soil_Dry_P Parameter: Plant Line Value: WS
  misc_feature: MA Experiment 20001560 PARAMETER Experiment Name: At_Drought_Soil_Dry_P Parameter: Post Timepoint (hr) Value: None
  misc_feature: MA Experiment 20001560 PARAMETER Experiment Name: At_Drought_Soil_Dry_P Parameter: Post-Treatment Value: None
  misc_feature: MA Experiment 20001560 PARAMETER Experiment Name: At_Drought_Soil_Dry_P Parameter: Timepoint (day) Value: 14
  misc_feature: MA Experiment 20001560 PARAMETER Experiment Name: At_Drought_Soil_Dry_P Parameter: Treatment Value: Drought vs. No Drought
  misc_feature: MA Experiment ID: 20001905 Result: Down-regulated in Transcription
  misc_feature: MA Experiment 20001905 PARAMETER Experiment Name: At_Drought_Reproduction_P Parameter: Age (day) Value: 40
  misc_feature: MA Experiment 20001905 PARAMETER Experiment Name: At_Drought_Reproduction_P Parameter: Organism Value: A. thaliana
  misc_feature: MA Experiment 20001905 PARAMETER Experiment Name: At_Drought_Reproduction_P Parameter: Plant Line Value: WS
  misc_feature: MA Experiment 20001905 PARAMETER Experiment Name: At_Drought_Reproduction_P Parameter: Timepoint (day) Value: 10
  misc_feature: MA Experiment 20001905 PARAMETER Experiment Name: At_Drought_Reproduction_P Parameter: Tissue Value: Rosettes
  misc_feature: MA Experiment 20001905 PARAMETER Experiment Name: At_Drought_Reproduction_P Parameter: Treatment Value: Drought vs. No Drought
atggaagatcggtgcttgatcaagaacgatatcactgaattgattggtaacacaccaatggtgtatctgaacaatgttgttgatggttgcgtggctcgtatcgctgcgaagcttgagatgatggagccttgttctagcgtcaaagacagaatcgcgtatagtatgatcaaagatgcagaagacaaaggattgattactcccggaaagagtacattgatagagccaactgctggtaacaccgggattggtttagcttgcatgggagctgcaagaggctataaagtgatccttgtgatgccttcaactatgagcttagagagaagaatcattctgagggcactaggtgcagagcttcatctctcggaccagcgcataggccttaaaggaatgttggagaaaactgaagcgattttaagcaaaactcctggtggttacattccacaacaatttgaaaatcctgcaaaccccgagattcattaccgaaccacgggaccggaaatatggagagattcagccgggaaagtagatatattggtcgctggcgtagggactggtggaactgctactggagtagggaagttcctcaaggagcagaacaaagacatcaaggtttgtgtggtggaaccagtagaaagtccggtacttagcggaggtcaaccaggtccacatttgattcagggaattggctctggtatcgtcccattcaatttggacttaaccattgttgatgaaattattcaagtggcaggtgaagaggctattgaaacagccaagcttcttgccctcaaagaaggattactggtgggaatatcctctggagccgcagcagcggctgcgttaaaggttgcaaagcggccagaaaacgcggggaaactcattgtggtggtttttcctagtggaggagaacgttatttatcgactaaactgttcgattcgattagatatgaagcagagaatttgcctattgaatgaatgttggacgtgtgccggtttcgtgtgtaataagagacgttcgttccaagagtccaagatttcaatttgcttattactggtcaatgtgaaatgtataaaaagttgcatattcgattatgaataattttagttgactacttcc

SEQ ID NO: 86661 - protein, 323 aa, Arabidopsis thaliana; identical to SEQ ID NO: 75872
  peptide (1)..(323): Ceres Seq. ID no. 12692414
  misc_feature (11)..(300): Pfam Name: Pyridoxal-phosphate dependent enzyme Pfam Description: Pyridoxal-phosphate dependent enzyme
  misc_feature (1)..(323): Homolog of NCBI NO: 15241111 NR Description: cysteine synthase; protein id: At5g28020.1, by cDNA: 154690., supported by cDNA: gi_15983447, supported by gi_4996617 [Arabidopsis thaliana] >gi|4996618|dbj|BAA78561.1|
  misc_feature (1)..(323): Homolog of NCBI NO: 21553635 NR Description: cysteine synthase [Arabidopsis thaliana]
  misc_feature (1)..(323): Homolog of NCBI NO: 2245144 NR Description: O-acetylserine(thiol) lyase [Brassica juncea]
  misc_feature (1)..(323): Homolog of NCBI NO: 15241112 NR Description: cysteine synthase - like; protein id:
  misc_feature (2)..(323): Homolog of NCBI NO: 21593263 NR Description: putative cysteine synthase [Arabidopsis thaliana]
  misc_feature (2)..(323): Homolog of NCBI NO: 12322845 NR Description: putative cysteine synthase; 39489-37437
  misc_feature (2)..(323): Homolog of NCBI NO: 18397061 NR Description: putative cysteine synthase; protein id: supported by cDNA: 37566., supported by cDNA: gi_4996619 thaliana] >gi|25291706|pir||T52609 cysteine synthase (EC
  misc_feature (7)..(323): Homolog of NCBI NO: 38350579 NR Description: cysteine synthase [Nicotiana plumbaginifolia]
  misc_feature (1)..(323): Homolog of NCBI NO: 2493895 NR Description: Cysteine synthase (O-acetylserine sulfhydrylase)

SEQ ID NO: 86662 - protein, 304 aa, Arabidopsis thaliana; identical to SEQ ID NO: 75873
  peptide (1)..(304): Ceres Seq. ID no. 12692415
  misc_feature (1)..(281): Pfam Name: Pyridoxal-phosphate dependent enzyme Pfam Description: Pyridoxal-phosphate dependent enzyme
  misc_feature (1)..(304): Homolog of NCBI NO: 15241111 NR Description: cysteine synthase; protein id: At5g28020.1, by cDNA: 154690., supported by cDNA: gi_15983447, supported by gi_4996617 [Arabidopsis thaliana] >gi|4996618|dbj|BAA78561.1|
  misc_feature (1)..(304): Homolog of NCBI NO: 21553635 NR Description: cysteine synthase [Arabidopsis thaliana]
  misc_feature (1)..(304): Homolog of NCBI NO: 2245144 NR Description: O-acetylserine(thiol) lyase [Brassica juncea]
  misc_feature (1)..(304): Homolog of NCBI NO: 15241112 NR Description: cysteine synthase - like; protein id:
  misc_feature (1)..(304): Homolog of NCBI NO: 21593263 NR Description: putative cysteine synthase [Arabidopsis thaliana]
  misc_feature (1)..(304): Homolog of NCBI NO: 12322845 NR Description: putative cysteine synthase; 39489-37437
  misc_feature (1)..(304): Homolog of NCBI NO: 18397061 NR Description: putative cysteine synthase; protein id: supported by cDNA: 37566., supported by cDNA: gi_4996619 thaliana] >gi|25291706|pir||T52609 cysteine synthase (EC
  misc_feature (1)..(304): Homolog of NCBI NO: 38350579 NR Description: cysteine synthase [Nicotiana plumbaginifolia]
  misc_feature (1)..(304): Homolog of NCBI NO: 2493895 NR Description: Cysteine synthase (O-acetylserine sulfhydrylase)

SEQ ID NO: 86663 - protein, 284 aa, Arabidopsis thaliana; identical to SEQ ID NO: 75874
  peptide (1)..(284): Ceres Seq. ID no. 12692416
  misc_feature (1)..(261): Pfam Name: Pyridoxal-phosphate dependent enzyme Pfam Description: Pyridoxal-phosphate dependent enzyme
  misc_feature (1)..(284): Homolog of NCBI NO: 15241111 NR Description: cysteine synthase; protein id: At5g28020.1, by cDNA: 154690., supported by cDNA: gi_15983447, supported by gi_4996617 [Arabidopsis thaliana] >gi|4996618|dbj|BAA78561.1|
  misc_feature (1)..(284): Homolog of NCBI NO: 21553635 NR Description: cysteine synthase [Arabidopsis thaliana]
  misc_feature (1)..(284): Homolog of NCBI NO: 2245144 NR Description: O-acetylserine(thiol) lyase [Brassica juncea]
  misc_feature (1)..(284): Homolog of NCBI NO: 15241112 NR Description: cysteine synthase - like; protein id:
  misc_feature (1)..(284): Homolog of NCBI NO: 21593263 NR Description: putative cysteine synthase [Arabidopsis thaliana]
  misc_feature (1)..(284): Homolog of NCBI NO: 12322845 NR Description: putative cysteine synthase; 39489-37437
  misc_feature (1)..(284): Homolog of NCBI NO: 18397061 NR Description: putative cysteine synthase; protein id: supported by cDNA: 37566., supported by cDNA: gi_4996619 thaliana] >gi|25291706|pir||T52609 cysteine synthase (EC
  misc_feature (1)..(284): Homolog of NCBI NO: 38350579 NR Description: cysteine synthase [Nicotiana plumbaginifolia]
  misc_feature (1)..(284): Homolog of NCBI NO: 2493895 NR Description: Cysteine synthase (O-acetylserine sulfhydrylase)

SEQ ID NO: 86664 - DNA, 561 bp, Arabidopsis thaliana
  misc_feature (1)..(561): Ceres Seq. ID no. 12692420
  misc_feature: MA Experiment ID: 20000179 Result: Up-regulated in Transcription
  misc_feature: MA Experiment 20000179 PARAMETER Experiment Name: At_Germinating_Seeds_P Parameter: Age (hr) Value: 6 vs. 0
  misc_feature: MA Experiment 20000179 PARAMETER Experiment Name: At_Germinating_Seeds_P Parameter: Tissue Value: Germinating Seeds
  misc_feature: MA Experiment ID: 20000180 Result: Up-regulated in Transcription
  misc_feature: MA Experiment 20000180 PARAMETER Experiment Name: At_Germinating_Seeds_P Parameter: Age (hr) Value: 24 vs. 0
  misc_feature: MA Experiment 20000180 PARAMETER Experiment Name: At_Germinating_Seeds_P Parameter: Tissue Value: Germinating Seeds
  misc_feature: MA Experiment ID: 20000214 Result: Down-regulated in Transcription
  misc_feature: MA Experiment 20000214 PARAMETER Experiment Name: At_4deg_Cold_P Parameter: Timepoint (hr) Value: 6
  misc_feature: MA Experiment ID: 20000452 Result: Down-regulated in Transcription
  misc_feature: MA Experiment 20000452 PARAMETER Experiment Name: At_CS6879_Shoots-Roots_P Parameter: Age (day) Value: 14
  misc_feature: MA Experiment 20000452 PARAMETER Experiment Name: At_CS6879_Shoots-Roots_P Parameter: Organism Value: A. thaliana
  misc_feature: MA Experiment 20000452 PARAMETER Experiment Name: At_CS6879_Shoots-Roots_P Parameter: Plant Line Value: CS6879 vs. WS
  misc_feature: MA Experiment 20000452 PARAMETER Experiment Name: At_CS6879_Shoots-Roots_P Parameter: Tissue Value: Shoots
  misc_feature: MA Experiment ID: 20000573 Result: Down-regulated in Transcription
  misc_feature: MA Experiment 20000573 PARAMETER Experiment Name: At_100uM_ABA_Mutants__P Parameter: Organism Value: A. thaliana
  misc_feature: MA Experiment 20000573 PARAMETER Experiment Name: At_100uM_ABA_Mutants__P Parameter: Plant Line Value: CS22 vs. Ler wt
  misc_feature: MA Experiment 20000573 PARAMETER Experiment Name: At_100uM_ABA_Mutants__P Parameter: Timepoint (hr) Value: N/A
  misc_feature: MA Experiment 20000573 PARAMETER Experiment Name: At_100uM_ABA_Mutants__P Parameter: Tissue Value: Whole Plant
  misc_feature: MA Experiment 20000573 PARAMETER Experiment Name: At_100uM_ABA_Mutants__P Parameter: Treatment Value: None
  misc_feature: MA Experiment ID: 20001248 Result: Up-regulated in Transcription
  misc_feature: MA Experiment 20001248 PARAMETER Experiment Name: At_Far-red-induction_P Parameter: Age (day) Value: 7
  misc_feature: MA Experiment 20001248 PARAMETER Experiment Name: At_Far-red-induction_P Parameter: Light Value: Far-red vs. White
  misc_feature: MA Experiment 20001248 PARAMETER Experiment Name: At_Far-red-induction_P Parameter: Organism Value: A. thaliana
  misc_feature: MA Experiment 20001248 PARAMETER Experiment Name: At_Far-red-induction_P Parameter: Plant Line Value: Columbia
  misc_feature: MA Experiment 20001248 PARAMETER Experiment Name: At_Far-red-induction_P Parameter: Timepoint (hr) Value: 4
  misc_feature: MA Experiment 20001248 PARAMETER Experiment Name: At_Far-red-induction_P Parameter: Tissue Value: Whole Plant
  misc_feature: MA Experiment ID: 20001450 Result: Up-regulated in Transcription
  misc_feature: MA Experiment 20001450 PARAMETER Experiment Name: At_Far-red-induction_P Parameter: Age (day) Value: 7
  misc_feature: MA Experiment 20001450 PARAMETER Experiment Name: At_Far-red-induction_P Parameter: Light Value: Far-red vs. White
  misc_feature: MA Experiment 20001450 PARAMETER Experiment Name: At_Far-red-induction_P Parameter: Organism Value: A. thaliana
  misc_feature: MA Experiment 20001450 PARAMETER Experiment Name: At_Far-red-induction_P Parameter: Plant Line Value: Columbia
  misc_feature: MA Experiment 20001450 PARAMETER Experiment Name: At_Far-red-induction_P Parameter: Timepoint (hr) Value: 8
  misc_feature: MA Experiment 20001450 PARAMETER Experiment Name: At_Far-red-induction_P Parameter: Tissue Value: Whole Plant
  misc_feature: MA Experiment ID: 20001451 Result: Up-regulated in Transcription
  misc_feature: MA Experiment 20001451 PARAMETER Experiment Name: At_Far-red-induction_P Parameter: Age (day) Value: 7
  misc_feature: MA Experiment 20001451 PARAMETER Experiment Name: At_Far-red-induction_P Parameter: Light Value: Far-red vs. White
  misc_feature: MA Experiment 20001451 PARAMETER Experiment Name: At_Far-red-induction_P Parameter: Organism Value: A. thaliana
  misc_feature: MA Experiment 20001451 PARAMETER Experiment Name: At_Far-red-induction_P Parameter: Plant Line Value: Columbia
  misc_feature: MA Experiment 20001451 PARAMETER Experiment Name: At_Far-red-induction_P Parameter: Timepoint (hr) Value: 24
  misc_feature: MA Experiment 20001451 PARAMETER Experiment Name: At_Far-red-induction_P Parameter: Tissue Value: Whole Plant
  misc_feature: MA Experiment ID: 20001557 Result: Down-regulated in Transcription
  misc_feature: MA Experiment 20001557 PARAMETER Experiment Name: At_Drought_Soil_Dry_P Parameter: Age (day) Value: 27
  misc_feature: MA Experiment 20001557 PARAMETER Experiment Name: At_Drought_Soil_Dry_P Parameter: Organism Value: A. thaliana
  misc_feature: MA Experiment 20001557 PARAMETER Experiment Name: At_Drought_Soil_Dry_P Parameter: Plant Line Value: WS
  misc_feature: MA Experiment 20001557 PARAMETER Experiment Name: At_Drought_Soil_Dry_P Parameter: Post Timepoint (hr) Value: 3
  misc_feature: MA Experiment 20001557 PARAMETER Experiment Name: At_Drought_Soil_Dry_P Parameter: Post-Treatment Value: Re-Water vs. No Drought
  misc_feature: MA Experiment 20001557 PARAMETER Experiment Name: At_Drought_Soil_Dry_P Parameter: Timepoint (day) Value: 13
  misc_feature: MA Experiment 20001557 PARAMETER Experiment Name: At_Drought_Soil_Dry_P Parameter: Treatment Value: Drought vs. No Drought
  misc_feature: MA Experiment ID: 20001905 Result: Up-regulated in Transcription
  misc_feature: MA Experiment 20001905 PARAMETER Experiment Name: At_Drought_Reproduction_P Parameter: Age (day) Value: 40
  misc_feature: MA Experiment 20001905 PARAMETER Experiment Name: At_Drought_Reproduction_P Parameter: Organism Value: A. thaliana
  misc_feature: MA Experiment 20001905 PARAMETER Experiment Name: At_Drought_Reproduction_P Parameter: Plant Line Value: WS
  misc_feature: MA Experiment 20001905 PARAMETER Experiment Name: At_Drought_Reproduction_P Parameter: Timepoint (day) Value: 10
  misc_feature: MA Experiment 20001905 PARAMETER Experiment Name: At_Drought_Reproduction_P Parameter: Tissue Value: Rosettes
  misc_feature: MA Experiment 20001905 PARAMETER Experiment Name: At_Drought_Reproduction_P Parameter: Treatment Value: Drought vs. No Drought
atggatgtaattgttcttgtggaagcaaaagatggtaccatctccgtagcttctgcattttccggtcaccaacaagctgttcacgatagcgaccataaattcctaacgcaagctgttgaagaagcttacaagggagtggactgtggtgatggtggcccatttggtgcggtgattgtgcataataacgaggttgtcgctagctgccacaatatggttttgaaatatactgacccaactgcacatgctgaagtcactgccattagagaggcatgtaagaaacttaacaaaatcgagttatcagaatgcgagatttacgcatcttgtgagccatgtccgatgtgcttcggagccatccatctctcgagactcaagaggttggtttatggagccaaagccgaagcagctatagccatcgggtttgatgacttcatagctgatgctttgagaggcacgggggtttaccagaaatctagtctggagatcaagaaagcagacgggaatggcgctgcgattgcggagcaagttttccagaacacaaaggagaagttccgtttatactaa

SEQ ID NO: 86665 - protein, 186 aa, Arabidopsis thaliana
  peptide (1)..(186): Ceres Seq. ID no. 12692421
  misc_feature (28)..(130): Pfam Name: Cytidine and deoxycytidylate deaminase Pfam Description: Cytidine and deoxycytidylate deaminase
  misc_feature (7)..(186): Homolog of NCBI NO: 15241124 NR Description: putative cytidine deaminase - like; protein id: supported by cDNA: 37242., supported by cDNA: gi_14532497 thaliana] >gi|14532498|gb|AAK63977.1| AT5g28050/F15F15_120
  misc_feature (7)..(186): Homolog of NCBI NO: 18266045 NR Description: deoxycytidine deaminase [Brassica oleracea]
  misc_feature (5)..(186): Homolog of NCBI NO: 3204108 NR Description: putative cytidine deaminase; putative
  misc_feature (1)..(186): Homolog of NCBI NO: 40714681 NR Description: putative deoxycytidine deaminase [Oryza sativa
  misc_feature (7)..(186): Homolog of NCBI NO: 23928436 NR Description: putative cytidine deaminase [Zea mays]
  misc_feature (71)..(185): Homolog of NCBI NO: 15229953 NR Description: unknown protein; protein id: At3g05300.1 thaliana] >gi|6729040|gb|AAF27036.1|AC009177_26 unknown protein
  misc_feature (34)..(159): Homolog of NCBI NO: 23021911 NR Description: hypothetical protein [Clostridium thermocellum
  misc_feature (33)..(165): Homolog of NCBI NO: 17554608 NR Description: Cytidine, cytosine, dCTP et al deaminase elegans] >gi|15144367|gb|AAK84461.1|AC006679_2 Hypothetical
  misc_feature (33)..(165): Homolog of NCBI NO: 39582012 NR Description: Hypothetical protein CBG09150 [Caenorhabditis
  misc_feature (31)..(182): Homolog of NCBI NO: 39591749 NR Description: Hypothetical protein CBG18226 [Caenorhabditis
MDVIVLVEAKDGTISVASAFSGHQQAVHDSDHKFLTQAVEEAYKGVDCGDGGPFGAVIVHNNEVVASCHNMVLKYTDPTAHAEVTAIREACKKLNKIELSECEIYASCEPCPMCFGAIHLSRLKRLVYGAKAEAAIAIGFDDFIADALRGTGVYQKSSLEIKKADGNGAAIAEQVFQNTKEKFRLY

SEQ ID NO: 86666 - protein, 116 aa, Arabidopsis thaliana; identical to SEQ ID NO: 23877
  peptide (1)..(116): Ceres Seq. ID no. 12692422
  misc_feature (1)..(60): Pfam Name: Cytidine and deoxycytidylate deaminase Pfam Description: Cytidine and deoxycytidylate deaminase
  misc_feature (1)..(116): Homolog of NCBI NO: 15241124 NR Description: putative cytidine deaminase - like; protein id: supported by cDNA: 37242., supported by cDNA: gi_14532497 thaliana] >gi|14532498|gb|AAK63977.1| AT5g28050/F15F15_120
  misc_feature (1)..(116): Homolog of NCBI NO: 18266045 NR Description: deoxycytidine deaminase [Brassica oleracea]
  misc_feature (1)..(116): Homolog of NCBI NO: 3204108 NR Description: putative cytidine deaminase; putative
  misc_feature (1)..(116): Homolog of NCBI NO: 40714681 NR Description: putative deoxycytidine deaminase [Oryza sativa
  misc_feature (1)..(116): Homolog of NCBI NO: 23928436 NR Description: putative cytidine deaminase [Zea mays]
  misc_feature (1)..(115): Homolog of NCBI NO: 15229953 NR Description: unknown protein; protein id: At3g05300.1 thaliana] >gi|6729040|gb|AAF27036.1|AC009177_26 unknown protein
  misc_feature (1)..(89): Homolog of NCBI NO: 23021911 NR Description: hypothetical protein [Clostridium thermocellum
  misc_feature (1)..(95): Homolog of NCBI NO: 17554608 NR Description: Cytidine, cytosine, dCTP et al deaminase elegans] >gi|15144367|gb|AAK84461.1|AC006679_2 Hypothetical
  misc_feature (1)..(95): Homolog of NCBI NO: 39582012 NR Description: Hypothetical protein CBG09150 [Caenorhabditis
  misc_feature (1)..(112): Homolog of NCBI NO: 39591749 NR Description: Hypothetical protein CBG18226 [Caenorhabditis

SEQ ID NO: 86667 - DNA, 1233 bp, Arabidopsis thaliana
  misc_feature (1)..(1233): Ceres Seq. ID no. 12692465
  misc_feature: MA Experiment ID: 20000166 Result: Up-regulated in Transcription
  misc_feature: MA Experiment 20000166 PARAMETER Experiment Name: At_100uM_ABA_P Parameter: Age (day) Value: 14
  misc_feature: MA Experiment 20000166 PARAMETER Experiment Name: At_100uM_ABA_P Parameter: Organism Value: A. thaliana
  misc_feature: MA Experiment 20000166 PARAMETER Experiment Name: At_100uM_ABA_P Parameter: Plant Line Value: WS
  misc_feature: MA Experiment 20000166 PARAMETER Experiment Name: At_100uM_ABA_P Parameter: Timepoint (hr) Value: 1
  misc_feature: MA Experiment 20000166 PARAMETER Experiment Name: At_100uM_ABA_P Parameter: Tissue Value: Aerial
  misc_feature: MA Experiment 20000166 PARAMETER Experiment Name: At_100uM_ABA_P Parameter: Treatment Value: 100uM ABA vs. No Treatment
  misc_feature: MA Experiment ID: 20000171 Result: Down-regulated in Transcription
  misc_feature: MA Experiment 20000171 PARAMETER Experiment Name: At_42deg_Heat_P Parameter: Age (day) Value: 14
  misc_feature: MA Experiment 20000171 PARAMETER Experiment Name: At_42deg_Heat_P Parameter: Organism Value: A. thaliana
  misc_feature: MA Experiment 20000171 PARAMETER Experiment Name: At_42deg_Heat_P Parameter: Plant Line Value: WS
  misc_feature: MA Experiment 20000171 PARAMETER Experiment Name: At_42deg_Heat_P Parameter: Temperature (deg C) Value: 42 vs. 22
  misc_feature: MA Experiment 20000171 PARAMETER Experiment Name: At_42deg_Heat_P Parameter: Timepoint (hr) Value: 1
  misc_feature: MA Experiment 20000171 PARAMETER Experiment Name: At_42deg_Heat_P Parameter: Tissue Value: Aerial
  misc_feature: MA Experiment ID: 20000173 Result: Down-regulated in Transcription
  misc_feature: MA Experiment 20000173 PARAMETER Experiment Name: At_42deg_Heat_P Parameter: Age (day) Value: 14
  misc_feature: MA Experiment 20000173 PARAMETER Experiment Name: At_42deg_Heat_P Parameter: Organism Value: A. thaliana
  misc_feature: MA Experiment 20000173 PARAMETER Experiment Name: At_42deg_Heat_P Parameter: Plant Line Value: WS
  misc_feature: MA Experiment 20000173 PARAMETER Experiment Name: At_42deg_Heat_P Parameter: Temperature (deg C) Value: 42 vs. 22
  misc_feature: MA Experiment 20000173 PARAMETER Experiment Name: At_42deg_Heat_P Parameter: Timepoint (hr) Value: 6
  misc_feature: MA Experiment 20000173 PARAMETER Experiment Name: At_42deg_Heat_P Parameter: Tissue Value: Aerial
  misc_feature: MA Experiment ID: 20000182 Result: Up-regulated in Transcription
  misc_feature: MA Experiment 20000182 PARAMETER Experiment Name: At_2mM_SA_P Parameter: Age (day) Value: 14
  misc_feature: MA Experiment 20000182 PARAMETER Experiment Name: At_2mM_SA_P Parameter: Organism Value: A. thaliana
  misc_feature: MA Experiment 20000182 PARAMETER Experiment Name: At_2mM_SA_P Parameter: Plant Line Value: WS
  misc_feature: MA Experiment 20000182 PARAMETER Experiment Name: At_2mM_SA_P Parameter: Timepoint (hr) Value: 6
  misc_feature: MA Experiment 20000182 PARAMETER Experiment Name: At_2mM_SA_P Parameter: Tissue Value: Aerial
  misc_feature: MA Experiment 20000182 PARAMETER Experiment Name: At_2mM_SA_P Parameter: Treatment Value: 2mM SA vs. No Treatment
  misc_feature: MA Experiment ID: 20000184 Result: Down-regulated in Transcription
  misc_feature: MA Experiment 20000184 PARAMETER Experiment Name: At_Shoots__P Parameter: Age (day) Value: 7
  misc_feature: MA Experiment 20000184 PARAMETER Experiment Name: At_Shoots__P Parameter: Tissue Value: Shoots vs. Whole Plant
  misc_feature: MA Experiment ID: 20000185 Result: Down-regulated in Transcription
  misc_feature: MA Experiment 20000185 PARAMETER Experiment Name: At_Roots__P Parameter: Age (day) Value: 7 vs. 21
  misc_feature: MA Experiment 20000185 PARAMETER Experiment Name: At_Roots__P Parameter: Organism Value: A. thaliana
  misc_feature: MA Experiment 20000185 PARAMETER Experiment Name: At_Roots__P Parameter: Tissue Value: Roots vs. Whole Plant
  misc_feature: MA Experiment ID: 20000234 Result: Down-regulated in Transcription
  misc_feature: MA Experiment 20000234 PARAMETER Experiment Name: At_Siliques_P Parameter: Age (day) Value: 21
  misc_feature: MA Experiment 20000234 PARAMETER Experiment Name: At_Siliques_P Parameter: Organism Value: A. thaliana
  misc_feature: MA Experiment 20000234 PARAMETER Experiment Name: At_Siliques_P Parameter: Plant Line Value: WS
  misc_feature: MA Experiment 20000234 PARAMETER Experiment Name: At_Siliques_P Parameter: Tissue Value: Less Than 5mm Siliques vs. Whole Plant
  misc_feature: MA Experiment ID: 20000235 Result: Down-regulated in Transcription
  misc_feature: MA Experiment 20000235 PARAMETER Experiment Name: At_Siliques_P Parameter: Age (day) Value: 21
  misc_feature: MA Experiment 20000235 PARAMETER Experiment Name: At_Siliques_P Parameter: Organism Value: A. thaliana
  misc_feature: MA Experiment 20000235 PARAMETER Experiment Name: At_Siliques_P Parameter: Plant Line Value: WS
  misc_feature: MA Experiment 20000235 PARAMETER Experiment Name: At_Siliques_P Parameter: Tissue Value: 5-10mm Siliques vs. Whole Plant
  misc_feature: MA Experiment ID: 20000264 Result: Down-regulated in Transcription
  misc_feature: MA Experiment 20000264 PARAMETER Experiment Name: At_Open_Flower_P Parameter: Age (day) Value: 21
  misc_feature: MA Experiment 20000264 PARAMETER Experiment Name: At_Open_Flower_P Parameter: Plant Line Value: WS
  misc_feature: MA Experiment 20000264 PARAMETER Experiment Name: At_Open_Flower_P Parameter: Tissue Value: Open Flower vs. Whole Plant
  misc_feature: MA Experiment ID: 20000265 Result: Down-regulated in Transcription
  misc_feature: MA Experiment 20000265 PARAMETER Experiment Name: At_Open_Flower_P Parameter: Age (day) Value: 21
  misc_feature: MA Experiment 20000265 PARAMETER Experiment Name: At_Open_Flower_P Parameter: Plant Line Value: WS
  misc_feature: MA Experiment 20000265 PARAMETER Experiment Name: At_Open_Flower_P Parameter: Tissue Value: Closed Flower vs. Whole Plant
  misc_feature: MA Experiment ID: 20000286 Result: Down-regulated in Transcription
  misc_feature: MA Experiment 20000286 PARAMETER Experiment Name: At_Open_Flower_P Parameter: Age (day) Value: 21
  misc_feature: MA Experiment 20000286 PARAMETER Experiment Name: At_Open_Flower_P Parameter: Plant Line Value: WS
  misc_feature: MA Experiment 20000286 PARAMETER Experiment Name: At_Open_Flower_P Parameter: Tissue Value: Half Open vs. Whole Plant
  misc_feature: MA Experiment ID: 20000438 Result: Down-regulated in Transcription
  misc_feature: MA Experiment 20000438 PARAMETER Experiment Name: At_Shoots__P Parameter: Age (day) Value: 14
  misc_feature: MA Experiment 20000438 PARAMETER Experiment Name: At_Shoots__P Parameter: Tissue Value: Shoots vs. Whole Plant
  misc_feature: MA Experiment ID: 20000439 Result: Down-regulated in Transcription
  misc_feature: MA Experiment 20000439 PARAMETER Experiment Name: At_Roots__P Parameter: Age (day) Value: 14 vs. 21
  misc_feature: MA Experiment 20000439 PARAMETER Experiment Name: At_Roots__P Parameter: Organism Value: A. thaliana
  misc_feature: MA Experiment 20000439 PARAMETER Experiment Name: At_Roots__P Parameter: Tissue Value: Roots vs. Whole Plant
  misc_feature: MA Experiment ID: 20000527 Result: Up-regulated in Transcription
  misc_feature: MA Experiment 20000527 PARAMETER Experiment Name: At_10percent_PEG_P Parameter: Age (day) Value: 20
  misc_feature: MA Experiment 20000527 PARAMETER Experiment Name: At_10percent_PEG_P Parameter: Organism Value: A. thaliana
  misc_feature: MA Experiment 20000527 PARAMETER Experiment Name: At_10percent_PEG_P Parameter: Plant Line Value: WS
  misc_feature: MA Experiment 20000527 PARAMETER Experiment Name: At_10percent_PEG_P Parameter: Timepoint (day) Value: 20
  misc_feature: MA Experiment 20000527 PARAMETER Experiment Name: At_10percent_PEG_P Parameter: Tissue Value: Whole Plant
  misc_feature: MA Experiment 20000527 PARAMETER Experiment Name: At_10percent_PEG_P Parameter: Treatment Value: 10percent PEG vs. No Treatment
atgaactgtctgttcttgttcaaatcaaagaaacccagaaagcaacagaaagacaacaacaagaacaaaagaaaaggtaaagagttgttacaaaactcagctccagaactgacgaatcggagtgaaacgtcttcgtttaatctccagacaccaagatcgttgccttctccaagaagtatcaaagatttgtatacagagagagaacaaaatcttagggttttttcttacgaagaactcagtaaagccacttatgtgtttagcagaaagcttgtgatcggtgaaggtggatttggtattgtttataaaggaaagattctcagcaatggagattcttctgatcctccacttgtcgttgccatcaagaaactcaatcgacaaggtttacagggtcacaagcaatggctagcagaggttcagtttcttggagtagtgaatcatccgaacgttgtgaagctcataggttattgctcggaagacggcgagaccgggatcgagaggcttttggtttatgagtacatgtcgaatcgaagtttagaagaccatctcttccctcgtcgatcacacacattaccgtggaaaaaaagactcgagatcatgcttggtgctgctgaaggattgacttatttacatgatcttaaggtgatatatagagatttcaaatcctctaatgtgcttttagacgatcaattctgtccaaaattatcggactttgggcttgccagagaaggacctgatggcgacaatactcatgtcactaccgcaagagttggaacacacggctatgcggctccggaatacgtgcaaacaggtcatcttcggttaaagagcgacgtctatagcttcggtgttgtgctctacgagatcataaccggacgcagaaccattgagaggaacaagccagtggctgaacgaaggctattggattgggtcaaagagtatcctgctgatagtcaacgtttcagcatgatcgttgaccctcggttacgcaacaattatccagctgctggagctaggagtttggctaaattggctgatctttgcctgaaaaagaacgataaagagcgacctacgatggaaattgtagtggaaagattgaaaaagattatcgaagaatcggatagtgaagattatccgatggctacgactacgaccaaggaaagtagtcaggtaaggaggagacaagttgcaaaacctgagaaacaaagtttgagaggggttagtgtcagaggatga

SEQ ID NO: 86668 - protein, 410 aa, Arabidopsis thaliana; identical to SEQ ID NO: 38356
  peptide (1)..(410): Ceres Seq. ID no. 12692466
  misc_feature (86)..(365): Pfam Name: Protein kinase domain Pfam Description: Protein kinase domain
  misc_feature (1)..(410): Homolog of NCBI NO: 15238002 NR Description: protein serine threonine kinase-like; protein id:
  misc_feature (1)..(376): Homolog of NCBI NO: 30684132 NR Description: protein kinase, putative [Arabidopsis thaliana]
  misc_feature (18)..(376): Homolog of NCBI NO: 7434305 NR Description: probable protein kinase - Arabidopsis thaliana NAK like protein kinase [Arabidopsis thaliana]
  misc_feature (38)..(409): Homolog of NCBI NO: 7488278 NR Description: probable protein kinase [imported] - Arabidopsis >gi|3461836|gb|AAC33222.1| putative protein kinase [Arabidopsis >gi|20197438|gb|AAM15076.1| putative protein kinase [Arabidopsis
  misc_feature (1)..(397): Homolog of NCBI NO: 28416693 NR Description: At2g39110 [Arabidopsis thaliana]
  misc_feature (1)..(397): Homolog of NCBI NO: 30687780 NR Description: protein kinase, putative [Arabidopsis thaliana]
  misc_feature (15)..(378): Homolog of NCBI NO: 34901778 NR Description: protein serine/threonine kinase-like [Oryza
  misc_feature (1)..(391): Homolog of NCBI NO: 15232764 NR Description: putative protein kinase; protein id: At3g09830.1, by cDNA: gi_20268726 [Arabidopsis thaliana] putative protein kinase [Arabidopsis thaliana]
  misc_feature (33)..(387): Homolog of NCBI NO: 38345946 NR Description: OSJNBb0103I08.17 [Oryza sativa (japonica
  misc_feature (1)..(397): Homolog of NCBI NO: 25287613 NR Description: probable protein kinase [imported] - Arabidopsis >gi|3928095|gb|AAC79621.1| putative protein kinase [Arabidopsis

SEQ ID NO: 86669 - protein, 238 aa, Arabidopsis thaliana; identical to SEQ ID NO: 38357
  peptide (1)..(238): Ceres Seq. ID no. 12692467
  misc_feature (1)..(193): Pfam Name: Protein kinase domain Pfam Description: Protein kinase domain
  misc_feature (1)..(238): Homolog of NCBI NO: 15238002 NR Description: protein serine threonine kinase-like; protein id:
  misc_feature (1)..(204): Homolog of NCBI NO: 30684132 NR Description: protein kinase, putative [Arabidopsis thaliana]
  misc_feature (1)..(204): Homolog of NCBI NO: 7434305 NR Description: probable protein kinase - Arabidopsis thaliana NAK like protein kinase [Arabidopsis thaliana]
  misc_feature (1)..(237): Homolog of NCBI NO: 7488278 NR Description: probable protein kinase [imported] - Arabidopsis >gi|3461836|gb|AAC33222.1| putative protein kinase [Arabidopsis >gi|20197438|gb|AAM15076.1| putative protein kinase [Arabidopsis
  misc_feature (1)..(225): Homolog of NCBI NO: 28416693 NR Description: At2g39110 [Arabidopsis thaliana]
  misc_feature (1)..(225): Homolog of NCBI NO: 30687780 NR Description: protein kinase, putative [Arabidopsis thaliana]
  misc_feature (1)..(206): Homolog of NCBI NO: 34901778 NR Description: protein serine/threonine kinase-like [Oryza
  misc_feature (1)..(219): Homolog of NCBI NO: 15232764 NR Description: putative protein kinase; protein id: At3g09830.1, by cDNA: gi_20268726 [Arabidopsis thaliana] putative protein kinase [Arabidopsis thaliana]
  misc_feature (1)..(215): Homolog of NCBI NO: 38345946 NR Description: OSJNBb0103I08.17 [Oryza sativa (japonica
  misc_feature (1)..(225): Homolog of NCBI NO: 25287613 NR Description: probable protein kinase [imported] - Arabidopsis >gi|3928095|gb|AAC79621.1| putative protein kinase [Arabidopsis

SEQ ID NO: 86670 - protein, 212 aa, Arabidopsis thaliana; identical to SEQ ID NO: 38358
  peptide (1)..(212): Ceres Seq. ID no. 12692468
  misc_feature (1)..(167): Pfam Name: Protein kinase domain Pfam Description: Protein kinase domain
  misc_feature (1)..(212): Homolog of NCBI NO: 15238002 NR Description: protein serine threonine kinase-like; protein id:
  misc_feature (1)..(178): Homolog of NCBI NO: 30684132 NR Description: protein kinase, putative [Arabidopsis thaliana]
  misc_feature (1)..(178): Homolog of NCBI NO: 7434305 NR Description: probable protein kinase - Arabidopsis thaliana NAK like protein kinase [Arabidopsis thaliana]
  misc_feature (1)..(211): Homolog of NCBI NO: 7488278 NR Description: probable protein kinase [imported] - Arabidopsis >gi|3461836|gb|AAC33222.1| putative protein kinase [Arabidopsis >gi|20197438|gb|AAM15076.1| putative protein kinase [Arabidopsis
  misc_feature (1)..(199): Homolog of NCBI NO: 28416693 NR Description: At2g39110 [Arabidopsis thaliana]
  misc_feature (1)..(199): Homolog of NCBI NO: 30687780 NR Description: protein kinase, putative [Arabidopsis thaliana]
  misc_feature (1)..(180): Homolog of NCBI NO: 34901778 NR Description: protein serine/threonine kinase-like [Oryza
  misc_feature (1)..(193): Homolog of NCBI NO: 15232764 NR Description: putative protein kinase; protein id: At3g09830.1, by cDNA: gi_20268726 [Arabidopsis thaliana] putative protein kinase [Arabidopsis thaliana]
  misc_feature (1)..(189): Homolog of NCBI NO: 38345946 NR Description: OSJNBb0103I08.17 [Oryza sativa (japonica
  misc_feature (1)..(199): Homolog of NCBI NO: 25287613 NR Description: probable protein kinase [imported] - Arabidopsis >gi|3928095|gb|AAC79621.1| putative protein kinase [Arabidopsis

SEQ ID NO: 86671 - DNA, 907 bp, Arabidopsis thaliana
  misc_feature (1)..(907): Ceres Seq. ID no. 12692477
  misc_feature: MA Experiment ID: 108462 Result: Up-regulated in Transcription
  misc_feature: MA Experiment 108462 PARAMETER Experiment Name: At_Germinating_Seeds_cDNA_P Parameter: Age (day) Value: 2 vs. 0
  misc_feature: MA Experiment 108462 PARAMETER Experiment Name: At_Germinating_Seeds_cDNA_P Parameter: Tissue Value: Germinating Seeds
  misc_feature: MA Experiment ID: 108464 Result: Up-regulated in Transcription
  misc_feature: MA Experiment 108464 PARAMETER Experiment Name: At_Germinating_Seeds_cDNA_P Parameter: Age (day) Value: 4 vs. 0
  misc_feature: MA Experiment 108464 PARAMETER Experiment Name: At_Germinating_Seeds_cDNA_P Parameter: Tissue Value: Germinating Seeds
  misc_feature: MA Experiment ID: 108561 Result: Up-regulated in Transcription
  misc_feature: MA Experiment 108561 PARAMETER Experiment Name: At_100uM_ABA_cDNA_P Parameter: Timepoint (hr) Value: 6
  misc_feature: MA Experiment 108561 PARAMETER Experiment Name: At_100uM_ABA_cDNA_P Parameter: Tissue Value: Aerial
  misc_feature: MA Experiment 108561 PARAMETER Experiment Name: At_100uM_ABA_cDNA_P Parameter: Treatment Value: 100uM ABA vs. No Treatment
  misc_feature: MA Experiment ID: 108573 Result: Up-regulated in Transcription
  misc_feature: MA Experiment 108573 PARAMETER Experiment Name: At_Drought_cDNA_P Parameter: Timepoint (hr) Value: 6
  misc_feature: MA Experiment 108573 PARAMETER Experiment Name: At_Drought_cDNA_P Parameter: Tissue Value: Aerial
  misc_feature: MA Experiment 108573 PARAMETER Experiment Name: At_Drought_cDNA_P Parameter: Treatment Value: Drought vs. No Drought
  misc_feature: MA Experiment ID: 108605 Result: Up-regulated in Transcription
  misc_feature: MA Experiment 108605 PARAMETER Experiment Name: At_100uM_ABA_cDNA_P Parameter: Timepoint (hr) Value: 6
  misc_feature: MA Experiment 108605 PARAMETER Experiment Name: At_100uM_ABA_cDNA_P Parameter: Tissue Value: Aerial
  misc_feature: MA Experiment 108605 PARAMETER Experiment Name: At_100uM_ABA_cDNA_P Parameter: Treatment Value: 100uM ABA vs. No Treatment
  misc_feature: MA Experiment ID: 108607 Result: Up-regulated in Transcription
  misc_feature: MA Experiment 108607 PARAMETER Experiment Name: At_100uM_ABA_cDNA_P Parameter: Timepoint (hr) Value: 4
  misc_feature: MA Experiment 108607 PARAMETER Experiment Name: At_100uM_ABA_cDNA_P Parameter: Tissue Value: Aerial
  misc_feature: MA Experiment 108607 PARAMETER Experiment Name: At_100uM_ABA_cDNA_P Parameter: Treatment Value: 100uM ABA vs. No Treatment
  misc_feature: MA Experiment ID: 108609 Result: Up-regulated in Transcription
  misc_feature: MA Experiment 108609 PARAMETER Experiment Name: At_100uM_ABA_cDNA_P Parameter: Timepoint (hr) Value: 24
  misc_feature: MA Experiment 108609 PARAMETER Experiment Name: At_100uM_ABA_cDNA_P Parameter: Tissue Value: Aerial
  misc_feature: MA Experiment 108609 PARAMETER Experiment Name: At_100uM_ABA_cDNA_P Parameter: Treatment Value: 100uM ABA vs. No Treatment
  misc_feature: MA Experiment ID: 20000069 Result: Up-regulated in Transcription
  misc_feature: MA Experiment 20000069 PARAMETER Experiment Name: At_100uM_ABA_Mutants_cDNA_P Parameter: Plant Line Value: CS23
  misc_feature: MA Experiment 20000069 PARAMETER Experiment Name: At_100uM_ABA_Mutants_cDNA_P Parameter: Timepoint (hr) Value: 6
  misc_feature: MA Experiment 20000069 PARAMETER Experiment Name: At_100uM_ABA_Mutants_cDNA_P Parameter: Tissue Value: Aerial
  misc_feature: MA Experiment 20000069 PARAMETER Experiment Name: At_100uM_ABA_Mutants_cDNA_P Parameter: Treatment Value: 100uM ABA vs. No Treatment
  misc_feature: MA Experiment ID: 20000070 Result: Up-regulated in Transcription
  misc_feature: MA Experiment 20000070 PARAMETER Experiment Name: At_100uM_ABA_Mutants_cDNA_P Parameter: Plant Line Value: CS24
  misc_feature: MA Experiment 20000070 PARAMETER Experiment Name: At_100uM_ABA_Mutants_cDNA_P Parameter: Timepoint (hr) Value: 6
  misc_feature: MA Experiment 20000070 PARAMETER Experiment Name: At_100uM_ABA_Mutants_cDNA_P Parameter: Tissue Value: Aerial
  misc_feature: MA Experiment 20000070 PARAMETER Experiment Name: At_100uM_ABA_Mutants_cDNA_P Parameter: Treatment Value: 100uM ABA vs. No Treatment
  misc_feature: MA Experiment ID: 20000071 Result: Up-regulated in Transcription
  misc_feature: MA Experiment 20000071 PARAMETER Experiment Name: At_100uM_ABA_Mutants_cDNA_P Parameter: Plant Line Value: CS8104
  misc_feature: MA Experiment 20000071 PARAMETER Experiment Name: At_100uM_ABA_Mutants_cDNA_P Parameter: Timepoint (hr) Value: 6
  misc_feature: MA Experiment 20000071 PARAMETER Experiment Name: At_100uM_ABA_Mutants_cDNA_P Parameter: Tissue Value: Aerial
  misc_feature: MA Experiment 20000071 PARAMETER Experiment Name: At_100uM_ABA_Mutants_cDNA_P Parameter: Treatment Value: 100uM ABA vs. No Treatment
  misc_feature: MA Experiment ID: 20000072 Result: Up-regulated in Transcription
  misc_feature: MA Experiment 20000072 PARAMETER Experiment Name: At_100uM_ABA_Mutants_cDNA_P Parameter: Plant Line Value: CS8105
  misc_feature: MA Experiment 20000072 PARAMETER Experiment Name: At_100uM_ABA_Mutants_cDNA_P Parameter: Timepoint (hr) Value: 6
  misc_feature: MA Experiment 20000072 PARAMETER Experiment Name: At_100uM_ABA_Mutants_cDNA_P Parameter: Tissue Value: Aerial
  misc_feature: MA Experiment 20000072 PARAMETER Experiment Name: At_100uM_ABA_Mutants_cDNA_P Parameter: Treatment Value: 100uM ABA vs. No Treatment
  misc_feature: MA Experiment ID: 20000086 Result: Up-regulated in Transcription
  misc_feature: MA Experiment 20000086 PARAMETER Experiment Name: At_100uM_ABA_Mutants_cDNA_P Parameter: Plant Line Value: CS22
  misc_feature: MA Experiment 20000086 PARAMETER Experiment Name: At_100uM_ABA_Mutants_cDNA_P Parameter: Timepoint (hr) Value: 6
  misc_feature: MA Experiment 20000086 PARAMETER Experiment Name: At_100uM_ABA_Mutants_cDNA_P Parameter: Tissue Value: Aerial
  misc_feature: MA Experiment 20000086 PARAMETER Experiment Name: At_100uM_ABA_Mutants_cDNA_P Parameter: Treatment Value: 100uM ABA vs. No Treatment
  misc_feature: MA Experiment ID: 20000087 Result: Up-regulated in Transcription
  misc_feature: MA Experiment 20000087 PARAMETER Experiment Name: At_100uM_ABA_Mutants_cDNA_P Parameter: Plant Line Value: WS
  misc_feature: MA Experiment 20000087 PARAMETER Experiment Name: At_100uM_ABA_Mutants_cDNA_P Parameter: Timepoint (hr) Value: 6
  misc_feature: MA Experiment 20000087 PARAMETER Experiment Name: At_100uM_ABA_Mutants_cDNA_P Parameter: Tissue Value: Aerial
  misc_feature: MA Experiment 20000087 PARAMETER Experiment Name: At_100uM_ABA_Mutants_cDNA_P Parameter: Treatment Value: 100uM ABA vs. No Treatment
  misc_feature: MA Experiment ID: 20000117 Result: Up-regulated in Transcription
  misc_feature: MA Experiment 20000117 PARAMETER Experiment Name: At_100uM_ABA_Mutants_cDNA_P Parameter: Plant Line Value: Columbia
  misc_feature: MA Experiment 20000117 PARAMETER Experiment Name: At_100uM_ABA_Mutants_cDNA_P Parameter: Timepoint (hr) Value: 6
  misc_feature: MA Experiment 20000117 PARAMETER Experiment Name: At_100uM_ABA_Mutants_cDNA_P Parameter: Tissue Value: Aerial
  misc_feature: MA Experiment 20000117 PARAMETER Experiment Name: At_100uM_ABA_Mutants_cDNA_P Parameter: Treatment Value: 100uM ABA vs. No Treatment
  misc_feature: MA Experiment ID: 20000184 Result: Down-regulated in Transcription
  misc_feature: MA Experiment 20000184 PARAMETER Experiment Name: At_Shoots__P Parameter: Age (day) Value: 7
  misc_feature: MA Experiment 20000184 PARAMETER Experiment Name: At_Shoots__P Parameter: Tissue Value: Shoots vs. Whole Plant
  misc_feature: MA Experiment ID: 20000438 Result: Down-regulated in Transcription
  misc_feature: MA Experiment 20000438 PARAMETER Experiment Name: At_Shoots__P Parameter: Age (day) Value: 14
  misc_feature: MA Experiment 20000438 PARAMETER Experiment Name: At_Shoots__P Parameter: Tissue Value: Shoots vs. Whole Plant
  misc_feature: MA Experiment ID: 20000453 Result: Up-regulated in Transcription
  misc_feature: MA Experiment 20000453 PARAMETER Experiment Name: At_100uM_ABA_P Parameter: Age (day) Value: 15
  misc_feature: MA Experiment 20000453 PARAMETER Experiment Name: At_100uM_ABA_P Parameter: Organism Value: A. thaliana
  misc_feature: MA Experiment 20000453 PARAMETER Experiment Name: At_100uM_ABA_P Parameter: Plant Line Value: WS
  misc_feature: MA Experiment 20000453 PARAMETER Experiment Name: At_100uM_ABA_P Parameter: Timepoint (hr) Value: 24
  misc_feature: MA Experiment 20000453 PARAMETER Experiment Name: At_100uM_ABA_P Parameter: Tissue Value: Aerial
  misc_feature: MA Experiment 20000453 PARAMETER Experiment Name: At_100uM_ABA_P Parameter: Treatment Value: 100uM ABA vs. No Treatment
  misc_feature: MA Experiment ID: 20001247 Result: Up-regulated in Transcription
  misc_feature: MA Experiment 20001247 PARAMETER Experiment Name: At_Far-red-induction_P Parameter: Age (day) Value: 7
  misc_feature: MA Experiment 20001247 PARAMETER Experiment Name: At_Far-red-induction_P Parameter: Light Value: Far-red vs. White
  misc_feature: MA Experiment 20001247 PARAMETER Experiment Name: At_Far-red-induction_P Parameter: Organism Value: A. thaliana
  misc_feature: MA Experiment 20001247 PARAMETER Experiment Name: At_Far-red-induction_P Parameter: Plant Line Value: Columbia
  misc_feature: MA Experiment 20001247 PARAMETER Experiment Name: At_Far-red-induction_P Parameter: Timepoint (hr) Value: 1
  misc_feature: MA Experiment 20001247 PARAMETER Experiment Name: At_Far-red-induction_P Parameter: Tissue Value: Whole Plant
  misc_feature: MA Experiment ID: 20001248 Result: Up-regulated in Transcription
  misc_feature: MA Experiment 20001248 PARAMETER Experiment Name: At_Far-red-induction_P Parameter: Age (day) Value: 7
  misc_feature: MA Experiment 20001248 PARAMETER Experiment Name: At_Far-red-induction_P Parameter: Light Value: Far-red vs. White
  misc_feature: MA Experiment 20001248 PARAMETER Experiment Name: At_Far-red-induction_P Parameter: Organism Value: A. thaliana
  misc_feature: MA Experiment 20001248 PARAMETER Experiment Name: At_Far-red-induction_P Parameter: Plant Line Value: Columbia
  misc_feature: MA Experiment 20001248 PARAMETER Experiment Name: At_Far-red-induction_P Parameter: Timepoint (hr) Value: 4
  misc_feature: MA Experiment 20001248 PARAMETER Experiment Name: At_Far-red-induction_P Parameter: Tissue Value: Whole Plant
  misc_feature: MA Experiment ID: 20001450 Result: Up-regulated in Transcription
  misc_feature: MA Experiment 20001450 PARAMETER Experiment Name: At_Far-red-induction_P Parameter: Age (day) Value: 7
  misc_feature: MA Experiment 20001450 PARAMETER Experiment Name: At_Far-red-induction_P Parameter: Light Value: Far-red vs. White
  misc_feature: MA Experiment 20001450 PARAMETER Experiment Name: At_Far-red-induction_P Parameter: Organism Value: A. thaliana
  misc_feature: MA Experiment 20001450 PARAMETER Experiment Name: At_Far-red-induction_P Parameter: Plant Line Value: Columbia
  misc_feature: MA Experiment 20001450 PARAMETER Experiment Name: At_Far-red-induction_P Parameter: Timepoint (hr) Value: 8
  misc_feature: MA Experiment 20001450 PARAMETER Experiment Name: At_Far-red-induction_P Parameter: Tissue Value: Whole Plant
tttctcagtttttcccctctttttaccttttctggaaaaaagttagataaaatcggaattgtttggattagggcttcgattttttgatgttgttgtatacttttttcaatagagatttgattgtgaaacttttgtcgtcgtagctttaagcaaacaaaaaaaaaagatgaccggcgttggcgagaatcagcttatctccattcaacctgatgaactcaaatttctctttgaacttgagaagcaaagctactgtgatcttaaagttgccaataaaacagagaactatgttgctttcaaggtgaaaacaacatctccaaagaagtattttgtaagacctaacactggtgtcattcagccatgggactcttgcatcattagagttactctacaagcgcaacgagagtatcctccagatatgcagtgcaaagacaaatttctcctgcaaagtaccattgtacctccacacactgatgtggatgaacttcctcaagacactttcaccaaggacagtggaaagacattaacagaatgtaagctcaaagtctcttatattaccccgtctacaacccaaagatcctctgaatccggagcaacaaatggtgatggacaaagctcggaaaccatctctactatacagcggctgaaggaagagcgagatgcagccgttaagcaaacacaacagctgcaacatgaattggaaacggtaaggaggcggagaaaccagaggaacagcggaaatgggctatccttgaagttggcagctatggttggactcatcggactcatcatcggtttcatcctaaaacttaccttagcttctcccacataacaactcttgagcttcaacacatcgcctatcatctcaatatatgtaacagccgaatcaaaacagattcacatattttcg

SEQ ID NO: 86672 - protein, 220 aa, Arabidopsis thaliana; identical to SEQ ID NO: 21397
  peptide (1)..(220): Ceres Seq. ID no. 12692478
  misc_feature (1)..(220): Homolog of NCBI NO: 15238034 NR Description: VAMP (vesicle-associated membrane
  misc_feature (54)..(220): Homolog of NCBI NO: 28207603 NR Description: putative VAMP-associated protein [Brassica rapa
  misc_feature (5)..(219): Homolog of NCBI NO: 14140121 NR Description: putative vesicle-associated membrane protein
  misc_feature (8)..(219): Homolog of NCBI NO: 37536644 NR Description: putative membrane protein [Oryza sativa (japonica group)] >gi|13876524|gb|AAK43500.1| putative membrane protein
  misc_feature (1)..(143): Homolog of NCBI NO: 18411661 NR Description: putative protein; protein id: At3g60600.1, by cDNA: 19714., supported by cDNA: gi_17473762 [Arabidopsis >gi|17473763|gb|AAL38320.1| putative protein [Arabidopsis
  misc_feature (149)..(215): Homolog of NCBI NO: 18411661 NR Description: putative protein; protein id: At3g60600.1, by cDNA: 19714., supported by cDNA: gi_17473762 [Arabidopsis >gi|17473763|gb|AAL38320.1| putative protein [Arabidopsis
  misc_feature (4)..(143): Homolog of NCBI NO: 21554053 NR Description: putative VAMP-associated protein [Arabidopsis
  misc_feature (149)..(215): Homolog of NCBI NO: 21554053 NR Description: putative VAMP-associated protein [Arabidopsis
  misc_feature (1)..(143): Homolog of NCBI NO: 11288305 NR Description: hypothetical protein T4C21.10 - Arabidopsis >gi|7329670|emb|CAB82664.1| putative protein [Arabidopsis
  misc_feature (149)..(215): Homolog of NCBI NO: 11288305 NR Description: hypothetical protein T4C21.10 - Arabidopsis >gi|7329670|emb|CAB82664.1| putative protein [Arabidopsis

SEQ ID NO: 86673 - protein, 137 aa, Arabidopsis thaliana; identical to SEQ ID NO: 21398
  peptide (1)..(137): Ceres Seq. ID no. 12692479
  misc_feature (1)..(137): Homolog of NCBI NO: 15238034 NR Description: VAMP (vesicle-associated membrane
  misc_feature (1)..(137): Homolog of NCBI NO: 28207603 NR Description: putative VAMP-associated protein [Brassica rapa
  misc_feature (1)..(136): Homolog of NCBI NO: 14140121 NR Description: putative vesicle-associated membrane protein
  misc_feature (1)..(136): Homolog of NCBI NO: 37536644 NR Description: putative membrane protein [Oryza sativa (japonica group)] >gi|13876524|gb|AAK43500.1| putative membrane protein
  misc_feature (1)..(60): Homolog of NCBI NO: 18411661 NR Description: putative protein; protein id: At3g60600.1, by cDNA: 19714., supported by cDNA: gi_17473762 [Arabidopsis >gi|17473763|gb|AAL38320.1| putative protein [Arabidopsis
  misc_feature (66)..(132): Homolog of NCBI NO: 18411661 NR Description: putative protein; protein id: At3g60600.1, by cDNA: 19714., supported by cDNA: gi_17473762 [Arabidopsis >gi|17473763|gb|AAL38320.1| putative protein [Arabidopsis
  misc_feature (1)..(60): Homolog of NCBI NO: 21554053 NR Description: putative VAMP-associated protein [Arabidopsis
  misc_feature (66)..(132): Homolog of NCBI NO: 21554053 NR Description: putative VAMP-associated protein [Arabidopsis
  misc_feature (1)..(60): Homolog of NCBI NO: 11288305 NR Description: hypothetical protein T4C21.10 - Arabidopsis >gi|7329670|emb|CAB82664.1| putative protein [Arabidopsis
  misc_feature (66)..(132): Homolog of NCBI NO: 11288305 NR Description: hypothetical protein T4C21.10 - Arabidopsis >gi|7329670|emb|CAB82664.1| putative protein [Arabidopsis

SEQ ID NO: 86674 - DNA, 917 bp, Arabidopsis thaliana
  misc_feature (1)..(917): Ceres Seq. ID no. 12692480
  misc_feature: MA Experiment ID: 108434 Result: Up-regulated in Transcription
  misc_feature: MA Experiment 108434 PARAMETER Experiment Name: At_Root_Tips_cDNA_P Parameter: Tissue Value: Root Tips
  misc_feature: MA Experiment ID: 108435 Result: Down-regulated in Transcription
  misc_feature: MA Experiment 108435 PARAMETER Experiment Name: At_stm_Mutants_cDNA_P Parameter: Plant Line Value: wt Landsburg vs stm
  misc_feature: MA Experiment 108435 PARAMETER Experiment Name: At_stm_Mutants_cDNA_P Parameter: Tissue Value: Shoot Apical Meristem Region
  misc_feature: MA Experiment ID: 108461 Result: Up-regulated in Transcription
  misc_feature: MA Experiment 108461 PARAMETER Experiment Name: At_Germinating_Seeds_cDNA_P Parameter: Age (day) Value: 1 vs. 0
  misc_feature: MA Experiment 108461 PARAMETER Experiment Name: At_Germinating_Seeds_cDNA_P Parameter: Tissue Value: Germinating Seeds
  misc_feature: MA Experiment ID: 108573 Result: Down-regulated in Transcription
  misc_feature: MA Experiment 108573 PARAMETER Experiment Name: At_Drought_cDNA_P Parameter: Timepoint (hr) Value: 6
  misc_feature: MA Experiment 108573 PARAMETER Experiment Name: At_Drought_cDNA_P Parameter: Tissue Value: Aerial
  misc_feature: MA Experiment 108573 PARAMETER Experiment Name: At_Drought_cDNA_P Parameter: Treatment Value: Drought vs. No Drought
  misc_feature: MA Experiment ID: 108595 Result: Down-regulated in Transcription
  misc_feature: MA Experiment 108595 PARAMETER Experiment Name: At_Ler-pi_Ovule_cDNA_P Parameter: Plant Line Value: null
  misc_feature: MA Experiment ID: 20000071 Result: Down-regulated in Transcription
  misc_feature: MA Experiment 20000071 PARAMETER Experiment Name: At_100uM_ABA_Mutants_cDNA_P Parameter: Plant Line Value: CS8104
  misc_feature: MA Experiment 20000071 PARAMETER Experiment Name: At_100uM_ABA_Mutants_cDNA_P Parameter: Timepoint (hr) Value: 6
  misc_feature: MA Experiment 20000071 PARAMETER Experiment Name: At_100uM_ABA_Mutants_cDNA_P Parameter: Tissue Value: Aerial
  misc_feature: MA Experiment 20000071 PARAMETER Experiment Name: At_100uM_ABA_Mutants_cDNA_P Parameter: Treatment Value: 100uM ABA vs. No Treatment
  misc_feature: MA Experiment ID: 20000117 Result: Down-regulated in Transcription
  misc_feature: MA Experiment 20000117 PARAMETER Experiment Name: At_100uM_ABA_Mutants_cDNA_P Parameter: Plant Line Value: Columbia
  misc_feature: MA Experiment 20000117 PARAMETER Experiment Name: At_100uM_ABA_Mutants_cDNA_P Parameter: Timepoint (hr) Value: 6
  misc_feature: MA Experiment 20000117 PARAMETER Experiment Name: At_100uM_ABA_Mutants_cDNA_P Parameter: Tissue Value: Aerial
  misc_feature: MA Experiment 20000117 PARAMETER Experiment Name: At_100uM_ABA_Mutants_cDNA_P Parameter: Treatment Value: 100uM ABA vs. No Treatment
  misc_feature: MA Experiment ID: 20000185 Result: Down-regulated in Transcription
  misc_feature: MA Experiment 20000185 PARAMETER Experiment Name: At_Roots__P Parameter: Age (day) Value: 7 vs. 21
  misc_feature: MA Experiment 20000185 PARAMETER Experiment Name: At_Roots__P Parameter: Organism Value: A. thaliana
  misc_feature: MA Experiment 20000185 PARAMETER Experiment Name: At_Roots__P Parameter: Tissue Value: Roots vs. Whole Plant
  misc_feature: MA Experiment ID: 20000439 Result: Down-regulated in Transcription
  misc_feature: MA Experiment 20000439 PARAMETER Experiment Name: At_Roots__P Parameter: Age (day) Value: 14 vs. 21
  misc_feature: MA Experiment 20000439 PARAMETER Experiment Name: At_Roots__P Parameter: Organism Value: A. thaliana
  misc_feature: MA Experiment 20000439 PARAMETER Experiment Name: At_Roots__P Parameter: Tissue Value: Roots vs. Whole Plant
  misc_feature: MA Experiment ID: 20000794 Result: Down-regulated in Transcription
  misc_feature: MA Experiment 20000794 PARAMETER Experiment Name: At_Petals_P Parameter: Age (day) Value: 23-25 days
  misc_feature: MA Experiment 20000794 PARAMETER Experiment Name: At_Petals_P Parameter: Plant Line Value: WS
  misc_feature: MA Experiment 20000794 PARAMETER Experiment Name: At_Petals_P Parameter: Tissue Value: Petals vs. Whole plant
  misc_feature: MA Experiment ID: 20001451 Result: Down-regulated in Transcription
  misc_feature: MA Experiment 20001451 PARAMETER Experiment Name: At_Far-red-induction_P Parameter: Age (day) Value: 7
  misc_feature: MA Experiment 20001451 PARAMETER Experiment Name: At_Far-red-induction_P Parameter: Light Value: Far-red vs. White
  misc_feature: MA Experiment 20001451 PARAMETER Experiment Name: At_Far-red-induction_P Parameter: Organism Value: A. thaliana
  misc_feature: MA Experiment 20001451 PARAMETER Experiment Name: At_Far-red-induction_P Parameter: Plant Line Value: Columbia
  misc_feature: MA Experiment 20001451 PARAMETER Experiment Name: At_Far-red-induction_P Parameter: Timepoint (hr) Value: 24
  misc_feature: MA Experiment 20001451 PARAMETER Experiment Name: At_Far-red-induction_P Parameter: Tissue Value: Whole Plant
  misc_feature: MA Experiment ID: 20001560 Result: Up-regulated in Transcription
  misc_feature: MA Experiment 20001560 PARAMETER Experiment Name: At_Drought_Soil_Dry_P Parameter: Age (day) Value: 28
  misc_feature: MA Experiment 20001560 PARAMETER Experiment Name: At_Drought_Soil_Dry_P Parameter: Organism Value: A. thaliana
  misc_feature: MA Experiment 20001560 PARAMETER Experiment Name: At_Drought_Soil_Dry_P Parameter: Plant Line Value: WS
  misc_feature: MA Experiment 20001560 PARAMETER Experiment Name: At_Drought_Soil_Dry_P Parameter: Post Timepoint (hr) Value: None
  misc_feature: MA Experiment 20001560 PARAMETER Experiment Name: At_Drought_Soil_Dry_P Parameter: Post-Treatment Value: None
  misc_feature: MA Experiment 20001560 PARAMETER Experiment Name: At_Drought_Soil_Dry_P Parameter: Timepoint (day) Value: 14
  misc_feature: MA Experiment 20001560 PARAMETER Experiment Name: At_Drought_Soil_Dry_P Parameter: Treatment Value: Drought vs. No Drought
  misc_feature: MA Experiment ID: 20001906 Result: Down-regulated in Transcription
  misc_feature: MA Experiment 20001906 PARAMETER Experiment Name: At_Drought_Reproduction_P Parameter: Age (day) Value: 35
  misc_feature: MA Experiment 20001906 PARAMETER Experiment Name: At_Drought_Reproduction_P Parameter: Organism Value: A. thaliana
  misc_feature: MA Experiment 20001906 PARAMETER Experiment Name: At_Drought_Reproduction_P Parameter: Plant Line Value: WS
  misc_feature: MA Experiment 20001906 PARAMETER Experiment Name: At_Drought_Reproduction_P Parameter: Timepoint (day) Value: 5
  misc_feature: MA Experiment 20001906 PARAMETER Experiment Name: At_Drought_Reproduction_P Parameter: Tissue Value: Siliques
  misc_feature: MA Experiment 20001906 PARAMETER Experiment Name: At_Drought_Reproduction_P Parameter: Treatment Value: Drought vs. No Drought
  misc_feature: MA Experiment ID: 20001908 Result: Down-regulated in Transcription
  misc_feature: MA Experiment 20001908 PARAMETER Experiment Name: At_Drought_Reproduction_P Parameter: Age (day) Value: 40
  misc_feature: MA Experiment 20001908 PARAMETER Experiment Name: At_Drought_Reproduction_P Parameter: Organism Value: A. thaliana
  misc_feature: MA Experiment 20001908 PARAMETER Experiment Name: At_Drought_Reproduction_P Parameter: Plant Line Value: WS
  misc_feature: MA Experiment 20001908 PARAMETER Experiment Name: At_Drought_Reproduction_P Parameter: Timepoint (day) Value: 10
  misc_feature: MA Experiment 20001908 PARAMETER Experiment Name: At_Drought_Reproduction_P Parameter: Tissue Value: Siliques
  misc_feature: MA Experiment 20001908 PARAMETER Experiment Name: At_Drought_Reproduction_P Parameter: Treatment Value: Drought vs. No Drought
  misc_feature: MA Experiment ID: 20001911 Result: Down-regulated in Transcription
  misc_feature: MA Experiment 20001911 PARAMETER Experiment Name: At_Drought_Reproduction_P Parameter: Age (day) Value: 40
  misc_feature: MA Experiment 20001911 PARAMETER Experiment Name: At_Drought_Reproduction_P Parameter: Organism Value: A. thaliana
  misc_feature: MA Experiment 20001911 PARAMETER Experiment Name: At_Drought_Reproduction_P Parameter: Plant Line Value: WS
  misc_feature: MA Experiment 20001911 PARAMETER Experiment Name: At_Drought_Reproduction_P Parameter: Timepoint (day) Value: 10
  misc_feature: MA Experiment 20001911 PARAMETER Experiment Name: At_Drought_Reproduction_P Parameter: Tissue Value: Flowers
  misc_feature: MA Experiment 20001911 PARAMETER Experiment Name: At_Drought_Reproduction_P Parameter: Treatment Value: Drought vs. No Drought
aaggctcttctttactctggtttcgagtttgggttgtgcaaacatggcgacgagctctcatcttcttcctcaggcattgcatatgataccgagaaccccttctttctcgtcgaagaatttaggggtttcttcaattctaccacgagcatcatcagtgaactcaagactatcagtttctagggtttttctcaatcattcgagctccaattttggtttcgccatcgattccaagaagagaaaagagtttatcgctaaagctgaagagagtactgaaggtgaaactgaggctgttgtggagaatgctgttgaaactgaagcggaaggagaaggagaagccactgttgcggcggaggaagctaaacctccgtggaagacgagagtcaagctcggagatatcatggggctactgaacaagaaagctattgaggttgcagagactgtaagaccggttcctggacttaggactggggatattgtagaaatcaaactggaagttcctgagaacaaacgtaggctatctatctacaaaggtattgtgatgtctagacaaaatgcaggcatccacactactatccgtatccggaggattattgcaggcattggtgttgaaatcgtctttcccatatactctcccaacataaaggagataaaagtggtaagtcacaggaaagtgagaagagcaagactttactatctgagggacaaacttcctcgtctctcaacttttaaatgatcaccaaacccaacaccagtcttgtcttgtgttgtcttcaatctccaaaggtagctagctactctcttttctcttgtaataattgtttgtttgtttcgtcttttggatttcatttcttttcatgtaatttacagtaacagtaatttaagaaaagtaaatcaatgttgattgttttgatcttgag

SEQ ID NO: 86675 - protein, 243 aa, Arabidopsis thaliana; identical to SEQ ID NO: 21468
  peptide (1)..(243): Ceres Seq. ID no. 12692481
  misc_feature (139)..(243): Pfam Name: Ribosomal protein L19 Pfam Description: Ribosomal protein L19
  misc_feature (20)..(243): Homolog of NCBI NO: 8809601 NR Description: contains similarity to plastid ribosomal protein
  misc_feature (15)..(243): Homolog of NCBI NO: 18422764 NR Description: putative protein; protein id: At5g47190.1, by cDNA: 30034. [Arabidopsis thaliana] unknown protein [Arabidopsis thaliana]
  misc_feature (15)..(243): Homolog of NCBI NO: 21592584 NR Description: contains similarity to plastid ribosomal protein
  misc_feature (15)..(243): Homolog of NCBI NO: 18414915 NR Description: putative protein; protein id: At4g17560.1, by cDNA: 2161., supported by cDNA: gi_17065489, supported by gi_20148592 [Arabidopsis thaliana] >gi|17065490|gb|AAL32899.1|
  misc_feature (18)..(243): Homolog of NCBI NO: 7582403 NR Description: plastid ribosomal protein L19 precursor [Spinacia
  misc_feature (13)..(243): Homolog of NCBI NO: 14140122 NR Description: putative plastid ribosomal protein L19 precursor
  misc_feature (52)..(170): Homolog of NCBI NO: 7485084 NR Description: hypothetical protein - Arabidopsis thaliana hypothetical protein [Arabidopsis thaliana]
  misc_feature (14)..(239): Homolog of NCBI NO: 15239778 NR Description: putative protein; protein id: At5g11750.1, by cDNA: gi_14030716 [Arabidopsis thaliana]
  misc_feature (18)..(239): Homolog of NCBI NO: 15234249 NR Description: putative protein; protein id: At4g11630.1, by cDNA: gi_14994248, supported by cDNA: gi_16974528, supported cDNA: gi_19699145 [Arabidopsis thaliana] >gi|7487679|pir||T04210
  misc_feature (18)..(239): Homolog of NCBI NO: 18395422 NR Description: expressed protein; protein id: At1g24240.1, by cDNA: gi_15146227 [Arabidopsis thaliana]

SEQ ID NO: 86676 - protein, 229 aa, Arabidopsis thaliana; identical to SEQ ID NO: 21469
  peptide (1)..(229): Ceres Seq. ID no. 12692482
  misc_feature (125)..(229): Pfam Name: Ribosomal protein L19 Pfam Description: Ribosomal protein L19
  misc_feature (6)..(229): Homolog of NCBI NO: 8809601 NR Description: contains similarity to plastid ribosomal protein
  misc_feature (1)..(229): Homolog of NCBI NO: 18422764 NR Description: putative protein; protein id: At5g47190.1, by cDNA: 30034. [Arabidopsis thaliana] unknown protein [Arabidopsis thaliana]
  misc_feature (1)..(229): Homolog of NCBI NO: 21592584 NR Description: contains similarity to plastid ribosomal protein
  misc_feature (1)..(229): Homolog of NCBI NO: 18414915 NR Description: putative protein; protein id: At4g17560.1, by cDNA: 2161., supported by cDNA: gi_17065489, supported by gi_20148592 [Arabidopsis thaliana] >gi|17065490|gb|AAL32899.1|
  misc_feature (4)..(229): Homolog of NCBI NO: 7582403 NR Description: plastid ribosomal protein L19 precursor [Spinacia
  misc_feature (1)..(229): Homolog of NCBI NO: 14140122 NR Description: putative plastid ribosomal protein L19 precursor
  misc_feature (38)..(156): Homolog of NCBI NO: 7485084 NR Description: hypothetical protein - Arabidopsis thaliana hypothetical protein [Arabidopsis thaliana]
  misc_feature (1)..(225): Homolog of NCBI NO: 15239778 NR Description: putative protein; protein id: At5g11750.1, by cDNA: gi_14030716 [Arabidopsis thaliana]
  misc_feature (4)..(225): Homolog of NCBI NO: 15234249 NR Description: putative protein; protein id: At4g11630.1, by cDNA: gi_14994248, supported by cDNA: gi_16974528, supported cDNA: gi_19699145 [Arabidopsis thaliana] >gi|7487679|pir||T04210
  misc_feature (4)..(225): Homolog of NCBI NO: 18395422 NR Description: expressed protein; protein id: At1g24240.1, by cDNA: gi_15146227 [Arabidopsis thaliana]

SEQ ID NO: 86677 - protein, 216 aa, Arabidopsis thaliana; identical to SEQ ID NO: 21470
  peptide (1)..(216): Ceres Seq. ID no. 12692483
  misc_feature (112)..(216): Pfam Name: Ribosomal protein L19 Pfam Description: Ribosomal protein L19
  misc_feature (1)..(216): Homolog of NCBI NO: 8809601 NR Description: contains similarity to plastid ribosomal protein
  misc_feature (1)..(216): Homolog of NCBI NO: 18422764 NR Description: putative protein; protein id: At5g47190.1, by cDNA: 30034. [Arabidopsis thaliana] unknown protein [Arabidopsis thaliana]
  misc_feature (1)..(216): Homolog of NCBI NO: 21592584 NR Description: contains similarity to plastid ribosomal protein
  misc_feature (1)..(216): Homolog of NCBI NO: 18414915 NR Description: putative protein; protein id: At4g17560.1, by cDNA: 2161., supported by cDNA: gi_17065489, supported by gi_20148592 [Arabidopsis thaliana] >gi|17065490|gb|AAL32899.1|
  misc_feature (1)..(216): Homolog of NCBI NO: 7582403 NR Description: plastid ribosomal protein L19 precursor [Spinacia
  misc_feature (1)..(216): Homolog of NCBI NO: 14140122 NR Description: putative plastid ribosomal protein L19 precursor
  misc_feature (25)..(143): Homolog of NCBI NO: 7485084 NR Description: hypothetical protein - Arabidopsis thaliana hypothetical protein [Arabidopsis thaliana]
  misc_feature (1)..(212): Homolog of NCBI NO: 15239778 NR Description: putative protein; protein id: At5g11750.1, by cDNA: gi_14030716 [Arabidopsis thaliana]
  misc_feature (1)..(212): Homolog of NCBI NO: 15234249 NR Description: putative protein; protein id: At4g11630.1, by cDNA: gi_14994248, supported by cDNA: gi_16974528, supported cDNA: gi_19699145 [Arabidopsis thaliana] >gi|7487679|pir||T04210
  misc_feature (1)..(212): Homolog of NCBI NO: 18395422 NR Description: expressed protein; protein id: At1g24240.1, by cDNA: gi_15146227 [Arabidopsis thaliana]

SEQ ID NO: 86678 - DNA, 1316 bp, Arabidopsis thaliana
  misc_feature (1)..(1316): Ceres Seq. ID no. 12692494
  misc_feature: MA Experiment ID: 108435 Result: Down-regulated in Transcription
  misc_feature: MA Experiment 108435 PARAMETER Experiment Name: At_stm_Mutants_cDNA_P Parameter: Plant Line Value: wt Landsburg vs stm
  misc_feature: MA Experiment 108435 PARAMETER Experiment Name: At_stm_Mutants_cDNA_P Parameter: Tissue Value: Shoot Apical Meristem Region
  misc_feature: MA Experiment ID: 108462 Result: Up-regulated in Transcription
  misc_feature: MA Experiment 108462 PARAMETER Experiment Name: At_Germinating_Seeds_cDNA_P Parameter: Age (day) Value: 2 vs. 0
  misc_feature: MA Experiment 108462 PARAMETER Experiment Name: At_Germinating_Seeds_cDNA_P Parameter: Tissue Value: Germinating Seeds
  misc_feature: MA Experiment ID: 108463 Result: Up-regulated in Transcription
  misc_feature: MA Experiment 108463 PARAMETER Experiment Name: At_Germinating_Seeds_cDNA_P Parameter: Age (day) Value: 3 vs. 0
  misc_feature: MA Experiment 108463 PARAMETER Experiment Name: At_Germinating_Seeds_cDNA_P Parameter: Tissue Value: Germinating Seeds
  misc_feature: MA Experiment ID: 108464 Result: Up-regulated in Transcription
  misc_feature: MA Experiment 108464 PARAMETER Experiment Name: At_Germinating_Seeds_cDNA_P Parameter: Age (day) Value: 4 vs. 0
  misc_feature: MA Experiment 108464 PARAMETER Experiment Name: At_Germinating_Seeds_cDNA_P Parameter: Tissue Value: Germinating Seeds
  misc_feature: MA Experiment ID: 108501 Result: Down-regulated in Transcription
  misc_feature: MA Experiment 108501 PARAMETER Experiment Name: At_ap2_floral_buds_cDNA_P Parameter: Plant Line Value: ap2 (Ler.)
  misc_feature: MA Experiment 108501 PARAMETER Experiment Name: At_ap2_floral_buds_cDNA_P Parameter: Tissue Value: Closed Flower
  misc_feature: MA Experiment ID: 108572 Result: Up-regulated in Transcription
  misc_feature: MA Experiment 108572 PARAMETER Experiment Name: At_Drought_cDNA_P Parameter: Timepoint (hr) Value: 1
  misc_feature: MA Experiment 108572 PARAMETER Experiment Name: At_Drought_cDNA_P Parameter: Tissue Value: Aerial
  misc_feature: MA Experiment 108572 PARAMETER Experiment Name: At_Drought_cDNA_P Parameter: Treatment Value: Drought vs. No Drought
  misc_feature: MA Experiment ID: 108574 Result: Up-regulated in Transcription
  misc_feature: MA Experiment 108574 PARAMETER Experiment Name: At_Wounding__cDNA_P Parameter: Timepoint (hr) Value: 1
  misc_feature: MA Experiment 108574 PARAMETER Experiment Name: At_Wounding__cDNA_P Parameter: Tissue Value: Aerial
  misc_feature: MA Experiment 108574 PARAMETER Experiment Name: At_Wounding__cDNA_P Parameter: Treatment Value: Wounding vs. No Wounding
  misc_feature: MA Experiment ID: 108577 Result: Down-regulated in Transcription
  misc_feature: MA Experiment 108577 PARAMETER Experiment Name: At_42deg_Heat_cDNA_P Parameter: Temperature (deg C) Value: 42 vs. 22
  misc_feature: MA Experiment 108577 PARAMETER Experiment Name: At_42deg_Heat_cDNA_P Parameter: Timepoint (hr) Value: 6
  misc_feature: MA Experiment 108577 PARAMETER Experiment Name: At_42deg_Heat_cDNA_P Parameter: Tissue Value: Aerial
  misc_feature: MA Experiment ID: 108579 Result: Up-regulated in Transcription
  misc_feature: MA Experiment 108579 PARAMETER Experiment Name: At_4deg_Cold_cDNA_P Parameter: Temperature (deg C) Value: 4 vs. 22
  misc_feature: MA Experiment 108579 PARAMETER Experiment Name: At_4deg_Cold_cDNA_P Parameter: Timepoint (hr) Value: 6
  misc_feature: MA Experiment 108579 PARAMETER Experiment Name: At_4deg_Cold_cDNA_P Parameter: Tissue Value: Aerial
  misc_feature: MA Experiment ID: 108585 Result: Down-regulated in Transcription
  misc_feature: MA Experiment 108585 PARAMETER Experiment Name: At_5mM_NaNP_cDNA_P Parameter: Timepoint (hr) Value: 6
  misc_feature: MA Experiment 108585 PARAMETER Experiment Name: At_5mM_NaNP_cDNA_P Parameter: Tissue Value: Aerial
  misc_feature: MA Experiment 108585 PARAMETER Experiment Name: At_5mM_NaNP_cDNA_P Parameter: Treatment Value: null
  misc_feature: MA Experiment ID: 108594 Result: Up-regulated in Transcription
  misc_feature: MA Experiment 108594 PARAMETER Experiment Name: At_Ler-rhl_Root_cDNA_P Parameter: Plant Line Value: null
  misc_feature: MA Experiment ID: 108595 Result: Up-regulated in Transcription
  misc_feature: MA Experiment 108595 PARAMETER Experiment Name: At_Ler-pi_Ovule_cDNA_P Parameter: Plant Line Value: null
  misc_feature: MA Experiment ID: 108668 Result: Down-regulated in Transcription
  misc_feature: MA Experiment 108668 PARAMETER Experiment Name: At_2mM_SA_cDNA_P Parameter: Plant Line Value: WS
  misc_feature: MA Experiment 108668 PARAMETER Experiment Name: At_2mM_SA_cDNA_P Parameter: Timepoint (hr) Value: 6
  misc_feature: MA Experiment 108668 PARAMETER Experiment Name: At_2mM_SA_cDNA_P Parameter: Treatment Value: 2mM SA vs. No Treatment
  misc_feature: MA Experiment ID: 20000030 Result: Down-regulated in Transcription
  misc_feature: MA Experiment 20000030 PARAMETER Experiment Name: At_CS6630_Roots_cDNA_P Parameter: Plant Line Value: CS6630 vs. WS
  misc_feature: MA Experiment 20000030 PARAMETER Experiment Name: At_CS6630_Roots_cDNA_P Parameter: Tissue Value: Roots
  misc_feature: MA Experiment ID: 20000070 Result: Up-regulated in Transcription
  misc_feature: MA Experiment 20000070 PARAMETER Experiment Name: At_100uM_ABA_Mutants_cDNA_P Parameter: Plant Line Value: CS24
  misc_feature: MA Experiment 20000070 PARAMETER Experiment Name: At_100uM_ABA_Mutants_cDNA_P Parameter: Timepoint (hr) Value: 6
  misc_feature: MA Experiment 20000070 PARAMETER Experiment Name: At_100uM_ABA_Mutants_cDNA_P Parameter: Tissue Value: Aerial
  misc_feature: MA Experiment 20000070 PARAMETER Experiment Name: At_100uM_ABA_Mutants_cDNA_P Parameter: Treatment Value: 100uM ABA vs. No Treatment
  misc_feature: MA Experiment ID: 20000071 Result: Up-regulated in Transcription
  misc_feature: MA Experiment 20000071 PARAMETER Experiment Name: At_100uM_ABA_Mutants_cDNA_P Parameter: Plant Line Value: CS8104
  misc_feature: MA Experiment 20000071 PARAMETER Experiment Name: At_100uM_ABA_Mutants_cDNA_P Parameter: Timepoint (hr) Value: 6
  misc_feature: MA Experiment 20000071 PARAMETER Experiment Name: At_100uM_ABA_Mutants_cDNA_P Parameter: Tissue Value: Aerial
  misc_feature: MA Experiment 20000071 PARAMETER Experiment Name: At_100uM_ABA_Mutants_cDNA_P Parameter: Treatment Value: 100uM ABA vs. No Treatment
  misc_feature: MA Experiment ID: 20000072 Result: Up-regulated in Transcription
  misc_feature: MA Experiment 20000072 PARAMETER Experiment Name: At_100uM_ABA_Mutants_cDNA_P Parameter: Plant Line Value: CS8105
  misc_feature: MA Experiment 20000072 PARAMETER Experiment Name: At_100uM_ABA_Mutants_cDNA_P Parameter: Timepoint (hr) Value: 6
  misc_feature: MA Experiment 20000072 PARAMETER Experiment Name: At_100uM_ABA_Mutants_cDNA_P Parameter: Tissue Value: Aerial
  misc_feature: MA Experiment 20000072 PARAMETER Experiment Name: At_100uM_ABA_Mutants_cDNA_P Parameter: Treatment Value: 100uM ABA vs. No Treatment
  misc_feature: MA Experiment ID: 20000086 Result: Up-regulated in Transcription
  misc_feature: MA Experiment 20000086 PARAMETER Experiment Name: At_100uM_ABA_Mutants_cDNA_P Parameter: Plant Line Value: CS22
  misc_feature: MA Experiment 20000086 PARAMETER Experiment Name: At_100uM_ABA_Mutants_cDNA_P Parameter: Timepoint (hr) Value: 6
  misc_feature: MA Experiment 20000086 PARAMETER Experiment Name: At_100uM_ABA_Mutants_cDNA_P Parameter: Tissue Value: Aerial
  misc_feature: MA Experiment 20000086 PARAMETER Experiment Name: At_100uM_ABA_Mutants_cDNA_P Parameter: Treatment Value: 100uM ABA vs. No Treatment
  misc_feature: MA Experiment ID: 20000087 Result: Up-regulated in Transcription
  misc_feature: MA Experiment 20000087 PARAMETER Experiment Name: At_100uM_ABA_Mutants_cDNA_P Parameter: Plant Line Value: WS
  misc_feature: MA Experiment 20000087 PARAMETER Experiment Name: At_100uM_ABA_Mutants_cDNA_P Parameter: Timepoint (hr) Value: 6
  misc_feature: MA Experiment 20000087 PARAMETER Experiment Name: At_100uM_ABA_Mutants_cDNA_P Parameter: Tissue Value: Aerial
  misc_feature: MA Experiment 20000087 PARAMETER Experiment Name: At_100uM_ABA_Mutants_cDNA_P Parameter: Treatment Value: 100uM ABA vs. No Treatment
  misc_feature: MA Experiment ID: 20000088 Result: Up-regulated in Transcription
  misc_feature: MA Experiment 20000088 PARAMETER Experiment Name: At_100uM_ABA_Mutants_cDNA_P Parameter: Plant Line Value: Landsberg
  misc_feature: MA Experiment 20000088 PARAMETER Experiment Name: At_100uM_ABA_Mutants_cDNA_P Parameter: Timepoint (hr) Value: 6
  misc_feature: MA Experiment 20000088 PARAMETER Experiment Name: At_100uM_ABA_Mutants_cDNA_P Parameter: Tissue Value: Aerial
  misc_feature: MA Experiment 20000088 PARAMETER Experiment Name: At_100uM_ABA_Mutants_cDNA_P Parameter: Treatment Value: 100uM ABA vs. No Treatment
  misc_feature: MA Experiment ID: 20000089 Result: Up-regulated in Transcription
  misc_feature: MA Experiment ID: 20000111 Result: Down-regulated in Transcription
  misc_feature: MA Experiment 20000111 PARAMETER Experiment Name: At_42deg_Heat_cDNA_P Parameter: Temperature (deg C) Value: 42 vs. 22
  misc_feature: MA Experiment 20000111 PARAMETER Experiment Name: At_42deg_Heat_cDNA_P Parameter: Timepoint (hr) Value: 6
  misc_feature: MA Experiment 20000111 PARAMETER Experiment Name: At_42deg_Heat_cDNA_P Parameter: Tissue Value: Aerial
  misc_feature: MA Experiment ID: 20000112 Result: Down-regulated in Transcription
  misc_feature: MA Experiment 20000112 PARAMETER Experiment Name: At_42deg_Heat_cDNA_P Parameter: Temperature (deg C) Value: 42 vs. 22
  misc_feature: MA Experiment 20000112 PARAMETER Experiment Name: At_42deg_Heat_cDNA_P Parameter: Timepoint (hr) Value: 2
  misc_feature: MA Experiment 20000112 PARAMETER Experiment Name: At_42deg_Heat_cDNA_P Parameter: Tissue Value: Aerial
  misc_feature: MA Experiment ID: 20000113 Result: Down-regulated in Transcription
  misc_feature: MA Experiment 20000113 PARAMETER Experiment Name: At_42deg_Heat_cDNA_P Parameter: Temperature (deg C) Value: 42 vs. 22
  misc_feature: MA Experiment 20000113 PARAMETER Experiment Name: At_42deg_Heat_cDNA_P Parameter: Timepoint (hr) Value: 8
  misc_feature: MA Experiment 20000113 PARAMETER Experiment Name: At_42deg_Heat_cDNA_P Parameter: Tissue Value: Aerial
  misc_feature: MA Experiment ID: 20000117 Result: Up-regulated in Transcription
  misc_feature: MA Experiment 20000117 PARAMETER Experiment Name: At_100uM_ABA_Mutants_cDNA_P Parameter: Plant Line Value: Columbia
  misc_feature: MA Experiment 20000117 PARAMETER Experiment Name: At_100uM_ABA_Mutants_cDNA_P Parameter: Timepoint (hr) Value: 6
  misc_feature: MA Experiment 20000117 PARAMETER Experiment Name: At_100uM_ABA_Mutants_cDNA_P Parameter: Tissue Value: Aerial
  misc_feature: MA Experiment 20000117 PARAMETER Experiment Name: At_100uM_ABA_Mutants_cDNA_P Parameter: Treatment Value: 100uM ABA vs. No Treatment
  misc_feature: MA Experiment ID: 20000173 Result: Down-regulated in Transcription
  misc_feature: MA Experiment 20000173 PARAMETER Experiment Name: At_42deg_Heat_P Parameter: Age (day) Value: 14
  misc_feature: MA Experiment 20000173 PARAMETER Experiment Name: At_42deg_Heat_P Parameter: Organism Value: A. thaliana
  misc_feature: MA Experiment 20000173 PARAMETER Experiment Name: At_42deg_Heat_P Parameter: Plant Line Value: WS
  misc_feature: MA Experiment 20000173 PARAMETER Experiment Name: At_42deg_Heat_P Parameter: Temperature (deg C) Value: 42 vs. 22
  misc_feature: MA Experiment 20000173 PARAMETER Experiment Name: At_42deg_Heat_P Parameter: Timepoint (hr) Value: 6
  misc_feature: MA Experiment 20000173 PARAMETER Experiment Name: At_42deg_Heat_P Parameter: Tissue Value: Aerial
  misc_feature: MA Experiment ID: 20000184 Result: Down-regulated in Transcription
  misc_feature: MA Experiment 20000184 PARAMETER Experiment Name: At_Shoots__P Parameter: Age (day) Value: 7
  misc_feature: MA Experiment 20000184 PARAMETER Experiment Name: At_Shoots__P Parameter: Tissue Value: Shoots vs. Whole Plant
  misc_feature: MA Experiment ID: 20000185 Result: Down-regulated in Transcription
  misc_feature: MA Experiment 20000185 PARAMETER Experiment Name: At_Roots__P Parameter: Age (day) Value: 7 vs. 21
  misc_feature: MA Experiment 20000185 PARAMETER Experiment Name: At_Roots__P Parameter: Organism Value: A. thaliana
  misc_feature: MA Experiment 20000185 PARAMETER Experiment Name: At_Roots__P Parameter: Tissue Value: Roots vs. Whole Plant
  misc_feature: MA Experiment ID: 20000211 Result: Up-regulated in Transcription
  misc_feature: MA Experiment 20000211 PARAMETER Experiment Name: At_0.001percent_MeJA__P Parameter: Age (day) Value: 14
  misc_feature: MA Experiment 20000211 PARAMETER Experiment Name: At_0.001percent_MeJA__P Parameter: Organism Value: A. thaliana
  misc_feature: MA Experiment 20000211 PARAMETER Experiment Name: At_0.001percent_MeJA__P Parameter: Plant Line Value: WS
  misc_feature: MA Experiment 20000211 PARAMETER Experiment Name: At_0.001percent_MeJA__P Parameter: Timepoint (hr) Value: 1
  misc_feature: MA Experiment 20000211 PARAMETER Experiment Name: At_0.001percent_MeJA__P Parameter: Tissue Value: Aerial
  misc_feature: MA Experiment 20000211 PARAMETER Experiment Name: At_0.001percent_MeJA__P Parameter: Treatment Value: 0.001percent MeJA vs. No Treatment
  misc_feature: MA Experiment ID: 20000213 Result: Up-regulated in Transcription
  misc_feature: MA Experiment 20000213 PARAMETER Experiment Name: At_4deg_Cold_P Parameter: Timepoint (hr) Value: 2
  misc_feature: MA Experiment ID: 20000227 Result: Down-regulated in Transcription
  misc_feature: MA Experiment 20000227 PARAMETER Experiment Name: At_Root-Tips-vs-Tops_P Parameter: Tissue Value: Root Tips vs. Root Tops
  misc_feature: MA Experiment ID: 20000234 Result: Down-regulated in Transcription
  misc_feature: MA Experiment 20000234 PARAMETER Experiment Name: At_Siliques_P Parameter: Age (day) Value: 21
  misc_feature: MA Experiment 20000234 PARAMETER Experiment Name: At_Siliques_P Parameter: Organism Value: A. thaliana
  misc_feature: MA Experiment 20000234 PARAMETER Experiment Name: At_Siliques_P Parameter: Plant Line Value: WS
  misc_feature: MA Experiment 20000234 PARAMETER Experiment Name: At_Siliques_P Parameter: Tissue Value: Less Than 5mm Siliques vs. Whole Plant
  misc_feature: MA Experiment ID: 20000235 Result: Down-regulated in Transcription
  misc_feature: MA Experiment 20000235 PARAMETER Experiment Name: At_Siliques_P Parameter: Age (day) Value: 21
  misc_feature: MA Experiment 20000235 PARAMETER Experiment Name: At_Siliques_P Parameter: Organism Value: A. thaliana
  misc_feature: MA Experiment 20000235 PARAMETER Experiment Name: At_Siliques_P Parameter: Plant Line Value: WS
  misc_feature: MA Experiment 20000235 PARAMETER Experiment Name: At_Siliques_P Parameter: Tissue Value: 5-10mm Siliques vs. Whole Plant
  misc_feature: MA Experiment ID: 20000269 Result: Up-regulated in Transcription
  misc_feature: MA Experiment 20000269 PARAMETER Experiment Name: At_1mM_KNO3_L-vs-H_Roots_P Parameter: Age (day) Value: 7,10,12
  misc_feature: MA Experiment 20000269 PARAMETER Experiment Name: At_1mM_KNO3_L-vs-H_Roots_P Parameter: Organism Value: A. thaliana
  misc_feature: MA Experiment 20000269 PARAMETER Experiment Name: At_1mM_KNO3_L-vs-H_Roots_P Parameter: Plant Line Value: WS
  misc_feature: MA Experiment 20000269 PARAMETER Experiment Name: At_1mM_KNO3_L-vs-H_Roots_P Parameter: Timepoint (day) Value: 7,10,12
  misc_feature: MA Experiment 20000269 PARAMETER Experiment Name: At_1mM_KNO3_L-vs-H_Roots_P Parameter: Tissue Value: Roots
  misc_feature: MA Experiment 20000269 PARAMETER Experiment Name: At_1mM_KNO3_L-vs-H_Roots_P Parameter: Treatment Value: 1mM KNO3 vs. 50mM KNO3
  misc_feature: MA Experiment ID: 20000436 Result: Up-regulated in Transcription
  misc_feature: MA Experiment 20000436 PARAMETER Experiment Name: At_Drought_P Parameter: Age (day) Value: 7
  misc_feature: MA Experiment 20000436 PARAMETER Experiment Name: At_Drought_P Parameter: Organism Value: A. thaliana
  misc_feature: MA Experiment 20000436 PARAMETER Experiment Name: At_Drought_P Parameter: Plant Line Value: WS
  misc_feature: MA Experiment 20000436 PARAMETER Experiment Name: At_Drought_P Parameter: Timepoint (hr) Value: 12
  misc_feature: MA Experiment 20000436 PARAMETER Experiment Name: At_Drought_P Parameter: Tissue Value: Whole Plant
  misc_feature: MA Experiment 20000436 PARAMETER Experiment Name: At_Drought_P Parameter: Treatment Value: Drought vs. No Drought
  misc_feature: MA Experiment ID: 20000437 Result: Up-regulated in Transcription
  misc_feature: MA Experiment 20000437 PARAMETER Experiment Name: At_Drought_P Parameter: Age (day) Value: 8
  misc_feature: MA Experiment 20000437 PARAMETER Experiment Name: At_Drought_P Parameter: Organism Value: A. thaliana
  misc_feature: MA Experiment 20000437 PARAMETER Experiment Name: At_Drought_P Parameter: Plant Line Value: WS
  misc_feature: MA Experiment 20000437 PARAMETER Experiment Name: At_Drought_P Parameter: Timepoint (hr) Value: 24
  misc_feature: MA Experiment 20000437 PARAMETER Experiment Name: At_Drought_P Parameter: Tissue Value: Whole Plant
  misc_feature: MA Experiment 20000437 PARAMETER Experiment Name: At_Drought_P Parameter: Treatment Value: Drought vs. No Drought
  misc_feature: MA Experiment ID: 20000438 Result: Down-regulated in Transcription
  misc_feature: MA Experiment 20000438 PARAMETER Experiment Name: At_Shoots__P Parameter: Age (day) Value: 14
  misc_feature: MA Experiment 20000438 PARAMETER Experiment Name: At_Shoots__P Parameter: Tissue Value: Shoots vs. Whole Plant
  misc_feature: MA Experiment ID: 20000451 Result: Down-regulated in Transcription
  misc_feature: MA Experiment 20000451 PARAMETER Experiment Name: At_CS6879_Shoots-Roots_P Parameter: Age (day) Value: 14
  misc_feature: MA Experiment 20000451 PARAMETER Experiment Name: At_CS6879_Shoots-Roots_P Parameter: Organism Value: A. thaliana
  misc_feature: MA Experiment 20000451 PARAMETER Experiment Name: At_CS6879_Shoots-Roots_P Parameter: Plant Line Value: CS6879 vs. WS
  misc_feature: MA Experiment 20000451 PARAMETER Experiment Name: At_CS6879_Shoots-Roots_P Parameter: Tissue Value: Roots
  misc_feature: MA Experiment ID: 20000495 Result: Down-regulated in Transcription
  misc_feature: MA Experiment 20000495 PARAMETER Experiment Name: At_Guard_Cells_P Parameter: Harvest Date Value: 8/2/2002
  misc_feature: MA Experiment 20000495 PARAMETER Experiment Name: At_Guard_Cells_P Parameter: Organism Value: A. thaliana
  misc_feature: MA Experiment 20000495 PARAMETER Experiment Name: At_Guard_Cells_P Parameter: Tissue Value: Guard Cells vs. Leaves
  misc_feature: MA Experiment ID: 20001247 Result: Down-regulated in Transcription
  misc_feature: MA Experiment 20001247 PARAMETER Experiment Name: At_Far-red-induction_P Parameter: Age (day) Value: 7
  misc_feature: MA Experiment 20001247 PARAMETER Experiment Name: At_Far-red-induction_P Parameter: Light Value: Far-red vs. White
  misc_feature: MA Experiment 20001247 PARAMETER Experiment Name: At_Far-red-induction_P Parameter: Organism Value: A. thaliana
  misc_feature: MA Experiment 20001247 PARAMETER Experiment Name: At_Far-red-induction_P Parameter: Plant Line Value: Columbia
  misc_feature: MA Experiment 20001247 PARAMETER Experiment Name: At_Far-red-induction_P Parameter: Timepoint (hr) Value: 1
  misc_feature: MA Experiment 20001247 PARAMETER Experiment Name: At_Far-red-induction_P Parameter: Tissue Value: Whole Plant
  misc_feature: MA Experiment ID: 20001451 Result: Down-regulated in Transcription
  misc_feature: MA Experiment 20001451 PARAMETER Experiment Name: At_Far-red-induction_P Parameter: Age (day) Value: 7
  misc_feature: MA Experiment 20001451 PARAMETER Experiment Name: At_Far-red-induction_P Parameter: Light Value: Far-red vs. White
  misc_feature: MA Experiment 20001451 PARAMETER Experiment Name: At_Far-red-induction_P Parameter: Organism Value: A. thaliana
  misc_feature: MA Experiment 20001451 PARAMETER Experiment Name: At_Far-red-induction_P Parameter: Plant Line Value: Columbia
  misc_feature: MA Experiment 20001451 PARAMETER Experiment Name: At_Far-red-induction_P Parameter: Timepoint (hr) Value: 24
  misc_feature: MA Experiment 20001451 PARAMETER Experiment Name: At_Far-red-induction_P Parameter: Tissue Value: Whole Plant
  misc_feature: MA Experiment ID: 20001558 Result: Down-regulated in Transcription
  misc_feature: MA Experiment 20001558 PARAMETER Experiment Name: At_Drought_Soil_Dry_P Parameter: Age (day) Value: 27
  misc_feature: MA Experiment 20001558 PARAMETER Experiment Name: At_Drought_Soil_Dry_P Parameter: Organism Value: A. thaliana
  misc_feature: MA Experiment 20001558 PARAMETER Experiment Name: At_Drought_Soil_Dry_P Parameter: Plant Line Value: WS
  misc_feature: MA Experiment 20001558 PARAMETER Experiment Name: At_Drought_Soil_Dry_P Parameter: Post Timepoint (hr) Value: 6
  misc_feature: MA Experiment 20001558 PARAMETER Experiment Name: At_Drought_Soil_Dry_P Parameter: Post-Treatment Value: Re-Water vs. No Drought
  misc_feature: MA Experiment 20001558 PARAMETER Experiment Name: At_Drought_Soil_Dry_P Parameter: Timepoint (day) Value: 13
  misc_feature: MA Experiment 20001558 PARAMETER Experiment Name: At_Drought_Soil_Dry_P Parameter: Treatment Value: Drought vs. No Drought
  misc_feature: MA Experiment ID: 20001905 Result: Down-regulated in Transcription
  misc_feature: MA Experiment 20001905 PARAMETER Experiment Name: At_Drought_Reproduction_P Parameter: Age (day) Value: 40
  misc_feature: MA Experiment 20001905 PARAMETER Experiment Name: At_Drought_Reproduction_P Parameter: Organism Value: A. thaliana
  misc_feature: MA Experiment 20001905 PARAMETER Experiment Name: At_Drought_Reproduction_P Parameter: Plant Line Value: WS
  misc_feature: MA Experiment 20001905 PARAMETER Experiment Name: At_Drought_Reproduction_P Parameter: Timepoint (day) Value: 10
  misc_feature: MA Experiment 20001905 PARAMETER Experiment Name: At_Drought_Reproduction_P Parameter: Tissue Value: Rosettes
  misc_feature: MA Experiment 20001905 PARAMETER Experiment Name: At_Drought_Reproduction_P Parameter: Treatment Value: Drought vs. No Drought
  misc_feature: MA Experiment ID: 20001906 Result: Down-regulated in Transcription
  misc_feature: MA Experiment 20001906 PARAMETER Experiment Name: At_Drought_Reproduction_P Parameter: Age (day) Value: 35
  misc_feature: MA Experiment 20001906 PARAMETER Experiment Name: At_Drought_Reproduction_P Parameter: Organism Value: A. thaliana
  misc_feature: MA Experiment 20001906 PARAMETER Experiment Name: At_Drought_Reproduction_P Parameter: Plant Line Value: WS
  misc_feature: MA Experiment 20001906 PARAMETER Experiment Name: At_Drought_Reproduction_P Parameter: Timepoint (day) Value: 5
  misc_feature: MA Experiment 20001906 PARAMETER Experiment Name: At_Drought_Reproduction_P Parameter: Tissue Value: Siliques
  misc_feature: MA Experiment 20001906 PARAMETER Experiment Name: At_Drought_Reproduction_P Parameter: Treatment Value: Drought vs. No Drought
  misc_feature: MA Experiment ID: 20001911 Result: Down-regulated in Transcription
  misc_feature: MA Experiment 20001911 PARAMETER Experiment Name: At_Drought_Reproduction_P Parameter: Age (day) Value: 40
  misc_feature: MA Experiment 20001911 PARAMETER Experiment Name: At_Drought_Reproduction_P Parameter: Organism Value: A. thaliana
  misc_feature: MA Experiment 20001911 PARAMETER Experiment Name: At_Drought_Reproduction_P Parameter: Plant Line Value: WS
  misc_feature: MA Experiment 20001911 PARAMETER Experiment Name: At_Drought_Reproduction_P Parameter: Timepoint (day) Value: 10
  misc_feature: MA Experiment 20001911 PARAMETER Experiment Name: At_Drought_Reproduction_P Parameter: Tissue Value: Flowers
  misc_feature: MA Experiment 20001911 PARAMETER Experiment Name: At_Drought_Reproduction_P Parameter: Treatment Value: Drought vs. No Drought
aaacaaatttcaagttctttaaacgatttccttttcaagaaaaatccttctccttcttctttttaccacatagatcttcttgatctacaatggattctgtttctctttctgaggttactgtcattaaaggaacaacacatttgggttttatgcacagtttcagacagccattttgtggtgtcaaaatatctccaaagttctatttatccaaagttgatggaccaaaggcaatatcttcgagcagcaacacaaagagtcaatttgtttatggaggaggaagcatagctgcaacttcagattcaggttataagatgaatggagtaaacctaaaaagcagaacattgatgagttctgcagttaaagaaagatcattacttgatgcttatgatgatgagtatggtggagtaatagtagatcatggaaaattaccatcaaacccttatgctttcgcttctatgcttcgagcttctctatccgattggagaagaaagggaaagaaaggagtttggttaaagttacctgtggaacaatcagaattagtcccaatagctataaaggaaggttttgagtatcatcatgcagagaaaggatatgtaatgttaacatattggataccagaggaggaacctagtatgcttcctgcaaatgcttcacatcaagttggtgttggaggttttgtattaaatcaacataaagaggtgcttgtggtacaagaaaagtattgtgctccttcgattactggtctatggaagttaccaacagggtttattaatgaatctgaagagattttctctggtgctgtaagagaagtcaaggaagaaactggggtagatacagagttctcagaggttatagctttcagacatgctcacaacgttgcatttgagaaatctgatctgttcttcatctgtatgttgagaccactctctgataagataatcatcgatgctcttgagatcaaagccgcaaagtggatgccattggctgaatttgtggagcaaccgatgataagaggagacaaaatgtttaaaagagtgattgaaatatgcgaggcgagattaagccatcggtactgcggtctttctcctcatcgacttgtctctacttttgatggcaaaccttcttctctctattacaacgttgttgatgatgatcatgatccttcccactccaattgtagcactgagttttatagatagacgggtaaaacagaaccaaatcaagtggttcgattctgtatatacttattctcatgtaatgtatgttgttatttgatactctctcttcagtatagtaaatagtaatagatcctctgc

SEQ ID NO: 86679 - protein, 369 aa, Arabidopsis thaliana
  peptide (1)..(369): Ceres Seq. ID no. 12692495
  misc_feature (189)..(322): Pfam Name: NUDIX domain Pfam Description: NUDIX domain
  misc_feature (1)..(369): Homolog of NCBI NO: 18422772 NR Description: mutT domain protein-like; protein id:
  misc_feature (1)..(369): Homolog of NCBI NO: 21928133 NR Description: AT5g47240/MQL5_10 [Arabidopsis thaliana]
  misc_feature (1)..(369): Homolog of NCBI NO: 21593371 NR Description: mutT domain protein-like [Arabidopsis thaliana]
  misc_feature (75)..(369): Homolog of NCBI NO: 8809607 NR Description: mutT domain protein-like [Arabidopsis thaliana]
  misc_feature (88)..(364): Homolog of NCBI NO: 38346172 NR Description: OSJNBa0079A21.19 [Oryza sativa (japonica
  misc_feature (94)..(353): Homolog of NCBI NO: 18422823 NR Description: MutT domain protein-like; protein id: supported by cDNA: gi_14596036, supported by cDNA: gi_17978726
  misc_feature (94)..(353): Homolog of NCBI NO: 9758793 NR Description: MutT domain protein-like [Arabidopsis thaliana]
  misc_feature (95)..(358): Homolog of NCBI NO: 38564312 NR Description: At4g25434 [Arabidopsis thaliana]
  misc_feature (95)..(247): Homolog of NCBI NO: 30686884 NR Description: MutT/nudix family protein [Arabidopsis thaliana]
  misc_feature (247)..(358): Homolog of NCBI NO: 30686884 NR Description: MutT/nudix family protein [Arabidopsis thaliana]
MDSVSLSEVTVIKGTTHLGFMHSFRQPFCGVKISPKFYLSKVDGPKAISSSSNTKSQFVYGGGSIAATSDSGYKMNGVNLKSRTLMSSAVKERSLLDAYDDEYGGVIVDHGKLPSNPYAFASMLRASLSDWRRKGKKGVWLKLPVEQSELVPIAIKEGFEYHHAEKGYVMLTYWIPEEEPSMLPANASHQVGVGGFVLNQHKEVLVVQEKYCAPSITGLWKLPTGFINESEEIFSGAVREVKEETGVDTEFSEVIAFRHAHNVAFEKSDLFFICMLRPLSDKIIIDALEIKAAKWMPLAEFVEQPMIRGDKMFKRVIEICEARLSHRYCGLSPHRLVSTFDGKPSSLYYNVVDDDHDPSHSNCSTEFYR

SEQ ID NO: 86680 - protein, 349 aa, Arabidopsis thaliana
  peptide (1)..(349): Ceres Seq. ID no. 12692496
  misc_feature (169)..(302): Pfam Name: NUDIX domain Pfam Description: NUDIX domain
  misc_feature (1)..(349): Homolog of NCBI NO: 18422772 NR Description: mutT domain protein-like; protein id:
  misc_feature (1)..(349): Homolog of NCBI NO: 21928133 NR Description: AT5g47240/MQL5_10 [Arabidopsis thaliana]
  misc_feature (1)..(349): Homolog of NCBI NO: 21593371 NR Description: mutT domain protein-like [Arabidopsis thaliana]
  misc_feature (55)..(349): Homolog of NCBI NO: 8809607 NR Description: mutT domain protein-like [Arabidopsis thaliana]
  misc_feature (68)..(344): Homolog of NCBI NO: 38346172 NR Description: OSJNBa0079A21.19 [Oryza sativa (japonica
  misc_feature (74)..(333): Homolog of NCBI NO: 18422823 NR Description: MutT domain protein-like; protein id: supported by cDNA: gi_14596036, supported by cDNA: gi_17978726
  misc_feature (74)..(333): Homolog of NCBI NO: 9758793 NR Description: MutT domain protein-like [Arabidopsis thaliana]
  misc_feature (75)..(338): Homolog of NCBI NO: 38564312 NR Description: At4g25434 [Arabidopsis thaliana]
  misc_feature (75)..(227): Homolog of NCBI NO: 30686884 NR Description: MutT/nudix family protein [Arabidopsis thaliana]
  misc_feature (227)..(338): Homolog of NCBI NO: 30686884 NR Description: MutT/nudix family protein [Arabidopsis thaliana]
MHSFRQPFCGVKISPKFYLSKVDGPKAISSSSNTKSQFVYGGGSIAATSDSGYKMNGVNLKSRTLMSSAVKERSLLDAYDDEYGGVIVDHGKLPSNPYAFASMLRASLSDWRRKGKKGVWLKLPVEQSELVPIAIKEGFEYHHAEKGYVMLTYWIPEEEPSMLPANASHQVGVGGFVLNQHKEVLVVQEKYCAPSITGLWKLPTGFINESEEIFSGAVREVKEETGVDTEFSEVIAFRHAHNVAFEKSDLFFICMLRPLSDKIIIDALEIKAAKWMPLAEFVEQPMIRGDKMFKRVIEICEARLSHRYCGLSPHRLVSTFDGKPSSLYYNVVDDDHDPSHSNCSTEFYR

SEQ ID NO: 86681 - protein, 295 aa, Arabidopsis thaliana
  peptide (1)..(295): Ceres Seq. ID no. 12692497
  misc_feature (115)..(248): Pfam Name: NUDIX domain Pfam Description: NUDIX domain
  misc_feature (1)..(295): Homolog of NCBI NO: 18422772 NR Description: mutT domain protein-like; protein id:
  misc_feature (1)..(295): Homolog of NCBI NO: 21928133 NR Description: AT5g47240/MQL5_10 [Arabidopsis thaliana]
  misc_feature (1)..(295): Homolog of NCBI NO: 21593371 NR Description: mutT domain protein-like [Arabidopsis thaliana]
  misc_feature (1)..(295): Homolog of NCBI NO: 8809607 NR Description: mutT domain protein-like [Arabidopsis thaliana]
  misc_feature (14)..(290): Homolog of NCBI NO: 38346172 NR Description: OSJNBa0079A21.19 [Oryza sativa (japonica
  misc_feature (20)..(279): Homolog of NCBI NO: 18422823 NR Description: MutT domain protein-like; protein id: supported by cDNA: gi_14596036, supported by cDNA: gi_17978726
  misc_feature (20)..(279): Homolog of NCBI NO: 9758793 NR Description: MutT domain protein-like [Arabidopsis thaliana]
  misc_feature (21)..(284): Homolog of NCBI NO: 38564312 NR Description: At4g25434 [Arabidopsis thaliana]
  misc_feature (21)..(173): Homolog of NCBI NO: 30686884 NR Description: MutT/nudix family protein [Arabidopsis thaliana]
  misc_feature (173)..(284): Homolog of NCBI NO: 30686884 NR Description: MutT/nudix family protein [Arabidopsis thaliana]
MNGVNLKSRTLMSSAVKERSLLDAYDDEYGGVIVDHGKLPSNPYAFASMLRASLSDWRRKGKKGVWLKLPVEQSELVPIAIKEGFEYHHAEKGYVMLTYWIPEEEPSMLPANASHQVGVGGFVLNQHKEVLVVQEKYCAPSITGLWKLPTGFINESEEIFSGAVREVKEETGVDTEFSEVIAFRHAHNVAFEKSDLFFICMLRPLSDKIIIDALEIKAAKWMPLAEFVEQPMIRGDKMFKRVIEICEARLSHRYCGLSPHRLVSTFDGKPSSLYYNVVDDDHDPSHSNCSTEFYR

SEQ ID NO: 86682 - DNA, 1851 bp, Arabidopsis thaliana
  misc_feature (1)..(1851): Ceres Seq. ID no. 12692498
  misc_feature: MA Experiment ID: 20000327 Result: Up-regulated in Transcription
  misc_feature: MA Experiment 20000327 PARAMETER Experiment Name: At_42deg_Heat_Sub_P Parameter: Age (day) Value: 14
  misc_feature: MA Experiment 20000327 PARAMETER Experiment Name: At_42deg_Heat_Sub_P Parameter: Organism Value: A. thaliana
  misc_feature: MA Experiment 20000327 PARAMETER Experiment Name: At_42deg_Heat_Sub_P Parameter: Plant Line Value: WS
  misc_feature: MA Experiment 20000327 PARAMETER Experiment Name: At_42deg_Heat_Sub_P Parameter: Temperature (deg C) Value: 42 vs. 22
  misc_feature: MA Experiment 20000327 PARAMETER Experiment Name: At_42deg_Heat_Sub_P Parameter: Timepoint (hr) Value: 1
  misc_feature: MA Experiment 20000327 PARAMETER Experiment Name: At_42deg_Heat_Sub_P Parameter: Tissue Value: Aerial
  misc_feature: MA Experiment ID: 20000328 Result: Up-regulated in Transcription
  misc_feature: MA Experiment 20000328 PARAMETER Experiment Name: At_42deg_Heat_Sub_P Parameter: Age (day) Value: 14
  misc_feature: MA Experiment 20000328 PARAMETER Experiment Name: At_42deg_Heat_Sub_P Parameter: Organism Value: A. thaliana
  misc_feature: MA Experiment 20000328 PARAMETER Experiment Name: At_42deg_Heat_Sub_P Parameter: Plant Line Value: WS
  misc_feature: MA Experiment 20000328 PARAMETER Experiment Name: At_42deg_Heat_Sub_P Parameter: Temperature (deg C) Value: 42 vs. 22
  misc_feature: MA Experiment 20000328 PARAMETER Experiment Name: At_42deg_Heat_Sub_P Parameter: Timepoint (hr) Value: 6
  misc_feature: MA Experiment 20000328 PARAMETER Experiment Name: At_42deg_Heat_Sub_P Parameter: Tissue Value: Aerial
atggaatgccagacatataaagttttcacaccagattgccccatcaacaatatgattgacactcctggcaagaggaaggtgaaggagatgctttttaatttgaacgatgaggcaagaattattgggatctcagggatgatcggttcagggaaaaccattcttgccaaggagcttgcgcgggacgaggaggtccgaggccattttgcgaaccgagttttgtttctgactgtgtcacaatctcccaatcttgaggagctgagatcccttatacgggattttcttactggtcatgaggctggctttggtaccgctcttccggaatccgttggtcatacacggaagctagtgatccttgatgatgttaggacaagggaatctctagaccagctgatgttcaatattcctggaaccacaacgcttgtggtctcacagtctaaactcgtagatcctagaaccacctatgatgtagagttattaaatgaacatgacgcaacatctctgttctgtctctctgctttcaaccagaaatcagttccttcagggttcagcaaaagtttggtcaagcaggttgttggggagtctaaaggtctacctttgtctctgaaagtccttggcgcttcattaaacgatcgacctgaaacatattgggcaattgcagtggagaggttatcaagaggtgaacctgttgatgaaactcatgagagtaaagtgtttgctcaaatcgaagcaactctagaaaatctcgatccaaaaaccaaagagtgtttcttggatatgggtgctttccctgaaggcaagaaaatccctgttgatgttctcatcaacatgttggtcaagatacatgatcttgaggacgcagccgcctttgatgttcttgttgatctagcaaataggaatcttcttactctcgtgaaagatccaacgtttgtcgctatgggcactagctactatgatatattcgtgacgcagcacgatgttttaagagatgtagcacttcatcttaccaatcgtggaaaagtaagagaaatgactgagatggactggtttgacatggatttccccaaggcagaagttctgatagtaaacttctcttcagacaactatgtattgcctcctttcattgctaagatgggaatgcttagggtgttcgtgattataaacaacggtacctctccagcgcatctacatgacttccccatccctaccagtttgaccaatctaaggagtctctggcttgagagggttcatgtccctgaactctctagcagtatgatacccttgaaaaacctccacaagctatatctgattatttgcaagatcaataacagttttgatcagacagccatagacattgcccaaatcttcccaaaattgactgatatcacaatagattattgcgatgatcttgcggaactaccttcgaccatctgtggaataacctctctcaactccatcagcataacaaattgtcccaacatcaaggagttaccgaagaatataagtaagctacaagcccttcaacttttgaggctatacgcttgcccagagctaaaatctctgcctgtggaaatctgtgaattgccaagactagtgtatgtcgacatctctcactgtctcagcctaagttctcttccggaaaagataggaaatgtaaggacacttgagaaaatcgacatgagagaatgtagcttatcgagcataccaagttccgcagtttcattgacttccctatgctatgtaacatgctatagagaggctttgtggatgtggaaagaggttgagaaggcagttcccggacttcgtattgaagctactgaaaaatggttcaacatgacttggcccgacgagtag

SEQ ID NO: 86683 - protein, 616 aa, Arabidopsis thaliana
  peptide (1)..(616): Ceres Seq. ID no. 12692499
  misc_feature (148)..(278): Pfam Name: NB-ARC domain Pfam Description: NB-ARC domain
  misc_feature (23)..(354): Homolog of NCBI NO: 30689664 NR Description: disease resistance protein (CC-NBS-LRR class),
  misc_feature (323)..(616): Homolog of NCBI NO: 30689664 NR Description: disease resistance protein (CC-NBS-LRR class),
  misc_feature (30)..(577): Homolog of NCBI NO: 15238054 NR Description: disease resistance protein (NBS-LRR class), protein id: At5g47280.1 [Arabidopsis thaliana]
  misc_feature (340)..(616): Homolog of NCBI NO: 7485661 NR Description: hypothetical protein F17M5.60 - Arabidopsis >gi|4490297|emb|CAB38788.1| putative protein [Arabidopsis >gi|7270278|emb|CAB80047.1| putative protein [Arabidopsis
  misc_feature (23)..(189): Homolog of NCBI NO: 7485661 NR Description: hypothetical protein F17M5.60 - Arabidopsis >gi|4490297|emb|CAB38788.1| putative protein [Arabidopsis >gi|7270278|emb|CAB80047.1| putative protein [Arabidopsis
  misc_feature (342)..(616): Homolog of NCBI NO: 15238054 NR Description: disease resistance protein (NBS-LRR class), protein id: At5g47280.1 [Arabidopsis thaliana]
  misc_feature (23)..(577): Homolog of NCBI NO: 15238281 NR Description: disease resistance protein (CC-NBS-LRR class), protein id: At5g04720.1, supported by cDNA: gi_15292720,
  misc_feature (132)..(580): Homolog of NCBI NO: 7485661 NR Description: hypothetical protein F17M5.60 - Arabidopsis >gi|4490297|emb|CAB38788.1| putative protein [Arabidopsis >gi|7270278|emb|CAB80047.1| putative protein [Arabidopsis
  misc_feature (342)..(616): Homolog of NCBI NO: 15238281 NR Description: disease resistance protein (CC-NBS-LRR class), protein id: At5g04720.1, supported by cDNA: gi_15292720,
  misc_feature (12)..(580): Homolog of NCBI NO: 25403197 NR Description: probable disease resistance protein [imported] - thaliana >gi|10998939|gb|AAG26078.1|AC069299_4 disease resistance putative [Arabidopsis thaliana]
MECQTYKVFTPDCPINNMIDTPGKRKVKEMLFNLNDEARIIGISGMIGSGKTILAKELARDEEVRGHFANRVLFLTVSQSPNLEELRSLIRDFLTGHEAGFGTALPESVGHTRKLVILDDVRTRESLDQLMFNIPGTTTLVVSQSKLVDPRTTYDVELLNEHDATSLFCLSAFNQKSVPSGFSKSLVKQVVGESKGLPLSLKVLGASLNDRPETYWAIAVERLSRGEPVDETHESKVFAQIEATLENLDPKTKECFLDMGAFPEGKKIPVDVLINMLVKIHDLEDAAAFDVLVDLANRNLLTLVKDPTFVAMGTSYYDIFVTQHDVLRDVALHLTNRGKVREMTEMDWFDMDFPKAEVLIVNFSSDNYVLPPFIAKMGMLRVFVIINNGTSPAHLHDFPIPTSLTNLRSLWLERVHVPELSSSMIPLKNLHKLYLIICKINNSFDQTAIDIAQIFPKLTDITIDYCDDLAELPSTICGITSLNSISITNCPNIKELPKNISKLQALQLLRLYACPELKSLPVEICELPRLVYVDISHCLSLSSLPEKIGNVRTLEKIDMRECSLSSIPSSAVSLTSLCYVTCYREALWMWKEVEKAVPGLRIEATEKWFNMTWPDE

SEQ ID NO: 86684 - protein, 599 aa, Arabidopsis thaliana
  peptide (1)..(599): Ceres Seq. ID no. 12692500
  misc_feature (131)..(261): Pfam Name: NB-ARC domain Pfam Description: NB-ARC domain
  misc_feature (6)..(337): Homolog of NCBI NO: 30689664 NR Description: disease resistance protein (CC-NBS-LRR class),
  misc_feature (306)..(599): Homolog of NCBI NO: 30689664 NR Description: disease resistance protein (CC-NBS-LRR class),
  misc_feature (13)..(560): Homolog of NCBI NO: 15238054 NR Description: disease resistance protein (NBS-LRR class), protein id: At5g47280.1 [Arabidopsis thaliana]
  misc_feature (323)..(599): Homolog of NCBI NO: 7485661 NR Description: hypothetical protein F17M5.60 - Arabidopsis >gi|4490297|emb|CAB38788.1| putative protein [Arabidopsis >gi|7270278|emb|CAB80047.1| putative protein [Arabidopsis
  misc_feature (6)..(172): Homolog of NCBI NO: 7485661 NR Description: hypothetical protein F17M5.60 - Arabidopsis >gi|4490297|emb|CAB38788.1| putative protein [Arabidopsis >gi|7270278|emb|CAB80047.1| putative protein [Arabidopsis
  misc_feature (325)..(599): Homolog of NCBI NO: 15238054 NR Description: disease resistance protein (NBS-LRR class), protein id: At5g47280.1 [Arabidopsis thaliana]
  misc_feature (6)..(560): Homolog of NCBI NO: 15238281 NR Description: disease resistance protein (CC-NBS-LRR class), protein id: At5g04720.1, supported by cDNA: gi_15292720,
  misc_feature (115)..(563): Homolog of NCBI NO: 7485661 NR Description: hypothetical protein F17M5.60 - Arabidopsis >gi|4490297|emb|CAB38788.1| putative protein [Arabidopsis >gi|7270278|emb|CAB80047.1| putative protein [Arabidopsis
  misc_feature (325)..(599): Homolog of NCBI NO: 15238281 NR Description: disease resistance protein (CC-NBS-LRR class), protein id: At5g04720.1, supported by cDNA: gi_15292720,
  misc_feature (1)..(563): Homolog of NCBI NO: 25403197 NR Description: probable disease resistance protein [imported] - thaliana >gi|10998939|gb|AAG26078.1|AC069299_4 disease resistance putative [Arabidopsis thaliana]
MIDTPGKRKVKEMLFNLNDEARIIGISGMIGSGKTILAKELARDEEVRGHFANRVLFLTVSQSPNLEELRSLIRDFLTGHEAGFGTALPESVGHTRKLVILDDVRTRESLDQLMFNIPGTTTLVVSQSKLVDPRTTYDVELLNEHDATSLFCLSAFNQKSVPSGFSKSLVKQVVGESKGLPLSLKVLGASLNDRPETYWAIAVERLSRGEPVDETHESKVFAQIEATLENLDPKTKECFLDMGAFPEGKKIPVDVLINMLVKIHDLEDAAAFDVLVDLANRNLLTLVKDPTFVAMGTSYYDIFVTQHDVLRDVALHLTNRGKVREMTEMDWFDMDFPKAEVLIVNFSSDNYVLPPFIAKMGMLRVFVIINNGTSPAHLHDFPIPTSLTNLRSLWLERVHVPELSSSMIPLKNLHKLYLIICKINNSFDQTAIDIAQIFPKLTDITIDYCDDLAELPSTICGITSLNSISITNCPNIKELPKNISKLQALQLLRLYACPELKSLPVEICELPRLVYVDISHCLSLSSLPEKIGNVRTLEKIDMRECSLSSIPSSAVSLTSLCYVTCYREALWMWKEVEKAVPGLRIEATEKWFNMTWPDE

SEQ ID NO: 86685 - protein, 587 aa, Arabidopsis thaliana
  peptide (1)..(587): Ceres Seq. ID no. 12692501
  misc_feature (119)..(249): Pfam Name: NB-ARC domain Pfam Description: NB-ARC domain
  misc_feature (1)..(325): Homolog of NCBI NO: 30689664 NR Description: disease resistance protein (CC-NBS-LRR class),
  misc_feature (294)..(587): Homolog of NCBI NO: 30689664 NR Description: disease resistance protein (CC-NBS-LRR class),
  misc_feature (1)..(548): Homolog of NCBI NO: 15238054 NR Description: disease resistance protein (NBS-LRR class), protein id: At5g47280.1 [Arabidopsis thaliana]
  misc_feature (311)..(587): Homolog of NCBI NO: 7485661 NR Description: hypothetical protein F17M5.60 - Arabidopsis >gi|4490297|emb|CAB38788.1| putative protein [Arabidopsis >gi|7270278|emb|CAB80047.1| putative protein [Arabidopsis
  misc_feature (1)..(160): Homolog of NCBI NO: 7485661 NR Description: hypothetical protein F17M5.60 - Arabidopsis >gi|4490297|emb|CAB38788.1| putative protein [Arabidopsis >gi|7270278|emb|CAB80047.1| putative protein [Arabidopsis
  misc_feature (313)..(587): Homolog of NCBI NO: 15238054 NR Description: disease resistance protein (NBS-LRR class), protein id: At5g47280.1 [Arabidopsis thaliana]
  misc_feature (1)..(548): Homolog of NCBI NO: 15238281 NR Description: disease resistance protein (CC-NBS-LRR class), protein id: At5g04720.1, supported by cDNA: gi_15292720,
  misc_feature (103)..(551): Homolog of NCBI NO: 7485661 NR Description: hypothetical protein F17M5.60 - Arabidopsis >gi|4490297|emb|CAB38788.1| putative protein [Arabidopsis >gi|7270278|emb|CAB80047.1| putative protein [Arabidopsis
  misc_feature (313)..(587): Homolog of NCBI NO: 15238281 NR Description: disease resistance protein (CC-NBS-LRR class), protein id: At5g04720.1, supported by cDNA: gi_15292720,
  misc_feature (1)..(551): Homolog of NCBI NO: 25403197 NR Description: probable disease resistance protein [imported] - thaliana >gi|10998939|gb|AAG26078.1|AC069299_4 disease resistance putative [Arabidopsis thaliana]
MLFNLNDEARIIGISGMIGSGKTILAKELARDEEVRGHFANRVLFLTVSQSPNLEELRSLIRDFLTGHEAGFGTALPESVGHTRKLVILDDVRTRESLDQLMFNIPGTTTLVVSQSKLVDPRTTYDVELLNEHDATSLFCLSAFNQKSVPSGFSKSLVKQVVGESKGLPLSLKVLGASLNDRPETYWAIAVERLSRGEPVDETHESKVFAQIEATLENLDPKTKECFLDMGAFPEGKKIPVDVLINMLVKIHDLEDAAAFDVLVDLANRNLLTLVKDPTFVAMGTSYYDIFVTQHDVLRDVALHLTNRGKVREMTEMDWFDMDFPKAEVLIVNFSSDNYVLPPFIAKMGMLRVFVIINNGTSPAHLHDFPIPTSLTNLRSLWLERVHVPELSSSMIPLKNLHKLYLIICKINNSFDQTAIDIAQIFPKLTDITIDYCDDLAELPSTICGITSLNSISITNCPNIKELPKNISKLQALQLLRLYACPELKSLPVEICELPRLVYVDISHCLSLSSLPEKIGNVRTLEKIDMRECSLSSIPSSAVSLTSLCYVTCYREALWMWKEVEKAVPGLRIEATEKWFNMTWPDE

SEQ ID NO: 86686 - DNA, 738 bp, Arabidopsis thaliana
  misc_feature (1)..(738): Ceres Seq. ID no. 12692506
  misc_feature: MA Experiment ID: 20000496 Result: Down-regulated in Transcription
  misc_feature: MA Experiment 20000496 PARAMETER Experiment Name: At_Guard_Cells_P Parameter: Harvest Date Value: 7/19/2002
  misc_feature: MA Experiment 20000496 PARAMETER Experiment Name: At_Guard_Cells_P Parameter: Organism Value: Canola
  misc_feature: MA Experiment 20000496 PARAMETER Experiment Name: At_Guard_Cells_P Parameter: Tissue Value: Guard Cells vs. Leaves
atgcgggtgcttggtttgagctcaagcttatgctctggtgaggataaggaagaagaagagattaatggagaaggctctctcacgcctgtttatctcaacgtctatgatctaactcctgtcaacaattatctctattggttcggccttggcatatttcactctggcattgaggctcatggtttcgaatatggatatggagctcatgagtattcgagcagtggggtatttgaggttgaacctaggagctgtccaggtttcatctttaggcgctcagttttgttgggaaccaccagcatgtctcgctctgatttccgctccttcatggagaagctttcgagaaagtatcatggggacacataccatttgattgccaaaaactgtaaccatttcactgaagaagtatgcttgcaggtaacaggaaagcctattcctggatggattaataggatggctcgagttggttcgttctgtaactgtatccttccagaaagcatacagctctcatcggttaatcatcctgaagccctcgagttctctgatgataacgatggatcagaagaatcagttgcatcttctgtgtcatacgaaacagatggagaaggatcggatcatcatctcataacagcaccaaacagcgatattgcgtatctacaggacagaccagtgagacttgcccgtgagctcctccaagaaccaaccgatgatacatctccgcagtacttgttgaagcggtcctga

SEQ ID NO: 86687 - protein, 245 aa, Arabidopsis thaliana; identical to SEQ ID NO: 24698
  peptide (1)..(245): Ceres Seq. ID no. 12692507
  misc_feature (28)..(151): Pfam Name: Eukaryotic protein of unknown function (DUF862) Pfam Description: Eukaryotic protein of unknown function (DUF862)
  misc_feature (1)..(245): Homolog of NCBI NO: 15238059 NR Description: putative protein; protein id: At5g47310.1
  misc_feature (1)..(227): Homolog of NCBI NO: 30684058 NR Description: expressed protein [Arabidopsis thaliana] AT4g17486/AT4g17486 [Arabidopsis thaliana]
  misc_feature (34)..(227): Homolog of NCBI NO: 7488100 NR Description: probable EREBP-4 - Arabidopsis thaliana
  misc_feature (22)..(214): Homolog of NCBI NO: 38346173 NR Description: OSJNBa0079A21.20 [Oryza sativa (japonica
  misc_feature (22)..(194): Homolog of NCBI NO: 18401869 NR Description: expressed protein; protein id: At1g47740.1, by cDNA: 40816. [Arabidopsis thaliana] unknown protein [Arabidopsis thaliana]
  misc_feature (22)..(194): Homolog of NCBI NO: 21593644 NR Description: unknown [Arabidopsis thaliana]
  misc_feature (25)..(177): Homolog of NCBI NO: 18420889 NR Description: putative protein; protein id: At5g25170.1,
  misc_feature (22)..(194): Homolog of NCBI NO: 9802596 NR Description: T2E6.19 [Arabidopsis thaliana]
  misc_feature (29)..(170): Homolog of NCBI NO: 15236618 NR Description: putative protein; protein id: At4g31980.1
  misc_feature (29)..(170): Homolog of NCBI NO: 17529024 NR Description: unknown protein [Arabidopsis thaliana]

SEQ ID NO: 86688 - protein, 147 aa, Arabidopsis thaliana; identical to SEQ ID NO: 24699
  peptide (1)..(147): Ceres Seq. ID no. 12692508
  misc_feature (1)..(53): Pfam Name: Eukaryotic protein of unknown function (DUF862) Pfam Description: Eukaryotic protein of unknown function (DUF862)
  misc_feature (1)..(147): Homolog of NCBI NO: 15238059 NR Description: putative protein; protein id: At5g47310.1
  misc_feature (1)..(129): Homolog of NCBI NO: 30684058 NR Description: expressed protein [Arabidopsis thaliana] AT4g17486/AT4g17486 [Arabidopsis thaliana]
  misc_feature (1)..(129): Homolog of NCBI NO: 7488100 NR Description: probable EREBP-4 - Arabidopsis thaliana
  misc_feature (1)..(116): Homolog of NCBI NO: 38346173 NR Description: OSJNBa0079A21.20 [Oryza sativa (japonica
  misc_feature (1)..(96): Homolog of NCBI NO: 18401869 NR Description: expressed protein; protein id: At1g47740.1, by cDNA: 40816. [Arabidopsis thaliana] unknown protein [Arabidopsis thaliana]
  misc_feature (1)..(96): Homolog of NCBI NO: 21593644 NR Description: unknown [Arabidopsis thaliana]
  misc_feature (1)..(79): Homolog of NCBI NO: 18420889 NR Description: putative protein; protein id: At5g25170.1,
  misc_feature (1)..(96): Homolog of NCBI NO: 9802596 NR Description: T2E6.19 [Arabidopsis thaliana]
  misc_feature (1)..(72): Homolog of NCBI NO: 15236618 NR Description: putative protein; protein id: At4g31980.1
  misc_feature (1)..(72): Homolog of NCBI NO: 17529024 NR Description: unknown protein [Arabidopsis thaliana]

SEQ ID NO: 86689 - protein, 138 aa, Arabidopsis thaliana; identical to SEQ ID NO: 24700
  peptide (1)..(138): Ceres Seq. ID no. 12692509
  misc_feature (1)..(138): Homolog of NCBI NO: 15238059 NR Description: putative protein; protein id: At5g47310.1
  misc_feature (1)..(120): Homolog of NCBI NO: 30684058 NR Description: expressed protein [Arabidopsis thaliana] AT4g17486/AT4g17486 [Arabidopsis thaliana]
  misc_feature (1)..(120): Homolog of NCBI NO: 7488100 NR Description: probable EREBP-4 - Arabidopsis thaliana
  misc_feature (1)..(107): Homolog of NCBI NO: 38346173 NR Description: OSJNBa0079A21.20 [Oryza sativa (japonica
  misc_feature (1)..(87): Homolog of NCBI NO: 18401869 NR Description: expressed protein; protein id: At1g47740.1, by cDNA: 40816. [Arabidopsis thaliana] unknown protein [Arabidopsis thaliana]
  misc_feature (1)..(87): Homolog of NCBI NO: 21593644 NR Description: unknown [Arabidopsis thaliana]
  misc_feature (1)..(70): Homolog of NCBI NO: 18420889 NR Description: putative protein; protein id: At5g25170.1,
  misc_feature (1)..(87): Homolog of NCBI NO: 9802596 NR Description: T2E6.19 [Arabidopsis thaliana]
  misc_feature (1)..(63): Homolog of NCBI NO: 15236618 NR Description: putative protein; protein id: At4g31980.1
  misc_feature (1)..(63): Homolog of NCBI NO: 17529024 NR Description: unknown protein [Arabidopsis thaliana]

SEQ ID NO: 86690 - DNA, 573 bp, Arabidopsis thaliana
  misc_feature (1)..(573): Ceres Seq. ID no. 12692584
  misc_feature: MA Experiment ID: 20000184 Result: Down-regulated in Transcription
  misc_feature: MA Experiment 20000184 PARAMETER Experiment Name: At_Shoots__P Parameter: Age (day) Value: 7
  misc_feature: MA Experiment 20000184 PARAMETER Experiment Name: At_Shoots__P Parameter: Tissue Value: Shoots vs. Whole Plant
atggtgctggtattggcattgggggatctccatgtaccccatagagcggctgatctacctcctaagttcaaatcaatgcttgttcctgggaagattcaacacatcatctgcactggaaatctctgcatcaaagaaatccatgactacttgaagactatctgccctgatttgcatatagttcgaggggagtttgacgaagatgcgcgataccctgagaataaaaccttgactattgggcaattcaagctgggattgtgtcatggccaccaggtgatcccatggggtgatctagactcactcgccatgcttcagagacaactgggcgtcgacattctcgtaacaggccatacccaccagttcacagcgtacaaacacgagggaggagtggtgataaacccgggctctgcaaccggagcttacagcagcataaaccaagacgttaacccaagctttgtccttatggacatcgatggtttccgagctgtagtctatgtctatgagctaatcgatggagaagttaaagtcgacaagatcgagttcaagaagccccctactaccagctctggtccgtag

SEQ ID NO: 86691 - protein, 190 aa, Arabidopsis thaliana; identical to SEQ ID NO: 21979
  peptide (1)..(190): Ceres Seq. ID no. 12692585
  misc_feature (2)..(120): Pfam Name: Calcineurin-like phosphoesterase Pfam Description: Calcineurin-like phosphoesterase
  misc_feature (1)..(190): Homolog of NCBI NO: 7487365 NR Description: VPS29-like phosphoesterase-related protein
  misc_feature (44)..(190): Homolog of NCBI NO: 30692933 NR Description: calcineurin-like phosphoesterase family
  misc_feature (2)..(183): Homolog of NCBI NO: 7706441 NR Description: vacuolar protein sorting 29, isoform 1; vacuolar sorting 29 (yeast homolog); vacuolar sorting protein VPS29/PEP11; protein; x 007 protein [Homo sapiens]
  misc_feature (3)..(183): Homolog of NCBI NO: 17402912 NR Description: vacuolar protein sorting 29, isoform 2; vacuolar sorting 29 (yeast homolog); vacuolar sorting protein VPS29/PEP11; protein; x 007 protein [Homo sapiens]
  misc_feature (3)..(183): Homolog of NCBI NO: 9295176 NR Description: DC15 [Homo sapiens]
  misc_feature (2)..(182): Homolog of NCBI NO: 28279210 NR Description: Similar to vacuolar protein sorting 29 (S. pombe)
  misc_feature (2)..(182): Homolog of NCBI NO: 9790285 NR Description: vacuolar protein sorting 29; vacuolar sorting [Mus musculus] >gi|25453324|sp|Q9QZ88|VP29_MOUSE Vacuolar protein
  misc_feature (2)..(183): Homolog of NCBI NO: 12052754 NR Description: hypothetical protein [Homo sapiens]
  misc_feature (3)..(182): Homolog of NCBI NO: 12835154 NR Description: unnamed protein product [Mus musculus]
  misc_feature (2)..(182): Homolog of NCBI NO: 29841378 NR Description: similar to NM_019780 vacuolar protein sorting 29

SEQ ID NO: 86692 - protein, 165 aa, Arabidopsis thaliana; identical to SEQ ID NO: 21980
  peptide (1)..(165): Ceres Seq. ID no. 12692586
  misc_feature (1)..(95): Pfam Name: Calcineurin-like phosphoesterase Pfam Description: Calcineurin-like phosphoesterase
  misc_feature (1)..(165): Homolog of NCBI NO: 7487365 NR Description: VPS29-like phosphoesterase-related protein
  misc_feature (19)..(165): Homolog of NCBI NO: 30692933 NR Description: calcineurin-like phosphoesterase family
  misc_feature (1)..(158): Homolog of NCBI NO: 7706441 NR Description: vacuolar protein sorting 29, isoform 1; vacuolar sorting 29 (yeast homolog); vacuolar sorting protein VPS29/PEP11; protein; x 007 protein [Homo sapiens]
  misc_feature (1)..(158): Homolog of NCBI NO: 17402912 NR Description: vacuolar protein sorting 29, isoform 2; vacuolar sorting 29 (yeast homolog); vacuolar sorting protein VPS29/PEP11; protein; x 007 protein [Homo sapiens]
  misc_feature (1)..(158): Homolog of NCBI NO: 9295176 NR Description: DC15 [Homo sapiens]
  misc_feature (1)..(157): Homolog of NCBI NO: 28279210 NR Description: Similar to vacuolar protein sorting 29 (S. pombe)
  misc_feature (1)..(157): Homolog of NCBI NO: 9790285 NR Description: vacuolar protein sorting 29; vacuolar sorting [Mus musculus] >gi|25453324|sp|Q9QZ88|VP29_MOUSE Vacuolar protein
  misc_feature (1)..(158): Homolog of NCBI NO: 12052754 NR Description: hypothetical protein [Homo sapiens]
  misc_feature (1)..(157): Homolog of NCBI NO: 12835154 NR Description: unnamed protein product [Mus musculus]
  misc_feature (1)..(157): Homolog of NCBI NO: 29841378 NR Description: similar to NM_019780 vacuolar protein sorting 29

SEQ ID NO: 86693 - DNA, 1002 bp, Arabidopsis thaliana
  misc_feature (1)..(1002): Ceres Seq. ID no. 12692607
  misc_feature: MA Experiment ID: 20001905 Result: Up-regulated in Transcription
  misc_feature: MA Experiment 20001905 PARAMETER Experiment Name: At_Drought_Reproduction_P Parameter: Age (day) Value: 40
  misc_feature: MA Experiment 20001905 PARAMETER Experiment Name: At_Drought_Reproduction_P Parameter: Organism Value: A. thaliana
  misc_feature: MA Experiment 20001905 PARAMETER Experiment Name: At_Drought_Reproduction_P Parameter: Plant Line Value: WS
  misc_feature: MA Experiment 20001905 PARAMETER Experiment Name: At_Drought_Reproduction_P Parameter: Timepoint (day) Value: 10
  misc_feature: MA Experiment 20001905 PARAMETER Experiment Name: At_Drought_Reproduction_P Parameter: Tissue Value: Rosettes
  misc_feature: MA Experiment 20001905 PARAMETER Experiment Name: At_Drought_Reproduction_P Parameter: Treatment Value: Drought vs. No Drought
atgggtgtagattactacaatatactaaaggtgaatcacaacgcgacggaggatgatctcaagaaagcttacaagcgtctcgccatgatttggcatcccgataagaatccatcgacgcgtcgagacgaagctgaagccaaattcaaacggatctccgaagcttacgatgttctctctgatcctcagaaacgtcagatctacgatctttacggcgaggaaggtcttaaatctggcaaaatccctaattcttcttcatcggagcacaggccgcagcatccgcctaacgcttcgtcgtttcgttttaaccctagagacgcggaggacatctatgctgagttctttggatctgaaaatggtggaggaagcaataatgctggtgggagaggaaacagagcgtttaggaatggtcatttcaacaccggtggtgccaatggttatagcggtgagatgaggaaagttccagctatggagaatccattgcctgtgagtttggaggatctgtataaaggtgtggtgaagaagatgcggataactagaaatgtctatgatgcttctgggagaatgatggtagaggcggagatattgcctatagaaataaaacctggttggaagaaaggaacaaagctgacatttcctaagaaaggcaatgaagagcctggaatcataccagcagatattgtattcgtggttgaagagaagccacatcctgtttacaagagagatgggaacgatcttttggtcagtcaggagataactctacttgaagctttaactggtaagactgtcaatctgatcacgcttgatggaaggactctcatgatcccattgacggagatcattaaacctgatcatgagattgttgttccaaacgaaggaatgcctatctctaaagaacctggaaaaaagggtaacttgaaactgaagcttagtgtgaaatacccgtcgaggctcacatcggatcagaaattcgagctaaagagagttcttggtggggtctcatga

SEQ ID NO: 86694 - protein, 333 aa, Arabidopsis thaliana
  peptide (1)..(333): Ceres Seq. ID no. 12692608
  misc_feature (207)..(329): Pfam Name: DnaJ C terminal region Pfam Description: DnaJ C terminal region
  misc_feature (87)..(333): Homolog of NCBI NO: 15228294 NR Description: heat shock protein-like protein; protein id: [Arabidopsis thaliana] >gi|7441939|pir||T06689 heat shock protein
  misc_feature (1)..(330): Homolog of NCBI NO: 15225377 NR Description: putative heat shock protein; protein id: supported by cDNA: 25528., supported by cDNA: gi_15982894 thaliana] >gi|25296018|pir||G84590 probable heat shock protein
  misc_feature (1)..(331): Homolog of NCBI NO: 15218901 NR Description: chaperone, putative; protein id: At1g59725.1 thaliana] >gi|25296016|pir||A96621 probable heat shock protein
  misc_feature (1)..(330): Homolog of NCBI NO: 6179940 NR Description: DnaJ-like protein [Nicotiana tabacum]
  misc_feature (1)..(328): Homolog of NCBI NO: 21618097 NR Description: putative heat shock protein [Arabidopsis thaliana]
  misc_feature (1)..(330): Homolog of NCBI NO: 11863723 NR Description: DnaJ like protein [Lycopersicon esculentum]
  misc_feature (1)..(328): Homolog of NCBI NO: 15231987 NR Description: putative heat shock protein; protein id: supported by cDNA: 96785. [Arabidopsis thaliana]
  misc_feature (1)..(331): Homolog of NCBI NO: 34905276 NR Description: putative heat shock protein [Oryza sativa
  misc_feature (1)..(329): Homolog of NCBI NO: 15240968 NR Description: heat shock protein 40-like; protein id: supported by cDNA: 114622. [Arabidopsis thaliana]
  misc_feature (1)..(331): Homolog of NCBI NO: 15239455 NR Description: heat-shock protein - like; protein id:
MGVDYYNILKVNHNATEDDLKKAYKRLAMIWHPDKNPSTRRDEAEAKFKRISEAYDVLSDPQKRQIYDLYGEEGLKSGKIPNSSSSEHRPQHPPNASSFRFNPRDAEDIYAEFFGSENGGGSNNAGGRGNRAFRNGHFNTGGANGYSGEMRKVPAMENPLPVSLEDLYKGVVKKMRITRNVYDASGRMMVEAEILPIEIKPGWKKGTKLTFPKKGNEEPGIIPADIVFVVEEKPHPVYKRDGNDLLVSQEITLLEALTGKTVNLITLDGRTLMIPLTEIIKPDHEIVVPNEGMPISKEPGKKGNLKLKLSVKYPSRLTSDQKFELKRVLGGVS

SEQ ID NO: 86695 - protein, 305 aa, Arabidopsis thaliana
  peptide (1)..(305): Ceres Seq. ID no. 12692609
  misc_feature (179)..(301): Pfam Name: DnaJ C terminal region Pfam Description: DnaJ C terminal region
  misc_feature (59)..(305): Homolog of NCBI NO: 15228294 NR Description: heat shock protein-like protein; protein id: [Arabidopsis thaliana] >gi|7441939|pir||T06689 heat shock protein
  misc_feature (1)..(302): Homolog of NCBI NO: 15225377 NR Description: putative heat shock protein; protein id: supported by cDNA: 25528., supported by cDNA: gi_15982894 thaliana] >gi|25296018|pir||G84590 probable heat shock protein
  misc_feature (1)..(303): Homolog of NCBI NO: 15218901 NR Description: chaperone, putative; protein id: At1g59725.1 thaliana] >gi|25296016|pir||A96621 probable heat shock protein
  misc_feature (1)..(302): Homolog of NCBI NO: 6179940 NR Description: DnaJ-like protein [Nicotiana tabacum]
  misc_feature (1)..(300): Homolog of NCBI NO: 21618097 NR Description: putative heat shock protein [Arabidopsis thaliana]
  misc_feature (1)..(302): Homolog of NCBI NO: 11863723 NR Description: DnaJ like protein [Lycopersicon esculentum]
  misc_feature (1)..(300): Homolog of NCBI NO: 15231987 NR Description: putative heat shock protein; protein id: supported by cDNA: 96785. [Arabidopsis thaliana]
  misc_feature (1)..(303): Homolog of NCBI NO: 34905276 NR Description: putative heat shock protein [Oryza sativa
  misc_feature (1)..(301): Homolog of NCBI NO: 15240968 NR Description: heat shock protein 40-like; protein id: supported by cDNA: 114622. [Arabidopsis thaliana]
  misc_feature (1)..(303): Homolog of NCBI NO: 15239455 NR Description: heat-shock protein - like; protein id:
MIWHPDKNPSTRRDEAEAKFKRISEAYDVLSDPQKRQIYDLYGEEGLKSGKIPNSSSSEHRPQHPPNASSFRFNPRDAEDIYAEFFGSENGGGSNNAGGRGNRAFRNGHFNTGGANGYSGEMRKVPAMENPLPVSLEDLYKGVVKKMRITRNVYDASGRMMVEAEILPIEIKPGWKKGTKLTFPKKGNEEPGIIPADIVFVVEEKPHPVYKRDGNDLLVSQEITLLEALTGKTVNLITLDGRTLMIPLTEIIKPDHEIVVPNEGMPISKEPGKKGNLKLKLSVKYPSRLTSDQKFELKRVLGGVS

SEQ ID NO: 86696 - protein, 184 aa, Arabidopsis thaliana; identical to SEQ ID NO: 44749
  peptide (1)..(184): Ceres Seq. ID no. 12692610
  misc_feature (58)..(180): Pfam Name: DnaJ C terminal region Pfam Description: DnaJ C terminal region
  misc_feature (1)..(184): Homolog of NCBI NO: 15228294 NR Description: heat shock protein-like protein; protein id: [Arabidopsis thaliana] >gi|7441939|pir||T06689 heat shock protein
  misc_feature (1)..(181): Homolog of NCBI NO: 15225377 NR Description: putative heat shock protein; protein id: supported by cDNA: 25528., supported by cDNA: gi_15982894 thaliana] >gi|25296018|pir||G84590 probable heat shock protein
  misc_feature (1)..(182): Homolog of NCBI NO: 15218901 NR Description: chaperone, putative; protein id: At1g59725.1 thaliana] >gi|25296016|pir||A96621 probable heat shock protein
  misc_feature (1)..(181): Homolog of NCBI NO: 6179940 NR Description: DnaJ-like protein [Nicotiana tabacum]
  misc_feature (1)..(179): Homolog of NCBI NO: 21618097 NR Description: putative heat shock protein [Arabidopsis thaliana]
  misc_feature (1)..(181): Homolog of NCBI NO: 11863723 NR Description: DnaJ like protein [Lycopersicon esculentum]
  misc_feature (1)..(179): Homolog of NCBI NO: 15231987 NR Description: putative heat shock protein; protein id: supported by cDNA: 96785. [Arabidopsis thaliana]
  misc_feature (1)..(182): Homolog of NCBI NO: 34905276 NR Description: putative heat shock protein [Oryza sativa
  misc_feature (1)..(180): Homolog of NCBI NO: 15240968 NR Description: heat shock protein 40-like; protein id: supported by cDNA: 114622. [Arabidopsis thaliana]
  misc_feature (1)..(182): Homolog of NCBI NO: 15239455 NR Description: heat-shock protein - like; protein id:

SEQ ID NO: 86697 - DNA, 1452 bp, Arabidopsis thaliana
  misc_feature (1)..(1452): Ceres Seq. ID no. 12692662
  misc_feature: MA Experiment ID: 20001905 Result: Up-regulated in Transcription
  misc_feature: MA Experiment 20001905 PARAMETER Experiment Name: At_Drought_Reproduction_P Parameter: Age (day) Value: 40
  misc_feature: MA Experiment 20001905 PARAMETER Experiment Name: At_Drought_Reproduction_P Parameter: Organism Value: A. thaliana
  misc_feature: MA Experiment 20001905 PARAMETER Experiment Name: At_Drought_Reproduction_P Parameter: Plant Line Value: WS
  misc_feature: MA Experiment 20001905 PARAMETER Experiment Name: At_Drought_Reproduction_P Parameter: Timepoint (day) Value: 10
  misc_feature: MA Experiment 20001905 PARAMETER Experiment Name: At_Drought_Reproduction_P Parameter: Tissue Value: Rosettes
  misc_feature: MA Experiment 20001905 PARAMETER Experiment Name: At_Drought_Reproduction_P Parameter: Treatment Value: Drought vs. No Drought
  misc_feature: MA Experiment ID: 20001906 Result: Up-regulated in Transcription
  misc_feature: MA Experiment 20001906 PARAMETER Experiment Name: At_Drought_Reproduction_P Parameter: Age (day) Value: 35
  misc_feature: MA Experiment 20001906 PARAMETER Experiment Name: At_Drought_Reproduction_P Parameter: Organism Value: A. thaliana
  misc_feature: MA Experiment 20001906 PARAMETER Experiment Name: At_Drought_Reproduction_P Parameter: Plant Line Value: WS
  misc_feature: MA Experiment 20001906 PARAMETER Experiment Name: At_Drought_Reproduction_P Parameter: Timepoint (day) Value: 5
  misc_feature: MA Experiment 20001906 PARAMETER Experiment Name: At_Drought_Reproduction_P Parameter: Tissue Value: Siliques
  misc_feature: MA Experiment 20001906 PARAMETER Experiment Name: At_Drought_Reproduction_P Parameter: Treatment Value: Drought vs. No Drought
  misc_feature: MA Experiment ID: 20001908 Result: Up-regulated in Transcription
  misc_feature: MA Experiment 20001908 PARAMETER Experiment Name: At_Drought_Reproduction_P Parameter: Age (day) Value: 40
  misc_feature: MA Experiment 20001908 PARAMETER Experiment Name: At_Drought_Reproduction_P Parameter: Organism Value: A. thaliana
  misc_feature: MA Experiment 20001908 PARAMETER Experiment Name: At_Drought_Reproduction_P Parameter: Plant Line Value: WS
  misc_feature: MA Experiment 20001908 PARAMETER Experiment Name: At_Drought_Reproduction_P Parameter: Timepoint (day) Value: 10
  misc_feature: MA Experiment 20001908 PARAMETER Experiment Name: At_Drought_Reproduction_P Parameter: Tissue Value: Siliques
  misc_feature: MA Experiment 20001908 PARAMETER Experiment Name: At_Drought_Reproduction_P Parameter: Treatment Value: Drought vs. No Drought
atgatacttttcttatgcttaataatattgttcatcataaccattctcttcttcaaaaaacataagacagtgaacaaaatcatcaactttccatccccaccgagacttccgttgatcggaaatcttcatcagcttagccaacatcctcaccgatcactctgctatctcagccaccgttacggtccactcatgctcctccacttcggaagtgtccccgttattgtagcctctacagcagaagcagctcgagacgttttaaagacgcatgatcgcgtttttgctagccgtccacggtcaaaaatcttcgaaaagcttctttacaagagccgtaatatggcctcagctccttatggagagtattggcgacaaatgaagagtgttagtgttctccatctcctcagcaacaaaatggtacggtcctttcaagacgtgagacaagaagagatcactctgatgatggaaacgatccgtaaatcgagttctaaaccggtaaatcttagcaagatcttgtcgagtttaactaacgatgttatatgtagagtagctttgggacggaaatatggtgttggaacagattttaaagagttaatagacaggctcatgaggcaacttggtacgtttactatcgggagttatgtaccgtggcttgcgtggactgattgggtcagcggtttggaggctcgactggaaaagaccgctaatgattttgataagctattggagagaattgtgcaggatcatgaagatggagacggcgacaagactgattttgtggatgtattgctcgcagctcagagagacaagagtttcgggttcgatattgaccggttaagcataaaagcaatcgtcttggatgcttttgtgggtggtacagacacatcctccacgcttgtggaatgggaaatgacagagcttctacgacacccaacgtgtctaaaaaaacttcaagaggaagtccgtacgatttgtaagggaaaatcaagtgtgtctgaagatgacattcaaggaatggaatacttaaaagctgtggtcaaagaggcactcaggctacatccaccagttccattgatggttcctcatcaatcaacacaagatgttaggttaagagataaccatatacctgccggtacgcaggttatagtcaatctttgggccgtcgggagagaggctgcgacgtggggaccagatgcgaatgagtttagaccggagaggcatttagagtcgccttctgatttccggggtcaggattttgagctgattccttttggagcagggagaaggatgtgtccaggaatatcatttgctgtggtgctgaatgaggtagtcttggctaacttagtgcatgggtttgattggcaatctatagacgatgagaccgatgttgctgaatcaatcggtagtgtgattcgccgcatgcaccctctttacgtcattccatcatctactacttga

SEQ ID NO: 86698 - protein, 483 aa, Arabidopsis thaliana
  peptide (1)..(483): Ceres Seq. ID no. 12692663
  misc_feature (1)..(483): Homolog of NCBI NO: 13878402 NR Description: Cytochrome P450 71A23 >gi|7430648|pir||T06712
  misc_feature (64)..(483): Homolog of NCBI NO: 22331678 NR Description: similar to cytochrome P450-like protein; protein
  misc_feature (1)..(483): Homolog of NCBI NO: 22331672 NR Description: similar to cytochrome P450-like protein; protein At3g48270.1 [Arabidopsis thaliana]
  misc_feature (1)..(483): Homolog of NCBI NO: 22331680 NR Description: Expressed protein; protein id: At3g48310.1, by cDNA: gi_20465426 [Arabidopsis thaliana] Cytochrome P450 71A22 >gi|7430647|pir||T06711 probable cytochrome
  misc_feature (1)..(478): Homolog of NCBI NO: 22331676 NR Description: similar to cytochrome P450-like protein; protein At3g48290.1 [Arabidopsis thaliana]
  misc_feature (1)..(480): Homolog of NCBI NO: 22331674 NR Description: similar to cytochrome p450 family; protein id: [Arabidopsis thaliana] >gi|13878400|sp|Q9STK8|C71P_ARATH
  misc_feature (1)..(284): Homolog of NCBI NO: 7430651 NR Description: probable cytochrome P450 T29H11.190 - Arabidopsis
  misc_feature (234)..(478): Homolog of NCBI NO: 7430651 NR Description: probable cytochrome P450 T29H11.190 - Arabidopsis
  misc_feature (1)..(483): Homolog of NCBI NO: 22331682 NR Description: similar to cytochrome P450-like protein; protein At3g48320.1 [Arabidopsis thaliana]
  misc_feature (1)..(481): Homolog of NCBI NO: 13878362 NR Description: Cytochrome P450 71A12 >gi|25282591|pir||C84712
MILFLCLIILFIITILFFKKHKTVNKIINFPSPPRLPLIGNLHQLSQHPHRSLCYLSHRYGPLMLLHFGSVPVIVASTAEAARDVLKTHDRVFASRPRSKIFEKLLYKSRNMASAPYGEYWRQMKSVSVLHLLSNKMVRSFQDVRQEEITLMMETIRKSSSKPVNLSKILSSLTNDVICRVALGRKYGVGTDFKELIDRLMRQLGTFTIGSYVPWLAWTDWVSGLEARLEKTANDFDKLLERIVQDHEDGDGDKTDFVDVLLAAQRDKSFGFDIDRLSIKAIVLDAFVGGTDTSSTLVEWEMTELLRHPTCLKKLQEEVRTICKGKSSVSEDDIQGMEYLKAVVKEALRLHPPVPLMVPHQSTQDVRLRDNHIPAGTQVIVNLWAVGREAATWGPDANEFRPERHLESPSDFRGQDFELIPFGAGRRMCPGISFAVVLNEVVLANLVHGFDWQSIDDETDVAESIGSVIRRMHPLYVIPSSTT

SEQ ID NO: 86699 - protein, 420 aa, Arabidopsis thaliana
  peptide (1)..(420): Ceres Seq. ID no. 12692664
  misc_feature (1)..(420): Homolog of NCBI NO: 13878402 NR Description: Cytochrome P450 71A23 >gi|7430648|pir||T06712
  misc_feature (1)..(420): Homolog of NCBI NO: 22331678 NR Description: similar to cytochrome P450-like protein; protein
  misc_feature (1)..(420): Homolog of NCBI NO: 22331672 NR Description: similar to cytochrome P450-like protein; protein At3g48270.1 [Arabidopsis thaliana]
  misc_feature (1)..(420): Homolog of NCBI NO: 22331680 NR Description: Expressed protein; protein id: At3g48310.1, by cDNA: gi_20465426 [Arabidopsis thaliana] Cytochrome P450 71A22 >gi|7430647|pir||T06711 probable cytochrome
  misc_feature (1)..(415): Homolog of NCBI NO: 22331676 NR Description: similar to cytochrome P450-like protein; protein At3g48290.1 [Arabidopsis thaliana]
  misc_feature (1)..(417): Homolog of NCBI NO: 22331674 NR Description: similar to cytochrome p450 family; protein id: [Arabidopsis thaliana] >gi|13878400|sp|Q9STK8|C71P_ARATH
  misc_feature (1)..(221): Homolog of NCBI NO: 7430651 NR Description: probable cytochrome P450 T29H11.190 - Arabidopsis
  misc_feature (171)..(415): Homolog of NCBI NO: 7430651 NR Description: probable cytochrome P450 T29H11.190 - Arabidopsis
  misc_feature (1)..(420): Homolog of NCBI NO: 22331682 NR Description: similar to cytochrome P450-like protein; protein At3g48320.1 [Arabidopsis thaliana]
  misc_feature (1)..(418): Homolog of NCBI NO: 13878362 NR Description: Cytochrome P450 71A12 >gi|25282591|pir||C84712
MLLHFGSVPVIVASTAEAARDVLKTHDRVFASRPRSKIFEKLLYKSRNMASAPYGEYWRQMKSVSVLHLLSNKMVRSFQDVRQEEITLMMETIRKSSSKPVNLSKILSSLTNDVICRVALGRKYGVGTDFKELIDRLMRQLGTFTIGSYVPWLAWTDWVSGLEARLEKTANDFDKLLERIVQDHEDGDGDKTDFVDVLLAAQRDKSFGFDIDRLSIKAIVLDAFVGGTDTSSTLVEWEMTELLRHPTCLKKLQEEVRTICKGKSSVSEDDIQGMEYLKAVVKEALRLHPPVPLMVPHQSTQDVRLRDNHIPAGTQVIVNLWAVGREAATWGPDANEFRPERHLESPSDFRGQDFELIPFGAGRRMCPGISFAVVLNEVVLANLVHGFDWQSIDDETDVAESIGSVIRRMHPLYVIPSSTT

SEQ ID NO: 86700 - protein, 372 aa, Arabidopsis thaliana
  peptide (1)..(372): Ceres Seq. ID no. 12692665
  misc_feature (1)..(372): Homolog of NCBI NO: 13878402 NR Description: Cytochrome P450 71A23 >gi|7430648|pir||T06712
  misc_feature (1)..(372): Homolog of NCBI NO: 22331678 NR Description: similar to cytochrome P450-like protein; protein
  misc_feature (1)..(372): Homolog of NCBI NO: 22331672 NR Description: similar to cytochrome P450-like protein; protein At3g48270.1 [Arabidopsis thaliana]
  misc_feature (1)..(372): Homolog of NCBI NO: 22331680 NR Description: Expressed protein; protein id: At3g48310.1, by cDNA: gi_20465426 [Arabidopsis thaliana] Cytochrome P450 71A22 >gi|7430647|pir||T06711 probable cytochrome
  misc_feature (1)..(367): Homolog of NCBI NO: 22331676 NR Description: similar to cytochrome P450-like protein; protein At3g48290.1 [Arabidopsis thaliana]
  misc_feature (1)..(369): Homolog of NCBI NO: 22331674 NR Description: similar to cytochrome p450 family; protein id: [Arabidopsis thaliana] >gi|13878400|sp|Q9STK8|C71P_ARATH
  misc_feature (1)..(173): Homolog of NCBI NO: 7430651 NR Description: probable cytochrome P450 T29H11.190 - Arabidopsis
  misc_feature (123)..(367): Homolog of NCBI NO: 7430651 NR Description: probable cytochrome P450 T29H11.190 - Arabidopsis
  misc_feature (1)..(372): Homolog of NCBI NO: 22331682 NR Description: similar to cytochrome P450-like protein; protein At3g48320.1 [Arabidopsis thaliana]
  misc_feature (1)..(370): Homolog of NCBI NO: 13878362 NR Description: Cytochrome P450 71A12 >gi|25282591|pir||C84712
MASAPYGEYWRQMKSVSVLHLLSNKMVRSFQDVRQEEITLMMETIRKSSSKPVNLSKILSSLTNDVICRVALGRKYGVGTDFKELIDRLMRQLGTFTIGSYVPWLAWTDWVSGLEARLEKTANDFDKLLERIVQDHEDGDGDKTDFVDVLLAAQRDKSFGFDIDRLSIKAIVLDAFVGGTDTSSTLVEWEMTELLRHPTCLKKLQEEVRTICKGKSSVSEDDIQGMEYLKAVVKEALRLHPPVPLMVPHQSTQDVRLRDNHIPAGTQVIVNLWAVGREAATWGPDANEFRPERHLESPSDFRGQDFELIPFGAGRRMCPGISFAVVLNEVVLANLVHGFDWQSIDDETDVAESIGSVIRRMHPLYVIPSSTT

SEQ ID NO: 86701 - DNA, 4083 bp, Arabidopsis thaliana
  misc_feature (1)..(4083): Ceres Seq. ID no. 12692678
  misc_feature: MA Experiment ID: 20000180 Result: Down-regulated in Transcription
  misc_feature: MA Experiment 20000180 PARAMETER Experiment Name: At_Germinating_Seeds_P Parameter: Age (hr) Value: 24 vs. 0
  misc_feature: MA Experiment 20000180 PARAMETER Experiment Name: At_Germinating_Seeds_P Parameter: Tissue Value: Germinating Seeds
  misc_feature: MA Experiment ID: 20000234 Result: Up-regulated in Transcription
  misc_feature: MA Experiment 20000234 PARAMETER Experiment Name: At_Siliques_P Parameter: Age (day) Value: 21
  misc_feature: MA Experiment 20000234 PARAMETER Experiment Name: At_Siliques_P Parameter: Organism Value: A. thaliana
  misc_feature: MA Experiment 20000234 PARAMETER Experiment Name: At_Siliques_P Parameter: Plant Line Value: WS
  misc_feature: MA Experiment 20000234 PARAMETER Experiment Name: At_Siliques_P Parameter: Tissue Value: Less Than 5mm Siliques vs. Whole Plant
  misc_feature: MA Experiment ID: 20000264 Result: Up-regulated in Transcription
  misc_feature: MA Experiment 20000264 PARAMETER Experiment Name: At_Open_Flower_P Parameter: Age (day) Value: 21
  misc_feature: MA Experiment 20000264 PARAMETER Experiment Name: At_Open_Flower_P Parameter: Plant Line Value: WS
  misc_feature: MA Experiment 20000264 PARAMETER Experiment Name: At_Open_Flower_P Parameter: Tissue Value: Open Flower vs. Whole Plant
  misc_feature: MA Experiment ID: 20000265 Result: Up-regulated in Transcription
  misc_feature: MA Experiment 20000265 PARAMETER Experiment Name: At_Open_Flower_P Parameter: Age (day) Value: 21
  misc_feature: MA Experiment 20000265 PARAMETER Experiment Name: At_Open_Flower_P Parameter: Plant Line Value: WS
  misc_feature: MA Experiment 20000265 PARAMETER Experiment Name: At_Open_Flower_P Parameter: Tissue Value: Closed Flower vs. Whole Plant
  misc_feature: MA Experiment ID: 20000286 Result: Up-regulated in Transcription
  misc_feature: MA Experiment 20000286 PARAMETER Experiment Name: At_Open_Flower_P Parameter: Age (day) Value: 21
  misc_feature: MA Experiment 20000286 PARAMETER Experiment Name: At_Open_Flower_P Parameter: Plant Line Value: WS
  misc_feature: MA Experiment 20000286 PARAMETER Experiment Name: At_Open_Flower_P Parameter: Tissue Value: Half Open vs. Whole Plant
  misc_feature: MA Experiment ID: 20000439 Result: Up-regulated in Transcription
  misc_feature: MA Experiment 20000439 PARAMETER Experiment Name: At_Roots__P Parameter: Age (day) Value: 14 vs. 21
  misc_feature: MA Experiment 20000439 PARAMETER Experiment Name: At_Roots__P Parameter: Organism Value: A. thaliana
  misc_feature: MA Experiment 20000439 PARAMETER Experiment Name: At_Roots__P Parameter: Tissue Value: Roots vs. Whole Plant
  misc_feature: MA Experiment ID: 20000794 Result: Up-regulated in Transcription
  misc_feature: MA Experiment 20000794 PARAMETER Experiment Name: At_Petals_P Parameter: Age (day) Value: 23-25 days
  misc_feature: MA Experiment 20000794 PARAMETER Experiment Name: At_Petals_P Parameter: Plant Line Value: WS
  misc_feature: MA Experiment 20000794 PARAMETER Experiment Name: At_Petals_P Parameter: Tissue Value: Petals vs. Whole plant
  misc_feature: MA Experiment ID: 20001451 Result: Down-regulated in Transcription
  misc_feature: MA Experiment 20001451 PARAMETER Experiment Name: At_Far-red-induction_P Parameter: Age (day) Value: 7
  misc_feature: MA Experiment 20001451 PARAMETER Experiment Name: At_Far-red-induction_P Parameter: Light Value: Far-red vs. White
  misc_feature: MA Experiment 20001451 PARAMETER Experiment Name: At_Far-red-induction_P Parameter: Organism Value: A. thaliana
  misc_feature: MA Experiment 20001451 PARAMETER Experiment Name: At_Far-red-induction_P Parameter: Plant Line Value: Columbia
  misc_feature: MA Experiment 20001451 PARAMETER Experiment Name: At_Far-red-induction_P Parameter: Timepoint (hr) Value: 24
  misc_feature: MA Experiment 20001451 PARAMETER Experiment Name: At_Far-red-induction_P Parameter: Tissue Value: Whole Plant
atggcggtttcagagcagagtcaagatgtgtttccatggcttaaatcgttaccggttgctccagagttcagacctactctagcagagtttcaagatccgatcgcttacattttgaagattgaagaagaagcttctagatatggaatctgtaaaattctgcctccactgcctcctccttccaaaaaaacctcgatttctaatctcaaccgttctctggcggcaagagcggcggcgagggttcgtgacggcggctttggcgcgtgtgattatgacggtggtcccacattcgccacgcgccagcagcagatcgggttttgccctaggaaacagcgtccagtgcagagacctgtgtggcagagtggagaggagtactcttttggtgagttcgagtttaaagctaagaactttgagaagaattatctcaagaaatgtggtaaaaagagtcaactctctgcccttgaaattgaaacactttactggagagccactgtggataaacccttctctgttgagtatgccaatgacatgcctggctcggcttttatccctctgagtctggctgctgcgaggaggagagagtctggtggtgaaggaggaacagttggtgagaccgcttggaacatgagggcaatgtctagagccgaaggatcattgcttaagttcatgaaggaagagatccctggagttacatcaccaatggtgtatgttgctatgatgtttagttggtttgcttggcatgtggaggaccatgaccttcatagtctcaattacttgcatatgggtgctggtaagacttggtacggtgtgccaaaggatgctgctctggcttttgaggaggttgttagggttcatggttacggtgaagagctcaatcctcttgtgacattttctactcttggtgagaagacaactgtgatgtctcctgaagtatttgttaaagccggaataccgtgttgcaggttagtgcaaaatcctggagagtttgtcgtcacctttccgggagcttatcattcgggatttagtcatggatttaattttggagaagcatctaacattgccactcccgaatggttgagaatggctaaagatgctgctatccggcgagctgctataaattaccctccaatggtttctcatctccagctactttatgactttgtattggctctaggttctagagtgccaacaagcatcaatcccaaaccacggagttctagattaaaagataaggcaagaagcgaaggagaaagattgaccaaaaagctatttgtgcaaaacattatccacaacaacgaattgctttcttctctcggaaaaggatccccagtggcccttctcccacagagttcctcagatatatcagtttgttctgacctgcgaattggatcccatttgataaccaaccaggaaaacccaatccagttaaagtgtgaggacttaagttctgatagtgttgtggttgatctcagtaacggtttaaaggatacagtttcagtgaaagaaaaatttacatctttatgtgaaaggagcagaaatcacctagcaagcacggagaaggacactcaagaaactctgtctgatgctgaaaggaggaagaatgatgcagctgttgcgctttcggatcaaaggcttttctcttgtgttacatgtggagtcttaagctttgattgtgtagctatcgttcaacctaaagaagcagctgctagatatctcatgtctgcagattgtagcttcttcaatgattggacagctgcttctggatctgcaaatcttggtcaggctgcaagatcacttcatcctcaaagcaaagagaagcatgatgtaaattacttctacaatgttcctgttcaaactatggatcattcagtgaagactggcgatcaaaaaacttcaacaacttccccgacaatagcgcataaagataatgatgttcttgggatgttagcttcagcatatggagactcttctgattccgaggaagaagatcaaaaaggcttagttacccctagttccaaaggggaaacaaaaacgtatgatcaagaaggttcagatggccatgaggaggctagagatggtagaacttctgattttaactgccagagactaaccagcgaacagaatgggttaagcaaaggcggaaaatcatcacttctggaaatagctttaccatttattccaagatctgatgacgattcatgtcggttgcacgtgttttgtcttgagcatgctgcggaagtggaacagcaacttcgtccttttggggggattaacttaatgttactgtgccatccagagtaccccaggatagaggctgaagcaaagatagttgccgaagagctcgtcatcaatcacgaatggaatgatactgaattcaggaatgtgacccgagaggatgaggaaacgattcaggcagcgttggataatgttgaagctaagggtgggaacagtgattggaccgtaaaattgggtgttaacctttcttacagcgctattctcagtcgctctcctctgtacagtaagcagatgccgtataactccatcatatacaaggcgttcggtcgcagctctccagtagcgagctcaccctcgaaacccaaagtctctggtaaaagatcgtccagacagaggaaatatgttgttggaaaatggtgtggtaaggtttggatgtcacatcaggtgcatccctttttgctggagcaggacttagagggggaagaatctgaaagaagttgtcatcttcgagttgctatggatgaggatgccactggaaagagatcgtttcctaataatgtttccagggattcgacaacaatgtttggaagaaagtattgtaggaagagaaagataagagcaaaggcggtgccacgcaagaagcttacttcttttaagagggaagatggagtttctgatgacacatcagaagatcattcttataagcagcaatggagggcttccgggaatgaggaagagtcttattttgagacagggaacacagcttctggtgattcatcaaatcaaatgtctgatccgcacaagggaattatcagacataaaggttataaagaatttgagtcagatgatgaggtttcagaccgttcacttggggaagagtatactgtacgggcatgtgcagcttcagagagctcaatggagaatggctctcagcattcaatgtatgaccatgatgatgatgatgatgatatcgacaggcagcctagggggattccaaggagccaacagacaagagtttttaggaatccagtttcatatgagtcagaagataatggcgtttatcagcaaagcggaagaatatccataagtaataggcaagctaatcgaatggttggtgaatatgattcagcagagaattctttggaggaacgaggcttttgcagtacagggaaaaggcaaaccaggtcaacagccaaacgaatagcaaaaaccaagacagttcagagttcgagagacacaaaaggtcgctttttgcaagaatttgcatctggaaagaagaatgaagaattggattcatacatggagggacctagcacacggcttagggtgagacatcagaagccgtcgagagggtctttagaaacaaaaccaaagaagattggtaagaagagaagtggtaatgcttccttctccagagttgcaactgaaaaagatgtggaggaaaaagaagaagaagaagaagaagaagagaatgaggaagaggaatgtgcagcataccaatgtaacatggagggttgcacgatgagtttcagttcggaaaaacagttgatgttacacaaaagaaacatatgcccaattaaaggctgtggtaaaaacttcttctcacacaagtatttggttcaacaccagcgtgttcactcagacgaccgtcctctgaaatgtccatggaagggatgtaagatgacgttcaagtgggcttggtctagaaccgagcacataagggttcacacaggcgctaggccttatgtttgcgctgaaccggattgtggtcaaacattcaggtttgtctctgacttcagccggcataaaaggaagaccggtcattcggttaagaagaccaacaaaaggtga

SEQ ID NO: 86702 - protein, 1360 aa, Arabidopsis thaliana
  peptide (1)..(1360): Ceres Seq. ID no. 12692679
  misc_feature (233)..(352): Pfam Name: jmjC domain Pfam Description: jmjC domain
  misc_feature (7)..(460): Homolog of NCBI NO: 20804883 NR Description: putative zinc finger protein [Oryza sativa
  misc_feature (616)..(938): Homolog of NCBI NO: 20804883 NR Description: putative zinc finger protein [Oryza sativa
  misc_feature (1101)..(1359): Homolog of NCBI NO: 20804883 NR Description: putative zinc finger protein [Oryza sativa
  misc_feature (510)..(594): Homolog of NCBI NO: 20804883 NR Description: putative zinc finger protein [Oryza sativa
  misc_feature (195)..(437): Homolog of NCBI NO: 15237652 NR Description: zinc finger protein - like; protein id:
  misc_feature (13)..(181): Homolog of NCBI NO: 15237652 NR Description: zinc finger protein - like; protein id:
  misc_feature (1244)..(1354): Homolog of NCBI NO: 15237652 NR Description: zinc finger protein - like; protein id:
  misc_feature (734)..(836): Homolog of NCBI NO: 15237652 NR Description: zinc finger protein - like; protein id:
  misc_feature (118)..(506): Homolog of NCBI NO: 15237976 NR Description: putative protein; protein id: At5g46910.1 thaliana] >gi|9759433|dbj|BAB10230.1|
  misc_feature (3)..(56): Homolog of NCBI NO: 15237976 NR Description: putative protein; protein id: At5g46910.1 thaliana] >gi|9759433|dbj|BAB10230.1|
MAVSEQSQDVFPWLKSLPVAPEFRPTLAEFQDPIAYILKIEEEASRYGICKILPPLPPPSKKTSISNLNRSLAARAAARVRDGGFGACDYDGGPTFATRQQQIGFCPRKQRPVQRPVWQSGEEYSFGEFEFKAKNFEKNYLKKCGKKSQLSALEIETLYWRATVDKPFSVEYANDMPGSAFIPLSLAAARRRESGGEGGTVGETAWNMRAMSRAEGSLLKFMKEEIPGVTSPMVYVAMMFSWFAWHVEDHDLHSLNYLHMGAGKTWYGVPKDAALAFEEVVRVHGYGEELNPLVTFSTLGEKTTVMSPEVFVKAGIPCCRLVQNPGEFVVTFPGAYHSGFSHGFNFGEASNIATPEWLRMAKDAAIRRAAINYPPMVSHLQLLYDFVLALGSRVPTSINPKPRSSRLKDKARSEGERLTKKLFVQNIIHNNELLSSLGKGSPVALLPQSSSDISVCSDLRIGSHLITNQENPIQLKCEDLSSDSVVVDLSNGLKDTVSVKEKFTSLCERSRNHLASTEKDTQETLSDAERRKNDAAVALSDQRLFSCVTCGVLSFDCVAIVQPKEAAARYLMSADCSFFNDWTAASGSANLGQAARSLHPQSKEKHDVNYFYNVPVQTMDHSVKTGDQKTSTTSPTIAHKDNDVLGMLASAYGDSSDSEEEDQKGLVTPSSKGETKTYDQEGSDGHEEARDGRTSDFNCQRLTSEQNGLSKGGKSSLLEIALPFIPRSDDDSCRLHVFCLEHAAEVEQQLRPFGGINLMLLCHPEYPRIEAEAKIVAEELVINHEWNDTEFRNVTREDEETIQAALDNVEAKGGNSDWTVKLGVNLSYSAILSRSPLYSKQMPYNSIIYKAFGRSSPVASSPSKPKVSGKRSSRQRKYVVGKWCGKVWMSHQVHPFLLEQDLEGEESERSCHLRVAMDEDATGKRSFPNNVSRDSTTMFGRKYCRKRKIRAKAVPRKKLTSFKREDGVSDDTSEDHSYKQQWRASGNEEESYFETGNTASGDSSNQMSDPHKGIIRHKGYKEFESDDEVSDRSLGEEYTVRACAASESSMENGSQHSMYDHDDDDDDIDRQPRGIPRSQQTRVFRNPVSYESEDNGVYQQSGRISISNRQANRMVGEYDSAENSLEERGFCSTGKRQTRSTAKRIAKTKTVQSSRDTKGRFLQEFASGKKNEELDSYMEGPSTRLRVRHQKPSRGSLETKPKKIGKKRSGNASFSRVATEKDVEEKEEEEEEEENEEEECAAYQCNMEGCTMSFSSEKQLMLHKRNICPIKGCGKNFFSHKYLVQHQRVHSDDRPLKCPWKGCKMTFKWAWSRTEHIRVHTGARPYVCAEPDCGQTFRFVSDFSRHKRKTGHSVKKTNKR

SEQ ID NO: 86703 - protein, 1185 aa, Arabidopsis thaliana
  peptide (1)..(1185): Ceres Seq. ID no. 12692680
  misc_feature (58)..(177): Pfam Name: jmjC domain Pfam Description: jmjC domain
  misc_feature (1)..(285): Homolog of NCBI NO: 20804883 NR Description: putative zinc finger protein [Oryza sativa
  misc_feature (441)..(763): Homolog of NCBI NO: 20804883 NR Description: putative zinc finger protein [Oryza sativa
  misc_feature (926)..(1184): Homolog of NCBI NO: 20804883 NR Description: putative zinc finger protein [Oryza sativa
  misc_feature (335)..(419): Homolog of NCBI NO: 20804883 NR Description: putative zinc finger protein [Oryza sativa
  misc_feature (20)..(262): Homolog of NCBI NO: 15237652 NR Description: zinc finger protein - like; protein id:
  misc_feature (1069)..(1179): Homolog of NCBI NO: 15237652 NR Description: zinc finger protein - like; protein id:
  misc_feature (559)..(661): Homolog of NCBI NO: 15237652 NR Description: zinc finger protein - like; protein id:
  misc_feature (1)..(331): Homolog of NCBI NO: 15237976 NR Description: putative protein; protein id: At5g46910.1 thaliana] >gi|9759433|dbj|BAB10230.1|
  misc_feature (1)..(285): Homolog of NCBI NO: 37537146 NR Description: putative retinoblastoma binding protein [Oryza
  misc_feature (1)..(189): Homolog of NCBI NO: 15226853 NR Description: unknown protein; protein id: At2g34880.1
MPGSAFIPLSLAAARRRESGGEGGTVGETAWNMRAMSRAEGSLLKFMKEEIPGVTSPMVYVAMMFSWFAWHVEDHDLHSLNYLHMGAGKTWYGVPKDAALAFEEVVRVHGYGEELNPLVTFSTLGEKTTVMSPEVFVKAGIPCCRLVQNPGEFVVTFPGAYHSGFSHGFNFGEASNIATPEWLRMAKDAAIRRAAINYPPMVSHLQLLYDFVLALGSRVPTSINPKPRSSRLKDKARSEGERLTKKLFVQNIIHNNELLSSLGKGSPVALLPQSSSDISVCSDLRIGSHLITNQENPIQLKCEDLSSDSVVVDLSNGLKDTVSVKEKFTSLCERSRNHLASTEKDTQETLSDAERRKNDAAVALSDQRLFSCVTCGVLSFDCVAIVQPKEAAARYLMSADCSFFNDWTAASGSANLGQAARSLHPQSKEKHDVNYFYNVPVQTMDHSVKTGDQKTSTTSPTIAHKDNDVLGMLASAYGDSSDSEEEDQKGLVTPSSKGETKTYDQEGSDGHEEARDGRTSDFNCQRLTSEQNGLSKGGKSSLLEIALPFIPRSDDDSCRLHVFCLEHAAEVEQQLRPFGGINLMLLCHPEYPRIEAEAKIVAEELVINHEWNDTEFRNVTREDEETIQAALDNVEAKGGNSDWTVKLGVNLSYSAILSRSPLYSKQMPYNSIIYKAFGRSSPVASSPSKPKVSGKRSSRQRKYVVGKWCGKVWMSHQVHPFLLEQDLEGEESERSCHLRVAMDEDATGKRSFPNNVSRDSTTMFGRKYCRKRKIRAKAVPRKKLTSFKREDGVSDDTSEDHSYKQQWRASGNEEESYFETGNTASGDSSNQMSDPHKGIIRHKGYKEFESDDEVSDRSLGEEYTVRACAASESSMENGSQHSMYDHDDDDDDIDRQPRGIPRSQQTRVFRNPVSYESEDNGVYQQSGRISISNRQANRMVGEYDSAENSLEERGFCSTGKRQTRSTAKRIAKTKTVQSSRDTKGRFLQEFASGKKNEELDSYMEGPSTRLRVRHQKPSRGSLETKPKKIGKKRSGNASFSRVATEKDVEEKEEEEEEEENEEEECAAYQCNMEGCTMSFSSEKQLMLHKRNICPIKGCGKNFFSHKYLVQHQRVHSDDRPLKCPWKGCKMTFKWAWSRTEHIRVHTGARPYVCAEPDCGQTFRFVSDFSRHKRKTGHSVKKTNKR

SEQ ID NO: 86704 - protein, 1153 aa, Arabidopsis thaliana
  peptide (1)..(1153): Ceres Seq. ID no. 12692681
  misc_feature (26)..(145): Pfam Name: jmjC domain Pfam Description: jmjC domain
  misc_feature (1)..(253): Homolog of NCBI NO: 20804883 NR Description: putative zinc finger protein [Oryza sativa
  misc_feature (409)..(731): Homolog of NCBI NO: 20804883 NR Description: putative zinc finger protein [Oryza sativa
  misc_feature (894)..(1152): Homolog of NCBI NO: 20804883 NR Description: putative zinc finger protein [Oryza sativa
  misc_feature (303)..(387): Homolog of NCBI NO: 20804883 NR Description: putative zinc finger protein [Oryza sativa
  misc_feature (1)..(230): Homolog of NCBI NO: 15237652 NR Description: zinc finger protein - like; protein id:
  misc_feature (1037)..(1147): Homolog of NCBI NO: 15237652 NR Description: zinc finger protein - like; protein id:
  misc_feature (527)..(629): Homolog of NCBI NO: 15237652 NR Description: zinc finger protein - like; protein id:
  misc_feature (1)..(299): Homolog of NCBI NO: 15237976 NR Description: putative protein; protein id: At5g46910.1 thaliana] >gi|9759433|dbj|BAB10230.1|
  misc_feature (1)..(253): Homolog of NCBI NO: 37537146 NR Description: putative retinoblastoma binding protein [Oryza
  misc_feature (1)..(157): Homolog of NCBI NO: 15226853 NR Description: unknown protein; protein id: At2g34880.1
MRAMSRAEGSLLKFMKEEIPGVTSPMVYVAMMFSWFAWHVEDHDLHSLNYLHMGAGKTWYGVPKDAALAFEEVVRVHGYGEELNPLVTFSTLGEKTTVMSPEVFVKAGIPCCRLVQNPGEFVVTFPGAYHSGFSHGFNFGEASNIATPEWLRMAKDAAIRRAAINYPPMVSHLQLLYDFVLALGSRVPTSINPKPRSSRLKDKARSEGERLTKKLFVQNIIHNNELLSSLGKGSPVALLPQSSSDISVCSDLRIGSHLITNQENPIQLKCEDLSSDSVVVDLSNGLKDTVSVKEKFTSLCERSRNHLASTEKDTQETLSDAERRKNDAAVALSDQRLFSCVTCGVLSFDCVAIVQPKEAAARYLMSADCSFFNDWTAASGSANLGQAARSLHPQSKEKHDVNYFYNVPVQTMDHSVKTGDQKTSTTSPTIAHKDNDVLGMLASAYGDSSDSEEEDQKGLVTPSSKGETKTYDQEGSDGHEEARDGRTSDFNCQRLTSEQNGLSKGGKSSLLEIALPFIPRSDDDSCRLHVFCLEHAAEVEQQLRPFGGINLMLLCHPEYPRIEAEAKIVAEELVINHEWNDTEFRNVTREDEETIQAALDNVEAKGGNSDWTVKLGVNLSYSAILSRSPLYSKQMPYNSIIYKAFGRSSPVASSPSKPKVSGKRSSRQRKYVVGKWCGKVWMSHQVHPFLLEQDLEGEESERSCHLRVAMDEDATGKRSFPNNVSRDSTTMFGRKYCRKRKIRAKAVPRKKLTSFKREDGVSDDTSEDHSYKQQWRASGNEEESYFETGNTASGDSSNQMSDPHKGIIRHKGYKEFESDDEVSDRSLGEEYTVRACAASESSMENGSQHSMYDHDDDDDDIDRQPRGIPRSQQTRVFRNPVSYESEDNGVYQQSGRISISNRQANRMVGEYDSAENSLEERGFCSTGKRQTRSTAKRIAKTKTVQSSRDTKGRFLQEFASGKKNEELDSYMEGPSTRLRVRHQKPSRGSLETKPKKIGKKRSGNASFSRVATEKDVEEKEEEEEEEENEEEECAAYQCNMEGCTMSFSSEKQLMLHKRNICPIKGCGKNFFSHKYLVQHQRVHSDDRPLKCPWKGCKMTFKWAWSRTEHIRVHTGARPYVCAEPDCGQTFRFVSDFSRHKRKTGHSVKKTNKR

SEQ ID NO: 86705 - DNA, 1587 bp, Arabidopsis thaliana
  misc_feature (1)..(1587): Ceres Seq. ID no. 12692778
  misc_feature: MA Experiment ID: 20000171 Result: Down-regulated in Transcription
  misc_feature: MA Experiment 20000171 PARAMETER Experiment Name: At_42deg_Heat_P Parameter: Age (day) Value: 14
  misc_feature: MA Experiment 20000171 PARAMETER Experiment Name: At_42deg_Heat_P Parameter: Organism Value: A. thaliana
  misc_feature: MA Experiment 20000171 PARAMETER Experiment Name: At_42deg_Heat_P Parameter: Plant Line Value: WS
  misc_feature: MA Experiment 20000171 PARAMETER Experiment Name: At_42deg_Heat_P Parameter: Temperature (deg C) Value: 42 vs. 22
  misc_feature: MA Experiment 20000171 PARAMETER Experiment Name: At_42deg_Heat_P Parameter: Timepoint (hr) Value: 1
  misc_feature: MA Experiment 20000171 PARAMETER Experiment Name: At_42deg_Heat_P Parameter: Tissue Value: Aerial
  misc_feature: MA Experiment ID: 20000173 Result: Down-regulated in Transcription
  misc_feature: MA Experiment 20000173 PARAMETER Experiment Name: At_42deg_Heat_P Parameter: Age (day) Value: 14
  misc_feature: MA Experiment 20000173 PARAMETER Experiment Name: At_42deg_Heat_P Parameter: Organism Value: A. thaliana
  misc_feature: MA Experiment 20000173 PARAMETER Experiment Name: At_42deg_Heat_P Parameter: Plant Line Value: WS
  misc_feature: MA Experiment 20000173 PARAMETER Experiment Name: At_42deg_Heat_P Parameter: Temperature (deg C) Value: 42 vs. 22
  misc_feature: MA Experiment 20000173 PARAMETER Experiment Name: At_42deg_Heat_P Parameter: Timepoint (hr) Value: 6
  misc_feature: MA Experiment 20000173 PARAMETER Experiment Name: At_42deg_Heat_P Parameter: Tissue Value: Aerial
  misc_feature: MA Experiment ID: 20000265 Result: Up-regulated in Transcription
  misc_feature: MA Experiment 20000265 PARAMETER Experiment Name: At_Open_Flower_P Parameter: Age (day) Value: 21
  misc_feature: MA Experiment 20000265 PARAMETER Experiment Name: At_Open_Flower_P Parameter: Plant Line Value: WS
  misc_feature: MA Experiment 20000265 PARAMETER Experiment Name: At_Open_Flower_P Parameter: Tissue Value: Closed Flower vs. Whole Plant
  misc_feature: MA Experiment ID: 20000286 Result: Up-regulated in Transcription
  misc_feature: MA Experiment 20000286 PARAMETER Experiment Name: At_Open_Flower_P Parameter: Age (day) Value: 21
  misc_feature: MA Experiment 20000286 PARAMETER Experiment Name: At_Open_Flower_P Parameter: Plant Line Value: WS
  misc_feature: MA Experiment 20000286 PARAMETER Experiment Name: At_Open_Flower_P Parameter: Tissue Value: Half Open vs. Whole Plant
  misc_feature: MA Experiment ID: 20000438 Result: Up-regulated in Transcription
  misc_feature: MA Experiment 20000438 PARAMETER Experiment Name: At_Shoots__P Parameter: Age (day) Value: 14
  misc_feature: MA Experiment 20000438 PARAMETER Experiment Name: At_Shoots__P Parameter: Tissue Value: Shoots vs. Whole Plant
  misc_feature: MA Experiment ID: 20000495 Result: Up-regulated in Transcription
  misc_feature: MA Experiment 20000495 PARAMETER Experiment Name: At_Guard_Cells_P Parameter: Harvest Date Value: 8/2/2002
  misc_feature: MA Experiment 20000495 PARAMETER Experiment Name: At_Guard_Cells_P Parameter: Organism Value: A. thaliana
  misc_feature: MA Experiment 20000495 PARAMETER Experiment Name: At_Guard_Cells_P Parameter: Tissue Value: Guard Cells vs. Leaves
atgatgaggaactcgccgtcatatacctctgcaacgcactctcgtaatttcgacaccattttgtctccactcgtcaaaaccggcaccggtgcttctaaccgatcctacgccttcttctccatctttctcttcctcctcctcggcgcgtttctctccacgcgcctcctcctcgatccctccgttttgatagagaaagaagcggtgtccgtgactgagagagaaaccactcaatccccagaataccctcagtcgactaagctaattacggaaaaaccaaaagagtttacgctaaactgcgctgctttctccggcaacgacactggaacttgcccaaaggacaattatccgacgagtttccgatctagcgccggagaaggagaatctgaccgttctccatccgccacgtgcccagattacttccgatggattcacgaggatctacggccatgggagaagaccgggatcacgagggaagccttggagcgagccaatgcgacggcgattttccgcctggcgattatcaacgggagaatctacgtcgagaaatttcgtgaggcttttcagacaagagatgtgttcacgatctggggattcgtacagctcctacggagatatccgggaaagattccggatctcgagctcatgtttgactgcgttgactggccggtagtgaaggcggctgaattcgccggagttgatcaacctccaccgccgccattgttccgttattgcgcgaacgacgagacgctcgacattgtatttcccgattggtcctattggggatgggctgaggtgaatataaagccatgggaaagtctgttgaaagaactaagagaaggaaaccagaggactaaatggatagatagagagccttatgcttactggaaagggaatccaacggttgctgagacgagacttgatctcatgaaatgtaatctctccgaggactgggtcaaggaatcaaaggaaggttacaagcagtcagacttggcgagccaatgccatcacaggtacaagatttacatagaagggtctgcgtggtcggtgagtgagaagtacattctggcttgtgactcggtgacattaatggtgaaacctcattactacgatttcttcacaagaggtatgtttccaggtcaccattactggcctgtcaaggaggacgacaaatgccgttccatcaaattcgctgttgattggggcaacttgcatatgcgaaaggcacaagacataggtaagaaggcaagtgagtttgtgcaacaagaactcaagatggactatgtgtacgattacatgtttcatctcttaatccaatactctaaactcctccggtttaaacccgagatccctcagaactccactgagctctgctcagaggcaatggcatgcccgagggatggaaatgaacgaaagtttatgatggaatcactcgtaaaacgcccagctgagacaggtccctgcgccatgccgcctccgtatgatccggcatcattttattcagttttgaaaaggagacagagtacgactagtagaatcgaacagtgggagagtaagtactggaggaagcagaacaagaccggttcgtaa

SEQ ID NO: 86706 - protein, 528 aa, Arabidopsis thaliana
  peptide (1)..(528): Ceres Seq. ID no. 12692779
  misc_feature (131)..(521): Pfam Name: Arabidopsis thaliana protein of unknown function Pfam Description: Arabidopsis thaliana protein of unknown
  misc_feature (1)..(528): Homolog of NCBI NO: 15229061 NR Description: putative protein; protein id: At3g48980.1
  misc_feature (2)..(528): Homolog of NCBI NO: 15237842 NR Description: putative protein; protein id: At5g23850.1 thaliana] >gi|10176852|dbj|BAB10058.1| contains similarity to
  misc_feature (31)..(520): Homolog of NCBI NO: 7486461 NR Description: hypothetical protein At2g45830 [imported] - thaliana >gi|3386611|gb|AAC28541.1| unknown protein [Arabidopsis
  misc_feature (88)..(522): Homolog of NCBI NO: 15222413 NR Description: hypothetical protein; protein id: At1g63420.1
  misc_feature (116)..(526): Homolog of NCBI NO: 15233070 NR Description: putative protein; protein id: At3g61270.1
  misc_feature (88)..(317): Homolog of NCBI NO: 25404907 NR Description: protein F2K11.20 [imported] - Arabidopsis >gi|6633846|gb|AAF19705.1|AC008047_12 F2K11.20 [Arabidopsis
  misc_feature (317)..(522): Homolog of NCBI NO: 25404907 NR Description: protein F2K11.20 [imported] - Arabidopsis >gi|6633846|gb|AAF19705.1|AC008047_12 F2K11.20 [Arabidopsis
  misc_feature (160)..(516): Homolog of NCBI NO: 21742339 NR Description: OSJNBb0020O11.18 [Oryza sativa (japonica
  misc_feature (111)..(518): Homolog of NCBI NO: 38346998 NR Description: OSJNBb0039L24.21 [Oryza sativa (japonica
  misc_feature (160)..(520): Homolog of NCBI NO: 30690136 NR Description: expressed protein [Arabidopsis thaliana]
MMRNSPSYTSATHSRNFDTILSPLVKTGTGASNRSYAFFSIFLFLLLGAFLSTRLLLDPSVLIEKEAVSVTERETTQSPEYPQSTKLITEKPKEFTLNCAAFSGNDTGTCPKDNYPTSFRSSAGEGESDRSPSATCPDYFRWIHEDLRPWEKTGITREALERANATAIFRLAIINGRIYVEKFREAFQTRDVFTIWGFVQLLRRYPGKIPDLELMFDCVDWPVVKAAEFAGVDQPPPPPLFRYCANDETLDIVFPDWSYWGWAEVNIKPWESLLKELREGNQRTKWIDREPYAYWKGNPTVAETRLDLMKCNLSEDWVKESKEGYKQSDLASQCHHRYKIYIEGSAWSVSEKYILACDSVTLMVKPHYYDFFTRGMFPGHHYWPVKEDDKCRSIKFAVDWGNLHMRKAQDIGKKASEFVQQELKMDYVYDYMFHLLIQYSKLLRFKPEIPQNSTELCSEAMACPRDGNERKFMMESLVKRPAETGPCAMPPPYDPASFYSVLKRRQSTTSRIEQWESKYWRKQNKTGS

SEQ ID NO: 86707 - protein, 527 aa, Arabidopsis thaliana
  peptide (1)..(527): Ceres Seq. ID no. 12692780
  misc_feature (130)..(520): Pfam Name: Arabidopsis thaliana protein of unknown function Pfam Description: Arabidopsis thaliana protein of unknown
  misc_feature (1)..(527): Homolog of NCBI NO: 15229061 NR Description: putative protein; protein id: At3g48980.1
  misc_feature (1)..(527): Homolog of NCBI NO: 15237842 NR Description: putative protein; protein id: At5g23850.1 thaliana] >gi|10176852|dbj|BAB10058.1| contains similarity to
  misc_feature (30)..(519): Homolog of NCBI NO: 7486461 NR Description: hypothetical protein At2g45830 [imported] - thaliana >gi|3386611|gb|AAC28541.1| unknown protein [Arabidopsis
  misc_feature (87)..(521): Homolog of NCBI NO: 15222413 NR Description: hypothetical protein; protein id: At1g63420.1
  misc_feature (115)..(525): Homolog of NCBI NO: 15233070 NR Description: putative protein; protein id: At3g61270.1
  misc_feature (87)..(316): Homolog of NCBI NO: 25404907 NR Description: protein F2K11.20 [imported] - Arabidopsis >gi|6633846|gb|AAF19705.1|AC008047_12 F2K11.20 [Arabidopsis
  misc_feature (316)..(521): Homolog of NCBI NO: 25404907 NR Description: protein F2K11.20 [imported] - Arabidopsis >gi|6633846|gb|AAF19705.1|AC008047_12 F2K11.20 [Arabidopsis
  misc_feature (159)..(515): Homolog of NCBI NO: 21742339 NR Description: OSJNBb0020O11.18 [Oryza sativa (japonica
  misc_feature (110)..(517): Homolog of NCBI NO: 38346998 NR Description: OSJNBb0039L24.21 [Oryza sativa (japonica
  misc_feature (159)..(519): Homolog of NCBI NO: 30690136 NR Description: expressed protein [Arabidopsis thaliana]
MRNSPSYTSATHSRNFDTILSPLVKTGTGASNRSYAFFSIFLFLLLGAFLSTRLLLDPSVLIEKEAVSVTERETTQSPEYPQSTKLITEKPKEFTLNCAAFSGNDTGTCPKDNYPTSFRSSAGEGESDRSPSATCPDYFRWIHEDLRPWEKTGITREALERANATAIFRLAIINGRIYVEKFREAFQTRDVFTIWGFVQLLRRYPGKIPDLELMFDCVDWPVVKAAEFAGVDQPPPPPLFRYCANDETLDIVFPDWSYWGWAEVNIKPWESLLKELREGNQRTKWIDREPYAYWKGNPTVAETRLDLMKCNLSEDWVKESKEGYKQSDLASQCHHRYKIYIEGSAWSVSEKYILACDSVTLMVKPHYYDFFTRGMFPGHHYWPVKEDDKCRSIKFAVDWGNLHMRKAQDIGKKASEFVQQELKMDYVYDYMFHLLIQYSKLLRFKPEIPQNSTELCSEAMACPRDGNERKFMMESLVKRPAETGPCAMPPPYDPASFYSVLKRRQSTTSRIEQWESKYWRKQNKTGS

SEQ ID NO: 86708 - protein, 314 aa, Arabidopsis thaliana
  peptide (1)..(314): Ceres Seq. ID no. 12692781
  misc_feature (1)..(307): Pfam Name: Arabidopsis thaliana protein of unknown function Pfam Description: Arabidopsis thaliana protein of unknown
  misc_feature (1)..(314): Homolog of NCBI NO: 15229061 NR Description: putative protein; protein id: At3g48980.1
  misc_feature (1)..(314): Homolog of NCBI NO: 15237842 NR Description: putative protein; protein id: At5g23850.1 thaliana] >gi|10176852|dbj|BAB10058.1| contains similarity to
  misc_feature (1)..(306): Homolog of NCBI NO: 7486461 NR Description: hypothetical protein At2g45830 [imported] - thaliana >gi|3386611|gb|AAC28541.1| unknown protein [Arabidopsis
  misc_feature (1)..(308): Homolog of NCBI NO: 15222413 NR Description: hypothetical protein; protein id: At1g63420.1
  misc_feature (1)..(312): Homolog of NCBI NO: 15233070 NR Description: putative protein; protein id: At3g61270.1
  misc_feature (1)..(103): Homolog of NCBI NO: 25404907 NR Description: protein F2K11.20 [imported] - Arabidopsis >gi|6633846|gb|AAF19705.1|AC008047_12 F2K11.20 [Arabidopsis
  misc_feature (103)..(308): Homolog of NCBI NO: 25404907 NR Description: protein F2K11.20 [imported] - Arabidopsis >gi|6633846|gb|AAF19705.1|AC008047_12 F2K11.20 [Arabidopsis
  misc_feature (1)..(302): Homolog of NCBI NO: 21742339 NR Description: OSJNBb0020O11.18 [Oryza sativa (japonica
  misc_feature (1)..(304): Homolog of NCBI NO: 38346998 NR Description: OSJNBb0039L24.21 [Oryza sativa (japonica
  misc_feature (1)..(306): Homolog of NCBI NO: 30690136 NR Description: expressed protein [Arabidopsis thaliana]
MFDCVDWPVVKAAEFAGVDQPPPPPLFRYCANDETLDIVFPDWSYWGWAEVNIKPWESLLKELREGNQRTKWIDREPYAYWKGNPTVAETRLDLMKCNLSEDWVKESKEGYKQSDLASQCHHRYKIYIEGSAWSVSEKYILACDSVTLMVKPHYYDFFTRGMFPGHHYWPVKEDDKCRSIKFAVDWGNLHMRKAQDIGKKASEFVQQELKMDYVYDYMFHLLIQYSKLLRFKPEIPQNSTELCSEAMACPRDGNERKFMMESLVKRPAETGPCAMPPPYDPASFYSVLKRRQSTTSRIEQWESKYWRKQNKTGS

SEQ ID NO: 86709 - DNA, 1903 bp, Arabidopsis thaliana
  misc_feature (1)..(1903): Ceres Seq. ID no. 12692786
  misc_feature: MA Experiment ID: 108462 Result: Down-regulated in Transcription
  misc_feature: MA Experiment 108462 PARAMETER Experiment Name: At_Germinating_Seeds_cDNA_P Parameter: Age (day) Value: 2 vs. 0
  misc_feature: MA Experiment 108462 PARAMETER Experiment Name: At_Germinating_Seeds_cDNA_P Parameter: Tissue Value: Germinating Seeds
atcgaaattttggattcgaacgtgtggatcgctggaaaaattaaactttagggtcgctagattacgattgcttcgctttttagtagtagtaggctacaatcgattggcaaacatctctatatcggccataactccgtcaagctctgcagaggctgcttcatcagtattgagagacttcctggtgattgattctcatgtctatgtctgagtttggcattgtctacgccatccatatcatcaccgtccaattcggctccgtcgtctcgaaagtttgtgaatgtcttctacgtaaaggacctctttcctcacgagacatctctcgtttagctgaatcagatatcaaccataacaaagttaaagatattctctatctcttgattcagcacaattgtgttcaagctttctccattgaacctcctgatggttctgagagcaaagctattgtacagtatattgtgttgtttaacaacattctgcatcgtgtgaggtataacaagttttcgaggattgtaaacgaagaacttgactccaagtgcggtgcagttcttgatggtttacttagtaacggtaggcttaccttgggacagtttattgaaagagatagagattcaggaaatacgataggttctgaagcaatcagagattctcttcagaaattggttgctgcccgttttgttgagcgcattccttctcccgaacctgttcttggaaacaaagaaaaagagccggcaaagagaagaggcgctaaagctgccaagattcttaaagaaccagaaaccttggaggaacaagttgttgaagcagcaactccagttgacgcaataaggtttccacttatattcgaagaagattccaattcatctttagcagatgacaatagcaacatcactgaggggaagcgtaaacaacgtgatgtggacacatcagattcgagcagtggagtaatttggcgtcctaattttgaggagttcatccaccgccttagacataaggcgtgtgtggagatagtgaaagagcgccgggatgaaggatgtgccattgtcttgagggcaatgttagaagtaggaagatcgcaagagaagaaggtgaaaacagacaattcggctccaatgtcagttggttccatttatgaagaagttattaagacagaagcaggtcgcactatgttacaagagcgagttgaagcatgccttgaccaattgagtgctacgtcttcttatctaccagcatttgtgaacgaagtgaatgattcatacatagttgattataaatccattatcagcgtagcacagaaagatgagatagaggcagtagtgatgagaagatatgggaaagaagctttcagaatgttcagatacttatcacaggaagggcgttttgttgagaccgataagattgctgatgccgcgctgactgaaaagaaagatacaccgcaattccttttaaagatgtggaaagacggatacttacatatgcagaaattggcggtcacagctccgggtatgtatacaccgtttctgttgtggaaggtaaacaagttgattgtgacaactcaaatgttggatgagatgtaccatgcgtcccttaacttgagtcttaggttggcccatgagttagaagccgaaaaagagttgctgttgttgccattagataaactggaaggaccattaaaggagagactgaaaaaggtcaaagccaagaggctgttactctcttccactatgtttaaacttgatgatgccattatgctttttcatgacttttaaactcatacattcaaaaactaatttcttttggtcgatttagttcacattgtcttctagcatttttttttttttttttgacataatgagaagttgtaactttgaaggtaattgatactgtttcgagagaaatgttgttt

SEQ ID NO: 86710 - protein, 523 aa, Arabidopsis thaliana; identical to SEQ ID NO: 43266
  peptide (1)..(523): Ceres Seq. ID no. 12692787
  misc_feature (10)..(523): Pfam Name: RNA polymerase III subunit RPC82 Pfam Description: RNA polymerase III subunit RPC82
  misc_feature (1)..(523): Homolog of NCBI NO: 18408755 NR Description: RNA polymerase III subunit - like protein; id: At3g49000.1, supported by cDNA: 157800., supported by cDNA:
  misc_feature (3)..(523): Homolog of NCBI NO: 21553700 NR Description: RNA polymerase III subunit-like protein
  misc_feature (3)..(523): Homolog of NCBI NO: 11358814 NR Description: RNA polymerase III subunit-like protein -
  misc_feature (75)..(327): Homolog of NCBI NO: 34911154 NR Description: putative RNA polymerase III subunit [Oryza sativa
  misc_feature (357)..(466): Homolog of NCBI NO: 34911154 NR Description: putative RNA polymerase III subunit [Oryza sativa

SEQ ID NO: 86711 - protein, 521 aa, Arabidopsis thaliana; identical to SEQ ID NO: 43267
  peptide (1)..(521): Ceres Seq. ID no. 12692788
  misc_feature (8)..(521): Pfam Name: RNA polymerase III subunit RPC82 Pfam Description: RNA polymerase III subunit RPC82
  misc_feature (1)..(521): Homolog of NCBI NO: 18408755 NR Description: RNA polymerase III subunit - like protein; id: At3g49000.1, supported by cDNA: 157800., supported by cDNA:
  misc_feature (1)..(521): Homolog of NCBI NO: 21553700 NR Description: RNA polymerase III subunit-like protein
  misc_feature (1)..(521): Homolog of NCBI NO: 11358814 NR Description: RNA polymerase III subunit-like protein -
  misc_feature (73)..(325): Homolog of NCBI NO: 34911154 NR Description: putative RNA polymerase III subunit [Oryza sativa
  misc_feature (355)..(464): Homolog of NCBI NO: 34911154 NR Description: putative RNA polymerase III subunit [Oryza sativa

SEQ ID NO: 86712 - DNA, 1488 bp, Arabidopsis thaliana
  misc_feature (1)..(1488): Ceres Seq. ID no. 12692816
  misc_feature: MA Experiment ID: 108434 Result: Up-regulated in Transcription
  misc_feature: MA Experiment 108434 PARAMETER Experiment Name: At_Root_Tips_cDNA_P Parameter: Tissue Value: Root Tips
  misc_feature: MA Experiment ID: 108461 Result: Down-regulated in Transcription
  misc_feature: MA Experiment 108461 PARAMETER Experiment Name: At_Germinating_Seeds_cDNA_P Parameter: Age (day) Value: 1 vs. 0
  misc_feature: MA Experiment 108461 PARAMETER Experiment Name: At_Germinating_Seeds_cDNA_P Parameter: Tissue Value: Germinating Seeds
  misc_feature: MA Experiment ID: 108462 Result: Down-regulated in Transcription
  misc_feature: MA Experiment 108462 PARAMETER Experiment Name: At_Germinating_Seeds_cDNA_P Parameter: Age (day) Value: 2 vs. 0
  misc_feature: MA Experiment 108462 PARAMETER Experiment Name: At_Germinating_Seeds_cDNA_P Parameter: Tissue Value: Germinating Seeds
  misc_feature: MA Experiment ID: 108463 Result: Down-regulated in Transcription
  misc_feature: MA Experiment 108463 PARAMETER Experiment Name: At_Germinating_Seeds_cDNA_P Parameter: Age (day) Value: 3 vs. 0
  misc_feature: MA Experiment 108463 PARAMETER Experiment Name: At_Germinating_Seeds_cDNA_P Parameter: Tissue Value: Germinating Seeds
  misc_feature: MA Experiment ID: 108464 Result: Down-regulated in Transcription
  misc_feature: MA Experiment 108464 PARAMETER Experiment Name: At_Germinating_Seeds_cDNA_P Parameter: Age (day) Value: 4 vs. 0
  misc_feature: MA Experiment 108464 PARAMETER Experiment Name: At_Germinating_Seeds_cDNA_P Parameter: Tissue Value: Germinating Seeds
  misc_feature: MA Experiment ID: 108595 Result: Down-regulated in Transcription
  misc_feature: MA Experiment 108595 PARAMETER Experiment Name: At_Ler-pi_Ovule_cDNA_P Parameter: Plant Line Value: null
  misc_feature: MA Experiment ID: 20000179 Result: Down-regulated in Transcription
  misc_feature: MA Experiment 20000179 PARAMETER Experiment Name: At_Germinating_Seeds_P Parameter: Age (hr) Value: 6 vs. 0
  misc_feature: MA Experiment 20000179 PARAMETER Experiment Name: At_Germinating_Seeds_P Parameter: Tissue Value: Germinating Seeds
  misc_feature: MA Experiment ID: 20000180 Result: Down-regulated in Transcription
  misc_feature: MA Experiment 20000180 PARAMETER Experiment Name: At_Germinating_Seeds_P Parameter: Age (hr) Value: 24 vs. 0
  misc_feature: MA Experiment 20000180 PARAMETER Experiment Name: At_Germinating_Seeds_P Parameter: Tissue Value: Germinating Seeds
  misc_feature: MA Experiment ID: 20000184 Result: Down-regulated in Transcription
  misc_feature: MA Experiment 20000184 PARAMETER Experiment Name: At_Shoots__P Parameter: Age (day) Value: 7
  misc_feature: MA Experiment 20000184 PARAMETER Experiment Name: At_Shoots__P Parameter: Tissue Value: Shoots vs. Whole Plant
  misc_feature: MA Experiment ID: 20001557 Result: Up-regulated in Transcription
  misc_feature: MA Experiment 20001557 PARAMETER Experiment Name: At_Drought_Soil_Dry_P Parameter: Age (day) Value: 27
  misc_feature: MA Experiment 20001557 PARAMETER Experiment Name: At_Drought_Soil_Dry_P Parameter: Organism Value: A. thaliana
  misc_feature: MA Experiment 20001557 PARAMETER Experiment Name: At_Drought_Soil_Dry_P Parameter: Plant Line Value: WS
  misc_feature: MA Experiment 20001557 PARAMETER Experiment Name: At_Drought_Soil_Dry_P Parameter: Post Timepoint (hr) Value: 3
  misc_feature: MA Experiment 20001557 PARAMETER Experiment Name: At_Drought_Soil_Dry_P Parameter: Post-Treatment Value: Re-Water vs. No Drought
  misc_feature: MA Experiment 20001557 PARAMETER Experiment Name: At_Drought_Soil_Dry_P Parameter: Timepoint (day) Value: 13
  misc_feature: MA Experiment 20001557 PARAMETER Experiment Name: At_Drought_Soil_Dry_P Parameter: Treatment Value: Drought vs. No Drought
  misc_feature: MA Experiment ID: 20001558 Result: Up-regulated in Transcription
  misc_feature: MA Experiment 20001558 PARAMETER Experiment Name: At_Drought_Soil_Dry_P Parameter: Age (day) Value: 27
  misc_feature: MA Experiment 20001558 PARAMETER Experiment Name: At_Drought_Soil_Dry_P Parameter: Organism Value: A. thaliana
  misc_feature: MA Experiment 20001558 PARAMETER Experiment Name: At_Drought_Soil_Dry_P Parameter: Plant Line Value: WS
  misc_feature: MA Experiment 20001558 PARAMETER Experiment Name: At_Drought_Soil_Dry_P Parameter: Post Timepoint (hr) Value: 6
  misc_feature: MA Experiment 20001558 PARAMETER Experiment Name: At_Drought_Soil_Dry_P Parameter: Post-Treatment Value: Re-Water vs. No Drought
  misc_feature: MA Experiment 20001558 PARAMETER Experiment Name: At_Drought_Soil_Dry_P Parameter: Timepoint (day) Value: 13
  misc_feature: MA Experiment 20001558 PARAMETER Experiment Name: At_Drought_Soil_Dry_P Parameter: Treatment Value: Drought vs. No Drought
agacttggaatcagtttctctttacttccctctttctctgagctatggagattactgtaatcgcttcttcctcaatcgatgaaggaattggaagttgggatctcaaaaccgggacagagcagcttcaattcaagccgtgtgcttctccggcgcatggtctcaccgccgtcggcgaaaaatttctcgcctcctctcagctctcggcgagaaatacttctggctcgattttttactggtcttggactaagcctcaagctgaagtgaagagctacccagtggaaccaataaaggctcttgcagcaaacaatgaaggaacttacttagttggtggtggaatctctggagatatttacctttgggaggttgcgactgggaagttgcttaagaagtggcatggtcattatcgttcagtaacatgtttggtgttctctggagatgattctttgttggtttctggatctcaagatgggtctattagagtttggtctcttataaggctatttgatgatttccagaggcagcaagggaacactctttatgaacacaattttaatgagcatacaatgtctgtaactgatattgttatagactatggaggctgcaatgctgtgataatttcctcttcagaagatcggacttgcaaggtttggagcttgtcaagagggaaattgttgaaaaatatcatttttccttcagtcatcaatgcactcgcattggaccctggagggtgtgtgttctatgctggtgccagagacagcaaaatctatatcggtgccattaatgccacaagtgaatacgggacacaagttcttggttcagtatctgaaaaaggcaaagctattacttgcttagcatattgtgcagacggaaaccttttgatatctggatcagaagatggtgtggtttgtgtttgggatcccaaatcacttcgccatgttcgtactctcatccatgcaaaaggttctagaaaaggtcctgtgaacaatattcaaattgttagaaaaacgattgttgctaattccaacaaaacccaagtttcctggaaaagtcgtggggctttaatcccaccgcctttggaaaaatatgaaagaccagtagaagatactatggatggtatcgttacggttgatccgccgccattttctgatgttcctgtttactcttctttcctcagtgctgaccttattgacgagcaagttaaagaacttcagcaacaaggctctgcagcaacagagatggaaatggaaagactgaaacttgaatacaaaagatctttacagatgaatgaacaatggcagaagaactatgagaatttgcttcaagtggttatggaagaagaacaaatcggtggtaccaattgaaagctttttattgttgtttctacacatttttggaattacattaagagatattgtcaagtggcatatgaagtcgtcactaaagatatgttttatcaagatcccaaatttaggtatcatagcattctgt

SEQ ID NO: 86713 - protein, 438 aa, Arabidopsis thaliana
  peptide (1)..(438): Ceres Seq. ID no. 12692817
  misc_feature (1)..(438): Homolog of NCBI NO: 15229101 NR Description: G-protein beta family; protein id: At3g49180.1, by cDNA: 33776. [Arabidopsis thaliana] >gi|11357747|pir||T45823
  misc_feature (1)..(438): Homolog of NCBI NO: 21592898 NR Description: unknown [Arabidopsis thaliana]
  misc_feature (5)..(249): Homolog of NCBI NO: 33354207 NR Description: transducin / WD-40 repeat protein family -like
  misc_feature (1)..(317): Homolog of NCBI NO: 20128895 NR Description: CG14805-PA [Drosophila melanogaster]
  misc_feature (1)..(317): Homolog of NCBI NO: 20151747 NR Description: RE49866p [Drosophila melanogaster]
  misc_feature (107)..(249): Homolog of NCBI NO: 34897604 NR Description: G-protein beta family-like protein [Oryza sativa
  misc_feature (1)..(318): Homolog of NCBI NO: 33859749 NR Description: WD repeat domain 18 [Homo sapiens]
  misc_feature (1)..(242): Homolog of NCBI NO: 7511885 NR Description: hypothetical protein 63B12.7 - fruit fly melanogaster) >gi|4725974|emb|CAA15942.2| version:''1.0'',
  misc_feature (248)..(317): Homolog of NCBI NO: 7511885 NR Description: hypothetical protein 63B12.7 - fruit fly melanogaster) >gi|4725974|emb|CAA15942.2| version:''1.0'',
  misc_feature (1)..(317): Homolog of NCBI NO: 34862331 NR Description: similar to WD-repeat protein 18 [Rattus
MEITVIASSSIDEGIGSWDLKTGTEQLQFKPCASPAHGLTAVGEKFLASSQLSARNTSGSIFYWSWTKPQAEVKSYPVEPIKALAANNEGTYLVGGGISGDIYLWEVATGKLLKKWHGHYRSVTCLVFSGDDSLLVSGSQDGSIRVWSLIRLFDDFQRQQGNTLYEHNFNEHTMSVTDIVIDYGGCNAVIISSSEDRTCKVWSLSRGKLLKNIIFPSVINALALDPGGCVFYAGARDSKIYIGAINATSEYGTQVLGSVSEKGKAITCLAYCADGNLLISGSEDGVVCVWDPKSLRHVRTLIHAKGSRKGPVNNIQIVRKTIVANSNKTQVSWKSRGALIPPPLEKYERPVEDTMDGIVTVDPPPFSDVPVYSSFLSADLIDEQVKELQQQGSAATEMEMERLKLEYKRSLQMNEQWQKNYENLLQVVMEEEQIGGTN

SEQ ID NO: 86714 - protein, 265 aa, Arabidopsis thaliana
  peptide (1)..(265): Ceres Seq. ID no. 12692818
  misc_feature (1)..(265): Homolog of NCBI NO: 15229101 NR Description: G-protein beta family; protein id: At3g49180.1, by cDNA: 33776. [Arabidopsis thaliana] >gi|11357747|pir||T45823
  misc_feature (1)..(265): Homolog of NCBI NO: 21592898 NR Description: unknown [Arabidopsis thaliana]
  misc_feature (1)..(76): Homolog of NCBI NO: 33354207 NR Description: transducin / WD-40 repeat protein family -like
  misc_feature (1)..(144): Homolog of NCBI NO: 20128895 NR Description: CG14805-PA [Drosophila melanogaster]
  misc_feature (1)..(144): Homolog of NCBI NO: 20151747 NR Description: RE49866p [Drosophila melanogaster]
  misc_feature (1)..(76): Homolog of NCBI NO: 34897604 NR Description: G-protein beta family-like protein [Oryza sativa
  misc_feature (1)..(145): Homolog of NCBI NO: 33859749 NR Description: WD repeat domain 18 [Homo sapiens]
  misc_feature (1)..(69): Homolog of NCBI NO: 7511885 NR Description: hypothetical protein 63B12.7 - fruit fly melanogaster) >gi|4725974|emb|CAA15942.2| version:''1.0'',
  misc_feature (75)..(144): Homolog of NCBI NO: 7511885 NR Description: hypothetical protein 63B12.7 - fruit fly melanogaster) >gi|4725974|emb|CAA15942.2| version:''1.0'',
  misc_feature (1)..(144): Homolog of NCBI NO: 34862331 NR Description: similar to WD-repeat protein 18 [Rattus
MSVTDIVIDYGGCNAVIISSSEDRTCKVWSLSRGKLLKNIIFPSVINALALDPGGCVFYAGARDSKIYIGAINATSEYGTQVLGSVSEKGKAITCLAYCADGNLLISGSEDGVVCVWDPKSLRHVRTLIHAKGSRKGPVNNIQIVRKTIVANSNKTQVSWKSRGALIPPPLEKYERPVEDTMDGIVTVDPPPFSDVPVYSSFLSADLIDEQVKELQQQGSAATEMEMERLKLEYKRSLQMNEQWQKNYENLLQVVMEEEQIGGTN

SEQ ID NO: 86715 - DNA, 1452 bp, Arabidopsis thaliana
  misc_feature (1)..(1452): Ceres Seq. ID no. 12692851
  misc_feature: MA Experiment ID: 20000307 Result: Up-regulated in Transcription
  misc_feature: MA Experiment 20000307 PARAMETER Experiment Name: At_Germinating_Seeds_Sub_P Parameter: Age (hr) Value: 24 vs. 0
  misc_feature: MA Experiment 20000307 PARAMETER Experiment Name: At_Germinating_Seeds_Sub_P Parameter: Organism Value: A. thaliana
  misc_feature: MA Experiment 20000307 PARAMETER Experiment Name: At_Germinating_Seeds_Sub_P Parameter: Plant Line Value: WS
  misc_feature: MA Experiment 20000307 PARAMETER Experiment Name: At_Germinating_Seeds_Sub_P Parameter: Tissue Value: Germinating Seeds
  misc_feature: MA Experiment ID: 20000315 Result: Down-regulated in Transcription
  misc_feature: MA Experiment 20000315 PARAMETER Experiment Name: At_14day_Shoots-Roots_Sub_P Parameter: Age (day) Value: 14
  misc_feature: MA Experiment 20000315 PARAMETER Experiment Name: At_14day_Shoots-Roots_Sub_P Parameter: Organism Value: A. thaliana
  misc_feature: MA Experiment 20000315 PARAMETER Experiment Name: At_14day_Shoots-Roots_Sub_P Parameter: Plant Line Value: WS
  misc_feature: MA Experiment 20000315 PARAMETER Experiment Name: At_14day_Shoots-Roots_Sub_P Parameter: Tissue Value: Shoots vs. Whole Plant
  misc_feature: MA Experiment ID: 20000327 Result: Down-regulated in Transcription
  misc_feature: MA Experiment 20000327 PARAMETER Experiment Name: At_42deg_Heat_Sub_P Parameter: Age (day) Value: 14
  misc_feature: MA Experiment 20000327 PARAMETER Experiment Name: At_42deg_Heat_Sub_P Parameter: Organism Value: A. thaliana
  misc_feature: MA Experiment 20000327 PARAMETER Experiment Name: At_42deg_Heat_Sub_P Parameter: Plant Line Value: WS
  misc_feature: MA Experiment 20000327 PARAMETER Experiment Name: At_42deg_Heat_Sub_P Parameter: Temperature (deg C) Value: 42 vs. 22
  misc_feature: MA Experiment 20000327 PARAMETER Experiment Name: At_42deg_Heat_Sub_P Parameter: Timepoint (hr) Value: 1
  misc_feature: MA Experiment 20000327 PARAMETER Experiment Name: At_42deg_Heat_Sub_P Parameter: Tissue Value: Aerial
  misc_feature: MA Experiment ID: 20000328 Result: Down-regulated in Transcription
  misc_feature: MA Experiment 20000328 PARAMETER Experiment Name: At_42deg_Heat_Sub_P Parameter: Age (day) Value: 14
  misc_feature: MA Experiment 20000328 PARAMETER Experiment Name: At_42deg_Heat_Sub_P Parameter: Organism Value: A. thaliana
  misc_feature: MA Experiment 20000328 PARAMETER Experiment Name: At_42deg_Heat_Sub_P Parameter: Plant Line Value: WS
  misc_feature: MA Experiment 20000328 PARAMETER Experiment Name: At_42deg_Heat_Sub_P Parameter: Temperature (deg C) Value: 42 vs. 22
  misc_feature: MA Experiment 20000328 PARAMETER Experiment Name: At_42deg_Heat_Sub_P Parameter: Timepoint (hr) Value: 6
  misc_feature: MA Experiment 20000328 PARAMETER Experiment Name: At_42deg_Heat_Sub_P Parameter: Tissue Value: Aerial
  misc_feature: MA Experiment ID: 20000347 Result: Up-regulated in Transcription
  misc_feature: MA Experiment 20000347 PARAMETER Experiment Name: At_2mM_SA_Sub_P Parameter: Age (day) Value: 14
  misc_feature: MA Experiment 20000347 PARAMETER Experiment Name: At_2mM_SA_Sub_P Parameter: Organism Value: A. thaliana
  misc_feature: MA Experiment 20000347 PARAMETER Experiment Name: At_2mM_SA_Sub_P Parameter: Plant Line Value: WS
  misc_feature: MA Experiment 20000347 PARAMETER Experiment Name: At_2mM_SA_Sub_P Parameter: Timepoint (hr) Value: 6
  misc_feature: MA Experiment 20000347 PARAMETER Experiment Name: At_2mM_SA_Sub_P Parameter: Tissue Value: Aerial
  misc_feature: MA Experiment 20000347 PARAMETER Experiment Name: At_2mM_SA_Sub_P Parameter: Treatment Value: 2mM SA vs. No Treatment
  misc_feature: MA Experiment ID: 20000355 Result: Down-regulated in Transcription
  misc_feature: MA Experiment 20000355 PARAMETER Experiment Name: At_Siliques_Sub_P Parameter: Age (day) Value: 21
  misc_feature: MA Experiment 20000355 PARAMETER Experiment Name: At_Siliques_Sub_P Parameter: Organism Value: A. thaliana
  misc_feature: MA Experiment 20000355 PARAMETER Experiment Name: At_Siliques_Sub_P Parameter: Plant Line Value: WS
  misc_feature: MA Experiment 20000355 PARAMETER Experiment Name: At_Siliques_Sub_P Parameter: Tissue Value: Less Than 5mm Siliques vs. Whole Plant
  misc_feature: MA Experiment ID: 20000440 Result: Down-regulated in Transcription
  misc_feature: MA Experiment 20000440 PARAMETER Experiment Name: At_Closed-Flower__Sub_P Parameter: Tissue Value: Closed Flower vs. Whole Plant
atgaaagctttgagacggattcaaacgacgtcttcgtcttctaatccttcatcgccattatcgtctcctccttcttcttcatcatcatcctcgtggatccaaatacgttctgctctcttcgttgttgcttcttcatctcctgcttcttgttctgatcggcctcgtcttaaatcaccatggtctcggaggaaaaggaaaaggccacttagacctcagcaatggaagaggttttttactcctgacggtagattgcggaatggaggagtggatttgttgaagaaagttcgaagtagaggtattgagccaagcattcggctagaggtgtggccattccttcttggattgtatggttttaatagttctaaagaagagagagttactataagaaaccggaggagaaaggagtatgagagactacgtaggcagtgcaaacggcttcaaaaacacaataacgggactcttgagagagacgacggtagtagttcaagacgaatcaccaatgctactatctctacacttaattccgagtcatcagattcagattcttcagatgagagtgaagtggtacaggtctttcaatcttctgctactccggatgtgaatagtacttatccagccagttcatctattccccggacagaagaggattttgtgacgtggcagcgtattatccgtctagacgccgtgcgtgctgactcagagtggacctcctattctccatcccaggcagttatatcggaggatagagcatgtcgtgccgctgaggcggttgggttgaaagattacaatcacctggaaccgtacaaaatctttcaagctgcacggctagttgctgttcttgaagcttatgctttgtatgaccctgacattggatattgccaaggaatgagtgatcttctctctcctatactctctgtaatccctgatgaccatgaagtcttttggtgtttcgtcgggttcatgaagaaagctcgtcacaatttcagacttgacgaggttggaatcagaagacaactcaacatagtctcaaagataatcaaatctaaagactctcagctttataggcaccttgagaaactccaagctgaagactgtttctttgtatacagaatggttgttgtgatgttcagacgagagctgacacttgatcagacattgtgtctatgggaagtaatgtgggcagatcaagccgcaatcagagccgggatgggaaaatccgcgtggagtaggataaggcaacgtgcacctcccactgatgatttggtgctctatgcaatagcggcctcggtgttgcaaagaaggaaacgtattatagaaaggtataacagcatggatgagattttaagggagtgccaaagtatggcagggcagttagatgtgtggaagctccttgatgatgcacatgacctcgttgttactctacacaccaagattgaacattcattctcataa

SEQ ID NO: 86716 - protein, 483 aa, Arabidopsis thaliana
  peptide (1)..(483): Ceres Seq. ID no. 12692852
  misc_feature (173)..(481): Homolog of NCBI NO: 15238518 NR Description: GTPase activator-like protein of Rab-like small protein id: At5g24390.1 [Arabidopsis thaliana]
  misc_feature (1)..(212): Homolog of NCBI NO: 15238518 NR Description: GTPase activator-like protein of Rab-like small protein id: At5g24390.1 [Arabidopsis thaliana]
  misc_feature (153)..(483): Homolog of NCBI NO: 15229125 NR Description: GTPase activating -like protein; protein id:
  misc_feature (183)..(479): Homolog of NCBI NO: 9759196 NR Description: GTPase activator protein of Rab-like small
  misc_feature (1)..(155): Homolog of NCBI NO: 9759196 NR Description: GTPase activator protein of Rab-like small
  misc_feature (183)..(479): Homolog of NCBI NO: 15238777 NR Description: GTPase activator protein of Rab-like small protein; protein id: At5g53570.1, supported by cDNA: gi_14517421, by cDNA: gi_20908079 [Arabidopsis thaliana]
  misc_feature (7)..(155): Homolog of NCBI NO: 15238777 NR Description: GTPase activator protein of Rab-like small protein; protein id: At5g53570.1, supported by cDNA: gi_14517421, by cDNA: gi_20908079 [Arabidopsis thaliana]
  misc_feature (1)..(30): Homolog of NCBI NO: 15238777 NR Description: GTPase activator protein of Rab-like small protein; protein id: At5g53570.1, supported by cDNA: gi_14517421, by cDNA: gi_20908079 [Arabidopsis thaliana]
  misc_feature (149)..(479): Homolog of NCBI NO: 37536102 NR Description: putative GTPase activating protein [Oryza sativa
  misc_feature (119)..(478): Homolog of NCBI NO: 15238237 NR Description: GTPase activator protein of Rab-like small
MKALRRIQTTSSSSNPSSPLSSPPSSSSSSSWIQIRSALFVVASSSPASCSDRPRLKSPWSRRKRKRPLRPQQWKRFFTPDGRLRNGGVDLLKKVRSRGIEPSIRLEVWPFLLGLYGFNSSKEERVTIRNRRRKEYERLRRQCKRLQKHNNGTLERDDGSSSRRITNATISTLNSESSDSDSSDESEVVQVFQSSATPDVNSTYPASSSIPRTEEDFVTWQRIIRLDAVRADSEWTSYSPSQAVISEDRACRAAEAVGLKDYNHLEPYKIFQAARLVAVLEAYALYDPDIGYCQGMSDLLSPILSVIPDDHEVFWCFVGFMKKARHNFRLDEVGIRRQLNIVSKIIKSKDSQLYRHLEKLQAEDCFFVYRMVVVMFRRELTLDQTLCLWEVMWADQAAIRAGMGKSAWSRIRQRAPPTDDLVLYAIAASVLQRRKRIIERYNSMDEILRECQSMAGQLDVWKLLDDAHDLVVTLHTKIEHSFS

SEQ ID NO: 86717 - DNA, 1820 bp, Arabidopsis thaliana
  misc_feature (1)..(1820): Ceres Seq. ID no. 12692882
  misc_feature: MA Experiment ID: 108573 Result: Up-regulated in Transcription
  misc_feature: MA Experiment 108573 PARAMETER Experiment Name: At_Drought_cDNA_P Parameter: Timepoint (hr) Value: 6
  misc_feature: MA Experiment 108573 PARAMETER Experiment Name: At_Drought_cDNA_P Parameter: Tissue Value: Aerial
  misc_feature: MA Experiment 108573 PARAMETER Experiment Name: At_Drought_cDNA_P Parameter: Treatment Value: Drought vs. No Drought
  misc_feature: MA Experiment ID: 108585 Result: Up-regulated in Transcription
  misc_feature: MA Experiment 108585 PARAMETER Experiment Name: At_5mM_NaNP_cDNA_P Parameter: Timepoint (hr) Value: 6
  misc_feature: MA Experiment 108585 PARAMETER Experiment Name: At_5mM_NaNP_cDNA_P Parameter: Tissue Value: Aerial
  misc_feature: MA Experiment 108585 PARAMETER Experiment Name: At_5mM_NaNP_cDNA_P Parameter: Treatment Value: null
  misc_feature: MA Experiment ID: 108595 Result: Down-regulated in Transcription
  misc_feature: MA Experiment 108595 PARAMETER Experiment Name: At_Ler-pi_Ovule_cDNA_P Parameter: Plant Line Value: null
  misc_feature: MA Experiment ID: 20000227 Result: Up-regulated in Transcription
  misc_feature: MA Experiment 20000227 PARAMETER Experiment Name: At_Root-Tips-vs-Tops_P Parameter: Tissue Value: Root Tips vs. Root Tops
  misc_feature: MA Experiment ID: 20000436 Result: Up-regulated in Transcription
  misc_feature: MA Experiment 20000436 PARAMETER Experiment Name: At_Drought_P Parameter: Age (day) Value: 7
  misc_feature: MA Experiment 20000436 PARAMETER Experiment Name: At_Drought_P Parameter: Organism Value: A. thaliana
  misc_feature: MA Experiment 20000436 PARAMETER Experiment Name: At_Drought_P Parameter: Plant Line Value: WS
  misc_feature: MA Experiment 20000436 PARAMETER Experiment Name: At_Drought_P Parameter: Timepoint (hr) Value: 12
  misc_feature: MA Experiment 20000436 PARAMETER Experiment Name: At_Drought_P Parameter: Tissue Value: Whole Plant
  misc_feature: MA Experiment 20000436 PARAMETER Experiment Name: At_Drought_P Parameter: Treatment Value: Drought vs. No Drought
  misc_feature: MA Experiment ID: 20000437 Result: Up-regulated in Transcription
  misc_feature: MA Experiment 20000437 PARAMETER Experiment Name: At_Drought_P Parameter: Age (day) Value: 8
  misc_feature: MA Experiment 20000437 PARAMETER Experiment Name: At_Drought_P Parameter: Organism Value: A. thaliana
  misc_feature: MA Experiment 20000437 PARAMETER Experiment Name: At_Drought_P Parameter: Plant Line Value: WS
  misc_feature: MA Experiment 20000437 PARAMETER Experiment Name: At_Drought_P Parameter: Timepoint (hr) Value: 24
  misc_feature: MA Experiment 20000437 PARAMETER Experiment Name: At_Drought_P Parameter: Tissue Value: Whole Plant
  misc_feature: MA Experiment 20000437 PARAMETER Experiment Name: At_Drought_P Parameter: Treatment Value: Drought vs. No Drought
  misc_feature: MA Experiment ID: 20001557 Result: Up-regulated in Transcription
  misc_feature: MA Experiment 20001557 PARAMETER Experiment Name: At_Drought_Soil_Dry_P Parameter: Age (day) Value: 27
  misc_feature: MA Experiment 20001557 PARAMETER Experiment Name: At_Drought_Soil_Dry_P Parameter: Organism Value: A. thaliana
  misc_feature: MA Experiment 20001557 PARAMETER Experiment Name: At_Drought_Soil_Dry_P Parameter: Plant Line Value: WS
  misc_feature: MA Experiment 20001557 PARAMETER Experiment Name: At_Drought_Soil_Dry_P Parameter: Post Timepoint (hr) Value: 3
  misc_feature: MA Experiment 20001557 PARAMETER Experiment Name: At_Drought_Soil_Dry_P Parameter: Post-Treatment Value: Re-Water vs. No Drought
  misc_feature: MA Experiment 20001557 PARAMETER Experiment Name: At_Drought_Soil_Dry_P Parameter: Timepoint (day) Value: 13
  misc_feature: MA Experiment 20001557 PARAMETER Experiment Name: At_Drought_Soil_Dry_P Parameter: Treatment Value: Drought vs. No Drought
  misc_feature: MA Experiment ID: 20001560 Result: Up-regulated in Transcription
  misc_feature: MA Experiment 20001560 PARAMETER Experiment Name: At_Drought_Soil_Dry_P Parameter: Age (day) Value: 28
  misc_feature: MA Experiment 20001560 PARAMETER Experiment Name: At_Drought_Soil_Dry_P Parameter: Organism Value: A. thaliana
  misc_feature: MA Experiment 20001560 PARAMETER Experiment Name: At_Drought_Soil_Dry_P Parameter: Plant Line Value: WS
  misc_feature: MA Experiment 20001560 PARAMETER Experiment Name: At_Drought_Soil_Dry_P Parameter: Post Timepoint (hr) Value: None
  misc_feature: MA Experiment 20001560 PARAMETER Experiment Name: At_Drought_Soil_Dry_P Parameter: Post-Treatment Value: None
  misc_feature: MA Experiment 20001560 PARAMETER Experiment Name: At_Drought_Soil_Dry_P Parameter: Timepoint (day) Value: 14
  misc_feature: MA Experiment 20001560 PARAMETER Experiment Name: At_Drought_Soil_Dry_P Parameter: Treatment Value: Drought vs. No Drought
  misc_feature: MA Experiment ID: 20001904 Result: Up-regulated in Transcription
  misc_feature: MA Experiment 20001904 PARAMETER Experiment Name: At_Drought_Reproduction_P Parameter: Age (day) Value: 37
  misc_feature: MA Experiment 20001904 PARAMETER Experiment Name: At_Drought_Reproduction_P Parameter: Organism Value: A. thaliana
  misc_feature: MA Experiment 20001904 PARAMETER Experiment Name: At_Drought_Reproduction_P Parameter: Plant Line Value: WS
  misc_feature: MA Experiment 20001904 PARAMETER Experiment Name: At_Drought_Reproduction_P Parameter: Timepoint (day) Value: 7
  misc_feature: MA Experiment 20001904 PARAMETER Experiment Name: At_Drought_Reproduction_P Parameter: Tissue Value: Rosettes
  misc_feature: MA Experiment 20001904 PARAMETER Experiment Name: At_Drought_Reproduction_P Parameter: Treatment Value: Drought vs. No Drought
  misc_feature: MA Experiment ID: 20001905 Result: Up-regulated in Transcription
  misc_feature: MA Experiment 20001905 PARAMETER Experiment Name: At_Drought_Reproduction_P Parameter: Age (day) Value: 40
  misc_feature: MA Experiment 20001905 PARAMETER Experiment Name: At_Drought_Reproduction_P Parameter: Organism Value: A. thaliana
  misc_feature: MA Experiment 20001905 PARAMETER Experiment Name: At_Drought_Reproduction_P Parameter: Plant Line Value: WS
  misc_feature: MA Experiment 20001905 PARAMETER Experiment Name: At_Drought_Reproduction_P Parameter: Timepoint (day) Value: 10
  misc_feature: MA Experiment 20001905 PARAMETER Experiment Name: At_Drought_Reproduction_P Parameter: Tissue Value: Rosettes
  misc_feature: MA Experiment 20001905 PARAMETER Experiment Name: At_Drought_Reproduction_P Parameter: Treatment Value: Drought vs. No Drought
  misc_feature: MA Experiment ID: 20001911 Result: Up-regulated in Transcription
  misc_feature: MA Experiment 20001911 PARAMETER Experiment Name: At_Drought_Reproduction_P Parameter: Age (day) Value: 40
  misc_feature: MA Experiment 20001911 PARAMETER Experiment Name: At_Drought_Reproduction_P Parameter: Organism Value: A. thaliana
  misc_feature: MA Experiment 20001911 PARAMETER Experiment Name: At_Drought_Reproduction_P Parameter: Plant Line Value: WS
  misc_feature: MA Experiment 20001911 PARAMETER Experiment Name: At_Drought_Reproduction_P Parameter: Timepoint (day) Value: 10
  misc_feature: MA Experiment 20001911 PARAMETER Experiment Name: At_Drought_Reproduction_P Parameter: Tissue Value: Flowers
  misc_feature: MA Experiment 20001911 PARAMETER Experiment Name: At_Drought_Reproduction_P Parameter: Treatment Value: Drought vs. No Drought
gtcttttggtgggtcttcgtcaaagctctctcctttacggtccttttctccagcgcatgaaataataaaggacacctgtatttattaaaatcactacattttccgtaacaaaaaaaatcaaactttgttttctcaatggacggtgccggagaatcacgactcggtggtgatggtggtggtgatggttctgttggagttcagatccgacaaacacggatgctaccggattttctccagagcgtgaatctcaagtatgtgaaattaggttaccattacttaatctcaaatctcttgactctctgtttattccctctcgccgttgttatctccgtcgaagcctctcagatgaacccagatgatctcaaacagctctggatccatctacaatacaatctggttagtatcatcatctgttcagcgattctagtcttcgggttaacggtttatgttatgacccgacctagacccgtttacttggttgatttctcttgttatctcccacctgatcatctcaaagctccttacgctcggttcatggaacattctagactcaccggagatttcgatgactctgctctcgagtttcaacgcaagatccttgagcgttctggtttaggggaagacacttatgtccctgaagctatgcattatgttccaccgagaatttcaatggctgctgctagagaagaagctgaacaagtcatgtttggtgctttagataaccttttcgctaacactaatgtgaaaccaaaggatattggaatccttgttgtgaattgtagtctctttaatccaactccttcgttatctgcaatgattgtgaacaagtataagcttagaggtaacattagaagctacaatctaggcggtatgggttgcagcgcgggagttatcgctgtggatcttgctaaagacatgttgttggtacataggaacacttatgcggttgttgtttctactgagaacattactcagaattggtattttggtaacaagaaatcgatgttgataccgaactgcttgtttcgagttggtggctctgcggttttgctatcgaacaagtcgagggacaagagacggtctaagtacaggcttgtacatgtagtcaggactcaccgtggagcagatgataaagctttccgttgtgtttatcaagagcaggatgatacagggagaaccggggtttcgttgtcgaaagatctaatggcgattgcaggggaaactctcaaaaccaatatcactacattgggtcctcttgttctaccgataagtgagcagattctcttctttatgactctagttgtgaagaagctctttaacggtaaagtgaaaccgtatatcccggatttcaaacttgctttcgagcatttctgtatccatgctggtggaagagctgtgatcgatgagttagagaagaatctgcagctttcaccagttcatgtcgaggcttcgaggatgactcttcatcgatttggtaacacatcttcgagctccatttggtatgaattggcttacattgaagcgaagggaaggatgcgaagaggtaatcgtgtttggcaaatcgcgttcggaagtggatttaaatgtaatagcgcgatttgggaagcattaaggcatgtgaaaccttcgaacaacagtccttgggaagattgtattgacaagtatccggtaactttaagttattagcttcgtttgaggaactgttattgtgtaacttcgagactaatccatggttgtttttttcttagagaagaaacccttagatttgatctctgacaatgtcaatgtgtttgttgtttatgtgttttggagagtttgtg

SEQ ID NO: 86718 - protein, 516 aa, Arabidopsis thaliana
  peptide (1)..(516): Ceres Seq. ID no. 12692883
  misc_feature (350)..(493): Pfam Name: Chalcone and stilbene synthases, C-terminal domain Pfam Description: Chalcone and stilbene synthases, C-terminal
  misc_feature (1)..(516): Homolog of NCBI NO: 15223556 NR Description: very-long-chain fatty acid condensing enzyme putative; protein id: At1g19440.1, supported by cDNA: 158882.
  misc_feature (14)..(516): Homolog of NCBI NO: 15226724 NR Description: putative beta-ketoacyl-CoA synthase; protein id:
  misc_feature (40)..(514): Homolog of NCBI NO: 15236133 NR Description: putative ketoacyl-CoA synthase; protein id:
  misc_feature (16)..(512): Homolog of NCBI NO: 29417540 NR Description: beta-ketoacyl-CoA-synthase [Marchantia polymorpha]
  misc_feature (27)..(512): Homolog of NCBI NO: 15225767 NR Description: putative beta-ketoacyl-CoA synthase; protein id:
  misc_feature (31)..(512): Homolog of NCBI NO: 9714501 NR Description: putative fatty acid elongase [Zea mays]
  misc_feature (29)..(512): Homolog of NCBI NO: 17979464 NR Description: At1g68530/T26J14_10 [Arabidopsis thaliana]
  misc_feature (29)..(512): Homolog of NCBI NO: 15221431 NR Description: very-long-chain fatty acid condensing enzyme protein id: At1g68530.1, supported by cDNA: 36276. [Arabidopsis
  misc_feature (29)..(512): Homolog of NCBI NO: 21593111 NR Description: very-long-chain fatty acid condensing enzyme CUT1
  misc_feature (29)..(514): Homolog of NCBI NO: 11066477 NR Description: fatty acid elongase 1-like protein [Limnanthes
MDGAGESRLGGDGGGDGSVGVQIRQTRMLPDFLQSVNLKYVKLGYHYLISNLLTLCLFPLAVVISVEASQMNPDDLKQLWIHLQYNLVSIIICSAILVFGLTVYVMTRPRPVYLVDFSCYLPPDHLKAPYARFMEHSRLTGDFDDSALEFQRKILERSGLGEDTYVPEAMHYVPPRISMAAAREEAEQVMFGALDNLFANTNVKPKDIGILVVNCSLFNPTPSLSAMIVNKYKLRGNIRSYNLGGMGCSAGVIAVDLAKDMLLVHRNTYAVVVSTENITQNWYFGNKKSMLIPNCLFRVGGSAVLLSNKSRDKRRSKYRLVHVVRTHRGADDKAFRCVYQEQDDTGRTGVSLSKDLMAIAGETLKTNITTLGPLVLPISEQILFFMTLVVKKLFNGKVKPYIPDFKLAFEHFCIHAGGRAVIDELEKNLQLSPVHVEASRMTLHRFGNTSSSSIWYELAYIEAKGRMRRGNRVWQIAFGSGFKCNSAIWEALRHVKPSNNSPWEDCIDKYPVTLSY

SEQ ID NO: 86719 - protein, 489 aa, Arabidopsis thaliana
  peptide (1)..(489): Ceres Seq. ID no. 12692884
  misc_feature (323)..(466): Pfam Name: Chalcone and stilbene synthases, C-terminal domain Pfam Description: Chalcone and stilbene synthases, C-terminal
  misc_feature (1)..(489): Homolog of NCBI NO: 15223556 NR Description: very-long-chain fatty acid condensing enzyme putative; protein id: At1g19440.1, supported by cDNA: 158882.
  misc_feature (1)..(489): Homolog of NCBI NO: 15226724 NR Description: putative beta-ketoacyl-CoA synthase; protein id:
  misc_feature (13)..(487): Homolog of NCBI NO: 15236133 NR Description: putative ketoacyl-CoA synthase; protein id:
  misc_feature (1)..(485): Homolog of NCBI NO: 29417540 NR Description: beta-ketoacyl-CoA-synthase [Marchantia polymorpha]
  misc_feature (1)..(485): Homolog of NCBI NO: 15225767 NR Description: putative beta-ketoacyl-CoA synthase; protein id:
  misc_feature (4)..(485): Homolog of NCBI NO: 9714501 NR Description: putative fatty acid elongase [Zea mays]
  misc_feature (2)..(485): Homolog of NCBI NO: 17979464 NR Description: At1g68530/T26J14_10 [Arabidopsis thaliana]
  misc_feature (2)..(485): Homolog of NCBI NO: 15221431 NR Description: very-long-chain fatty acid condensing enzyme protein id: At1g68530.1, supported by cDNA: 36276. [Arabidopsis
  misc_feature (2)..(485): Homolog of NCBI NO: 21593111 NR Description: very-long-chain fatty acid condensing enzyme CUT1
  misc_feature (2)..(487): Homolog of NCBI NO: 11066477 NR Description: fatty acid elongase 1-like protein [Limnanthes
MLPDFLQSVNLKYVKLGYHYLISNLLTLCLFPLAVVISVEASQMNPDDLKQLWIHLQYNLVSIIICSAILVFGLTVYVMTRPRPVYLVDFSCYLPPDHLKAPYARFMEHSRLTGDFDDSALEFQRKILERSGLGEDTYVPEAMHYVPPRISMAAAREEAEQVMFGALDNLFANTNVKPKDIGILVVNCSLFNPTPSLSAMIVNKYKLRGNIRSYNLGGMGCSAGVIAVDLAKDMLLVHRNTYAVVVSTENITQNWYFGNKKSMLIPNCLFRVGGSAVLLSNKSRDKRRSKYRLVHVVRTHRGADDKAFRCVYQEQDDTGRTGVSLSKDLMAIAGETLKTNITTLGPLVLPISEQILFFMTLVVKKLFNGKVKPYIPDFKLAFEHFCIHAGGRAVIDELEKNLQLSPVHVEASRMTLHRFGNTSSSSIWYELAYIEAKGRMRRGNRVWQIAFGSGFKCNSAIWEALRHVKPSNNSPWEDCIDKYPVTLSY

SEQ ID NO: 86720 - protein, 446 aa, Arabidopsis thaliana
  peptide (1)..(446): Ceres Seq. ID no. 12692885
  misc_feature (280)..(423): Pfam Name: Chalcone and stilbene synthases, C-terminal domain Pfam Description: Chalcone and stilbene synthases, C-terminal
  misc_feature (1)..(446): Homolog of NCBI NO: 15223556 NR Description: very-long-chain fatty acid condensing enzyme putative; protein id: At1g19440.1, supported by cDNA: 158882.
  misc_feature (1)..(446): Homolog of NCBI NO: 15226724 NR Description: putative beta-ketoacyl-CoA synthase; protein id:
  misc_feature (1)..(444): Homolog of NCBI NO: 15236133 NR Description: putative ketoacyl-CoA synthase; protein id:
  misc_feature (1)..(442): Homolog of NCBI NO: 29417540 NR Description: beta-ketoacyl-CoA-synthase [Marchantia polymorpha]
  misc_feature (1)..(442): Homolog of NCBI NO: 15225767 NR Description: putative beta-ketoacyl-CoA synthase; protein id:
  misc_feature (1)..(442): Homolog of NCBI NO: 9714501 NR Description: putative fatty acid elongase [Zea mays]
  misc_feature (1)..(442): Homolog of NCBI NO: 17979464 NR Description: At1g68530/T26J14_10 [Arabidopsis thaliana]
  misc_feature (1)..(442): Homolog of NCBI NO: 15221431 NR Description: very-long-chain fatty acid condensing enzyme protein id: At1g68530.1, supported by cDNA: 36276. [Arabidopsis
  misc_feature (1)..(442): Homolog of NCBI NO: 21593111 NR Description: very-long-chain fatty acid condensing enzyme CUT1
  misc_feature (1)..(444): Homolog of NCBI NO: 11066477 NR Description: fatty acid elongase 1-like protein [Limnanthes
MNPDDLKQLWIHLQYNLVSIIICSAILVFGLTVYVMTRPRPVYLVDFSCYLPPDHLKAPYARFMEHSRLTGDFDDSALEFQRKILERSGLGEDTYVPEAMHYVPPRISMAAAREEAEQVMFGALDNLFANTNVKPKDIGILVVNCSLFNPTPSLSAMIVNKYKLRGNIRSYNLGGMGCSAGVIAVDLAKDMLLVHRNTYAVVVSTENITQNWYFGNKKSMLIPNCLFRVGGSAVLLSNKSRDKRRSKYRLVHVVRTHRGADDKAFRCVYQEQDDTGRTGVSLSKDLMAIAGETLKTNITTLGPLVLPISEQILFFMTLVVKKLFNGKVKPYIPDFKLAFEHFCIHAGGRAVIDELEKNLQLSPVHVEASRMTLHRFGNTSSSSIWYELAYIEAKGRMRRGNRVWQIAFGSGFKCNSAIWEALRHVKPSNNSPWEDCIDKYPVTLSY

SEQ ID NO: 86721 - DNA, 2904 bp, Arabidopsis thaliana
  misc_feature (1)..(2904): Ceres Seq. ID no. 12693016
  misc_feature: MA Experiment ID: 20000224 Result: Down-regulated in Transcription
  misc_feature: MA Experiment ID: 20000235 Result: Down-regulated in Transcription
  misc_feature: MA Experiment 20000235 PARAMETER Experiment Name: At_Siliques_P Parameter: Age (day) Value: 21
  misc_feature: MA Experiment 20000235 PARAMETER Experiment Name: At_Siliques_P Parameter: Organism Value: A. thaliana
  misc_feature: MA Experiment 20000235 PARAMETER Experiment Name: At_Siliques_P Parameter: Plant Line Value: WS
  misc_feature: MA Experiment 20000235 PARAMETER Experiment Name: At_Siliques_P Parameter: Tissue Value: 5-10mm Siliques vs. Whole Plant
  misc_feature: MA Experiment ID: 20000264 Result: Up-regulated in Transcription
  misc_feature: MA Experiment 20000264 PARAMETER Experiment Name: At_Open_Flower_P Parameter: Age (day) Value: 21
  misc_feature: MA Experiment 20000264 PARAMETER Experiment Name: At_Open_Flower_P Parameter: Plant Line Value: WS
  misc_feature: MA Experiment 20000264 PARAMETER Experiment Name: At_Open_Flower_P Parameter: Tissue Value: Open Flower vs. Whole Plant
  misc_feature: MA Experiment ID: 20000265 Result: Up-regulated in Transcription
  misc_feature: MA Experiment 20000265 PARAMETER Experiment Name: At_Open_Flower_P Parameter: Age (day) Value: 21
  misc_feature: MA Experiment 20000265 PARAMETER Experiment Name: At_Open_Flower_P Parameter: Plant Line Value: WS
  misc_feature: MA Experiment 20000265 PARAMETER Experiment Name: At_Open_Flower_P Parameter: Tissue Value: Closed Flower vs. Whole Plant
  misc_feature: MA Experiment ID: 20000286 Result: Up-regulated in Transcription
  misc_feature: MA Experiment 20000286 PARAMETER Experiment Name: At_Open_Flower_P Parameter: Age (day) Value: 21
  misc_feature: MA Experiment 20000286 PARAMETER Experiment Name: At_Open_Flower_P Parameter: Plant Line Value: WS
  misc_feature: MA Experiment 20000286 PARAMETER Experiment Name: At_Open_Flower_P Parameter: Tissue Value: Half Open vs. Whole Plant
  misc_feature: MA Experiment ID: 20000437 Result: Up-regulated in Transcription
  misc_feature: MA Experiment 20000437 PARAMETER Experiment Name: At_Drought_P Parameter: Age (day) Value: 8
  misc_feature: MA Experiment 20000437 PARAMETER Experiment Name: At_Drought_P Parameter: Organism Value: A. thaliana
  misc_feature: MA Experiment 20000437 PARAMETER Experiment Name: At_Drought_P Parameter: Plant Line Value: WS
  misc_feature: MA Experiment 20000437 PARAMETER Experiment Name: At_Drought_P Parameter: Timepoint (hr) Value: 24
  misc_feature: MA Experiment 20000437 PARAMETER Experiment Name: At_Drought_P Parameter: Tissue Value: Whole Plant
  misc_feature: MA Experiment 20000437 PARAMETER Experiment Name: At_Drought_P Parameter: Treatment Value: Drought vs. No Drought
  misc_feature: MA Experiment ID: 20001910 Result: Down-regulated in Transcription
  misc_feature: MA Experiment 20001910 PARAMETER Experiment Name: At_Drought_Reproduction_P Parameter: Age (day) Value: 37
  misc_feature: MA Experiment 20001910 PARAMETER Experiment Name: At_Drought_Reproduction_P Parameter: Organism Value: A. thaliana
  misc_feature: MA Experiment 20001910 PARAMETER Experiment Name: At_Drought_Reproduction_P Parameter: Plant Line Value: WS
  misc_feature: MA Experiment 20001910 PARAMETER Experiment Name: At_Drought_Reproduction_P Parameter: Timepoint (day) Value: 7
  misc_feature: MA Experiment 20001910 PARAMETER Experiment Name: At_Drought_Reproduction_P Parameter: Tissue Value: Flowers
  misc_feature: MA Experiment 20001910 PARAMETER Experiment Name: At_Drought_Reproduction_P Parameter: Treatment Value: Drought vs. No Drought
atgcaacagggagattacaattcgtactatcaccaccaatactctcaatttcaaaatcctactccgaatcctaatcctaatcccaatccttctccgccggcgccggcaaccgtagctggtccgaccgatcttactcgaaacacgtacgcatcagcgccaccgttcaccggcggttacggttccgccgattactctaactattcacagaattacactccttacgggcaaaactctgagcatgtccctccttcagctccttccttcacttcaccatcacaacctcctccttctccgccggcgacatcactaaaccctaattcttattcaaccttcaaccaaccaccacctccacccacgattcatccacaacctctatcctcttatggatcatttgattctactgctccgtatcagcaacctacctcgcaacatatgtattactcaccgtatgatcagcatcaaacctctggctattcatctgcgcctcctccttcatctgcgcctgcgccgaatcctaatcccgcgccttattcatcatccttgtactctgcacctccttatagtagcggaggatcatccatacctccttcgtatgagaaaccgtcagtgaaatttgatcaatctggttatgacggttataaccggagcagatcggatttaggatctgatctatacggaaaacgatctgatagcggagaatatcctgcttttgaagattcctatggcgatggcgtttatgcttatcaaggaggcaaagttgagccatacggttctcgtggaactgcgccgaaatcatcgaattcaacattgttcgatgattatggacgatccattagcttttcttcttcagggagagattcttctgttagctcgaattctgctaagatcgtgagagctgttcctaaggctgatgtgcaggaagattccactggtggtgtgcagaaatttcgtgtcaaattgttggctgagacttatggacaaaccacaacagatgttctttgtcagattggtttggatggtcttcgtatgcttgatccaagtactagccgaactttgagaatatatcctcttgagaacatcacaagatgcgaaaaactagattcgtctattctggctttctggtctaagactccggtagacattgaagctaaacgtatcagattgcaatcaaatagttacaccaccaacacccttctggacactgtgacggctgcaatgtttcaggccaaggagatcgggggaagtagcaggcctcccacctctggaaaactgattgaacaaactgctgagaagaaaaaaggattgggtgattggatgaacattataaagcctgttaatgaggagaaagatcattgggtacctgatgaagctgtttctaagtgcacatcatgtggttcagatttcggtgcatttatacgaaggcaccactgcaggaattgtggtgacgtcttctgtgacaagtgtactcaaggcaggattgctctcactgctgaggataatgctcctcaagtccgtgtttgtgaccggtgcatggcagaagtgtcacaaaggttgagtaatgccaaggaaaccactggcaggaatgtgagcctgcagagccatgaagaccttgctagaaagttacaggaggaaatggagagaaaccgcaagtcttcgtctggtttgagggaaggatctgggaggcggatgaaagaagtagcttgtccaacatgcactgtgcacttacaggtccaggttccagtctcaggatcagagaccattgagtgcggagtttgccaaaaccctttcctcgtccaaacacttgaaacgttatgttatactgcgcctggaaccgaaacagagcggtttcaagttgacctggtcttcttccatgcaaaccgcttacagcgagttccaaatccagggccttccccggcaccagagcctaagccatgtccgagtccagggccaaaccccgcaccagcgacaactaagaggacacataacactacgtttccggcgatcttcgcctttggggattcgatcttagacacaggaaataacgattatattttgaccttgatcaaagctaattttcttccatatggcatgaattttccagataaagttcccaccggcagattttgcaacggcaaaatcccttcggactttatcgcggattatataggagtaaaaccagttgtaccggcatatttgagaccgggactgacccaggaagatttgctcactggtgtatcctttgcttcgggtggttctggctatgatcctttgacaccaatcgtagtaagtgcgataccgatgtcaaaacaattgacatactttcaagaatacatagagaaagtgaaaggctttgtgggaaaagagaaagccgagcacataatatccaaaggcctagccattgtggtagcgggcagcgacgatctggccaatacctactatggtgaacacttagaggaattcttgtatgacatagatacatatacctcttttatggctagctctgctgcaagttttgctatgagaaccacaagaggaggacttaaaagaaaatgtgctgatgaactcaactttgcagctcagctttttaattccaaactctccacaagtttgaacgaattggctaaaaccatgaaaaataccacattggtgtatattgacatctactcttctttcaatgatatgattcaaaaccccaaaaaatatggatttgatgagattgatagaggatgttgcgggacggggctactcgaattaggtccgctttgcaacaaatatacatcacttctttgcaagaatgtgtcttcttttatgttttgggactcttaccatccaacggaaagagcttataaaatcttaagccaaaagtttgtagagaatgacatgggccctttctatgacaattaa

SEQ ID NO: 86722 - protein, 967 aa, Arabidopsis thaliana
  peptide (1)..(967): Ceres Seq. ID no. 12693017
  misc_feature (668)..(956): Pfam Name: GDSL-like Lipase/Acylhydrolase Pfam Description: GDSL-like Lipase/Acylhydrolase
  misc_feature (1)..(429): Homolog of NCBI NO: 15450926 NR Description: Unknown protein [Arabidopsis thaliana]
  misc_feature (625)..(849): Homolog of NCBI NO: 18394825 NR Description: anter-specific proline-rich protein APG putative; protein id: At1g20120.1, supported by cDNA: 22980.
  misc_feature (841)..(967): Homolog of NCBI NO: 18394825 NR Description: anter-specific proline-rich protein APG putative; protein id: At1g20120.1, supported by cDNA: 22980.
  misc_feature (625)..(849): Homolog of NCBI NO: 21592372 NR Description: anter-specific proline-rich protein APG
  misc_feature (841)..(967): Homolog of NCBI NO: 21592372 NR Description: anter-specific proline-rich protein APG
  misc_feature (242)..(598): Homolog of NCBI NO: 1246823 NR Description: unknown [Phoenix dactylifera]
  misc_feature (74)..(598): Homolog of NCBI NO: 34393553 NR Description: unknown protein [Oryza sativa (japonica
  misc_feature (97)..(598): Homolog of NCBI NO: 4101568 NR Description: unknown [Triticum aestivum]
  misc_feature (631)..(849): Homolog of NCBI NO: 728868 NR Description: ANTER-SPECIFIC PROLINE-RICH PROTEIN APG (PROTEIN
  misc_feature (848)..(958): Homolog of NCBI NO: 728868 NR Description: ANTER-SPECIFIC PROLINE-RICH PROTEIN APG (PROTEIN
MQQGDYNSYYHHQYSQFQNPTPNPNPNPNPSPPAPATVAGPTDLTRNTYASAPPFTGGYGSADYSNYSQNYTPYGQNSEHVPPSAPSFTSPSQPPPSPPATSLNPNSYSTFNQPPPPPTIHPQPLSSYGSFDSTAPYQQPTSQHMYYSPYDQHQTSGYSSAPPPSSAPAPNPNPAPYSSSLYSAPPYSSGGSSIPPSYEKPSVKFDQSGYDGYNRSRSDLGSDLYGKRSDSGEYPAFEDSYGDGVYAYQGGKVEPYGSRGTAPKSSNSTLFDDYGRSISFSSSGRDSSVSSNSAKIVRAVPKADVQEDSTGGVQKFRVKLLAETYGQTTTDVLCQIGLDGLRMLDPSTSRTLRIYPLENITRCEKLDSSILAFWSKTPVDIEAKRIRLQSNSYTTNTLLDTVTAAMFQAKEIGGSSRPPTSGKLIEQTAEKKKGLGDWMNIIKPVNEEKDHWVPDEAVSKCTSCGSDFGAFIRRHHCRNCGDVFCDKCTQGRIALTAEDNAPQVRVCDRCMAEVSQRLSNAKETTGRNVSLQSHEDLARKLQEEMERNRKSSSGLREGSGRRMKEVACPTCTVHLQVQVPVSGSETIECGVCQNPFLVQTLETLCYTAPGTETERFQVDLVFFHANRLQRVPNPGPSPAPEPKPCPSPGPNPAPATTKRTHNTTFPAIFAFGDSILDTGNNDYILTLIKANFLPYGMNFPDKVPTGRFCNGKIPSDFIADYIGVKPVVPAYLRPGLTQEDLLTGVSFASGGSGYDPLTPIVVSAIPMSKQLTYFQEYIEKVKGFVGKEKAEHIISKGLAIVVAGSDDLANTYYGEHLEEFLYDIDTYTSFMASSAASFAMRTTRGGLKRKCADELNFAAQLFNSKLSTSLNELAKTMKNTTLVYIDIYSSFNDMIQNPKKYGFDEIDRGCCGTGLLELGPLCNKYTSLLCKNVSSFMFWDSYHPTERAYKILSQKFVENDMGPFYDN

SEQ ID NO: 86723 - protein, 823 aa, Arabidopsis thaliana
  peptide (1)..(823): Ceres Seq. ID no. 12693018
  misc_feature (524)..(812): Pfam Name: GDSL-like Lipase/Acylhydrolase Pfam Description: GDSL-like Lipase/Acylhydrolase
  misc_feature (1)..(285): Homolog of NCBI NO: 15450926 NR Description: Unknown protein [Arabidopsis thaliana]
  misc_feature (481)..(705): Homolog of NCBI NO: 18394825 NR Description: anter-specific proline-rich protein APG putative; protein id: At1g20120.1, supported by cDNA: 22980.
  misc_feature (697)..(823): Homolog of NCBI NO: 18394825 NR Description: anter-specific proline-rich protein APG putative; protein id: At1g20120.1, supported by cDNA: 22980.
  misc_feature (481)..(705): Homolog of NCBI NO: 21592372 NR Description: anter-specific proline-rich protein APG
  misc_feature (697)..(823): Homolog of NCBI NO: 21592372 NR Description: anter-specific proline-rich protein APG
  misc_feature (98)..(454): Homolog of NCBI NO: 1246823 NR Description: unknown [Phoenix dactylifera]
  misc_feature (1)..(454): Homolog of NCBI NO: 34393553 NR Description: unknown protein [Oryza sativa (japonica
  misc_feature (1)..(454): Homolog of NCBI NO: 4101568 NR Description: unknown [Triticum aestivum]
  misc_feature (487)..(705): Homolog of NCBI NO: 728868 NR Description: ANTER-SPECIFIC PROLINE-RICH PROTEIN APG (PROTEIN
  misc_feature (704)..(814): Homolog of NCBI NO: 728868 NR Description: ANTER-SPECIFIC PROLINE-RICH PROTEIN APG (PROTEIN
MYYSPYDQHQTSGYSSAPPPSSAPAPNPNPAPYSSSLYSAPPYSSGGSSIPPSYEKPSVKFDQSGYDGYNRSRSDLGSDLYGKRSDSGEYPAFEDSYGDGVYAYQGGKVEPYGSRGTAPKSSNSTLFDDYGRSISFSSSGRDSSVSSNSAKIVRAVPKADVQEDSTGGVQKFRVKLLAETYGQTTTDVLCQIGLDGLRMLDPSTSRTLRIYPLENITRCEKLDSSILAFWSKTPVDIEAKRIRLQSNSYTTNTLLDTVTAAMFQAKEIGGSSRPPTSGKLIEQTAEKKKGLGDWMNIIKPVNEEKDHWVPDEAVSKCTSCGSDFGAFIRRHHCRNCGDVFCDKCTQGRIALTAEDNAPQVRVCDRCMAEVSQRLSNAKETTGRNVSLQSHEDLARKLQEEMERNRKSSSGLREGSGRRMKEVACPTCTVHLQVQVPVSGSETIECGVCQNPFLVQTLETLCYTAPGTETERFQVDLVFFHANRLQRVPNPGPSPAPEPKPCPSPGPNPAPATTKRTHNTTFPAIFAFGDSILDTGNNDYILTLIKANFLPYGMNFPDKVPTGRFCNGKIPSDFIADYIGVKPVVPAYLRPGLTQEDLLTGVSFASGGSGYDPLTPIVVSAIPMSKQLTYFQEYIEKVKGFVGKEKAEHIISKGLAIVVAGSDDLANTYYGEHLEEFLYDIDTYTSFMASSAASFAMRTTRGGLKRKCADELNFAAQLFNSKLSTSLNELAKTMKNTTLVYIDIYSSFNDMIQNPKKYGFDEIDRGCCGTGLLELGPLCNKYTSLLCKNVSSFMFWDSYHPTERAYKILSQKFVENDMGPFYDN

SEQ ID NO: 86724 - protein, 625 aa, Arabidopsis thaliana
  peptide (1)..(625): Ceres Seq. ID no. 12693019
  misc_feature (326)..(614): Pfam Name: GDSL-like Lipase/Acylhydrolase Pfam Description: GDSL-like Lipase/Acylhydrolase
  misc_feature (1)..(87): Homolog of NCBI NO: 15450926 NR Description: Unknown protein [Arabidopsis thaliana]
  misc_feature (283)..(507): Homolog of NCBI NO: 18394825 NR Description: anter-specific proline-rich protein APG putative; protein id: At1g20120.1, supported by cDNA: 22980.
  misc_feature (499)..(625): Homolog of NCBI NO: 18394825 NR Description: anter-specific proline-rich protein APG putative; protein id: At1g20120.1, supported by cDNA: 22980.
  misc_feature (283)..(507): Homolog of NCBI NO: 21592372 NR Description: anter-specific proline-rich protein APG
  misc_feature (499)..(625): Homolog of NCBI NO: 21592372 NR Description: anter-specific proline-rich protein APG
  misc_feature (1)..(256): Homolog of NCBI NO: 1246823 NR Description: unknown [Phoenix dactylifera]
  misc_feature (1)..(256): Homolog of NCBI NO: 34393553 NR Description: unknown protein [Oryza sativa (japonica
  misc_feature (1)..(256): Homolog of NCBI NO: 4101568 NR Description: unknown [Triticum aestivum]
  misc_feature (289)..(507): Homolog of NCBI NO: 728868 NR Description: ANTER-SPECIFIC PROLINE-RICH PROTEIN APG (PROTEIN
  misc_feature (506)..(616): Homolog of NCBI NO: 728868 NR Description: ANTER-SPECIFIC PROLINE-RICH PROTEIN APG (PROTEIN
MLDPSTSRTLRIYPLENITRCEKLDSSILAFWSKTPVDIEAKRIRLQSNSYTTNTLLDTVTAAMFQAKEIGGSSRPPTSGKLIEQTAEKKKGLGDWMNIIKPVNEEKDHWVPDEAVSKCTSCGSDFGAFIRRHHCRNCGDVFCDKCTQGRIALTAEDNAPQVRVCDRCMAEVSQRLSNAKETTGRNVSLQSHEDLARKLQEEMERNRKSSSGLREGSGRRMKEVACPTCTVHLQVQVPVSGSETIECGVCQNPFLVQTLETLCYTAPGTETERFQVDLVFFHANRLQRVPNPGPSPAPEPKPCPSPGPNPAPATTKRTHNTTFPAIFAFGDSILDTGNNDYILTLIKANFLPYGMNFPDKVPTGRFCNGKIPSDFIADYIGVKPVVPAYLRPGLTQEDLLTGVSFASGGSGYDPLTPIVVSAIPMSKQLTYFQEYIEKVKGFVGKEKAEHIISKGLAIVVAGSDDLANTYYGEHLEEFLYDIDTYTSFMASSAASFAMRTTRGGLKRKCADELNFAAQLFNSKLSTSLNELAKTMKNTTLVYIDIYSSFNDMIQNPKKYGFDEIDRGCCGTGLLELGPLCNKYTSLLCKNVSSFMFWDSYHPTERAYKILSQKFVENDMGPFYDN

SEQ ID NO: 86725 - DNA, 492 bp, Arabidopsis thaliana
  misc_feature (1)..(492): Ceres Seq. ID no. 12693024
  misc_feature: MA Experiment ID: 20000328 Result: Up-regulated in Transcription
  misc_feature: MA Experiment 20000328 PARAMETER Experiment Name: At_42deg_Heat_Sub_P Parameter: Age (day) Value: 14
  misc_feature: MA Experiment 20000328 PARAMETER Experiment Name: At_42deg_Heat_Sub_P Parameter: Organism Value: A. thaliana
  misc_feature: MA Experiment 20000328 PARAMETER Experiment Name: At_42deg_Heat_Sub_P Parameter: Plant Line Value: WS
  misc_feature: MA Experiment 20000328 PARAMETER Experiment Name: At_42deg_Heat_Sub_P Parameter: Temperature (deg C) Value: 42 vs. 22
  misc_feature: MA Experiment 20000328 PARAMETER Experiment Name: At_42deg_Heat_Sub_P Parameter: Timepoint (hr) Value: 6
  misc_feature: MA Experiment 20000328 PARAMETER Experiment Name: At_42deg_Heat_Sub_P Parameter: Tissue Value: Aerial
atggcagaaacgaagaagatgatcatccttaagagctccgacggtgaatccttcgagatcgaggaagccgtcgctgttaagtcccagacgattaagcacatgattgaggacgactgtgccgataacggaattccacttcccaatgtcaccggagccatcctcgccaaggttattgagtattgcaagaagcacgttgaagccgctgctgaagctggtggagacaaggatttctatggttccgctgagaacgacgagcttaagaattgggacagcgaattcgtcaaagtcgatcagcctactctcttcgatctcatcttggctgcgaactatttgaacatcggtggacttcttgaccttacgtgcaaggccgtggctgatcagatgagaggcaaaactccagagcagatgcgtgcacacttcaacatcaagaacgattacacacctgaggaagaggcggaggttcgcaatgagaacaagtgggcgttcgagtga

SEQ ID NO: 86726 - protein, 163 aa, Arabidopsis thaliana; identical to SEQ ID NO: 37296
  peptide (1)..(163): Ceres Seq. ID no. 12693025
  misc_feature (86)..(163): Pfam Name: Skp1 family, dimerisation domain Pfam Description: Skp1 family, dimerisation domain
  misc_feature (1)..(163): Homolog of NCBI NO: 18394828 NR Description: SKP1/ASK1 (At4), putative; protein id: supported by cDNA: gi_16648854, supported by cDNA: gi_20466136
  misc_feature (1)..(163): Homolog of NCBI NO: 18400912 NR Description: E3 ubiquitin ligase SCF complex subunit SKP1/ASK1 putative; protein id: At2g25700.1, supported by cDNA: gi_15450664 thaliana] >gi|25366630|pir||F84651 probable SKP1/ASK1 (At3),
  misc_feature (2)..(163): Homolog of NCBI NO: 7378764 NR Description: putative kinetochore protein [Hordeum vulgare
  misc_feature (2)..(163): Homolog of NCBI NO: 40644754 NR Description: putative SKP1 protein [Triticum aestivum]
  misc_feature (4)..(163): Homolog of NCBI NO: 18958257 NR Description: kinetochore protein [Brassica juncea]
  misc_feature (4)..(163): Homolog of NCBI NO: 18958259 NR Description: kinetochore protein [Brassica juncea]
  misc_feature (4)..(163): Homolog of NCBI NO: 4959710 NR Description: Skp1 [Medicago sativa]
  misc_feature (4)..(163): Homolog of NCBI NO: 18958253 NR Description: kinetochore protein [Brassica juncea]
  misc_feature (6)..(163): Homolog of NCBI NO: 18410982 NR Description: E3 ubiquitin ligase SCF complex subunit, (At1); protein id: At1g75950.1, supported by cDNA: gi_1432082, by cDNA: gi_19424109, supported by cDNA: gi_21281126, supported
  misc_feature (4)..(163): Homolog of NCBI NO: 3719211 NR Description: UIP2 [Arabidopsis thaliana]

SEQ ID NO: 86727 - protein, 157 aa, Arabidopsis thaliana; identical to SEQ ID NO: 37297
  peptide (1)..(157): Ceres Seq. ID no. 12693026
  misc_feature (80)..(157): Pfam Name: Skp1 family, dimerisation domain Pfam Description: Skp1 family, dimerisation domain
  misc_feature (1)..(157): Homolog of NCBI NO: 18394828 NR Description: SKP1/ASK1 (At4), putative; protein id: supported by cDNA: gi_16648854, supported by cDNA: gi_20466136
  misc_feature (1)..(157): Homolog of NCBI NO: 18400912 NR Description: E3 ubiquitin ligase SCF complex subunit SKP1/ASK1 putative; protein id: At2g25700.1, supported by cDNA: gi_15450664 thaliana] >gi|25366630|pir||F84651 probable SKP1/ASK1 (At3),
  misc_feature (1)..(157): Homolog of NCBI NO: 7378764 NR Description: putative kinetochore protein [Hordeum vulgare
  misc_feature (1)..(157): Homolog of NCBI NO: 40644754 NR Description: putative SKP1 protein [Triticum aestivum]
  misc_feature (1)..(157): Homolog of NCBI NO: 18958257 NR Description: kinetochore protein [Brassica juncea]
  misc_feature (1)..(157): Homolog of NCBI NO: 18958259 NR Description: kinetochore protein [Brassica juncea]
  misc_feature (1)..(157): Homolog of NCBI NO: 4959710 NR Description: Skp1 [Medicago sativa]
  misc_feature (1)..(157): Homolog of NCBI NO: 18958253 NR Description: kinetochore protein [Brassica juncea]
  misc_feature (1)..(157): Homolog of NCBI NO: 18410982 NR Description: E3 ubiquitin ligase SCF complex subunit, (At1); protein id: At1g75950.1, supported by cDNA: gi_1432082, by cDNA: gi_19424109, supported by cDNA: gi_21281126, supported
  misc_feature (1)..(157): Homolog of NCBI NO: 3719211 NR Description: UIP2 [Arabidopsis thaliana]

SEQ ID NO: 86728 - protein, 130 aa, Arabidopsis thaliana
  peptide (1)..(130): Ceres Seq. ID no. 12693027
  misc_feature (53)..(130): Pfam Name: Skp1 family, dimerisation domain Pfam Description: Skp1 family, dimerisation domain
  misc_feature (1)..(130): Homolog of NCBI NO: 18394828 NR Description: SKP1/ASK1 (At4), putative; protein id: supported by cDNA: gi_16648854, supported by cDNA: gi_20466136
  misc_feature (1)..(130): Homolog of NCBI NO: 18400912 NR Description: E3 ubiquitin ligase SCF complex subunit SKP1/ASK1 putative; protein id: At2g25700.1, supported by cDNA: gi_15450664 thaliana] >gi|25366630|pir||F84651 probable SKP1/ASK1 (At3),
  misc_feature (1)..(130): Homolog of NCBI NO: 7378764 NR Description: putative kinetochore protein [Hordeum vulgare
  misc_feature (1)..(130): Homolog of NCBI NO: 40644754 NR Description: putative SKP1 protein [Triticum aestivum]
  misc_feature (1)..(130): Homolog of NCBI NO: 18958257 NR Description: kinetochore protein [Brassica juncea]
  misc_feature (1)..(130): Homolog of NCBI NO: 18958259 NR Description: kinetochore protein [Brassica juncea]
  misc_feature (1)..(130): Homolog of NCBI NO: 4959710 NR Description: Skp1 [Medicago sativa]
  misc_feature (1)..(130): Homolog of NCBI NO: 18958253 NR Description: kinetochore protein [Brassica juncea]
  misc_feature (1)..(130): Homolog of NCBI NO: 18410982 NR Description: E3 ubiquitin ligase SCF complex subunit, (At1); protein id: At1g75950.1, supported by cDNA: gi_1432082, by cDNA: gi_19424109, supported by cDNA: gi_21281126, supported
  misc_feature (1)..(130): Homolog of NCBI NO: 3719211 NR Description: UIP2 [Arabidopsis thaliana]
MIEDDCADNGIPLPNVTGAILAKVIEYCKKHVEAAAEAGGDKDFYGSAENDELKNWDSEFVKVDQPTLFDLILAANYLNIGGLLDLTCKAVADQMRGKTPEQMRAHFNIKNDYTPEEEAEVRNENKWAFE

SEQ ID NO: 86729 - DNA, 2319 bp, Arabidopsis thaliana
  misc_feature (1)..(2319): Ceres Seq. ID no. 12693032
  misc_feature: MA Experiment ID: 20000307 Result: Down-regulated in Transcription
  misc_feature: MA Experiment 20000307 PARAMETER Experiment Name: At_Germinating_Seeds_Sub_P Parameter: Age (hr) Value: 24 vs. 0
  misc_feature: MA Experiment 20000307 PARAMETER Experiment Name: At_Germinating_Seeds_Sub_P Parameter: Organism Value: A. thaliana
  misc_feature: MA Experiment 20000307 PARAMETER Experiment Name: At_Germinating_Seeds_Sub_P Parameter: Plant Line Value: WS
  misc_feature: MA Experiment 20000307 PARAMETER Experiment Name: At_Germinating_Seeds_Sub_P Parameter: Tissue Value: Germinating Seeds
  misc_feature: MA Experiment ID: 20000328 Result: Down-regulated in Transcription
  misc_feature: MA Experiment 20000328 PARAMETER Experiment Name: At_42deg_Heat_Sub_P Parameter: Age (day) Value: 14
  misc_feature: MA Experiment 20000328 PARAMETER Experiment Name: At_42deg_Heat_Sub_P Parameter: Organism Value: A. thaliana
  misc_feature: MA Experiment 20000328 PARAMETER Experiment Name: At_42deg_Heat_Sub_P Parameter: Plant Line Value: WS
  misc_feature: MA Experiment 20000328 PARAMETER Experiment Name: At_42deg_Heat_Sub_P Parameter: Temperature (deg C) Value: 42 vs. 22
  misc_feature: MA Experiment 20000328 PARAMETER Experiment Name: At_42deg_Heat_Sub_P Parameter: Timepoint (hr) Value: 6
  misc_feature: MA Experiment 20000328 PARAMETER Experiment Name: At_42deg_Heat_Sub_P Parameter: Tissue Value: Aerial
atgacaaaacaagttcttccactgatagagaaaattcctcaatcgatcgttggattcttagaatcttcatcatatcattggtcttcttcgttgtcgaagacaacacaagctcatgctcgtatactcaaatccggagctcaaaacgatggctatatctccgctaaactcattgcttcatactcgaactataattgtttcaacgatgctgatctcgtcttgcaatcgattccggatcctactatttactctttctcttctcttatatacgctttaacaaaggctaagctttttacgcaatcgattggtgtgttttctcggatgttctctcatgggttgattccagatagtcatgttcttccgaatttgttcaaggtttgtgctgaattatcggcttttaaagtgggtaaacagatacattgtgtgtcgtgtgtttccgggttggatatggatgcgtttgttcaggggtctatgtttcatatgtacatgaggtgtggtaggatgggtgatgcacgcaaagtgttcgatagaatgtctgacaaagatgttgtcacttgcagtgctttgctttgtgcctatgcgcgaaagggttgcttagaagaggtggttcgtatcctctctgagatggaaagttcaggtattgaggcgaatattgtgtcttggaatggtattcttagtgggtttaatcggagtgggtatcacaaggaagcagtggtgatgttccagaagattcaccatttggggttttgtcctgatcaagttacagtttcaagtgttcttccttcagttggagattcagagatgctgaatatggggaggctgattcatggatatgtgattaaacagggtttgcttaaggataaatgtgtcattagtgcaatgattgatatgtatgggaaatctgggcatgtttatggaatcataagtcttttcaatcaatttgagatgatggaggcaggggtttgcaatgcctacattacagggctatcgcgaaatggtcttgttgacaaggcacttgaaatgtttgagctattcaaggagcaaacgatggagcttaatgttgtgtcatggacttcaatcatagctgggtgtgctcagaacgggaaagatatcgaagctttggaattgttcagagaaatgcaggttgcaggggtgaagccaaaccatgtaacaatcccttcaatgcttccagcttgcggaaatatagcagctttgggtcatgggagatccactcatggatttgcagtaagggtccaccttttggataatgttcatgtagggagtgctctgattgacatgtatgccaaatgtggaagaatcaacttgtctcagattgtctttaatatgatgcctacaaaaaacttagtctgctggaactctttaatgaatggattttcgatgcatgggaaggccaaggaagtcatgagcatatttgaatctcttatgagaaccaggttgaaacccgatttcatcagctttaccagtttattatcagcatgtggccaagtaggtttaacagatgaagggtggaaatatttcaaaatgatgtcagaggaatatgggataaaaccgaggttggaacactattcttgcatggtaaaccttcttggacgcgcaggcaagttgcaagaagcatatgatctgataaaagagatgccttttgagccagactcctgcgtctggggagctttgttaaattcttgcaggcttcaaaacaatgtagatttagctgaaatcgcagcagaaaagcttttccatttagaacccgaaaacccagggacttacgttctcttgtccaatatatatgccgctaaaggcatgtggacagaagtagacagtattagaaacaagatggagagtctgggactgaagaagaacccgggatgcagctggattcaagtgaagaacagagtgtacacgcttctggctggtgacaagtcgcatccgcagatagatcaaataacagagaagatggatgagattagcaaagagatgaggaaatcaggtcaccgcccaaatttagattttgctctgcatgatgtggaggagcaagagcaagagcagatgttatggggacacagtgagaaactagcagtagttttcggtcttcttaacacaccagacggcacacctcttcaggtagagagattttcattagagatacaaataggtttcatcattttaaagacggaatttgttcctgtggagatttctggtgatactaagagtaagagatacatgtctcatattcttttatctacactagtgtttcaggttcgtttaaaaagctcatctaaagcttataaatgggaattgaattga

SEQ ID NO: 86730 - protein, 772 aa, Arabidopsis thaliana
  peptide (1)..(772): Ceres Seq. ID no. 12693033
  misc_feature (218)..(252): Pfam Name: PPR repeat Pfam Description: PPR repeat
  misc_feature (32)..(713): Homolog of NCBI NO: 15227144 NR Description: hypothetical protein; protein id: At2g22070.1
  misc_feature (30)..(713): Homolog of NCBI NO: 34393605 NR Description: pentatricopeptide (PPR) repeat-containing
  misc_feature (320)..(715): Homolog of NCBI NO: 15234006 NR Description: putative protein; protein id: At4g18750.1
  misc_feature (22)..(311): Homolog of NCBI NO: 15234006 NR Description: putative protein; protein id: At4g18750.1
  misc_feature (315)..(715): Homolog of NCBI NO: 34915012 NR Description: P0458A05.10 [Oryza sativa (japonica
  misc_feature (36)..(320): Homolog of NCBI NO: 34915012 NR Description: P0458A05.10 [Oryza sativa (japonica
  misc_feature (56)..(713): Homolog of NCBI NO: 34896896 NR Description: hypothetical protein [Oryza sativa (japonica group)] >gi|24899461|gb|AAN65031.1| hypothetical protein [Oryza
  misc_feature (332)..(715): Homolog of NCBI NO: 38606535 NR Description: OSJNBa0016O02.23 [Oryza sativa (japonica
  misc_feature (30)..(224): Homolog of NCBI NO: 38606535 NR Description: OSJNBa0016O02.23 [Oryza sativa (japonica
  misc_feature (297)..(717): Homolog of NCBI NO: 34903762 NR Description: unnamed protein product [Oryza sativa (japonica group)] >gi|7340873|dbj|BAA92963.1| unnamed protein product
MTKQVLPLIEKIPQSIVGFLESSSYHWSSSLSKTTQAHARILKSGAQNDGYISAKLIASYSNYNCFNDADLVLQSIPDPTIYSFSSLIYALTKAKLFTQSIGVFSRMFSHGLIPDSHVLPNLFKVCAELSAFKVGKQIHCVSCVSGLDMDAFVQGSMFHMYMRCGRMGDARKVFDRMSDKDVVTCSALLCAYARKGCLEEVVRILSEMESSGIEANIVSWNGILSGFNRSGYHKEAVVMFQKIHHLGFCPDQVTVSSVLPSVGDSEMLNMGRLIHGYVIKQGLLKDKCVISAMIDMYGKSGHVYGIISLFNQFEMMEAGVCNAYITGLSRNGLVDKALEMFELFKEQTMELNVVSWTSIIAGCAQNGKDIEALELFREMQVAGVKPNHVTIPSMLPACGNIAALGHGRSTHGFAVRVHLLDNVHVGSALIDMYAKCGRINLSQIVFNMMPTKNLVCWNSLMNGFSMHGKAKEVMSIFESLMRTRLKPDFISFTSLLSACGQVGLTDEGWKYFKMMSEEYGIKPRLEHYSCMVNLLGRAGKLQEAYDLIKEMPFEPDSCVWGALLNSCRLQNNVDLAEIAAEKLFHLEPENPGTYVLLSNIYAAKGMWTEVDSIRNKMESLGLKKNPGCSWIQVKNRVYTLLAGDKSHPQIDQITEKMDEISKEMRKSGHRPNLDFALHDVEEQEQEQMLWGHSEKLAVVFGLLNTPDGTPLQVERFSLEIQIGFIILKTEFVPVEISGDTKSKRYMSHILLSTLVFQVRLKSSSKAYKWELN

SEQ ID NO: 86731 - protein, 666 aa, Arabidopsis thaliana
  peptide (1)..(666): Ceres Seq. ID no. 12693034
  misc_feature (112)..(146): Pfam Name: PPR repeat Pfam Description: PPR repeat
  misc_feature (1)..(607): Homolog of NCBI NO: 15227144 NR Description: hypothetical protein; protein id: At2g22070.1
  misc_feature (1)..(607): Homolog of NCBI NO: 34393605 NR Description: pentatricopeptide (PPR) repeat-containing
  misc_feature (214)..(609): Homolog of NCBI NO: 15234006 NR Description: putative protein; protein id: At4g18750.1
  misc_feature (1)..(205): Homolog of NCBI NO: 15234006 NR Description: putative protein; protein id: At4g18750.1
  misc_feature (209)..(609): Homolog of NCBI NO: 34915012 NR Description: P0458A05.10 [Oryza sativa (japonica
  misc_feature (1)..(214): Homolog of NCBI NO: 34915012 NR Description: P0458A05.10 [Oryza sativa (japonica
  misc_feature (1)..(607): Homolog of NCBI NO: 34896896 NR Description: hypothetical protein [Oryza sativa (japonica group)] >gi|24899461|gb|AAN65031.1| hypothetical protein [Oryza
  misc_feature (226)..(609): Homolog of NCBI NO: 38606535 NR Description: OSJNBa0016O02.23 [Oryza sativa (japonica
  misc_feature (1)..(118): Homolog of NCBI NO: 38606535 NR Description: OSJNBa0016O02.23 [Oryza sativa (japonica
  misc_feature (191)..(611): Homolog of NCBI NO: 34903762 NR Description: unnamed protein product [Oryza sativa (japonica group)] >gi|7340873|dbj|BAA92963.1| unnamed protein product
MFSHGLIPDSHVLPNLFKVCAELSAFKVGKQIHCVSCVSGLDMDAFVQGSMFHMYMRCGRMGDARKVFDRMSDKDVVTCSALLCAYARKGCLEEVVRILSEMESSGIEANIVSWNGILSGFNRSGYHKEAVVMFQKIHHLGFCPDQVTVSSVLPSVGDSEMLNMGRLIHGYVIKQGLLKDKCVISAMIDMYGKSGHVYGIISLFNQFEMMEAGVCNAYITGLSRNGLVDKALEMFELFKEQTMELNVVSWTSIIAGCAQNGKDIEALELFREMQVAGVKPNHVTIPSMLPACGNIAALGHGRSTHGFAVRVHLLDNVHVGSALIDMYAKCGRINLSQIVFNMMPTKNLVCWNSLMNGFSMHGKAKEVMSIFESLMRTRLKPDFISFTSLLSACGQVGLTDEGWKYFKMMSEEYGIKPRLEHYSCMVNLLGRAGKLQEAYDLIKEMPFEPDSCVWGALLNSCRLQNNVDLAEIAAEKLFHLEPENPGTYVLLSNIYAAKGMWTEVDSIRNKMESLGLKKNPGCSWIQVKNRVYTLLAGDKSHPQIDQITEKMDEISKEMRKSGHRPNLDFALHDVEEQEQEQMLWGHSEKLAVVFGLLNTPDGTPLQVERFSLEIQIGFIILKTEFVPVEISGDTKSKRYMSHILLSTLVFQVRLKSSSKAYKWELN

SEQ ID NO: 86732 - protein, 624 aa, Arabidopsis thaliana
  peptide (1)..(624): Ceres Seq. ID no. 12693035
  misc_feature (70)..(104): Pfam Name: PPR repeat Pfam Description: PPR repeat
  misc_feature (1)..(565): Homolog of NCBI NO: 15227144 NR Description: hypothetical protein; protein id: At2g22070.1
  misc_feature (1)..(565): Homolog of NCBI NO: 34393605 NR Description: pentatricopeptide (PPR) repeat-containing
  misc_feature (172)..(567): Homolog of NCBI NO: 15234006 NR Description: putative protein; protein id: At4g18750.1
  misc_feature (1)..(163): Homolog of NCBI NO: 15234006 NR Description: putative protein; protein id: At4g18750.1
  misc_feature (167)..(567): Homolog of NCBI NO: 34915012 NR Description: P0458A05.10 [Oryza sativa (japonica
  misc_feature (1)..(172): Homolog of NCBI NO: 34915012 NR Description: P0458A05.10 [Oryza sativa (japonica
  misc_feature (1)..(565): Homolog of NCBI NO: 34896896 NR Description: hypothetical protein [Oryza sativa (japonica group)] >gi|24899461|gb|AAN65031.1| hypothetical protein [Oryza
  misc_feature (184)..(567): Homolog of NCBI NO: 38606535 NR Description: OSJNBa0016O02.23 [Oryza sativa (japonica
  misc_feature (1)..(76): Homolog of NCBI NO: 38606535 NR Description: OSJNBa0016O02.23 [Oryza sativa (japonica
  misc_feature (149)..(569): Homolog of NCBI NO: 34903762 NR Description: unnamed protein product [Oryza sativa (japonica group)] >gi|7340873|dbj|BAA92963.1| unnamed protein product
MDAFVQGSMFHMYMRCGRMGDARKVFDRMSDKDVVTCSALLCAYARKGCLEEVVRILSEMESSGIEANIVSWNGILSGFNRSGYHKEAVVMFQKIHHLGFCPDQVTVSSVLPSVGDSEMLNMGRLIHGYVIKQGLLKDKCVISAMIDMYGKSGHVYGIISLFNQFEMMEAGVCNAYITGLSRNGLVDKALEMFELFKEQTMELNVVSWTSIIAGCAQNGKDIEALELFREMQVAGVKPNHVTIPSMLPACGNIAALGHGRSTHGFAVRVHLLDNVHVGSALIDMYAKCGRINLSQIVFNMMPTKNLVCWNSLMNGFSMHGKAKEVMSIFESLMRTRLKPDFISFTSLLSACGQVGLTDEGWKYFKMMSEEYGIKPRLEHYSCMVNLLGRAGKLQEAYDLIKEMPFEPDSCVWGALLNSCRLQNNVDLAEIAAEKLFHLEPENPGTYVLLSNIYAAKGMWTEVDSIRNKMESLGLKKNPGCSWIQVKNRVYTLLAGDKSHPQIDQITEKMDEISKEMRKSGHRPNLDFALHDVEEQEQEQMLWGHSEKLAVVFGLLNTPDGTPLQVERFSLEIQIGFIILKTEFVPVEISGDTKSKRYMSHILLSTLVFQVRLKSSSKAYKWELN

SEQ ID NO: 86733 - DNA, 1437 bp, Arabidopsis thaliana
  misc_feature (1)..(1437): Ceres Seq. ID no. 12693047
  misc_feature: MA Experiment ID: 20000307 Result: Up-regulated in Transcription
  misc_feature: MA Experiment 20000307 PARAMETER Experiment Name: At_Germinating_Seeds_Sub_P Parameter: Age (hr) Value: 24 vs. 0
  misc_feature: MA Experiment 20000307 PARAMETER Experiment Name: At_Germinating_Seeds_Sub_P Parameter: Organism Value: A. thaliana
  misc_feature: MA Experiment 20000307 PARAMETER Experiment Name: At_Germinating_Seeds_Sub_P Parameter: Plant Line Value: WS
  misc_feature: MA Experiment 20000307 PARAMETER Experiment Name: At_Germinating_Seeds_Sub_P Parameter: Tissue Value: Germinating Seeds
atggtggagactagtatcgacatggaggaaggaactctcgagatcggaatggagtatagaactgtctccggagttgctggacctttggtcatccttgacaaagtgaagggtccaaagtaccaggagattgttaatattcgcttaggagatggatcaacgagacgtggtcaggtcttggaggttgatggggagaaagctgttgtccaggtttttgaaggaacatctgggattgacaacaagtttaccaccgtgcaattcacaggagaggtactgaaaacgcctgtgtcattggacatgcttggccgcatatttaacggctcgggaaagccaattgataatggccctcctattttgccagaggcataccttgatatttctggaagttcaatcaaccccagtgaaagaacctaccctgaagagatgatacaaacggggatttctaccattgatgtcatgaactccattgctcgtggacagaagattcctcttttctctgctgctggtctacctcataatgagattgctgctcaaatttgtcgtcaggctggacttgtgaagcggttggaaaagactgagaacttaattcaggaggatcatggagaggacaattttgcaattgtttttgcagctatgggtgtaaacatggagacagctcagtttttcaagcgtgattttgaagaaaatggatcgatggaaagggttacccttttcctgaacttggccaatgatccaaccattgagagaattatcactcctcgaattgccctaacaaccgctgaatatttggcttatgaatgtggaaagcatgtgcttgttatattgacagacatgagttcttatgcagatgctcttcgtgaggtttctgctgctcgagaagaagttcctggaagacatcttgcaactatttatgaacgcgcgggacgtattgaaggaagaaagggttccattacccaaatccctatcctgactatgcccaatgacgatatcactcaccctactccggatcttactggttacattactgagggtcagatatatattgataggcaacttcacaacagacagatatacccacccattaacgtgcttccatcactttctcggctgatgaagagtgctattggtgaaggaatgactcgcaaagaccattctgatgtgtccaaccagctatacgcaaattatgcaatcggaaaagatgttcaagccatgaaagctgttgttggagaagaagctctgtcttccgaggatctgctgtatttagagtttctggataaatttgaaaggaagtttgtgatgcaaggcgcatacgatacaaggaacatcttccagtcgcttgacttggcatggacactgctccgtatcttcccacgtgagcttcttcaccgtattcctgccaaaacacttgatcaattctacagccgcgactccacaagctaa

SEQ ID NO: 86734 - protein, 478 aa, Arabidopsis thaliana
  peptide (1)..(478): Ceres Seq. ID no. 12693048
  misc_feature (203)..(373): Pfam Name: ATP synthase alpha/beta family, Pfam Description: ATP synthase alpha/beta family,
  misc_feature (1)..(478): Homolog of NCBI NO: 17065080 NR Description: Unknown protein [Arabidopsis thaliana]
  misc_feature (1)..(478): Homolog of NCBI NO: 25290450 NR Description: hypothetical protein F14O10.13 - Arabidopsis >gi|9558599|gb|AAF88162.1|AC026234_13 Nearly identical to
  misc_feature (1)..(478): Homolog of NCBI NO: 81637 NR Description: H+-exporting ATPase (EC 3.6.3.6) 57K chain -
  misc_feature (1)..(478): Homolog of NCBI NO: 15222929 NR Description: vacuolar ATP synthase subunit B; protein id: supported by cDNA: gi_166626, supported by cDNA: gi_20453109 thaliana] >gi|27735259|sp|P11574|VATB_ARATH Vacuolar
  misc_feature (241)..(478): Homolog of NCBI NO: 25290419 NR Description: protein T4O12.24 [imported] - Arabidopsis >gi|6721109|gb|AAF26763.1|AC007396_12 T4O12.24 [Arabidopsis
  misc_feature (1)..(242): Homolog of NCBI NO: 25290419 NR Description: protein T4O12.24 [imported] - Arabidopsis >gi|6721109|gb|AAF26763.1|AC007396_12 T4O12.24 [Arabidopsis
  misc_feature (3)..(478): Homolog of NCBI NO: 15233891 NR Description: probable H+-transporting ATPase; protein id: supported by cDNA: gi_14517367, supported by cDNA: gi_15010615,
  misc_feature (1)..(476): Homolog of NCBI NO: 2493129 NR Description: Vacuolar ATP synthase subunit B isoform 1 B subunit 1) (Vacuolar proton pump B subunit 1)
  misc_feature (7)..(477): Homolog of NCBI NO: 2493132 NR Description: Vacuolar ATP synthase subunit B isoform 2 B subunit 2) (Vacuolar proton pump B subunit 2)
  misc_feature (5)..(478): Homolog of NCBI NO: 26986106 NR Description: vacuolar ATPase subunit B [Mesembryanthemum
MVETSIDMEEGTLEIGMEYRTVSGVAGPLVILDKVKGPKYQEIVNIRLGDGSTRRGQVLEVDGEKAVVQVFEGTSGIDNKFTTVQFTGEVLKTPVSLDMLGRIFNGSGKPIDNGPPILPEAYLDISGSSINPSERTYPEEMIQTGISTIDVMNSIARGQKIPLFSAAGLPHNEIAAQICRQAGLVKRLEKTENLIQEDHGEDNFAIVFAAMGVNMETAQFFKRDFEENGSMERVTLFLNLANDPTIERIITPRIALTTAEYLAYECGKHVLVILTDMSSYADALREVSAAREEVPGRHLATIYERAGRIEGRKGSITQIPILTMPNDDITHPTPDLTGYITEGQIYIDRQLHNRQIYPPINVLPSLSRLMKSAIGEGMTRKDHSDVSNQLYANYAIGKDVQAMKAVVGEEALSSEDLLYLEFLDKFERKFVMQGAYDTRNIFQSLDLAWTLLRIFPRELLHRIPAKTLDQFYSRDSTS

SEQ ID NO: 86735 - protein, 471 aa, Arabidopsis thaliana
  peptide (1)..(471): Ceres Seq. ID no. 12693049
  misc_feature (196)..(366): Pfam Name: ATP synthase alpha/beta family, Pfam Description: ATP synthase alpha/beta family,
  misc_feature (1)..(471): Homolog of NCBI NO: 17065080 NR Description: Unknown protein [Arabidopsis thaliana]
  misc_feature (1)..(471): Homolog of NCBI NO: 25290450 NR Description: hypothetical protein F14O10.13 - Arabidopsis >gi|9558599|gb|AAF88162.1|AC026234_13 Nearly identical to
  misc_feature (1)..(471): Homolog of NCBI NO: 81637 NR Description: H+-exporting ATPase (EC 3.6.3.6) 57K chain -
  misc_feature (1)..(471): Homolog of NCBI NO: 15222929 NR Description: vacuolar ATP synthase subunit B; protein id: supported by cDNA: gi_166626, supported by cDNA: gi_20453109 thaliana] >gi|27735259|sp|P11574|VATB_ARATH Vacuolar
  misc_feature (234)..(471): Homolog of NCBI NO: 25290419 NR Description: protein T4O12.24 [imported] - Arabidopsis >gi|6721109|gb|AAF26763.1|AC007396_12 T4O12.24 [Arabidopsis
  misc_feature (1)..(235): Homolog of NCBI NO: 25290419 NR Description: protein T4O12.24 [imported] - Arabidopsis >gi|6721109|gb|AAF26763.1|AC007396_12 T4O12.24 [Arabidopsis
  misc_feature (1)..(471): Homolog of NCBI NO: 15233891 NR Description: probable H+-transporting ATPase; protein id: supported by cDNA: gi_14517367, supported by cDNA: gi_15010615,
  misc_feature (1)..(469): Homolog of NCBI NO: 2493129 NR Description: Vacuolar ATP synthase subunit B isoform 1 B subunit 1) (Vacuolar proton pump B subunit 1)
  misc_feature (1)..(470): Homolog of NCBI NO: 2493132 NR Description: Vacuolar ATP synthase subunit B isoform 2 B subunit 2) (Vacuolar proton pump B subunit 2)
  misc_feature (1)..(471): Homolog of NCBI NO: 26986106 NR Description: vacuolar ATPase subunit B [Mesembryanthemum
MEEGTLEIGMEYRTVSGVAGPLVILDKVKGPKYQEIVNIRLGDGSTRRGQVLEVDGEKAVVQVFEGTSGIDNKFTTVQFTGEVLKTPVSLDMLGRIFNGSGKPIDNGPPILPEAYLDISGSSINPSERTYPEEMIQTGISTIDVMNSIARGQKIPLFSAAGLPHNEIAAQICRQAGLVKRLEKTENLIQEDHGEDNFAIVFAAMGVNMETAQFFKRDFEENGSMERVTLFLNLANDPTIERIITPRIALTTAEYLAYECGKHVLVILTDMSSYADALREVSAAREEVPGRHLATIYERAGRIEGRKGSITQIPILTMPNDDITHPTPDLTGYITEGQIYIDRQLHNRQIYPPINVLPSLSRLMKSAIGEGMTRKDHSDVSNQLYANYAIGKDVQAMKAVVGEEALSSEDLLYLEFLDKFERKFVMQGAYDTRNIFQSLDLAWTLLRIFPRELLHRIPAKTLDQFYSRDSTS

SEQ ID NO: 86736 - protein, 462 aa, Arabidopsis thaliana
  peptide (1)..(462): Ceres Seq. ID no. 12693050
  misc_feature (187)..(357): Pfam Name: ATP synthase alpha/beta family, Pfam Description: ATP synthase alpha/beta family,
  misc_feature (1)..(462): Homolog of NCBI NO: 17065080 NR Description: Unknown protein [Arabidopsis thaliana]
  misc_feature (1)..(462): Homolog of NCBI NO: 25290450 NR Description: hypothetical protein F14O10.13 - Arabidopsis >gi|9558599|gb|AAF88162.1|AC026234_13 Nearly identical to
  misc_feature (1)..(462): Homolog of NCBI NO: 81637 NR Description: H+-exporting ATPase (EC 3.6.3.6) 57K chain -
  misc_feature (1)..(462): Homolog of NCBI NO: 15222929 NR Description: vacuolar ATP synthase subunit B; protein id: supported by cDNA: gi_166626, supported by cDNA: gi_20453109 thaliana] >gi|27735259|sp|P11574|VATB_ARATH Vacuolar
  misc_feature (225)..(462): Homolog of NCBI NO: 25290419 NR Description: protein T4O12.24 [imported] - Arabidopsis >gi|6721109|gb|AAF26763.1|AC007396_12 T4O12.24 [Arabidopsis
  misc_feature (1)..(226): Homolog of NCBI NO: 25290419 NR Description: protein T4O12.24 [imported] - Arabidopsis >gi|6721109|gb|AAF26763.1|AC007396_12 T4O12.24 [Arabidopsis
  misc_feature (1)..(462): Homolog of NCBI NO: 15233891 NR Description: probable H+-transporting ATPase; protein id: supported by cDNA: gi_14517367, supported by cDNA: gi_15010615,
  misc_feature (1)..(460): Homolog of NCBI NO: 2493129 NR Description: Vacuolar ATP synthase subunit B isoform 1 B subunit 1) (Vacuolar proton pump B subunit 1)
  misc_feature (1)..(461): Homolog of NCBI NO: 2493132 NR Description: Vacuolar ATP synthase subunit B isoform 2 B subunit 2) (Vacuolar proton pump B subunit 2)
  misc_feature (1)..(462): Homolog of NCBI NO: 26986106 NR Description: vacuolar ATPase subunit B [Mesembryanthemum
MEYRTVSGVAGPLVILDKVKGPKYQEIVNIRLGDGSTRRGQVLEVDGEKAVVQVFEGTSGIDNKFTTVQFTGEVLKTPVSLDMLGRIFNGSGKPIDNGPPILPEAYLDISGSSINPSERTYPEEMIQTGISTIDVMNSIARGQKIPLFSAAGLPHNEIAAQICRQAGLVKRLEKTENLIQEDHGEDNFAIVFAAMGVNMETAQFFKRDFEENGSMERVTLFLNLANDPTIERIITPRIALTTAEYLAYECGKHVLVILTDMSSYADALREVSAAREEVPGRHLATIYERAGRIEGRKGSITQIPILTMPNDDITHPTPDLTGYITEGQIYIDRQLHNRQIYPPINVLPSLSRLMKSAIGEGMTRKDHSDVSNQLYANYAIGKDVQAMKAVVGEEALSSEDLLYLEFLDKFERKFVMQGAYDTRNIFQSLDLAWTLLRIFPRELLHRIPAKTLDQFYSRDSTS

SEQ ID NO: 86737 - DNA, 5517 bp, Arabidopsis thaliana
  misc_feature (1)..(5517): Ceres Seq. ID no. 12693066
  misc_feature: MA Experiment ID: 20000314 Result: Up-regulated in Transcription
  misc_feature: MA Experiment 20000314 PARAMETER Experiment Name: At_14day_Shoots-Roots_Sub_P Parameter: Age (day) Value: 14
  misc_feature: MA Experiment 20000314 PARAMETER Experiment Name: At_14day_Shoots-Roots_Sub_P Parameter: Organism Value: A. thaliana
  misc_feature: MA Experiment 20000314 PARAMETER Experiment Name: At_14day_Shoots-Roots_Sub_P Parameter: Plant Line Value: WS
  misc_feature: MA Experiment 20000314 PARAMETER Experiment Name: At_14day_Shoots-Roots_Sub_P Parameter: Tissue Value: Roots vs. Whole Plant
  misc_feature: MA Experiment ID: 20000315 Result: Up-regulated in Transcription
  misc_feature: MA Experiment 20000315 PARAMETER Experiment Name: At_14day_Shoots-Roots_Sub_P Parameter: Age (day) Value: 14
  misc_feature: MA Experiment 20000315 PARAMETER Experiment Name: At_14day_Shoots-Roots_Sub_P Parameter: Organism Value: A. thaliana
  misc_feature: MA Experiment 20000315 PARAMETER Experiment Name: At_14day_Shoots-Roots_Sub_P Parameter: Plant Line Value: WS
  misc_feature: MA Experiment 20000315 PARAMETER Experiment Name: At_14day_Shoots-Roots_Sub_P Parameter: Tissue Value: Shoots vs. Whole Plant
atgacaacaggcggaccttcaggagcgctcgacgcaaacgcctccagctcgggaggtagggcagcggcaccagccccaggacggatccacatctcaacatccatcccggctccatcactcccatctaccccggaaggacaaatggcaggggccaacgtagaaacccccccgctgccgggttccagctcgcaaactcccctagccgagcagaacccgccagttcgtcggaatacggaccaggaggaacgacgcgttactgacggaacctatgtcgggcccggaggactactccagaacatcctcgaccacttaagtcgacaggaggccagaacggaagcacgattcgccaccctagccgctgcacaagcacattcgatggacgaaatcaatcgtctacaaaccagccgaacttcagtccataggccagtgtttgaaagcatcgagcatcgtcctcaagtccgtatcgccggtcccaccaacgatgtcgcaagagacgcagaagtcgccgacctcagacgcactatatctgaaatgagctccaagatccaccgcgcaacaagcacggcgcccgagctcgaccgcgttctggaggagactcagcaaaccccctttactcgacgaataactaacgtctcgatcagaggagcccaaaaaatcaagctggaaagttacaacggtagaaacgacccgaaagagttcctaacatcgttcaacgtcgccataaaccgggccgagctcacgatcgacaactttgatgccgggaggtgtcaaatattcatcgaacatctgaccggaccagctcacaactggttttcacgtctaaaacccaattccatcgacagcttccatcagctcacctcgtccttcctcaaacattacgcgcctctaattgaaaatcaaacatcgaacgccgacctatggtccatctctcagggagctaaagaatcacttcgatctttcgttgatcgtttcaaactggtagtcacaaatatcactgtgcccgacgaagctgcaatagttgcgctacgaaatgcagtatggtacgactccagattccgggatgacataacattacacgctccgagcaccctagaggacgccctgcatcgggcatccaggttcatcgaacttgaagaggagaagctcattctggcaagaaaacacaactcgaccaaaacccccgcatgtaaagacgcagtggttattaaggtcggacctgacgactcaaacgagccgcgacagcacctcgatcgcaatcccagtgcgggccgaaaaccaacttcattcttagtaagcaccgaaactcccgacgctaaaccttggaacaaatatattcgcgacgccgattccccagcagcagggccgatgtactgcgaataccacaaaagcagagcgcattcgaccgagaattgccgtttcctgcagggcctcctgatggccaagtataagagcggcggaataacaatcgaatgcgaccgacccccgataaataacaaaaatcaacgacgtaacgaaactacggcccgacaatatttgaacgatcaaaccaaaccaccgaccccagcagaacaagggataattacctcggctgacgatccggcagccaaaagacagcgaaacggaaaggctatcgccgcggaaccagtcgtggttagacaagttcacgtgataatggggggactccagaattgcagcgattcagtgcgctcaattaagcaataccgaaagaaagccgagatggtggtagcttggccctcatccacaagcacgacaagaaatccgaaccaaagcgctccgatctcattcaccgacgtcgacctagaaggtttggataccccgcacaacgacccgctcgttgtcgagttgatcataagcgatagcagagtaacaagggttctgattgacaccgggagctcggtagacttgattttcaaagatgttttaaccgcgatgaacataacggatcgtcagattaagccagtctcaaaacctctcgccggtttcgatggagatttcgtcatgacaataggcacgattaaactaccaatctttgtcggaggattaatcgcctgggtgaagttcgtcgtgattggcaaaccagcggtctacaacgttatcctcggcaccccctggattcaccaaatgcaagccatcccgtccacttatcatcagtgcgttaagttcccaacgcacaacggcatcttcactctccgagcgccgaaggaagccaagaccccgagtaggtcttacgaggagtccgagttgtgccgcaccgagatggtaaacatagatgagtccgacccgacaaggtgcgttggtgttggggcagagatttcaccatcaattcggctcgaactcattgcactacttaaacgaaattccaaaaccttcgcatggagcatcgaagatatgaagggaatcgacccggcaatcaccgcacacgaacttaacgtagatccaactttcaagccggtaaaacagaaacgaaggaaactcggcccggagcgtgcacgagcagtaaatgaagaggtggaaaaactccttaaggcggggcaaatcatcgaggtgaaataccctgaatggctagcaaatcccgtcgtcgtcaaaaagaagaacggaaagtggcgcgtctgtgtcgattataccgacctcaacaaagcctgcccaaaggatagttatccactaccgcacatcgaccggctcgtcgaagcaacttcagggaatggtctcctctccttcatggacgctttctcaggctacaaccagatcctgatgcacaaggacgatcaagaaaagacatcattcgttaccgaccgcggcacgtattgttacaaggtgatgtccttcgggcttaaaaacgccggggcaacataccagcggttcgtcaataaaatgttagccgaccagatcgggagaaccgtcgaggtgtacatcgacgacatgctcgtaaagtcattgaagcccgaagaccatgtcgagcatctgagcaaatgcttcgacgtcctcaatacatacggaatgaagctaaatccaaccaagtgcaccttcggagtaacatcgggagagtttcttgggtatgtcgtcactaaaagaggaatagaagcaaacccaaaacaaattcgcgctatcctcgaactaccatcaccgcggaacgcccgagaagtgcaaaggctcacaggacgaattgccgccctcaatcgattcatctcacgatcaacggacaagtgcctaccattctacaacctgctcaagcgccgggcccaattcgattgggataaggatagcgaggaagctttcgaaaagctaaaggactacctttccacaccaccgatcctggtaaagcccgaagtcggcgaaactttgtatctctatatcgcagtatcggatcacgcagtaagtagcgtactagtacgagaagaccgaggcgagcaaaggccgatcttctatacgagcaaatcactagtcgaagccgaaacacgatacccggtaatagaaaaagccgcgctggcagtcgtcacgtcggcacgaaaactgcgaccatacttccaatcacatacaatagccgtcctgaccgatcaacctctaagagtcgccctacacagcccaagtcagtcaggacggatgacaaagtgggctgtggagttaagcgaatacgacatcgattttcgaccacgccccgcaatgaaatcacaggtcctggctgacttcctcatcgaactaccgttacagtcagcagaacgtgcggtcagtggaaaccgcggtgaagagtggagtctgtacgtggacggttcatcttcagctcgcggatcggggataggaattcgcctcgtctccccaaccgccgaggtgctagaacagtcctttcgtctccgattcgtcgcaacaaacaacgtggccgagtacgaggtcctaattgccgggctccgcctcgccgcggggatgcagataaccacgatccacgcattcaccgactcgcaactcatcgccgggcagctcagtggggagtacgaagcaaagaacgagaaaatggacgcctatctcaagatcgtccaactgatgacgaaagatttcgaaaactttaaactctcaaaaattccccgaggtgacaacgcaccggcagatgcgctcgccgccttagcgttaacttccgactccgacttgcgacgaatcatcccggtggaaagtattgataaaccaagtatcgattcgaccgacgccgtggaaatcgtaaataccatccgaagctcgaacgcccccgacccagcggatccgaccgattggcgagtagaaattcgcgattacctctccgatggaacattgccaagtgataagtggacagcgcggcgtctacgaatcaaagcggccaagtataccctcatgaaggagcatctccttaaggtcagcgcgttcggagcaatgctgaactgcctccacggaaccgagatcaatgaaataatgaaggaaactcacgaaggagcagccggaaaccactccggaggacgagctctcgcacttaagctcaaaaagttaggattttactggccaacaatgatttctgactgcaagaccttcacggccaagtgtgaacaatgtcaaagacacgcgcccaccatccatcaacccacggaactgctacgagccggagtcgcaccatacccctttatgcgatgggcaatggacatcgtcggcccgatgcctgcttcacgacagaaacggttcatccttgtaatgaccgattacttcacgaagtgggtcgaagccgaatcatacgcgacgatccgagccaatgatgtccaaaactttgtctggaaattcatcatctgccggcacggtctcccttatgaaatcataaccgataacggttcgcagttcatctcgctgtctttcgaaaatttctgcgccagctggaaaatacgactcaataagtccacgccacggtacccacaggggaatggccaggccgaggccacaaacaagacaattctctccggtctgaagaaaagactagacgaaaagaaaggagcttgggcagacgagctggatggtgtcctatggtcctaccgaacgacgccccgaagtgcaacggatcaaactccattcgcacacgcatacggaatggaggccatggcccctgccgaggtaggatactccagtcttcgaagatccatgatggtgaaaaaccccgaactcaacgacagaatgatgctcgatcgactcgacgacctggaagaaatacggaacgccgccctctgccgcattcagaactaccaactcgccgccgccaaacactataaccaaaaggtccacaatcgccacttcgacgtcggagatctcgttctccggaaagttttcgaaaatacagccgagatcaacgccggcaaactgggagcgaactgggaaggatcataccaagtatcgaaaatcgtccgacccggagactacgaactcctaacaatgagcggcaccgcggtgcctcgcacctggaactcaatgcacctgaagagatactattactaa

SEQ ID NO: 86738 - protein, 1838 aa, Arabidopsis thaliana
  peptide (1)..(1838): Ceres Seq. ID no. 12693067
  misc_feature (859)..(1028): Pfam Name: Reverse transcriptase (RNA-dependent DNA polymerase) Pfam Description: Reverse transcriptase (RNA-dependent DNA
  misc_feature (829)..(1149): Homolog of NCBI NO: 15225653 NR Description: putative retroelement pol polyprotein; protein At2g14400.1 [Arabidopsis thaliana] >gi|25411562|pir||G84516
  misc_feature (170)..(425): Homolog of NCBI NO: 15225653 NR Description: putative retroelement pol polyprotein; protein At2g14400.1 [Arabidopsis thaliana] >gi|25411562|pir||G84516
  misc_feature (1611)..(1829): Homolog of NCBI NO: 15225653 NR Description: putative retroelement pol polyprotein; protein At2g14400.1 [Arabidopsis thaliana] >gi|25411562|pir||G84516
  misc_feature (1477)..(1589): Homolog of NCBI NO: 15225653 NR Description: putative retroelement pol polyprotein; protein At2g14400.1 [Arabidopsis thaliana] >gi|25411562|pir||G84516
  misc_feature (1327)..(1423): Homolog of NCBI NO: 15225653 NR Description: putative retroelement pol polyprotein; protein At2g14400.1 [Arabidopsis thaliana] >gi|25411562|pir||G84516
  misc_feature (596)..(680): Homolog of NCBI NO: 15225653 NR Description: putative retroelement pol polyprotein; protein At2g14400.1 [Arabidopsis thaliana] >gi|25411562|pir||G84516
  misc_feature (758)..(1837): Homolog of NCBI NO: 4378066 NR Description: polyprotein [Sorghum bicolor]
  misc_feature (219)..(534): Homolog of NCBI NO: 4378066 NR Description: polyprotein [Sorghum bicolor]
  misc_feature (511)..(753): Homolog of NCBI NO: 4378066 NR Description: polyprotein [Sorghum bicolor]
  misc_feature (757)..(1742): Homolog of NCBI NO: 20161451 NR Description: putative polyprotein [Oryza sativa (japonica
MTTGGPSGALDANASSSGGRAAAPAPGRIHISTSIPAPSLPSTPEGQMAGANVETPPLPGSSSQTPLAEQNPPVRRNTDQEERRVTDGTYVGPGGLLQNILDHLSRQEARTEARFATLAAAQAHSMDEINRLQTSRTSVHRPVFESIEHRPQVRIAGPTNDVARDAEVADLRRTISEMSSKIHRATSTAPELDRVLEETQQTPFTRRITNVSIRGAQKIKLESYNGRNDPKEFLTSFNVAINRAELTIDNFDAGRCQIFIEHLTGPAHNWFSRLKPNSIDSFHQLTSSFLKHYAPLIENQTSNADLWSISQGAKESLRSFVDRFKLVVTNITVPDEAAIVALRNAVWYDSRFRDDITLHAPSTLEDALHRASRFIELEEEKLILARKHNSTKTPACKDAVVIKVGPDDSNEPRQHLDRNPSAGRKPTSFLVSTETPDAKPWNKYIRDADSPAAGPMYCEYHKSRAHSTENCRFLQGLLMAKYKSGGITIECDRPPINNKNQRRNETTARQYLNDQTKPPTPAEQGIITSADDPAAKRQRNGKAIAAEPVVVRQVHVIMGGLQNCSDSVRSIKQYRKKAEMVVAWPSSTSTTRNPNQSAPISFTDVDLEGLDTPHNDPLVVELIISDSRVTRVLIDTGSSVDLIFKDVLTAMNITDRQIKPVSKPLAGFDGDFVMTIGTIKLPIFVGGLIAWVKFVVIGKPAVYNVILGTPWIHQMQAIPSTYHQCVKFPTHNGIFTLRAPKEAKTPSRSYEESELCRTEMVNIDESDPTRCVGVGAEISPSIRLELIALLKRNSKTFAWSIEDMKGIDPAITAHELNVDPTFKPVKQKRRKLGPERARAVNEEVEKLLKAGQIIEVKYPEWLANPVVVKKKNGKWRVCVDYTDLNKACPKDSYPLPHIDRLVEATSGNGLLSFMDAFSGYNQILMHKDDQEKTSFVTDRGTYCYKVMSFGLKNAGATYQRFVNKMLADQIGRTVEVYIDDMLVKSLKPEDHVEHLSKCFDVLNTYGMKLNPTKCTFGVTSGEFLGYVVTKRGIEANPKQIRAILELPSPRNAREVQRLTGRIAALNRFISRSTDKCLPFYNLLKRRAQFDWDKDSEEAFEKLKDYLSTPPILVKPEVGETLYLYIAVSDHAVSSVLVREDRGEQRPIFYTSKSLVEAETRYPVIEKAALAVVTSARKLRPYFQSHTIAVLTDQPLRVALHSPSQSGRMTKWAVELSEYDIDFRPRPAMKSQVLADFLIELPLQSAERAVSGNRGEEWSLYVDGSSSARGSGIGIRLVSPTAEVLEQSFRLRFVATNNVAEYEVLIAGLRLAAGMQITTIHAFTDSQLIAGQLSGEYEAKNEKMDAYLKIVQLMTKDFENFKLSKIPRGDNAPADALAALALTSDSDLRRIIPVESIDKPSIDSTDAVEIVNTIRSSNAPDPADPTDWRVEIRDYLSDGTLPSDKWTARRLRIKAAKYTLMKEHLLKVSAFGAMLNCLHGTEINEIMKETHEGAAGNHSGGRALALKLKKLGFYWPTMISDCKTFTAKCEQCQRHAPTIHQPTELLRAGVAPYPFMRWAMDIVGPMPASRQKRFILVMTDYFTKWVEAESYATIRANDVQNFVWKFIICRHGLPYEIITDNGSQFISLSFENFCASWKIRLNKSTPRYPQGNGQAEATNKTILSGLKKRLDEKKGAWADELDGVLWSYRTTPRSATDQTPFAHAYGMEAMAPAEVGYSSLRRSMMVKNPELNDRMMLDRLDDLEEIRNAALCRIQNYQLAAAKHYNQKVHNRHFDVGDLVLRKVFENTAEINAGKLGANWEGSYQVSKIVRPGDYELLTMSGTAVPRTWNSMHLKRYYY

SEQ ID NO: 86739 - protein, 1791 aa, Arabidopsis thaliana; identical to SEQ ID NO: 73599
  peptide (1)..(1791): Ceres Seq. ID no. 12693068
  misc_feature (812)..(981): Pfam Name: Reverse transcriptase (RNA-dependent DNA polymerase) Pfam Description: Reverse transcriptase (RNA-dependent DNA
  misc_feature (782)..(1102): Homolog of NCBI NO: 15225653 NR Description: putative retroelement pol polyprotein; protein At2g14400.1 [Arabidopsis thaliana] >gi|25411562|pir||G84516
  misc_feature (123)..(378): Homolog of NCBI NO: 15225653 NR Description: putative retroelement pol polyprotein; protein At2g14400.1 [Arabidopsis thaliana] >gi|25411562|pir||G84516
  misc_feature (1564)..(1782): Homolog of NCBI NO: 15225653 NR Description: putative retroelement pol polyprotein; protein At2g14400.1 [Arabidopsis thaliana] >gi|25411562|pir||G84516
  misc_feature (1430)..(1542): Homolog of NCBI NO: 15225653 NR Description: putative retroelement pol polyprotein; protein At2g14400.1 [Arabidopsis thaliana] >gi|25411562|pir||G84516
  misc_feature (1280)..(1376): Homolog of NCBI NO: 15225653 NR Description: putative retroelement pol polyprotein; protein At2g14400.1 [Arabidopsis thaliana] >gi|25411562|pir||G84516
  misc_feature (549)..(633): Homolog of NCBI NO: 15225653 NR Description: putative retroelement pol polyprotein; protein At2g14400.1 [Arabidopsis thaliana] >gi|25411562|pir||G84516
  misc_feature (711)..(1790): Homolog of NCBI NO: 4378066 NR Description: polyprotein [Sorghum bicolor]
  misc_feature (172)..(487): Homolog of NCBI NO: 4378066 NR Description: polyprotein [Sorghum bicolor]
  misc_feature (464)..(706): Homolog of NCBI NO: 4378066 NR Description: polyprotein [Sorghum bicolor]
  misc_feature (710)..(1695): Homolog of NCBI NO: 20161451 NR Description: putative polyprotein [Oryza sativa (japonica

SEQ ID NO: 86740 - protein, 1713 aa, Arabidopsis thaliana; identical to SEQ ID NO: 73600
  peptide (1)..(1713): Ceres Seq. ID no. 12693069
  misc_feature (734)..(903): Pfam Name: Reverse transcriptase (RNA-dependent DNA polymerase) Pfam Description: Reverse transcriptase (RNA-dependent DNA
  misc_feature (704)..(1024): Homolog of NCBI NO: 15225653 NR Description: putative retroelement pol polyprotein; protein At2g14400.1 [Arabidopsis thaliana] >gi|25411562|pir||G84516
  misc_feature (45)..(300): Homolog of NCBI NO: 15225653 NR Description: putative retroelement pol polyprotein; protein At2g14400.1 [Arabidopsis thaliana] >gi|25411562|pir||G84516
  misc_feature (1486)..(1704): Homolog of NCBI NO: 15225653 NR Description: putative retroelement pol polyprotein; protein At2g14400.1 [Arabidopsis thaliana] >gi|25411562|pir||G84516
  misc_feature (1352)..(1464): Homolog of NCBI NO: 15225653 NR Description: putative retroelement pol polyprotein; protein At2g14400.1 [Arabidopsis thaliana] >gi|25411562|pir||G84516
  misc_feature (1202)..(1298): Homolog of NCBI NO: 15225653 NR Description: putative retroelement pol polyprotein; protein At2g14400.1 [Arabidopsis thaliana] >gi|25411562|pir||G84516
  misc_feature (471)..(555): Homolog of NCBI NO: 15225653 NR Description: putative retroelement pol polyprotein; protein At2g14400.1 [Arabidopsis thaliana] >gi|25411562|pir||G84516
  misc_feature (633)..(1712): Homolog of NCBI NO: 4378066 NR Description: polyprotein [Sorghum bicolor]
  misc_feature (94)..(409): Homolog of NCBI NO: 4378066 NR Description: polyprotein [Sorghum bicolor]
  misc_feature (386)..(628): Homolog of NCBI NO: 4378066 NR Description: polyprotein [Sorghum bicolor]
  misc_feature (632)..(1617): Homolog of NCBI NO: 20161451 NR Description: putative polyprotein [Oryza sativa (japonica

SEQ ID NO: 86741 - DNA, 4650 bp, Arabidopsis thaliana
  misc_feature (1)..(4650): Ceres Seq. ID no. 12693077
  misc_feature: MA Experiment ID: 20001248 Result: Up-regulated in Transcription
  misc_feature: MA Experiment 20001248 PARAMETER Experiment Name: At_Far-red-induction_P Parameter: Age (day) Value: 7
  misc_feature: MA Experiment 20001248 PARAMETER Experiment Name: At_Far-red-induction_P Parameter: Light Value: Far-red vs. White
  misc_feature: MA Experiment 20001248 PARAMETER Experiment Name: At_Far-red-induction_P Parameter: Organism Value: A. thaliana
  misc_feature: MA Experiment 20001248 PARAMETER Experiment Name: At_Far-red-induction_P Parameter: Plant Line Value: Columbia
  misc_feature: MA Experiment 20001248 PARAMETER Experiment Name: At_Far-red-induction_P Parameter: Timepoint (hr) Value: 4
  misc_feature: MA Experiment 20001248 PARAMETER Experiment Name: At_Far-red-induction_P Parameter: Tissue Value: Whole Plant
  misc_feature: MA Experiment ID: 20001450 Result: Up-regulated in Transcription
  misc_feature: MA Experiment 20001450 PARAMETER Experiment Name: At_Far-red-induction_P Parameter: Age (day) Value: 7
  misc_feature: MA Experiment 20001450 PARAMETER Experiment Name: At_Far-red-induction_P Parameter: Light Value: Far-red vs. White
  misc_feature: MA Experiment 20001450 PARAMETER Experiment Name: At_Far-red-induction_P Parameter: Organism Value: A. thaliana
  misc_feature: MA Experiment 20001450 PARAMETER Experiment Name: At_Far-red-induction_P Parameter: Plant Line Value: Columbia
  misc_feature: MA Experiment 20001450 PARAMETER Experiment Name: At_Far-red-induction_P Parameter: Timepoint (hr) Value: 8
  misc_feature: MA Experiment 20001450 PARAMETER Experiment Name: At_Far-red-induction_P Parameter: Tissue Value: Whole Plant
atggcgtatcctgagagatctctcattgttgatcctagaagtggtttctgcaaatcaaactctacattctatagcaagcgccaaccattaagtctcccgccaaatctttcgcgtgacgtcaccacattcatctcctctcagccacaccgtggcaaaaccgcctttatcgacgctgccacaggccagtgcttaaccttctccgatctctggagagccgtcgatcgcgtcgccgactgtctatatcatgaagtcggaatacgaagaggcgacgtcgtcctcatcctttctccaaactccatcttcattcccgttgtttgcctctccgtcatgtctctcggcgccgttttcaccaccgccaacactctcaatacttccggtgaaatctccaaacagattgccgacagtaatccaactctcgtcttcactacgcgccagctggcaccaaaactccccgtcgctatctccgtcgttctcaccgacgacgaagtttaccaggagctcactagcgcaatcagagtcgttgggattttaagcgagatggtgaagaaagaaccgagtgggcaacgagtcagggaccgagtcaaccaggacgacacggcgatgatgctttactcgtcgggaaccacgggaccgagcaaaggagtgatctcgtctcaccggaatttaacagctcacgtggctagattcatatcggataatttgaaacgagacgatattttcatctgtaccgtcccgatgttccacacctacggtttattgaccttcgctatgggcaccgtagcattgggttcaacggtggtgatcctccggagatttcagctccacgatatgatggatgcggtggagaagcaccgagccacagctctggctttggcgccacctgttttggtagctatgattaacgacgcagatctgatcaaggctaagtacgatctgagctcactgaaaacggtgaggtgtggtggagcgccgttgagcaaggaggtgacggaagggtttctagagaaatatccgacggttgatatactgcaggggtatgctttgacggaatccaacggcggaggggctttcacgaattcagcggaggagagccggagatatggcacggcggggacgttgacgtctgatgtggaggcgaggatcgtggatccgaatacgggtcggttcatgggaattaaccaaacgggagagctctggctcaagggcccttctatttctaaaggttattttaaaaaccaagaagctacaaatgaaaccattaatttagagggatggctaaaaactggagatctttgctacatcgatgaagatgggtttctttttgttgtggatcgattgaaagaactgataaaatacaaaggctatcaggtgcctccagctgaactagaagctcttctgattactcatccggacattctcgatgccgccgttattccttttccggacaaagaagcaggacaatatccaatggcttacgtggttcgaaaacacgagagcaatctctctgagaaacaagtcattgacttcatctctaagcaggtagcaccatataagaagataagaaaggtctcatttataaactccataccaaaaactgcatccgagaagttgtacttagagaagagcttcatattaagaaatatggcgtatcctgagagagatctcattgttgatcctagaagcggtttctgcaaatcaaactctacattctatagcaagcgaaacccattatgtctcccgccaaatccgtcgcttgacgtcacaactttcatatcatctcaaccgcaacgcggcaccaccgccttcatcgacgcctccacgggccaccgcttaaccttctccgatctctggagagtcgttgatcgcgtcgctgactgtctatatcatgaagtcggaatacgaagaggcgacgtcgtcctcatcctctctccaaattcaatctacattcccgtcgtttgcctctccgtcatgtctctcggcgccgtcgtcaccaccgccaacactctcaacacctccggcgaaatctccaaacagatcgcccaaagtaatccaactctcgtcttcaccacgagccagctggcacccaaactcgcagccgcaatctccgtcgtcctcaccgacgaagaagacgagaagcgagtggagctcactagtggagtcagagtcgttgggattttgagcgagatgatgaagaaagaaacgagtggtcaacgagtcagagaccgagtcaaccaggacgacacggcgatgatgctttactcgtcgggaaccacagggacgagcaaaggagtgatctcgtctcaccggaatttaacagcttacgttgcgaaatacatcgacgataaatggaaacgagacgagatattcgtatgtaccgtgccgatgttccactccttcgggttattggcgttcgcaatgggctccgtagcatcgggttcaacggtggtgattctccggagattcgggctcgacgatatgatgcaagcggtggagaagtacaaagccacgattctgagtttggctccaccggttttggtagctatgattaacggtgcagatcagctcaaggccaagtacgatttgacctccctgagaaaggttaggtgtggtggagcaccgttgagcaaggaggttatggatagcttcctagagaaatatccaacggttaatatttttcaaggatatgcgttgactgagtcgcacggttcaggagcttcgacggaatctgtggaggagagtctgaaatacggtgcggttgggttgttgtcgtccggtattgaagcgaggattgtggatccggatacgggtcgggtcatgggtgtgaaccaacccggtgagctctggctcaagggtccttctatttctaaagatgggtttctatttgttgtggatcgactgaaagaattgatcaaatacaaaggctatcaggtgcctccagctgaactagaggctcttttgatcgctcatccacacattcttgatgctgctgttattccgtttccggatagagaagccggacaatatccgatggcttatgtagcccgaaagcccgagagcaatctctccgaaaaagaagttattgacttcatctctaatcaggtggcaccgtataagaaaataagaaagcctcatcgcggcaaaaccgtattcgtcgacgccgtaaccggtcgtcgactaagcttccctgagctctggctcggtgtcgaaagagtcgcgggttgtctttacgcattaggtgtacgcaaaggaaatgtcgtcattatactctctccaaactcaatcctcttcccgatcgtctccctctccgtaatgtcactcggcgcaatcataaccaccgctaatccgatcaacacgtccgacgaaatctccaaacagataggcgattcgcgtcctgttctcgccttcaccacatgcaaactcgtctccaaactcgccgccgcgtcgaattttaatctcccggtggttctcatggacgactaccacgttccttcgcaaagttacggtgaccgcgtgaaactagtcgggaggttagagacgatgattgaaacagaaccgagtgagtcacgagttaagcaacgagtcaaccaggacgacacggcggctctgttatactcatcaggtacgacggggacgagtaaaggagtaatgctgagtcaccgtaacctaatcgcattggtacaagcataccgggcccggttcggtttagagcagcgaaccatttgcacaatcccaatgtgtcacatcttcggattcggtggtttcgcgacggggctaatcgcgttaggatggacaatcgttgttcttcctaaattcgacatggctaagcttctctcggcggtggagactcatcgttcttcgtacctttctcttgtaccgccgattgtagtagctatggttaacggagcaaatgagattaattccaagtatgatctgagctcgttgcacactgtggtggctggaggagctccgttgagtagagaggtgacggagaagttcgttgagaattatcccaaggttaagatcctacaagggtatggtttgactgagtcaacggctatagctgcttctatgtttaataaagaggagactaagaggtatggagcttctggcttactggctccgaatgtggaaggtaagattgtggatccggatacgggtcgggttttgggtgtgaatcaaacgggtgagctgtggattcgaagtcctactgtgatgaaaggttatttcaagaataaagaagctactgcttctaccattgattcagaaggatggttgaaaactggagatttgtgttacattgacggtgatgggtttgtctttgttgttgatagattaaaggagctcatcaaatgcaatggttatcaggttgctccagctgaactagaggcattgttgcttgctcatccagagattgctgatgcagcagtaatacccatccctgacatgaaagctgggcaatatccaatggcatatatcgtaagaaaagttggaagtaacttatccgagagcgaaatcatgggatttgtcgcaaaacaggtatcaccgtacaagaagattcgcaaagtcacatttttggcttcaatccccaaaaatccttcgggcaagattttaagaagagaacttacaaagctcacaacttcaaaactctag

SEQ ID NO: 86742 - protein, 1549 aa, Arabidopsis thaliana
  peptide (1)..(1549): Ceres Seq. ID no. 12693078
  misc_feature (1060)..(1476): Pfam Name: AMP-binding enzyme Pfam Description: AMP-binding enzyme
  misc_feature (1002)..(1549): Homolog of NCBI NO: 15217956 NR Description: hypothetical protein; protein id: At1g20480.1
  misc_feature (1002)..(1549): Homolog of NCBI NO: 29888143 NR Description: 4-coumarate-CoA ligase-like protein [Arabidopsis
  misc_feature (548)..(1042): Homolog of NCBI NO: 15217958 NR Description: hypothetical protein; protein id: At1g20490.1
  misc_feature (1)..(407): Homolog of NCBI NO: 15217958 NR Description: hypothetical protein; protein id: At1g20490.1
  misc_feature (423)..(544): Homolog of NCBI NO: 15217958 NR Description: hypothetical protein; protein id: At1g20490.1
  misc_feature (1422)..(1549): Homolog of NCBI NO: 15217958 NR Description: hypothetical protein; protein id: At1g20490.1
  misc_feature (1)..(408): Homolog of NCBI NO: 30686860 NR Description: 4-coumarate:CoA ligase 1 (4-coumaroyl-CoA
  misc_feature (1)..(544): Homolog of NCBI NO: 29888141 NR Description: 4-coumarate-CoA ligase-like protein [Arabidopsis
  misc_feature (1)..(544): Homolog of NCBI NO: 30693203 NR Description: 4-coumarate:CoA ligase (4-coumaroyl-CoA synthase)
  misc_feature (1)..(544): Homolog of NCBI NO: 10177788 NR Description: AMP-binding protein-like [Arabidopsis thaliana]
MAYPERSLIVDPRSGFCKSNSTFYSKRQPLSLPPNLSRDVTTFISSQPHRGKTAFIDAATGQCLTFSDLWRAVDRVADCLYHEVGIRRGDVVLILSPNSIFIPVVCLSVMSLGAVFTTANTLNTSGEISKQIADSNPTLVFTTRQLAPKLPVAISVVLTDDEVYQELTSAIRVVGILSEMVKKEPSGQRVRDRVNQDDTAMMLYSSGTTGPSKGVISSHRNLTAHVARFISDNLKRDDIFICTVPMFHTYGLLTFAMGTVALGSTVVILRRFQLHDMMDAVEKHRATALALAPPVLVAMINDADLIKAKYDLSSLKTVRCGGAPLSKEVTEGFLEKYPTVDILQGYALTESNGGGAFTNSAEESRRYGTAGTLTSDVEARIVDPNTGRFMGINQTGELWLKGPSISKGYFKNQEATNETINLEGWLKTGDLCYIDEDGFLFVVDRLKELIKYKGYQVPPAELEALLITHPDILDAAVIPFPDKEAGQYPMAYVVRKHESNLSEKQVIDFISKQVAPYKKIRKVSFINSIPKTASEKLYLEKSFILRNMAYPERDLIVDPRSGFCKSNSTFYSKRNPLCLPPNPSLDVTTFISSQPQRGTTAFIDASTGHRLTFSDLWRVVDRVADCLYHEVGIRRGDVVLILSPNSIYIPVVCLSVMSLGAVVTTANTLNTSGEISKQIAQSNPTLVFTTSQLAPKLAAAISVVLTDEEDEKRVELTSGVRVVGILSEMMKKETSGQRVRDRVNQDDTAMMLYSSGTTGTSKGVISSHRNLTAYVAKYIDDKWKRDEIFVCTVPMFHSFGLLAFAMGSVASGSTVVILRRFGLDDMMQAVEKYKATILSLAPPVLVAMINGADQLKAKYDLTSLRKVRCGGAPLSKEVMDSFLEKYPTVNIFQGYALTESHGSGASTESVEESLKYGAVGLLSSGIEARIVDPDTGRVMGVNQPGELWLKGPSISKDGFLFVVDRLKELIKYKGYQVPPAELEALLIAHPHILDAAVIPFPDREAGQYPMAYVARKPESNLSEKEVIDFISNQVAPYKKIRKPHRGKTVFVDAVTGRRLSFPELWLGVERVAGCLYALGVRKGNVVIILSPNSILFPIVSLSVMSLGAIITTANPINTSDEISKQIGDSRPVLAFTTCKLVSKLAAASNFNLPVVLMDDYHVPSQSYGDRVKLVGRLETMIETEPSESRVKQRVNQDDTAALLYSSGTTGTSKGVMLSHRNLIALVQAYRARFGLEQRTICTIPMCHIFGFGGFATGLIALGWTIVVLPKFDMAKLLSAVETHRSSYLSLVPPIVVAMVNGANEINSKYDLSSLHTVVAGGAPLSREVTEKFVENYPKVKILQGYGLTESTAIAASMFNKEETKRYGASGLLAPNVEGKIVDPDTGRVLGVNQTGELWIRSPTVMKGYFKNKEATASTIDSEGWLKTGDLCYIDGDGFVFVVDRLKELIKCNGYQVAPAELEALLLAHPEIADAAVIPIPDMKAGQYPMAYIVRKVGSNLSESEIMGFVAKQVSPYKKIRKVTFLASIPKNPSGKILRRELTKLTTSKL

SEQ ID NO: 86743 - protein, 1440 aa, Arabidopsis thaliana
  peptide (1)..(1440): Ceres Seq. ID no. 12693079
  misc_feature (951)..(1367): Pfam Name: AMP-binding enzyme Pfam Description: AMP-binding enzyme
  misc_feature (893)..(1440): Homolog of NCBI NO: 15217956 NR Description: hypothetical protein; protein id: At1g20480.1
  misc_feature (893)..(1440): Homolog of NCBI NO: 29888143 NR Description: 4-coumarate-CoA ligase-like protein [Arabidopsis
  misc_feature (439)..(933): Homolog of NCBI NO: 15217958 NR Description: hypothetical protein; protein id: At1g20490.1
  misc_feature (1)..(298): Homolog of NCBI NO: 15217958 NR Description: hypothetical protein; protein id: At1g20490.1
  misc_feature (314)..(435): Homolog of NCBI NO: 15217958 NR Description: hypothetical protein; protein id: At1g20490.1
  misc_feature (1313)..(1440): Homolog of NCBI NO: 15217958 NR Description: hypothetical protein; protein id: At1g20490.1
  misc_feature (1)..(299): Homolog of NCBI NO: 30686860 NR Description: 4-coumarate:CoA ligase 1 (4-coumaroyl-CoA
  misc_feature (1)..(435): Homolog of NCBI NO: 29888141 NR Description: 4-coumarate-CoA ligase-like protein [Arabidopsis
  misc_feature (1)..(435): Homolog of NCBI NO: 30693203 NR Description: 4-coumarate:CoA ligase (4-coumaroyl-CoA synthase)
  misc_feature (1)..(435): Homolog of NCBI NO: 10177788 NR Description: AMP-binding protein-like [Arabidopsis thaliana]
MSLGAVFTTANTLNTSGEISKQIADSNPTLVFTTRQLAPKLPVAISVVLTDDEVYQELTSAIRVVGILSEMVKKEPSGQRVRDRVNQDDTAMMLYSSGTTGPSKGVISSHRNLTAHVARFISDNLKRDDIFICTVPMFHTYGLLTFAMGTVALGSTVVILRRFQLHDMMDAVEKHRATALALAPPVLVAMINDADLIKAKYDLSSLKTVRCGGAPLSKEVTEGFLEKYPTVDILQGYALTESNGGGAFTNSAEESRRYGTAGTLTSDVEARIVDPNTGRFMGINQTGELWLKGPSISKGYFKNQEATNETINLEGWLKTGDLCYIDEDGFLFVVDRLKELIKYKGYQVPPAELEALLITHPDILDAAVIPFPDKEAGQYPMAYVVRKHESNLSEKQVIDFISKQVAPYKKIRKVSFINSIPKTASEKLYLEKSFILRNMAYPERDLIVDPRSGFCKSNSTFYSKRNPLCLPPNPSLDVTTFISSQPQRGTTAFIDASTGHRLTFSDLWRVVDRVADCLYHEVGIRRGDVVLILSPNSIYIPVVCLSVMSLGAVVTTANTLNTSGEISKQIAQSNPTLVFTTSQLAPKLAAAISVVLTDEEDEKRVELTSGVRVVGILSEMMKKETSGQRVRDRVNQDDTAMMLYSSGTTGTSKGVISSHRNLTAYVAKYIDDKWKRDEIFVCTVPMFHSFGLLAFAMGSVASGSTVVILRRFGLDDMMQAVEKYKATILSLAPPVLVAMINGADQLKAKYDLTSLRKVRCGGAPLSKEVMDSFLEKYPTVNIFQGYALTESHGSGASTESVEESLKYGAVGLLSSGIEARIVDPDTGRVMGVNQPGELWLKGPSISKDGFLFVVDRLKELIKYKGYQVPPAELEALLIAHPHILDAAVIPFPDREAGQYPMAYVARKPESNLSEKEVIDFISNQVAPYKKIRKPHRGKTVFVDAVTGRRLSFPELWLGVERVAGCLYALGVRKGNVVIILSPNSILFPIVSLSVMSLGAIITTANPINTSDEISKQIGDSRPVLAFTTCKLVSKLAAASNFNLPVVLMDDYHVPSQSYGDRVKLVGRLETMIETEPSESRVKQRVNQDDTAALLYSSGTTGTSKGVMLSHRNLIALVQAYRARFGLEQRTICTIPMCHIFGFGGFATGLIALGWTIVVLPKFDMAKLLSAVETHRSSYLSLVPPIVVAMVNGANEINSKYDLSSLHTVVAGGAPLSREVTEKFVENYPKVKILQGYGLTESTAIAASMFNKEETKRYGASGLLAPNVEGKIVDPDTGRVLGVNQTGELWIRSPTVMKGYFKNKEATASTIDSEGWLKTGDLCYIDGDGFVFVVDRLKELIKCNGYQVAPAELEALLLAHPEIADAAVIPIPDMKAGQYPMAYIVRKVGSNLSESEIMGFVAKQVSPYKKIRKVTFLASIPKNPSGKILRRELTKLTTSKL

SEQ ID NO: 86744 - protein, 1370 aa, Arabidopsis thaliana
  peptide (1)..(1370): Ceres Seq. ID no. 12693080
  misc_feature (881)..(1297): Pfam Name: AMP-binding enzyme Pfam Description: AMP-binding enzyme
  misc_feature (823)..(1370): Homolog of NCBI NO: 15217956 NR Description: hypothetical protein; protein id: At1g20480.1
  misc_feature (823)..(1370): Homolog of NCBI NO: 29888143 NR Description: 4-coumarate-CoA ligase-like protein [Arabidopsis
  misc_feature (369)..(863): Homolog of NCBI NO: 15217958 NR Description: hypothetical protein; protein id: At1g20490.1
  misc_feature (1)..(228): Homolog of NCBI NO: 15217958 NR Description: hypothetical protein; protein id: At1g20490.1
  misc_feature (244)..(365): Homolog of NCBI NO: 15217958 NR Description: hypothetical protein; protein id: At1g20490.1
  misc_feature (1243)..(1370): Homolog of NCBI NO: 15217958 NR Description: hypothetical protein; protein id: At1g20490.1
  misc_feature (1)..(229): Homolog of NCBI NO: 30686860 NR Description: 4-coumarate:CoA ligase 1 (4-coumaroyl-CoA
  misc_feature (1)..(365): Homolog of NCBI NO: 29888141 NR Description: 4-coumarate-CoA ligase-like protein [Arabidopsis
  misc_feature (1)..(365): Homolog of NCBI NO: 30693203 NR Description: 4-coumarate:CoA ligase (4-coumaroyl-CoA synthase)
  misc_feature (1)..(365): Homolog of NCBI NO: 10177788 NR Description: AMP-binding protein-like [Arabidopsis thaliana]
MVKKEPSGQRVRDRVNQDDTAMMLYSSGTTGPSKGVISSHRNLTAHVARFISDNLKRDDIFICTVPMFHTYGLLTFAMGTVALGSTVVILRRFQLHDMMDAVEKHRATALALAPPVLVAMINDADLIKAKYDLSSLKTVRCGGAPLSKEVTEGFLEKYPTVDILQGYALTESNGGGAFTNSAEESRRYGTAGTLTSDVEARIVDPNTGRFMGINQTGELWLKGPSISKGYFKNQEATNETINLEGWLKTGDLCYIDEDGFLFVVDRLKELIKYKGYQVPPAELEALLITHPDILDAAVIPFPDKEAGQYPMAYVVRKHESNLSEKQVIDFISKQVAPYKKIRKVSFINSIPKTASEKLYLEKSFILRNMAYPERDLIVDPRSGFCKSNSTFYSKRNPLCLPPNPSLDVTTFISSQPQRGTTAFIDASTGHRLTFSDLWRVVDRVADCLYHEVGIRRGDVVLILSPNSIYIPVVCLSVMSLGAVVTTANTLNTSGEISKQIAQSNPTLVFTTSQLAPKLAAAISVVLTDEEDEKRVELTSGVRVVGILSEMMKKETSGQRVRDRVNQDDTAMMLYSSGTTGTSKGVISSHRNLTAYVAKYIDDKWKRDEIFVCTVPMFHSFGLLAFAMGSVASGSTVVILRRFGLDDMMQAVEKYKATILSLAPPVLVAMINGADQLKAKYDLTSLRKVRCGGAPLSKEVMDSFLEKYPTVNIFQGYALTESHGSGASTESVEESLKYGAVGLLSSGIEARIVDPDTGRVMGVNQPGELWLKGPSISKDGFLFVVDRLKELIKYKGYQVPPAELEALLIAHPHILDAAVIPFPDREAGQYPMAYVARKPESNLSEKEVIDFISNQVAPYKKIRKPHRGKTVFVDAVTGRRLSFPELWLGVERVAGCLYALGVRKGNVVIILSPNSILFPIVSLSVMSLGAIITTANPINTSDEISKQIGDSRPVLAFTTCKLVSKLAAASNFNLPVVLMDDYHVPSQSYGDRVKLVGRLETMIETEPSESRVKQRVNQDDTAALLYSSGTTGTSKGVMLSHRNLIALVQAYRARFGLEQRTICTIPMCHIFGFGGFATGLIALGWTIVVLPKFDMAKLLSAVETHRSSYLSLVPPIVVAMVNGANEINSKYDLSSLHTVVAGGAPLSREVTEKFVENYPKVKILQGYGLTESTAIAASMFNKEETKRYGASGLLAPNVEGKIVDPDTGRVLGVNQTGELWIRSPTVMKGYFKNKEATASTIDSEGWLKTGDLCYIDGDGFVFVVDRLKELIKCNGYQVAPAELEALLLAHPEIADAAVIPIPDMKAGQYPMAYIVRKVGSNLSESEIMGFVAKQVSPYKKIRKVTFLASIPKNPSGKILRRELTKLTTSKL

SEQ ID NO: 86745 - DNA, 1095 bp, Arabidopsis thaliana
  misc_feature (1)..(1095): Ceres Seq. ID no. 12693154
  misc_feature: MA Experiment ID: 20000227 Result: Down-regulated in Transcription
  misc_feature: MA Experiment 20000227 PARAMETER Experiment Name: At_Root-Tips-vs-Tops_P Parameter: Tissue Value: Root Tips vs. Root Tops
  misc_feature: MA Experiment ID: 20000438 Result: Up-regulated in Transcription
  misc_feature: MA Experiment 20000438 PARAMETER Experiment Name: At_Shoots__P Parameter: Age (day) Value: 14
  misc_feature: MA Experiment 20000438 PARAMETER Experiment Name: At_Shoots__P Parameter: Tissue Value: Shoots vs. Whole Plant
atggcatccattgattctctccaattccattctctctgcaatctccaggtaaaaatcgaacccatctcttcttcttcacttacacttataccgtcgtcgattggaagagccaagctccagaatccttcaagtttggttattttcagacggagacccgtaaatctgaattgggttcaattcgaaactaaaggaagtttcgtgtgtaaagcgattggtgattcctcgactccagatgaagatattcagaacactcaaagtgatgataatgttgttgttgttactgctacgactcagagtgacattccccatgattccgagtattcaatttcgaggtttcgaagtatggttaccacactccctcctgttgtcttcctgatgaagaagtgctcagtgaacagcatttggattggggtctgcatcacggctactgttttggtcgctgcgattagggcttatgtagtcagaaagtcaagagataatcagcgtgctggctctgttgctgatcttgtgagacgtggccagctgaggtctggtgatagaagaggcatctccaaatctcttaactacgaggacccattcaacaacccttttgtgaaacttgataaaggaagctcaacggtagagatgtgcgggaaagtttatcggctagctccagtcacacttacagagaaagaacaaactattcatcagaaaagaaggtcaagagcttaccaatggaagcgaccaacgatttttctcaaagaaggggactcgataccacctgatgttgatcccgatacagtcagatggatcccggccaatcatccgtttgccaccacagttagcgatatcgatcaagaccttgcccagaataatgtctaccagaagcaaggtgttcctttccggattcgagctgagcatgaagctatgcagaaaaagcttgaagctttacaaaatgaggagaaattgaacaatctgagtattgacagtcaaaatgccagagatttccagaggccatacaagttctcagcgaagctcgaaggcgagaatatccagaagaattctcaggagaatcatacaggcaattcatcctctgaggaaacgcacaagtcctga

SEQ ID NO: 86746 - protein, 364 aa, Arabidopsis thaliana
  peptide (1)..(364): Ceres Seq. ID no. 12693155
  misc_feature (1)..(364): Homolog of NCBI NO: 25373024 NR Description: protein F2D10.35 [imported] - Arabidopsis >gi|8886939|gb|AAF80625.1|AC069251_18 F2D10.35 [Arabidopsis
  misc_feature (1)..(364): Homolog of NCBI NO: 15218043 NR Description: hypothetical protein; protein id: At1g20830.1 thaliana] >gi|26452945|dbj|BAC43549.1| unknown protein
MASIDSLQFHSLCNLQVKIEPISSSSLTLIPSSIGRAKLQNPSSLVIFRRRPVNLNWVQFETKGSFVCKAIGDSSTPDEDIQNTQSDDNVVVVTATTQSDIPHDSEYSISRFRSMVTTLPPVVFLMKKCSVNSIWIGVCITATVLVAAIRAYVVRKSRDNQRAGSVADLVRRGQLRSGDRRGISKSLNYEDPFNNPFVKLDKGSSTVEMCGKVYRLAPVTLTEKEQTIHQKRRSRAYQWKRPTIFLKEGDSIPPDVDPDTVRWIPANHPFATTVSDIDQDLAQNNVYQKQGVPFRIRAEHEAMQKKLEALQNEEKLNNLSIDSQNARDFQRPYKFSAKLEGENIQKNSQENHTGNSSSEETHKS

SEQ ID NO: 86747 - protein, 250 aa, Arabidopsis thaliana; identical to SEQ ID NO: 47559
  peptide (1)..(250): Ceres Seq. ID no. 12693156
  misc_feature (1)..(250): Homolog of NCBI NO: 25373024 NR Description: protein F2D10.35 [imported] - Arabidopsis >gi|8886939|gb|AAF80625.1|AC069251_18 F2D10.35 [Arabidopsis
  misc_feature (1)..(250): Homolog of NCBI NO: 15218043 NR Description: hypothetical protein; protein id: At1g20830.1 thaliana] >gi|26452945|dbj|BAC43549.1| unknown protein

SEQ ID NO: 86748 - protein, 239 aa, Arabidopsis thaliana; identical to SEQ ID NO: 47560
  peptide (1)..(239): Ceres Seq. ID no. 12693157
  misc_feature (1)..(239): Homolog of NCBI NO: 25373024 NR Description: protein F2D10.35 [imported] - Arabidopsis >gi|8886939|gb|AAF80625.1|AC069251_18 F2D10.35 [Arabidopsis
  misc_feature (1)..(239): Homolog of NCBI NO: 15218043 NR Description: hypothetical protein; protein id: At1g20830.1 thaliana] >gi|26452945|dbj|BAC43549.1| unknown protein

SEQ ID NO: 86749 - DNA, 1210 bp, Arabidopsis thaliana
  misc_feature (1)..(1210): Ceres Seq. ID no. 12693172
  misc_feature: MA Experiment ID: 108433 Result: Down-regulated in Transcription
  misc_feature: MA Experiment 108433 PARAMETER Experiment Name: At_rhl_Mutant2_cDNA_P Parameter: Age (day) Value: 7
  misc_feature: MA Experiment 108433 PARAMETER Experiment Name: At_rhl_Mutant2_cDNA_P Parameter: Organism Value: A. thaliana
  misc_feature: MA Experiment 108433 PARAMETER Experiment Name: At_rhl_Mutant2_cDNA_P Parameter: Plant Line Value: rhl Mutant vs. wt landsburg
  misc_feature: MA Experiment 108433 PARAMETER Experiment Name: At_rhl_Mutant2_cDNA_P Parameter: Tissue Value: Roots
  misc_feature: MA Experiment ID: 108434 Result: Up-regulated in Transcription
  misc_feature: MA Experiment 108434 PARAMETER Experiment Name: At_Root_Tips_cDNA_P Parameter: Tissue Value: Root Tips
  misc_feature: MA Experiment ID: 108435 Result: Up-regulated in Transcription
  misc_feature: MA Experiment 108435 PARAMETER Experiment Name: At_stm_Mutants_cDNA_P Parameter: Plant Line Value: wt Landsburg vs stm
  misc_feature: MA Experiment 108435 PARAMETER Experiment Name: At_stm_Mutants_cDNA_P Parameter: Tissue Value: Shoot Apical Meristem Region
  misc_feature: MA Experiment ID: 108461 Result: Up-regulated in Transcription
  misc_feature: MA Experiment 108461 PARAMETER Experiment Name: At_Germinating_Seeds_cDNA_P Parameter: Age (day) Value: 1 vs. 0
  misc_feature: MA Experiment 108461 PARAMETER Experiment Name: At_Germinating_Seeds_cDNA_P Parameter: Tissue Value: Germinating Seeds
  misc_feature: MA Experiment ID: 108462 Result: Up-regulated in Transcription
  misc_feature: MA Experiment 108462 PARAMETER Experiment Name: At_Germinating_Seeds_cDNA_P Parameter: Age (day) Value: 2 vs. 0
  misc_feature: MA Experiment 108462 PARAMETER Experiment Name: At_Germinating_Seeds_cDNA_P Parameter: Tissue Value: Germinating Seeds
  misc_feature: MA Experiment ID: 108463 Result: Up-regulated in Transcription
  misc_feature: MA Experiment 108463 PARAMETER Experiment Name: At_Germinating_Seeds_cDNA_P Parameter: Age (day) Value: 3 vs. 0
  misc_feature: MA Experiment 108463 PARAMETER Experiment Name: At_Germinating_Seeds_cDNA_P Parameter: Tissue Value: Germinating Seeds
  misc_feature: MA Experiment ID: 108464 Result: Up-regulated in Transcription
  misc_feature: MA Experiment 108464 PARAMETER Experiment Name: At_Germinating_Seeds_cDNA_P Parameter: Age (day) Value: 4 vs. 0
  misc_feature: MA Experiment 108464 PARAMETER Experiment Name: At_Germinating_Seeds_cDNA_P Parameter: Tissue Value: Germinating Seeds
  misc_feature: MA Experiment ID: 20000113 Result: Down-regulated in Transcription
  misc_feature: MA Experiment 20000113 PARAMETER Experiment Name: At_42deg_Heat_cDNA_P Parameter: Temperature (deg C) Value: 42 vs. 22
  misc_feature: MA Experiment 20000113 PARAMETER Experiment Name: At_42deg_Heat_cDNA_P Parameter: Timepoint (hr) Value: 8
  misc_feature: MA Experiment 20000113 PARAMETER Experiment Name: At_42deg_Heat_cDNA_P Parameter: Tissue Value: Aerial
  misc_feature: MA Experiment ID: 20000179 Result: Up-regulated in Transcription
  misc_feature: MA Experiment 20000179 PARAMETER Experiment Name: At_Germinating_Seeds_P Parameter: Age (hr) Value: 6 vs. 0
  misc_feature: MA Experiment 20000179 PARAMETER Experiment Name: At_Germinating_Seeds_P Parameter: Tissue Value: Germinating Seeds
  misc_feature: MA Experiment ID: 20000180 Result: Up-regulated in Transcription
  misc_feature: MA Experiment 20000180 PARAMETER Experiment Name: At_Germinating_Seeds_P Parameter: Age (hr) Value: 24 vs. 0
  misc_feature: MA Experiment 20000180 PARAMETER Experiment Name: At_Germinating_Seeds_P Parameter: Tissue Value: Germinating Seeds
  misc_feature: MA Experiment ID: 20000234 Result: Up-regulated in Transcription
  misc_feature: MA Experiment 20000234 PARAMETER Experiment Name: At_Siliques_P Parameter: Age (day) Value: 21
  misc_feature: MA Experiment 20000234 PARAMETER Experiment Name: At_Siliques_P Parameter: Organism Value: A. thaliana
  misc_feature: MA Experiment 20000234 PARAMETER Experiment Name: At_Siliques_P Parameter: Plant Line Value: WS
  misc_feature: MA Experiment 20000234 PARAMETER Experiment Name: At_Siliques_P Parameter: Tissue Value: Less Than 5mm Siliques vs. Whole Plant
  misc_feature: MA Experiment ID: 20000527 Result: Down-regulated in Transcription
  misc_feature: MA Experiment 20000527 PARAMETER Experiment Name: At_10percent_PEG_P Parameter: Age (day) Value: 20
  misc_feature: MA Experiment 20000527 PARAMETER Experiment Name: At_10percent_PEG_P Parameter: Organism Value: A. thaliana
  misc_feature: MA Experiment 20000527 PARAMETER Experiment Name: At_10percent_PEG_P Parameter: Plant Line Value: WS
  misc_feature: MA Experiment 20000527 PARAMETER Experiment Name: At_10percent_PEG_P Parameter: Timepoint (day) Value: 20
  misc_feature: MA Experiment 20000527 PARAMETER Experiment Name: At_10percent_PEG_P Parameter: Tissue Value: Whole Plant
  misc_feature: MA Experiment 20000527 PARAMETER Experiment Name: At_10percent_PEG_P Parameter: Treatment Value: 10percent PEG vs. No Treatment
  misc_feature: MA Experiment ID: 20001451 Result: Down-regulated in Transcription
  misc_feature: MA Experiment 20001451 PARAMETER Experiment Name: At_Far-red-induction_P Parameter: Age (day) Value: 7
  misc_feature: MA Experiment 20001451 PARAMETER Experiment Name: At_Far-red-induction_P Parameter: Light Value: Far-red vs. White
  misc_feature: MA Experiment 20001451 PARAMETER Experiment Name: At_Far-red-induction_P Parameter: Organism Value: A. thaliana
  misc_feature: MA Experiment 20001451 PARAMETER Experiment Name: At_Far-red-induction_P Parameter: Plant Line Value: Columbia
  misc_feature: MA Experiment 20001451 PARAMETER Experiment Name: At_Far-red-induction_P Parameter: Timepoint (hr) Value: 24
  misc_feature: MA Experiment 20001451 PARAMETER Experiment Name: At_Far-red-induction_P Parameter: Tissue Value: Whole Plant
  misc_feature: MA Experiment ID: 20001911 Result: Down-regulated in Transcription
  misc_feature: MA Experiment 20001911 PARAMETER Experiment Name: At_Drought_Reproduction_P Parameter: Age (day) Value: 40
  misc_feature: MA Experiment 20001911 PARAMETER Experiment Name: At_Drought_Reproduction_P Parameter: Organism Value: A. thaliana
  misc_feature: MA Experiment 20001911 PARAMETER Experiment Name: At_Drought_Reproduction_P Parameter: Plant Line Value: WS
  misc_feature: MA Experiment 20001911 PARAMETER Experiment Name: At_Drought_Reproduction_P Parameter: Timepoint (day) Value: 10
  misc_feature: MA Experiment 20001911 PARAMETER Experiment Name: At_Drought_Reproduction_P Parameter: Tissue Value: Flowers
  misc_feature: MA Experiment 20001911 PARAMETER Experiment Name: At_Drought_Reproduction_P Parameter: Treatment Value: Drought vs. No Drought
ttcctctctctttccccaaattgaaaacaaaatctgagattcgcgaaggaagaagaagagttgtcttgagagattgatagagatggacaacaatggagttaaacccgctgtttccgccatggaagcctttgaaaagcttgagaaagtaggtgaagggacttatgggaaagtttacagagcaagagagaaagctactgggatgatcgttgctttgaagaagacgcgtctccatgaggatgaagaaggtgttcctcccactactcttcgcgagatctctatcttgcgtatgctcgctcgtgatcctcacatcgttaggttgatggatgttaagcaaggaataaacaaagaaggaaaaactgtactttaccttgttttcgagtatgttgatactgatctcaagaaattcatcagaagctttcgtcaagctggacagaacattccacaaaatactgtcaagtgcttgatgtaccagttatgcaaaggcatggctttttgccatggtcatggagtgttgcacagggatcttaagcctcacaatctcttgatggaccggaagacaatgacgctcaaaatagcagatcttggattagccagagccttcactctcccaatgaaaaagtatacacatgagattctaactctatggtatagagctccggaagttcttcttggagcaacccattactctactggagtggatatgtggtctgttggctgtatttttgctgaactagtgaccaagcaagcaatctttgcgggagactctgagctccaacagctcctccgtatattcaggttgttgggaacaccaaacgaagaagtttggcctggagtaagcaaactcaaggactggcatgaatacccgcaatggaaaccgttgagtctctccacagctgtgccaaacctcgacgaggctggacttgatctcttatctaaaatgctggagtacgagccagcaaaacgaatctcagcaaagaaagctatggagcatccttacttcgatgatttgcctgacaagtcctctctctgaggctctctttataaactctcaataggatattttgttctatctctgtctttgcttgtctcaagcatttatctgctatcttaggatgattgaagtttcaatattcccttttgattgggtctctattcccaattgtataaccttccaacatttttatcaatgaaagaatatatcagtttctct

SEQ ID NO: 86750 - protein, 315 aa, Arabidopsis thaliana; identical to SEQ ID NO: 39620
  peptide (1)..(315): Ceres Seq. ID no. 12693173
  misc_feature (16)..(306): Pfam Name: Protein kinase domain Pfam Description: Protein kinase domain
  misc_feature (1)..(315): Homolog of NCBI NO: 15218072 NR Description: Cyclin-dependent kinase B2;2; protein id: supported by cDNA: 108339. [Arabidopsis thaliana]
  misc_feature (13)..(315): Homolog of NCBI NO: 21536682 NR Description: putative cell division control protein cdc2
  misc_feature (9)..(315): Homolog of NCBI NO: 15223081 NR Description: Cyclin-dependent kinase B2;1; protein id: supported by cDNA: 1241., supported by cDNA: gi_14488070, by cDNA: gi_14717829 [Arabidopsis thaliana]
  misc_feature (9)..(315): Homolog of NCBI NO: 14488071 NR Description: At1g76540/F14G6_14 [Arabidopsis thaliana]
  misc_feature (13)..(315): Homolog of NCBI NO: 21537217 NR Description: putative cell division control protein cdc2
  misc_feature (1)..(315): Homolog of NCBI NO: 7434327 NR Description: probable cdc2-like protein kinase cdc2MsF -
  misc_feature (1)..(315): Homolog of NCBI NO: 11125685 NR Description: B2-type cyclin dependent kinase [Lycopersicon
  misc_feature (7)..(315): Homolog of NCBI NO: 5921447 NR Description: CELL DIVISION CONTROL PROTEIN 2 HOMOLOG D
  misc_feature (13)..(309): Homolog of NCBI NO: 7489567 NR Description: protein kinase cdc2 homolog - rice
  misc_feature (13)..(315): Homolog of NCBI NO: 115920 NR Description: Cell division control protein 2 homolog (P34

SEQ ID NO: 86751 - protein, 303 aa, Arabidopsis thaliana; identical to SEQ ID NO: 39621
  peptide (1)..(303): Ceres Seq. ID no. 12693174
  misc_feature (4)..(294): Pfam Name: Protein kinase domain Pfam Description: Protein kinase domain
  misc_feature (1)..(303): Homolog of NCBI NO: 15218072 NR Description: Cyclin-dependent kinase B2;2; protein id: supported by cDNA: 108339. [Arabidopsis thaliana]
  misc_feature (1)..(303): Homolog of NCBI NO: 21536682 NR Description: putative cell division control protein cdc2
  misc_feature (1)..(303): Homolog of NCBI NO: 15223081 NR Description: Cyclin-dependent kinase B2;1; protein id: supported by cDNA: 1241., supported by cDNA: gi_14488070, by cDNA: gi_14717829 [Arabidopsis thaliana]
  misc_feature (1)..(303): Homolog of NCBI NO: 14488071 NR Description: At1g76540/F14G6_14 [Arabidopsis thaliana]
  misc_feature (1)..(303): Homolog of NCBI NO: 21537217 NR Description: putative cell division control protein cdc2
  misc_feature (1)..(303): Homolog of NCBI NO: 7434327 NR Description: probable cdc2-like protein kinase cdc2MsF -
  misc_feature (1)..(303): Homolog of NCBI NO: 11125685 NR Description: B2-type cyclin dependent kinase [Lycopersicon
  misc_feature (1)..(303): Homolog of NCBI NO: 5921447 NR Description: CELL DIVISION CONTROL PROTEIN 2 HOMOLOG D
  misc_feature (1)..(297): Homolog of NCBI NO: 7489567 NR Description: protein kinase cdc2 homolog - rice
  misc_feature (1)..(303): Homolog of NCBI NO: 115920 NR Description: Cell division control protein 2 homolog (P34

SEQ ID NO: 86752 - protein, 276 aa, Arabidopsis thaliana; identical to SEQ ID NO: 39622
  peptide (1)..(276): Ceres Seq. ID no. 12693175
  misc_feature (1)..(267): Pfam Name: Protein kinase domain Pfam Description: Protein kinase domain
  misc_feature (1)..(276): Homolog of NCBI NO: 15218072 NR Description: Cyclin-dependent kinase B2;2; protein id: supported by cDNA: 108339. [Arabidopsis thaliana]
  misc_feature (1)..(276): Homolog of NCBI NO: 21536682 NR Description: putative cell division control protein cdc2
  misc_feature (1)..(276): Homolog of NCBI NO: 15223081 NR Description: Cyclin-dependent kinase B2;1; protein id: supported by cDNA: 1241., supported by cDNA: gi_14488070, by cDNA: gi_14717829 [Arabidopsis thaliana]
  misc_feature (1)..(276): Homolog of NCBI NO: 14488071 NR Description: At1g76540/F14G6_14 [Arabidopsis thaliana]
  misc_feature (1)..(276): Homolog of NCBI NO: 21537217 NR Description: putative cell division control protein cdc2
  misc_feature (1)..(276): Homolog of NCBI NO: 7434327 NR Description: probable cdc2-like protein kinase cdc2MsF -
  misc_feature (1)..(276): Homolog of NCBI NO: 11125685 NR Description: B2-type cyclin dependent kinase [Lycopersicon
  misc_feature (1)..(276): Homolog of NCBI NO: 5921447 NR Description: CELL DIVISION CONTROL PROTEIN 2 HOMOLOG D
  misc_feature (1)..(270): Homolog of NCBI NO: 7489567 NR Description: protein kinase cdc2 homolog - rice
  misc_feature (1)..(276): Homolog of NCBI NO: 115920 NR Description: Cell division control protein 2 homolog (P34

SEQ ID NO: 86753 - DNA, 4659 bp, Arabidopsis thaliana
  misc_feature (1)..(4659): Ceres Seq. ID no. 12693224
  misc_feature: MA Experiment ID: 20000179 Result: Up-regulated in Transcription
  misc_feature: MA Experiment 20000179 PARAMETER Experiment Name: At_Germinating_Seeds_P Parameter: Age (hr) Value: 6 vs. 0
  misc_feature: MA Experiment 20000179 PARAMETER Experiment Name: At_Germinating_Seeds_P Parameter: Tissue Value: Germinating Seeds
atggatccgaggaattcgagtgcgtggggtgggggtgatggtctcccccttatctcatccatgggaggtgttgaatcaaagaatagatgctgtgtgactgacgacgatggctctattggtacgaagctatgtgagaaacctaaagctgaggagattgatttttctgctcggaaaaagaagttgaaatcgaagaaaggcgggtctgttagctttgctcttctcgatgttgaagatgacaaggaggaagcagaggatggagacgacaaaaatccttctattaggagtgatgaggtggttggagaaacttcaatgagtaagaaaaagaagaaggataagagtggcaagcatggggtatgtgaagaagatgatgatgcggacaagattcttgctcaacatgggataacaactactgtttcaacagggcctgaagcggagatagctctagctcaacctgagcaagttgcatctgcagatggggctgttgacaaggacggagaagaaaagactgttgagtcagctacagcgaagaaaaagaaaaagaagaaggacaaggacaagaaagcaagtgcttctttagctatttcttctgtggaggctaaggaggatagacaagggaagaaagatgtaaagattaaagtagcggaaaagaaagttcctaaacatgttcgagagaagcaagagactcttgcgcggtggaaagaagctgaagatgggaagaagaaggaagaagaagagagattgaggaaagaggaagaggagcgccgtatagaggaagagcgagaaagggaagctgaagagattaggcagaagagaaagatcaggaaaatggagaagaagcaagaaggcctgattctaacagcaaagcaaaagcgtgatgctgctaagaatgaggctttcagaaaaagggtgttgactgatgctggaagtcttcttgttgcagataaaaacggtgattcctcaaaacgtcccatatatggcaataaaaacaaattagcttgcaaaaaagcaaacgatcctgcttctgtccaggctaaaggtgatggggaaaccaaggaaaatcatgcagcagatgaaccatgtactttacctgacttggtttcagttgaagatagaagggttggtattatcgaatcagtagacacagaagagacacatgaatctgttgatgtatcacaagagaatggtgatgaggaagatgtgtgggatgcaaaaactaattttaccatcaagggtgattctgatgatgaggaggaaaaacctcagcctgtgttcaagaaaggtttaaaagacactgcatcaaaggcacatgattcagttcctggcgcagatagaccaacagtgaagcctggaggttctggcaagccaaaaacagctgccaaaaaagctatgcctaaggtggatgatactacccggccgaaagatacttctaaaaaggatgaaggcttagtactgaatgaacttgctaaagaagtagaagaaaatcttcgctctccaatttgctgcatcatgggtcatgttgattctggtaaaacaaagctgttggattgcatcagaggaacaaatgttcaggaaggtgaagctggaggtattactcaacagattggtgcaacctttttccctgcagaaaacatccgtgagaggaccaaagagttacaagctaatgctaaactcaaggtgccaggtatattggttatcgatacacctggacacgagtcattcacaaatctgcggtcaaggggttcaaatttgtgtgaccttgcaattctagtggttgatataatgcgaggtctagagccacaaaccatagaatctcttaatcttttgagaagaaggaatgtaaagttcattattgccttgaataaggtggataggctatatgggtgggaaaaaagcaagaatgctcctataaggaagacaatgatgcaacaaacgggagatgtggttaaggaatttaaaatgaggctaaaccgagttcaaaaccagttccaagaacaaggactcaacagtatgctttattacaagaacagagaaatgggagaaactatcagtatcctacctgctagcgctattagtggggaagggattccagatcttttactgttcttggttcaatgggctcagaaaacgatggtggagaaacttacatatgttgacaaagtgcagtgtaccgtccttgaggtcaaagttattgaaggccatggtattacagttgatgttgttttggtcaacggtgtactccgtgaaggtgatcaaattgttgtttgtgggtcacagggaccaattgtaacaactattagatcattgttgactccttatcctatgaacgagatgcgggtgacgggtacctatatgcctcacagagaagtaaaggctgcgcagggtatcaaaattgctgcacagggccttgaacacgccattgctggtactgccttgcatgtgattggacctaatgaggacatggaagaagccaagaaaaatgccatggaagatattgagtcagttatgaaccgcattgacaaaagtggtgaaggcgtttatgtacaagcatctacattagggtccttggaagcattgctcgagttcttgaagtcctcagatgtaaaaatacctgtcagtggtattggcataggacctgtgcataagaaggatatcatgaaggccggggtaatgctagagaagaaaaaagagtttgcaacgattttggcctttgatgtgaaaataagtgcagaagctcgtgaacttgcagacaaaatgggagtaaaaatcttctgcgatgataccatctattgtctgttcgataagtttaagagttacatagagggtatcaaagaggagaaaaagaaagaaacagcttgtgaagcagttttcccatgtatccttcagattttaccaaaccatatctacaatcagagggacccaattatccttggagttaaagtcaatgatggaatactaaaggttggaactcccatttgcattgttaaaaggattgagaatgtaagagtgtttatggacattgggcgcgtctcatcaattaagaataacaacaacatgccagttgattatgcaaggaaaggacaggaggtggctattaagatcattgcttctaacccagaagaacagaaaatgtttgggaggcactttggtgtagacgacaggcttatcagtcacatttctagtcgatccgtggacgtaatcagaactaattactggagaaataaaggacctattcacagattcagacaacatcgtcgcattttgattttgaatcgattattttacctacactcgtgtatgagccagtcctccggaataagacaacatctccaggagtctctacgaaattcttcggctctcaaaggtattcacgacggtcttttagctctattctctattgagaacctgatttttccggtgaattttgattattgcaaagttggagaatttttgagatttagaagagatactggcttaggattcgtattcatgtcgagcttattacactgtagaaatgtcgtagattgtgcgtttacttcttccactgttcgtcgcattgtcaatttagggtttttagtgggtagaataagaacgttgtgttcagtgtcacaagtgaaatcagagaatctcgaaaagcaaaaaccatgtttggaatcttttacagtttcttatctcgtggattcttgtggactgtctttggaatctgctaaatcgaattccagattcgtcaaattggtttcgtccaagaaaccagactctgttcttgctctcttcaaggaccatggcttcaccaatgaccagatcaccagtgtcatcaaatcctttcctcgtgttctgtcactgagcccggaagatgtaatctcgcccaagctcatgtttttcagttctatcgggttttcgacctcggatactgcgaaaatgatctcttcttccccgaaaatgctatcatatagcttgcacaaaagattgatcccttgctatgattccctcaagagcatactcgttgaggaagaaagtgttgtcaagtgtctcaagcgtggaatcagatgtttctcattgaagattacacattgtgtgtctcttcgtgtctccatttgtagagagcttggagttcctgacaaaagcatcaagtggttggttcaagcgtctccattcacttttttctctcgtgagagaagattcaacgaggtcttaaacagagtttgcagctacggttttgacccgaaaaaggcgggttttgttcacgctatggtagcctttgattgcacgagtgaatcagcaatggagcggaaatttaagttgttccaatgttttggttggtctaaagaagatttcgtcgcagcgatcatgagattcccaaactgtgtgacggtttcagatgagaagataatgtacacattggagtaccttgtaaacaacattggtctgcaagctcgtgacattgttgcaagaccggtggtgttatctctgagcatggagaagagaatcaaaccgaggaaccaggtcatctctttgcttctctccaaaggacttgtgaagaaggaagacatcaactatttcactatactaaagctgaaaagctccgagttcatggataagtttgtgctgaaatatcaggatgagatgccacaacttgtacaaccctttacaagtaatcgatga

SEQ ID NO: 86754 - protein, 1552 aa, Arabidopsis thaliana
  peptide (1)..(1552): Ceres Seq. ID no. 12693225
  misc_feature (1254)..(1531): Pfam Name: mTERF Pfam Description: mTERF
  misc_feature (226)..(1070): Homolog of NCBI NO: 23452071 NR Description: translation initiation factor [Pisum sativum]
  misc_feature (454)..(1093): Homolog of NCBI NO: 18411214 NR Description: putative translation initiation factor IF-2;
  misc_feature (544)..(1070): Homolog of NCBI NO: 21955294 NR Description: putative translation initiation factor IF-2
  misc_feature (1163)..(1552): Homolog of NCBI NO: 15218140 NR Description: hypothetical protein; protein id: At1g21150.1
  misc_feature (594)..(1070): Homolog of NCBI NO: 22330673 NR Description: translation initiation factor eIF-2, putative; id: At1g76810.1, supported by cDNA: gi_19423951 [Arabidopsis
  misc_feature (48)..(1073): Homolog of NCBI NO: 7108770 NR Description: IF2 protein [Drosophila melanogaster]
  misc_feature (48)..(1073): Homolog of NCBI NO: 24656849 NR Description: CG10840-PB [Drosophila melanogaster]
  misc_feature (57)..(1074): Homolog of NCBI NO: 11360327 NR Description: translation initiation factor IF-2 homolog - human (fragment) >gi|6599138|emb|CAB63717.1| hypothetical
  misc_feature (57)..(1074): Homolog of NCBI NO: 14195666 NR Description: TRANSLATION INITIATION FACTOR IF-2
  misc_feature (57)..(1074): Homolog of NCBI NO: 5002645 NR Description: IF2 protein [Homo sapiens]
MDPRNSSAWGGGDGLPLISSMGGVESKNRCCVTDDDGSIGTKLCEKPKAEEIDFSARKKKLKSKKGGSVSFALLDVEDDKEEAEDGDDKNPSIRSDEVVGETSMSKKKKKDKSGKHGVCEEDDDADKILAQHGITTTVSTGPEAEIALAQPEQVASADGAVDKDGEEKTVESATAKKKKKKKDKDKKASASLAISSVEAKEDRQGKKDVKIKVAEKKVPKHVREKQETLARWKEAEDGKKKEEEERLRKEEEERRIEEEREREAEEIRQKRKIRKMEKKQEGLILTAKQKRDAAKNEAFRKRVLTDAGSLLVADKNGDSSKRPIYGNKNKLACKKANDPASVQAKGDGETKENHAADEPCTLPDLVSVEDRRVGIIESVDTEETHESVDVSQENGDEEDVWDAKTNFTIKGDSDDEEEKPQPVFKKGLKDTASKAHDSVPGADRPTVKPGGSGKPKTAAKKAMPKVDDTTRPKDTSKKDEGLVLNELAKEVEENLRSPICCIMGHVDSGKTKLLDCIRGTNVQEGEAGGITQQIGATFFPAENIRERTKELQANAKLKVPGILVIDTPGHESFTNLRSRGSNLCDLAILVVDIMRGLEPQTIESLNLLRRRNVKFIIALNKVDRLYGWEKSKNAPIRKTMMQQTGDVVKEFKMRLNRVQNQFQEQGLNSMLYYKNREMGETISILPASAISGEGIPDLLLFLVQWAQKTMVEKLTYVDKVQCTVLEVKVIEGHGITVDVVLVNGVLREGDQIVVCGSQGPIVTTIRSLLTPYPMNEMRVTGTYMPHREVKAAQGIKIAAQGLEHAIAGTALHVIGPNEDMEEAKKNAMEDIESVMNRIDKSGEGVYVQASTLGSLEALLEFLKSSDVKIPVSGIGIGPVHKKDIMKAGVMLEKKKEFATILAFDVKISAEARELADKMGVKIFCDDTIYCLFDKFKSYIEGIKEEKKKETACEAVFPCILQILPNHIYNQRDPIILGVKVNDGILKVGTPICIVKRIENVRVFMDIGRVSSIKNNNNMPVDYARKGQEVAIKIIASNPEEQKMFGRHFGVDDRLISHISSRSVDVIRTNYWRNKGPIHRFRQHRRILILNRLFYLHSCMSQSSGIRQHLQESLRNSSALKGIHDGLLALFSIENLIFPVNFDYCKVGEFLRFRRDTGLGFVFMSSLLHCRNVVDCAFTSSTVRRIVNLGFLVGRIRTLCSVSQVKSENLEKQKPCLESFTVSYLVDSCGLSLESAKSNSRFVKLVSSKKPDSVLALFKDHGFTNDQITSVIKSFPRVLSLSPEDVISPKLMFFSSIGFSTSDTAKMISSSPKMLSYSLHKRLIPCYDSLKSILVEEESVVKCLKRGIRCFSLKITHCVSLRVSICRELGVPDKSIKWLVQASPFTFFSRERRFNEVLNRVCSYGFDPKKAGFVHAMVAFDCTSESAMERKFKLFQCFGWSKEDFVAAIMRFPNCVTVSDEKIMYTLEYLVNNIGLQARDIVARPVVLSLSMEKRIKPRNQVISLLLSKGLVKKEDINYFTILKLKSSEFMDKFVLKYQDEMPQLVQPFTSNR

SEQ ID NO: 86755 - protein, 1532 aa, Arabidopsis thaliana
  peptide (1)..(1532): Ceres Seq. ID no. 12693226
  misc_feature (1234)..(1511): Pfam Name: mTERF Pfam Description: mTERF
  misc_feature (206)..(1050): Homolog of NCBI NO: 23452071 NR Description: translation initiation factor [Pisum sativum]
  misc_feature (434)..(1073): Homolog of NCBI NO: 18411214 NR Description: putative translation initiation factor IF-2;
  misc_feature (524)..(1050): Homolog of NCBI NO: 21955294 NR Description: putative translation initiation factor IF-2
  misc_feature (1143)..(1532): Homolog of NCBI NO: 15218140 NR Description: hypothetical protein; protein id: At1g21150.1
  misc_feature (574)..(1050): Homolog of NCBI NO: 22330673 NR Description: translation initiation factor eIF-2, putative; id: At1g76810.1, supported by cDNA: gi_19423951 [Arabidopsis
  misc_feature (28)..(1053): Homolog of NCBI NO: 7108770 NR Description: IF2 protein [Drosophila melanogaster]
  misc_feature (28)..(1053): Homolog of NCBI NO: 24656849 NR Description: CG10840-PB [Drosophila melanogaster]
  misc_feature (37)..(1054): Homolog of NCBI NO: 11360327 NR Description: translation initiation factor IF-2 homolog - human (fragment) >gi|6599138|emb|CAB63717.1| hypothetical
  misc_feature (37)..(1054): Homolog of NCBI NO: 14195666 NR Description: TRANSLATION INITIATION FACTOR IF-2
  misc_feature (37)..(1054): Homolog of NCBI NO: 5002645 NR Description: IF2 protein [Homo sapiens]
MGGVESKNRCCVTDDDGSIGTKLCEKPKAEEIDFSARKKKLKSKKGGSVSFALLDVEDDKEEAEDGDDKNPSIRSDEVVGETSMSKKKKKDKSGKHGVCEEDDDADKILAQHGITTTVSTGPEAEIALAQPEQVASADGAVDKDGEEKTVESATAKKKKKKKDKDKKASASLAISSVEAKEDRQGKKDVKIKVAEKKVPKHVREKQETLARWKEAEDGKKKEEEERLRKEEEERRIEEEREREAEEIRQKRKIRKMEKKQEGLILTAKQKRDAAKNEAFRKRVLTDAGSLLVADKNGDSSKRPIYGNKNKLACKKANDPASVQAKGDGETKENHAADEPCTLPDLVSVEDRRVGIIESVDTEETHESVDVSQENGDEEDVWDAKTNFTIKGDSDDEEEKPQPVFKKGLKDTASKAHDSVPGADRPTVKPGGSGKPKTAAKKAMPKVDDTTRPKDTSKKDEGLVLNELAKEVEENLRSPICCIMGHVDSGKTKLLDCIRGTNVQEGEAGGITQQIGATFFPAENIRERTKELQANAKLKVPGILVIDTPGHESFTNLRSRGSNLCDLAILVVDIMRGLEPQTIESLNLLRRRNVKFIIALNKVDRLYGWEKSKNAPIRKTMMQQTGDVVKEFKMRLNRVQNQFQEQGLNSMLYYKNREMGETISILPASAISGEGIPDLLLFLVQWAQKTMVEKLTYVDKVQCTVLEVKVIEGHGITVDVVLVNGVLREGDQIVVCGSQGPIVTTIRSLLTPYPMNEMRVTGTYMPHREVKAAQGIKIAAQGLEHAIAGTALHVIGPNEDMEEAKKNAMEDIESVMNRIDKSGEGVYVQASTLGSLEALLEFLKSSDVKIPVSGIGIGPVHKKDIMKAGVMLEKKKEFATILAFDVKISAEARELADKMGVKIFCDDTIYCLFDKFKSYIEGIKEEKKKETACEAVFPCILQILPNHIYNQRDPIILGVKVNDGILKVGTPICIVKRIENVRVFMDIGRVSSIKNNNNMPVDYARKGQEVAIKIIASNPEEQKMFGRHFGVDDRLISHISSRSVDVIRTNYWRNKGPIHRFRQHRRILILNRLFYLHSCMSQSSGIRQHLQESLRNSSALKGIHDGLLALFSIENLIFPVNFDYCKVGEFLRFRRDTGLGFVFMSSLLHCRNVVDCAFTSSTVRRIVNLGFLVGRIRTLCSVSQVKSENLEKQKPCLESFTVSYLVDSCGLSLESAKSNSRFVKLVSSKKPDSVLALFKDHGFTNDQITSVIKSFPRVLSLSPEDVISPKLMFFSSIGFSTSDTAKMISSSPKMLSYSLHKRLIPCYDSLKSILVEEESVVKCLKRGIRCFSLKITHCVSLRVSICRELGVPDKSIKWLVQASPFTFFSRERRFNEVLNRVCSYGFDPKKAGFVHAMVAFDCTSESAMERKFKLFQCFGWSKEDFVAAIMRFPNCVTVSDEKIMYTLEYLVNNIGLQARDIVARPVVLSLSMEKRIKPRNQVISLLLSKGLVKKEDINYFTILKLKSSEFMDKFVLKYQDEMPQLVQPFTSNR

SEQ ID NO: 86756 - protein, 1449 aa, Arabidopsis thaliana
  peptide (1)..(1449): Ceres Seq. ID no. 12693227
  misc_feature (1151)..(1428): Pfam Name: mTERF Pfam Description: mTERF
  misc_feature (123)..(967): Homolog of NCBI NO: 23452071 NR Description: translation initiation factor [Pisum sativum]
  misc_feature (351)..(990): Homolog of NCBI NO: 18411214 NR Description: putative translation initiation factor IF-2;
  misc_feature (441)..(967): Homolog of NCBI NO: 21955294 NR Description: putative translation initiation factor IF-2
  misc_feature (1060)..(1449): Homolog of NCBI NO: 15218140 NR Description: hypothetical protein; protein id: At1g21150.1
  misc_feature (491)..(967): Homolog of NCBI NO: 22330673 NR Description: translation initiation factor eIF-2, putative; id: At1g76810.1, supported by cDNA: gi_19423951 [Arabidopsis
  misc_feature (1)..(970): Homolog of NCBI NO: 7108770 NR Description: IF2 protein [Drosophila melanogaster]
  misc_feature (1)..(970): Homolog of NCBI NO: 24656849 NR Description: CG10840-PB [Drosophila melanogaster]
  misc_feature (1)..(971): Homolog of NCBI NO: 11360327 NR Description: translation initiation factor IF-2 homolog - human (fragment) >gi|6599138|emb|CAB63717.1| hypothetical
  misc_feature (1)..(971): Homolog of NCBI NO: 14195666 NR Description: TRANSLATION INITIATION FACTOR IF-2
  misc_feature (1)..(971): Homolog of NCBI NO: 5002645 NR Description: IF2 protein [Homo sapiens]
MSKKKKKDKSGKHGVCEEDDDADKILAQHGITTTVSTGPEAEIALAQPEQVASADGAVDKDGEEKTVESATAKKKKKKKDKDKKASASLAISSVEAKEDRQGKKDVKIKVAEKKVPKHVREKQETLARWKEAEDGKKKEEEERLRKEEEERRIEEEREREAEEIRQKRKIRKMEKKQEGLILTAKQKRDAAKNEAFRKRVLTDAGSLLVADKNGDSSKRPIYGNKNKLACKKANDPASVQAKGDGETKENHAADEPCTLPDLVSVEDRRVGIIESVDTEETHESVDVSQENGDEEDVWDAKTNFTIKGDSDDEEEKPQPVFKKGLKDTASKAHDSVPGADRPTVKPGGSGKPKTAAKKAMPKVDDTTRPKDTSKKDEGLVLNELAKEVEENLRSPICCIMGHVDSGKTKLLDCIRGTNVQEGEAGGITQQIGATFFPAENIRERTKELQANAKLKVPGILVIDTPGHESFTNLRSRGSNLCDLAILVVDIMRGLEPQTIESLNLLRRRNVKFIIALNKVDRLYGWEKSKNAPIRKTMMQQTGDVVKEFKMRLNRVQNQFQEQGLNSMLYYKNREMGETISILPASAISGEGIPDLLLFLVQWAQKTMVEKLTYVDKVQCTVLEVKVIEGHGITVDVVLVNGVLREGDQIVVCGSQGPIVTTIRSLLTPYPMNEMRVTGTYMPHREVKAAQGIKIAAQGLEHAIAGTALHVIGPNEDMEEAKKNAMEDIESVMNRIDKSGEGVYVQASTLGSLEALLEFLKSSDVKIPVSGIGIGPVHKKDIMKAGVMLEKKKEFATILAFDVKISAEARELADKMGVKIFCDDTIYCLFDKFKSYIEGIKEEKKKETACEAVFPCILQILPNHIYNQRDPIILGVKVNDGILKVGTPICIVKRIENVRVFMDIGRVSSIKNNNNMPVDYARKGQEVAIKIIASNPEEQKMFGRHFGVDDRLISHISSRSVDVIRTNYWRNKGPIHRFRQHRRILILNRLFYLHSCMSQSSGIRQHLQESLRNSSALKGIHDGLLALFSIENLIFPVNFDYCKVGEFLRFRRDTGLGFVFMSSLLHCRNVVDCAFTSSTVRRIVNLGFLVGRIRTLCSVSQVKSENLEKQKPCLESFTVSYLVDSCGLSLESAKSNSRFVKLVSSKKPDSVLALFKDHGFTNDQITSVIKSFPRVLSLSPEDVISPKLMFFSSIGFSTSDTAKMISSSPKMLSYSLHKRLIPCYDSLKSILVEEESVVKCLKRGIRCFSLKITHCVSLRVSICRELGVPDKSIKWLVQASPFTFFSRERRFNEVLNRVCSYGFDPKKAGFVHAMVAFDCTSESAMERKFKLFQCFGWSKEDFVAAIMRFPNCVTVSDEKIMYTLEYLVNNIGLQARDIVARPVVLSLSMEKRIKPRNQVISLLLSKGLVKKEDINYFTILKLKSSEFMDKFVLKYQDEMPQLVQPFTSNR

SEQ ID NO: 86757 - DNA, 2709 bp, Arabidopsis thaliana
  misc_feature (1)..(2709): Ceres Seq. ID no. 12693234
  misc_feature: MA Experiment ID: 20000182 Result: Up-regulated in Transcription
  misc_feature: MA Experiment 20000182 PARAMETER Experiment Name: At_2mM_SA_P Parameter: Age (day) Value: 14
  misc_feature: MA Experiment 20000182 PARAMETER Experiment Name: At_2mM_SA_P Parameter: Organism Value: A. thaliana
  misc_feature: MA Experiment 20000182 PARAMETER Experiment Name: At_2mM_SA_P Parameter: Plant Line Value: WS
  misc_feature: MA Experiment 20000182 PARAMETER Experiment Name: At_2mM_SA_P Parameter: Timepoint (hr) Value: 6
  misc_feature: MA Experiment 20000182 PARAMETER Experiment Name: At_2mM_SA_P Parameter: Tissue Value: Aerial
  misc_feature: MA Experiment 20000182 PARAMETER Experiment Name: At_2mM_SA_P Parameter: Treatment Value: 2mM SA vs. No Treatment
atgaagttccaggagggtgtgttcttggtggttattttcttccttgcatatactcagcttgtgaaggggcaacatcaacctcgcgaagattgtaaacttaaatgtggaaacgtcacaatagagtacccttttggtatttctacaggttgttactatcccggagatgataatttcaatctcacctgtgtcgtggaagagaagctactactctttggcatcattcaagtgaccaatatttctcacagtggccatgtaagtgtactgtttgaacgattctctgaatgctacgagcagaaaaatgagactaatggaactgccctcgggtatcagctgggtagtagtttctctctctcctccaacaacaagtttactttagtaggatgtaacgctttatcacttttgagcacttttggaaagcaaaactactcaactggatgcttgtcattatgcaattctcaaccagaggcaaatggaagatgtaatggtgtaggttgctgcacaacagaggacttctctgtcccgttcgatagcgatacattccaatttggctcagttcgcttgagaaaccaagttaataattccttagatctatttaatacttcggtatatcagtttaatccttgcacctacgcttttctcgttgaagatggtaagtttaacttcgattcttcaaaagatcttaagaatctgaggaatgtcacgaggttccctgtggcactagattggtctattggaaaccagacatgtgagcaagctggaagcacaagaatatgcggtaagaacagctcatgttacaattctactactagaaacgggtatatctgcaaatgtaatgaaggttatgatgggaatccataccgttcagagggttgcaaagacatcgatgagtgtattagtgatacacataactgttcggatccaaaaacctgtagaaacagggatggaggcttcgattgtaagtgtccatctggttacgacttaaactccagtatgagctgcacgaggcccgaatacaaacggactcgaatttttcttgtaatcataatcggcgtcttggtcctcctgcttgctgcgatctgtatacaacatgcaacgaagcaaaggaagtataccaagctccgacgacaattctttgagcaaaatggtggtggcatgttgatacagcgactttcaggagcagggttgtcaaacattgatttcaaaatctttactgaggaaggcatgaaagaggcaactaatggctatgatgagagcagaatcttgggccagggaggtcaaggaacagtctacaaagggatattgccggacaacactatcgttgctataaagaaagctcggcttgcagacagtagacaagtagatcagttcatccacgaagtgctcgtgctttcacaaattaaccacaggaacgtggtcaagatcttgggttgctgtctagagactgaagtccccttgttggtctatgaattcattaccaatggcacccttttcgatcacttgcacggttccatttttgattcttctcttacatgggaacaccgcctcagaatagcgatagaagtcgctggaactcttgcttatcttcactcctctgcttctattccaatcatccatcgcgatatcaaaactgcaaatattctcttggatgaaaacttaactgcaaaagtagccgactttggcgcttctaagcttataccaatggataaagagcagctcacaactatggtgcaaggcactctaggctatttagacccagaatactataccacagggcttctgaacgagaagagcgatgtgtatagctttggggtagtcctcatggaactgctctcaggtcaaaaggcattgtgctttgaacggccacaggcttcaaaacatttggtgagttactttgtttctgccacggaagagaataggttgcatgagattattgacgaccaagtgttgaacgaggataatctgaaggagatccaggaagctgcaagaattgctgcagagtgtacaaggctaatgggagaggaaaggccaaggatgaaagaagtagctgcaaagctagaagccttgagggtcgagaaaaccaaacataagtggtcggatcagtatcctgaggagaatgaacacttgattggtggtcacatcttgtctgcacaaggcgaaaccagtagcagcattggctatgatagcatcaaaaatgtagcaatattggacattgaaactggcactctaggctatttagacccagaatactataccacagggcttctgaacgagaagagcgatgtgtatagctttggggtagtcctcatggaactgctctcaggtcaaaaggcattgtgctttgaacggccacaggcttcaaaacatttggtgagttactttgtttctgccacggaagagaataggttgcatgagattattgacgaccaagtgttgaacgaggataatctgaaggagatccaggaagctgcaagaattgctgcagagtgtacaaggctaatgggaaaagaaaggccaaggatgaaagaagtagctgtagagctagaaactttgagcgtcaaaacaaccaaacataattggtcggatcagtatcgagaggagaatttacacttgcttggtagcaacatcgtgtcttcccaaggcgataccaatagccgtggttatgacagcgtcaagaatgtagcattgcttgacattgaagctggccgctga

SEQ ID NO: 86758 - protein, 902 aa, Arabidopsis thaliana
  peptide (1)..(902): Ceres Seq. ID no. 12693235
  misc_feature (1)..(740): Homolog of NCBI NO: 18394970 NR Description: wall-associated kinase 1; protein id:
  misc_feature (1)..(740): Homolog of NCBI NO: 25751318 NR Description: probable serine/threonine-specific protein kinase
  misc_feature (7)..(740): Homolog of NCBI NO: 15218170 NR Description: wall-associated kinase 5; protein id: At1g21230.1
  misc_feature (1)..(740): Homolog of NCBI NO: 15218959 NR Description: wall-associated kinase 2; protein id: supported by cDNA: gi_17064909 [Arabidopsis thaliana]
  misc_feature (1)..(740): Homolog of NCBI NO: 25287666 NR Description: wall-associated serine/threonine kinase (EC
  misc_feature (740)..(902): Homolog of NCBI NO: 25287657 NR Description: F16F4.8 protein - Arabidopsis thaliana
  misc_feature (140)..(740): Homolog of NCBI NO: 166813 NR Description: serine threonine kinase
  misc_feature (1)..(740): Homolog of NCBI NO: 25287665 NR Description: hypothetical protein F16F4.10 [imported] -
  misc_feature (1)..(740): Homolog of NCBI NO: 15218167 NR Description: wall-associated kinase 4; protein id: At1g21210.1
  misc_feature (10)..(710): Homolog of NCBI NO: 34915126 NR Description: putative wall-associated kinase 2 [Oryza sativa
MKFQEGVFLVVIFFLAYTQLVKGQHQPREDCKLKCGNVTIEYPFGISTGCYYPGDDNFNLTCVVEEKLLLFGIIQVTNISHSGHVSVLFERFSECYEQKNETNGTALGYQLGSSFSLSSNNKFTLVGCNALSLLSTFGKQNYSTGCLSLCNSQPEANGRCNGVGCCTTEDFSVPFDSDTFQFGSVRLRNQVNNSLDLFNTSVYQFNPCTYAFLVEDGKFNFDSSKDLKNLRNVTRFPVALDWSIGNQTCEQAGSTRICGKNSSCYNSTTRNGYICKCNEGYDGNPYRSEGCKDIDECISDTHNCSDPKTCRNRDGGFDCKCPSGYDLNSSMSCTRPEYKRTRIFLVIIIGVLVLLLAAICIQHATKQRKYTKLRRQFFEQNGGGMLIQRLSGAGLSNIDFKIFTEEGMKEATNGYDESRILGQGGQGTVYKGILPDNTIVAIKKARLADSRQVDQFIHEVLVLSQINHRNVVKILGCCLETEVPLLVYEFITNGTLFDHLHGSIFDSSLTWEHRLRIAIEVAGTLAYLHSSASIPIIHRDIKTANILLDENLTAKVADFGASKLIPMDKEQLTTMVQGTLGYLDPEYYTTGLLNEKSDVYSFGVVLMELLSGQKALCFERPQASKHLVSYFVSATEENRLHEIIDDQVLNEDNLKEIQEAARIAAECTRLMGEERPRMKEVAAKLEALRVEKTKHKWSDQYPEENEHLIGGHILSAQGETSSSIGYDSIKNVAILDIETGTLGYLDPEYYTTGLLNEKSDVYSFGVVLMELLSGQKALCFERPQASKHLVSYFVSATEENRLHEIIDDQVLNEDNLKEIQEAARIAAECTRLMGKERPRMKEVAVELETLSVKTTKHNWSDQYREENLHLLGSNIVSSQGDTNSRGYDSVKNVALLDIEAGR

SEQ ID NO: 86759 - protein, 572 aa, Arabidopsis thaliana
  peptide (1)..(572): Ceres Seq. ID no. 12693236
  misc_feature (1)..(410): Homolog of NCBI NO: 18394970 NR Description: wall-associated kinase 1; protein id:
  misc_feature (1)..(410): Homolog of NCBI NO: 25751318 NR Description: probable serine/threonine-specific protein kinase
  misc_feature (1)..(410): Homolog of NCBI NO: 15218170 NR Description: wall-associated kinase 5; protein id: At1g21230.1
  misc_feature (1)..(410): Homolog of NCBI NO: 15218959 NR Description: wall-associated kinase 2; protein id: supported by cDNA: gi_17064909 [Arabidopsis thaliana]
  misc_feature (1)..(410): Homolog of NCBI NO: 25287666 NR Description: wall-associated serine/threonine kinase (EC
  misc_feature (410)..(572): Homolog of NCBI NO: 25287657 NR Description: F16F4.8 protein - Arabidopsis thaliana
  misc_feature (1)..(410): Homolog of NCBI NO: 166813 NR Description: serine threonine kinase
  misc_feature (1)..(410): Homolog of NCBI NO: 25287665 NR Description: hypothetical protein F16F4.10 [imported] -
  misc_feature (1)..(410): Homolog of NCBI NO: 15218167 NR Description: wall-associated kinase 4; protein id: At1g21210.1
  misc_feature (1)..(380): Homolog of NCBI NO: 34915126 NR Description: putative wall-associated kinase 2 [Oryza sativa
MSCTRPEYKRTRIFLVIIIGVLVLLLAAICIQHATKQRKYTKLRRQFFEQNGGGMLIQRLSGAGLSNIDFKIFTEEGMKEATNGYDESRILGQGGQGTVYKGILPDNTIVAIKKARLADSRQVDQFIHEVLVLSQINHRNVVKILGCCLETEVPLLVYEFITNGTLFDHLHGSIFDSSLTWEHRLRIAIEVAGTLAYLHSSASIPIIHRDIKTANILLDENLTAKVADFGASKLIPMDKEQLTTMVQGTLGYLDPEYYTTGLLNEKSDVYSFGVVLMELLSGQKALCFERPQASKHLVSYFVSATEENRLHEIIDDQVLNEDNLKEIQEAARIAAECTRLMGEERPRMKEVAAKLEALRVEKTKHKWSDQYPEENEHLIGGHILSAQGETSSSIGYDSIKNVAILDIETGTLGYLDPEYYTTGLLNEKSDVYSFGVVLMELLSGQKALCFERPQASKHLVSYFVSATEENRLHEIIDDQVLNEDNLKEIQEAARIAAECTRLMGKERPRMKEVAVELETLSVKTTKHNWSDQYREENLHLLGSNIVSSQGDTNSRGYDSVKNVALLDIEAGR

SEQ ID NO: 86760 - protein, 518 aa, Arabidopsis thaliana
  peptide (1)..(518): Ceres Seq. ID no. 12693237
  misc_feature (1)..(356): Homolog of NCBI NO: 18394970 NR Description: wall-associated kinase 1; protein id:
  misc_feature (1)..(356): Homolog of NCBI NO: 25751318 NR Description: probable serine/threonine-specific protein kinase
  misc_feature (1)..(356): Homolog of NCBI NO: 15218170 NR Description: wall-associated kinase 5; protein id: At1g21230.1
  misc_feature (1)..(356): Homolog of NCBI NO: 15218959 NR Description: wall-associated kinase 2; protein id: supported by cDNA: gi_17064909 [Arabidopsis thaliana]
  misc_feature (1)..(356): Homolog of NCBI NO: 25287666 NR Description: wall-associated serine/threonine kinase (EC
  misc_feature (356)..(518): Homolog of NCBI NO: 25287657 NR Description: F16F4.8 protein - Arabidopsis thaliana
  misc_feature (1)..(356): Homolog of NCBI NO: 166813 NR Description: serine threonine kinase
  misc_feature (1)..(356): Homolog of NCBI NO: 25287665 NR Description: hypothetical protein F16F4.10 [imported] -
  misc_feature (1)..(356): Homolog of NCBI NO: 15218167 NR Description: wall-associated kinase 4; protein id: At1g21210.1
  misc_feature (1)..(326): Homolog of NCBI NO: 34915126 NR Description: putative wall-associated kinase 2 [Oryza sativa
MLIQRLSGAGLSNIDFKIFTEEGMKEATNGYDESRILGQGGQGTVYKGILPDNTIVAIKKARLADSRQVDQFIHEVLVLSQINHRNVVKILGCCLETEVPLLVYEFITNGTLFDHLHGSIFDSSLTWEHRLRIAIEVAGTLAYLHSSASIPIIHRDIKTANILLDENLTAKVADFGASKLIPMDKEQLTTMVQGTLGYLDPEYYTTGLLNEKSDVYSFGVVLMELLSGQKALCFERPQASKHLVSYFVSATEENRLHEIIDDQVLNEDNLKEIQEAARIAAECTRLMGEERPRMKEVAAKLEALRVEKTKHKWSDQYPEENEHLIGGHILSAQGETSSSIGYDSIKNVAILDIETGTLGYLDPEYYTTGLLNEKSDVYSFGVVLMELLSGQKALCFERPQASKHLVSYFVSATEENRLHEIIDDQVLNEDNLKEIQEAARIAAECTRLMGKERPRMKEVAVELETLSVKTTKHNWSDQYREENLHLLGSNIVSSQGDTNSRGYDSVKNVALLDIEAGR

SEQ ID NO: 86761 - DNA, 2027 bp, Arabidopsis thaliana
  misc_feature (1)..(2027): Ceres Seq. ID no. 12693270
  misc_feature: MA Experiment ID: 20000166 Result: Down-regulated in Transcription
  misc_feature: MA Experiment 20000166 PARAMETER Experiment Name: At_100uM_ABA_P Parameter: Age (day) Value: 14
  misc_feature: MA Experiment 20000166 PARAMETER Experiment Name: At_100uM_ABA_P Parameter: Organism Value: A. thaliana
  misc_feature: MA Experiment 20000166 PARAMETER Experiment Name: At_100uM_ABA_P Parameter: Plant Line Value: WS
  misc_feature: MA Experiment 20000166 PARAMETER Experiment Name: At_100uM_ABA_P Parameter: Timepoint (hr) Value: 1
  misc_feature: MA Experiment 20000166 PARAMETER Experiment Name: At_100uM_ABA_P Parameter: Tissue Value: Aerial
  misc_feature: MA Experiment 20000166 PARAMETER Experiment Name: At_100uM_ABA_P Parameter: Treatment Value: 100uM ABA vs. No Treatment
  misc_feature: MA Experiment ID: 20000173 Result: Down-regulated in Transcription
  misc_feature: MA Experiment 20000173 PARAMETER Experiment Name: At_42deg_Heat_P Parameter: Age (day) Value: 14
  misc_feature: MA Experiment 20000173 PARAMETER Experiment Name: At_42deg_Heat_P Parameter: Organism Value: A. thaliana
  misc_feature: MA Experiment 20000173 PARAMETER Experiment Name: At_42deg_Heat_P Parameter: Plant Line Value: WS
  misc_feature: MA Experiment 20000173 PARAMETER Experiment Name: At_42deg_Heat_P Parameter: Temperature (deg C) Value: 42 vs. 22
  misc_feature: MA Experiment 20000173 PARAMETER Experiment Name: At_42deg_Heat_P Parameter: Timepoint (hr) Value: 6
  misc_feature: MA Experiment 20000173 PARAMETER Experiment Name: At_42deg_Heat_P Parameter: Tissue Value: Aerial
  misc_feature: MA Experiment ID: 20000182 Result: Up-regulated in Transcription
  misc_feature: MA Experiment 20000182 PARAMETER Experiment Name: At_2mM_SA_P Parameter: Age (day) Value: 14
  misc_feature: MA Experiment 20000182 PARAMETER Experiment Name: At_2mM_SA_P Parameter: Organism Value: A. thaliana
  misc_feature: MA Experiment 20000182 PARAMETER Experiment Name: At_2mM_SA_P Parameter: Plant Line Value: WS
  misc_feature: MA Experiment 20000182 PARAMETER Experiment Name: At_2mM_SA_P Parameter: Timepoint (hr) Value: 6
  misc_feature: MA Experiment 20000182 PARAMETER Experiment Name: At_2mM_SA_P Parameter: Tissue Value: Aerial
  misc_feature: MA Experiment 20000182 PARAMETER Experiment Name: At_2mM_SA_P Parameter: Treatment Value: 2mM SA vs. No Treatment
  misc_feature: MA Experiment ID: 20000184 Result: Down-regulated in Transcription
  misc_feature: MA Experiment 20000184 PARAMETER Experiment Name: At_Shoots__P Parameter: Age (day) Value: 7
  misc_feature: MA Experiment 20000184 PARAMETER Experiment Name: At_Shoots__P Parameter: Tissue Value: Shoots vs. Whole Plant
  misc_feature: MA Experiment ID: 20000234 Result: Down-regulated in Transcription
  misc_feature: MA Experiment 20000234 PARAMETER Experiment Name: At_Siliques_P Parameter: Age (day) Value: 21
  misc_feature: MA Experiment 20000234 PARAMETER Experiment Name: At_Siliques_P Parameter: Organism Value: A. thaliana
  misc_feature: MA Experiment 20000234 PARAMETER Experiment Name: At_Siliques_P Parameter: Plant Line Value: WS
  misc_feature: MA Experiment 20000234 PARAMETER Experiment Name: At_Siliques_P Parameter: Tissue Value: Less Than 5mm Siliques vs. Whole Plant
  misc_feature: MA Experiment ID: 20000235 Result: Down-regulated in Transcription
  misc_feature: MA Experiment 20000235 PARAMETER Experiment Name: At_Siliques_P Parameter: Age (day) Value: 21
  misc_feature: MA Experiment 20000235 PARAMETER Experiment Name: At_Siliques_P Parameter: Organism Value: A. thaliana
  misc_feature: MA Experiment 20000235 PARAMETER Experiment Name: At_Siliques_P Parameter: Plant Line Value: WS
  misc_feature: MA Experiment 20000235 PARAMETER Experiment Name: At_Siliques_P Parameter: Tissue Value: 5-10mm Siliques vs. Whole Plant
  misc_feature: MA Experiment ID: 20000264 Result: Down-regulated in Transcription
  misc_feature: MA Experiment 20000264 PARAMETER Experiment Name: At_Open_Flower_P Parameter: Age (day) Value: 21
  misc_feature: MA Experiment 20000264 PARAMETER Experiment Name: At_Open_Flower_P Parameter: Plant Line Value: WS
  misc_feature: MA Experiment 20000264 PARAMETER Experiment Name: At_Open_Flower_P Parameter: Tissue Value: Open Flower vs. Whole Plant
  misc_feature: MA Experiment ID: 20000265 Result: Down-regulated in Transcription
  misc_feature: MA Experiment 20000265 PARAMETER Experiment Name: At_Open_Flower_P Parameter: Age (day) Value: 21
  misc_feature: MA Experiment 20000265 PARAMETER Experiment Name: At_Open_Flower_P Parameter: Plant Line Value: WS
  misc_feature: MA Experiment 20000265 PARAMETER Experiment Name: At_Open_Flower_P Parameter: Tissue Value: Closed Flower vs. Whole Plant
  misc_feature: MA Experiment ID: 20000439 Result: Down-regulated in Transcription
  misc_feature: MA Experiment 20000439 PARAMETER Experiment Name: At_Roots__P Parameter: Age (day) Value: 14 vs. 21
  misc_feature: MA Experiment 20000439 PARAMETER Experiment Name: At_Roots__P Parameter: Organism Value: A. thaliana
  misc_feature: MA Experiment 20000439 PARAMETER Experiment Name: At_Roots__P Parameter: Tissue Value: Roots vs. Whole Plant
  misc_feature: MA Experiment ID: 20001248 Result: Up-regulated in Transcription
  misc_feature: MA Experiment 20001248 PARAMETER Experiment Name: At_Far-red-induction_P Parameter: Age (day) Value: 7
  misc_feature: MA Experiment 20001248 PARAMETER Experiment Name: At_Far-red-induction_P Parameter: Light Value: Far-red vs. White
  misc_feature: MA Experiment 20001248 PARAMETER Experiment Name: At_Far-red-induction_P Parameter: Organism Value: A. thaliana
  misc_feature: MA Experiment 20001248 PARAMETER Experiment Name: At_Far-red-induction_P Parameter: Plant Line Value: Columbia
  misc_feature: MA Experiment 20001248 PARAMETER Experiment Name: At_Far-red-induction_P Parameter: Timepoint (hr) Value: 4
  misc_feature: MA Experiment 20001248 PARAMETER Experiment Name: At_Far-red-induction_P Parameter: Tissue Value: Whole Plant
  misc_feature: MA Experiment ID: 20001451 Result: Up-regulated in Transcription
  misc_feature: MA Experiment 20001451 PARAMETER Experiment Name: At_Far-red-induction_P Parameter: Age (day) Value: 7
  misc_feature: MA Experiment 20001451 PARAMETER Experiment Name: At_Far-red-induction_P Parameter: Light Value: Far-red vs. White
  misc_feature: MA Experiment 20001451 PARAMETER Experiment Name: At_Far-red-induction_P Parameter: Organism Value: A. thaliana
  misc_feature: MA Experiment 20001451 PARAMETER Experiment Name: At_Far-red-induction_P Parameter: Plant Line Value: Columbia
  misc_feature: MA Experiment 20001451 PARAMETER Experiment Name: At_Far-red-induction_P Parameter: Timepoint (hr) Value: 24
  misc_feature: MA Experiment 20001451 PARAMETER Experiment Name: At_Far-red-induction_P Parameter: Tissue Value: Whole Plant
  misc_feature: MA Experiment ID: 20001905 Result: Down-regulated in Transcription
  misc_feature: MA Experiment 20001905 PARAMETER Experiment Name: At_Drought_Reproduction_P Parameter: Age (day) Value: 40
  misc_feature: MA Experiment 20001905 PARAMETER Experiment Name: At_Drought_Reproduction_P Parameter: Organism Value: A. thaliana
  misc_feature: MA Experiment 20001905 PARAMETER Experiment Name: At_Drought_Reproduction_P Parameter: Plant Line Value: WS
  misc_feature: MA Experiment 20001905 PARAMETER Experiment Name: At_Drought_Reproduction_P Parameter: Timepoint (day) Value: 10
  misc_feature: MA Experiment 20001905 PARAMETER Experiment Name: At_Drought_Reproduction_P Parameter: Tissue Value: Rosettes
  misc_feature: MA Experiment 20001905 PARAMETER Experiment Name: At_Drought_Reproduction_P Parameter: Treatment Value: Drought vs. No Drought
aggtgtgttgtgtttgagtgtctctctaggtaaacatggtagcagaagaagcaagaaaagaagccatggctaaatcagtatctggcgggaagattacttattttgtggtggcttcatgtgtcatggccgccatgggcggtgtcatcttcggctacgacatcggggtttcaggttcacatatatattcttgctaattaggatatatatgttctttcttttttttgtttgtgtttgtgtttgcgtttgcaaaaagaataaatcatatttttgaagtagaaaacattttagtttttcataatatttaaatgaaatgttgtggttctctaaacctaaacataaatgcaaacatgtaactatataaatatgtaggtggagtgatgtcaatggggccatttctaaaaagatttttcccaaaagtgtataagctccaagaagaagatagaagaagaagaggcaatagcaataaccactactgccttttcaatagccaacttcttacatccttcacatcttctctatacgtttccggtctcatcgctactctgttagcttcgtccgtgactcgttcatggggtcgcaagccctctatatttcttggcggtgtgtcctttctcgccggcgctgctcttggtggctctgctcaaaacgttgctatgctcattattgcgcgtctcttgctcggcgtaggagttggattcgctaaccaggtaacaaaagacaagttgattaatgatgtttcaattttctctgtatgttgactggtttgttgttttatattttagtcggttcctctgtatctctccgagatggcgccggcaaaatacagaggagcaatcagcaatggtttccagctctgtatcggaattggatttctatctgcaaatgtaataaactacgaaacccaaaatatcaaacatggttggagaatctctttagccacagctgcaatacctgcttcaatcctcactttaggatcactgtttctcccggaaacgccgaatagtatcatccagaccaccggagatgttcacaagaccgagcttatgcttcgccgtgtccgtggaactaacgacgttcaagatgagcttactgatctcgttgaagcgagttctggttctgatacagattcaaacgcgtttttgaaactgcttcaaagaaaatataggcctgagttagtgatggctttggtgatacctttctttcagcaagttactggaatcaatgttgttgctttctacgcaccggttttgtatagaaccgttgggtttggagagagtggttcgttgatgtcgaccctcgtgactggaatcgtgggaacctcgtcgacgttgttgtcgatgcttgtcgttgacagaatcggtagaaagactctgtttttgattggagggttacagatgctcgtgtcgcaagttaccattggtgtgatcgttatggtggctgatgttcacgacggtgtgatcaaggaagggtatggttacgcggttgtggttttggtgtgtgtctacgtggccgggtttggttggtcttggggtccattaggatggcttgtaccgagtgagatttttccgttggagataagatcggtggcgcagagtgtaactgtggcagtgagttttgtgtttacttttgcggtggctcaaagtgcaccaccgatgttgtgtaagtttcgagctgggattttcttcttttatggagggtggttggtggtaatgacggtagcggtgcagctgtttttgccggagactaagaatgttccaatcgagaaggtggttggactttgggagaagcattggttttggaggagaatgacgagcaagcgtgatatccaagaaaccaccattcttagccattgaaaacaataaaaaaaccagcacctcatgatttgagatgagacgcatcttttgttgccaaaaaaattattgcatataagttttaaaattttcaaagttcaaactaaattaaggatatttttttactattcacgtaacaataatcaaatcacatgatccaagattcgattattgttc

SEQ ID NO: 86762 - protein, 348 aa, Arabidopsis thaliana
  peptide (1)..(348): Ceres Seq. ID no. 12693271
  misc_feature (1)..(325): Pfam Name: Sugar (and other) transporter Pfam Description: Sugar (and other) transporter
  misc_feature (1)..(348): Homolog of NCBI NO: 30697543 NR Description: hexose transporter, putative [Arabidopsis >gi|4127417|emb|CAA05384.1| monosaccharide transporter thaliana] >gi|9758468|dbj|BAB08997.1| monosaccharide transporter
  misc_feature (1)..(348): Homolog of NCBI NO: 22135848 NR Description: AT5g61520/k11j9_40 [Arabidopsis thaliana]
  misc_feature (1)..(342): Homolog of NCBI NO: 1708191 NR Description: Hexose carrier protein HEX6
  misc_feature (1)..(340): Homolog of NCBI NO: 34915514 NR Description: monosaccharide transporter 3 [Oryza sativa
  misc_feature (1)..(334): Homolog of NCBI NO: 347855 NR Description: glucose transporter [Saccharum hybrid cultivar
  misc_feature (1)..(339): Homolog of NCBI NO: 3915039 NR Description: Sugar carrier protein C >gi|7446731|pir||T10122
  misc_feature (1)..(333): Homolog of NCBI NO: 4138724 NR Description: hexose transporter [Vitis vinifera]
  misc_feature (1)..(345): Homolog of NCBI NO: 15234474 NR Description: glucose transporter; protein id: At4g21480.1
  misc_feature (1)..(333): Homolog of NCBI NO: 15220330 NR Description: glucose transporter; protein id: At1g11260.1, by cDNA: 33727., supported by cDNA: gi_15809961, supported by gi_16604672 [Arabidopsis thaliana]
  misc_feature (1)..(339): Homolog of NCBI NO: 30349804 NR Description: monosaccharide-H+ symporter [Datisca glomerata]
MAPAKYRGAISNGFQLCIGIGFLSANVINYETQNIKHGWRISLATAAIPASILTLGSLFLPETPNSIIQTTGDVHKTELMLRRVRGTNDVQDELTDLVEASSGSDTDSNAFLKLLQRKYRPELVMALVIPFFQQVTGINVVAFYAPVLYRTVGFGESGSLMSTLVTGIVGTSSTLLSMLVVDRIGRKTLFLIGGLQMLVSQVTIGVIVMVADVHDGVIKEGYGYAVVVLVCVYVAGFGWSWGPLGWLVPSEIFPLEIRSVAQSVTVAVSFVFTFAVAQSAPPMLCKFRAGIFFFYGGWLVVMTVAVQLFLPETKNVPIEKVVGLWEKHWFWRRMTSKRDIQETTILSH

SEQ ID NO: 86763 - protein, 269 aa, Arabidopsis thaliana
  peptide (1)..(269): Ceres Seq. ID no. 12693272
  misc_feature (1)..(246): Pfam Name: Sugar (and other) transporter Pfam Description: Sugar (and other) transporter
  misc_feature (1)..(269): Homolog of NCBI NO: 30697543 NR Description: hexose transporter, putative [Arabidopsis >gi|4127417|emb|CAA05384.1| monosaccharide transporter thaliana] >gi|9758468|dbj|BAB08997.1| monosaccharide transporter
  misc_feature (1)..(269): Homolog of NCBI NO: 22135848 NR Description: AT5g61520/k11j9_40 [Arabidopsis thaliana]
  misc_feature (1)..(263): Homolog of NCBI NO: 1708191 NR Description: Hexose carrier protein HEX6
  misc_feature (1)..(261): Homolog of NCBI NO: 34915514 NR Description: monosaccharide transporter 3 [Oryza sativa
  misc_feature (1)..(255): Homolog of NCBI NO: 347855 NR Description: glucose transporter [Saccharum hybrid cultivar
  misc_feature (1)..(260): Homolog of NCBI NO: 3915039 NR Description: Sugar carrier protein C >gi|7446731|pir||T10122
  misc_feature (1)..(254): Homolog of NCBI NO: 4138724 NR Description: hexose transporter [Vitis vinifera]
  misc_feature (1)..(266): Homolog of NCBI NO: 15234474 NR Description: glucose transporter; protein id: At4g21480.1
  misc_feature (1)..(254): Homolog of NCBI NO: 15220330 NR Description: glucose transporter; protein id: At1g11260.1, by cDNA: 33727., supported by cDNA: gi_15809961, supported by gi_16604672 [Arabidopsis thaliana]
  misc_feature (1)..(260): Homolog of NCBI NO: 30349804 NR Description: monosaccharide-H+ symporter [Datisca glomerata]
MLRRVRGTNDVQDELTDLVEASSGSDTDSNAFLKLLQRKYRPELVMALVIPFFQQVTGINVVAFYAPVLYRTVGFGESGSLMSTLVTGIVGTSSTLLSMLVVDRIGRKTLFLIGGLQMLVSQVTIGVIVMVADVHDGVIKEGYGYAVVVLVCVYVAGFGWSWGPLGWLVPSEIFPLEIRSVAQSVTVAVSFVFTFAVAQSAPPMLCKFRAGIFFFYGGWLVVMTVAVQLFLPETKNVPIEKVVGLWEKHWFWRRMTSKRDIQETTILSH

SEQ ID NO: 86764 - protein, 224 aa, Arabidopsis thaliana
  peptide (1)..(224): Ceres Seq. ID no. 12693273
  misc_feature (1)..(201): Pfam Name: Sugar (and other) transporter Pfam Description: Sugar (and other) transporter
  misc_feature (1)..(224): Homolog of NCBI NO: 30697543 NR Description: hexose transporter, putative [Arabidopsis >gi|4127417|emb|CAA05384.1| monosaccharide transporter thaliana] >gi|9758468|dbj|BAB08997.1| monosaccharide transporter
  misc_feature (1)..(224): Homolog of NCBI NO: 22135848 NR Description: AT5g61520/k11j9_40 [Arabidopsis thaliana]
  misc_feature (1)..(218): Homolog of NCBI NO: 1708191 NR Description: Hexose carrier protein HEX6
  misc_feature (1)..(216): Homolog of NCBI NO: 34915514 NR Description: monosaccharide transporter 3 [Oryza sativa
  misc_feature (1)..(210): Homolog of NCBI NO: 347855 NR Description: glucose transporter [Saccharum hybrid cultivar
  misc_feature (1)..(215): Homolog of NCBI NO: 3915039 NR Description: Sugar carrier protein C >gi|7446731|pir||T10122
  misc_feature (1)..(209): Homolog of NCBI NO: 4138724 NR Description: hexose transporter [Vitis vinifera]
  misc_feature (1)..(221): Homolog of NCBI NO: 15234474 NR Description: glucose transporter; protein id: At4g21480.1
  misc_feature (1)..(209): Homolog of NCBI NO: 15220330 NR Description: glucose transporter; protein id: At1g11260.1, by cDNA: 33727., supported by cDNA: gi_15809961, supported by gi_16604672 [Arabidopsis thaliana]
  misc_feature (1)..(215): Homolog of NCBI NO: 30349804 NR Description: monosaccharide-H+ symporter [Datisca glomerata]
MALVIPFFQQVTGINVVAFYAPVLYRTVGFGESGSLMSTLVTGIVGTSSTLLSMLVVDRIGRKTLFLIGGLQMLVSQVTIGVIVMVADVHDGVIKEGYGYAVVVLVCVYVAGFGWSWGPLGWLVPSEIFPLEIRSVAQSVTVAVSFVFTFAVAQSAPPMLCKFRAGIFFFYGGWLVVMTVAVQLFLPETKNVPIEKVVGLWEKHWFWRRMTSKRDIQETTILSH

SEQ ID NO: 86765 - DNA, 1899 bp, Arabidopsis thaliana
  misc_feature (1)..(1899): Ceres Seq. ID no. 12693274
  misc_feature: MA Experiment ID: 20000166 Result: Down-regulated in Transcription
  misc_feature: MA Experiment 20000166 PARAMETER Experiment Name: At_100uM_ABA_P Parameter: Age (day) Value: 14
  misc_feature: MA Experiment 20000166 PARAMETER Experiment Name: At_100uM_ABA_P Parameter: Organism Value: A. thaliana
  misc_feature: MA Experiment 20000166 PARAMETER Experiment Name: At_100uM_ABA_P Parameter: Plant Line Value: WS
  misc_feature: MA Experiment 20000166 PARAMETER Experiment Name: At_100uM_ABA_P Parameter: Timepoint (hr) Value: 1
  misc_feature: MA Experiment 20000166 PARAMETER Experiment Name: At_100uM_ABA_P Parameter: Tissue Value: Aerial
  misc_feature: MA Experiment 20000166 PARAMETER Experiment Name: At_100uM_ABA_P Parameter: Treatment Value: 100uM ABA vs. No Treatment
  misc_feature: MA Experiment ID: 20000173 Result: Down-regulated in Transcription
  misc_feature: MA Experiment 20000173 PARAMETER Experiment Name: At_42deg_Heat_P Parameter: Age (day) Value: 14
  misc_feature: MA Experiment 20000173 PARAMETER Experiment Name: At_42deg_Heat_P Parameter: Organism Value: A. thaliana
  misc_feature: MA Experiment 20000173 PARAMETER Experiment Name: At_42deg_Heat_P Parameter: Plant Line Value: WS
  misc_feature: MA Experiment 20000173 PARAMETER Experiment Name: At_42deg_Heat_P Parameter: Temperature (deg C) Value: 42 vs. 22
  misc_feature: MA Experiment 20000173 PARAMETER Experiment Name: At_42deg_Heat_P Parameter: Timepoint (hr) Value: 6
  misc_feature: MA Experiment 20000173 PARAMETER Experiment Name: At_42deg_Heat_P Parameter: Tissue Value: Aerial
  misc_feature: MA Experiment ID: 20000182 Result: Up-regulated in Transcription
  misc_feature: MA Experiment 20000182 PARAMETER Experiment Name: At_2mM_SA_P Parameter: Age (day) Value: 14
  misc_feature: MA Experiment 20000182 PARAMETER Experiment Name: At_2mM_SA_P Parameter: Organism Value: A. thaliana
  misc_feature: MA Experiment 20000182 PARAMETER Experiment Name: At_2mM_SA_P Parameter: Plant Line Value: WS
  misc_feature: MA Experiment 20000182 PARAMETER Experiment Name: At_2mM_SA_P Parameter: Timepoint (hr) Value: 6
  misc_feature: MA Experiment 20000182 PARAMETER Experiment Name: At_2mM_SA_P Parameter: Tissue Value: Aerial
  misc_feature: MA Experiment 20000182 PARAMETER Experiment Name: At_2mM_SA_P Parameter: Treatment Value: 2mM SA vs. No Treatment
  misc_feature: MA Experiment ID: 20000184 Result: Down-regulated in Transcription
  misc_feature: MA Experiment 20000184 PARAMETER Experiment Name: At_Shoots__P Parameter: Age (day) Value: 7
  misc_feature: MA Experiment 20000184 PARAMETER Experiment Name: At_Shoots__P Parameter: Tissue Value: Shoots vs. Whole Plant
  misc_feature: MA Experiment ID: 20000234 Result: Down-regulated in Transcription
  misc_feature: MA Experiment 20000234 PARAMETER Experiment Name: At_Siliques_P Parameter: Age (day) Value: 21
  misc_feature: MA Experiment 20000234 PARAMETER Experiment Name: At_Siliques_P Parameter: Organism Value: A. thaliana
  misc_feature: MA Experiment 20000234 PARAMETER Experiment Name: At_Siliques_P Parameter: Plant Line Value: WS
  misc_feature: MA Experiment 20000234 PARAMETER Experiment Name: At_Siliques_P Parameter: Tissue Value: Less Than 5mm Siliques vs. Whole Plant
  misc_feature: MA Experiment ID: 20000235 Result: Down-regulated in Transcription
  misc_feature: MA Experiment 20000235 PARAMETER Experiment Name: At_Siliques_P Parameter: Age (day) Value: 21
  misc_feature: MA Experiment 20000235 PARAMETER Experiment Name: At_Siliques_P Parameter: Organism Value: A. thaliana
  misc_feature: MA Experiment 20000235 PARAMETER Experiment Name: At_Siliques_P Parameter: Plant Line Value: WS
  misc_feature: MA Experiment 20000235 PARAMETER Experiment Name: At_Siliques_P Parameter: Tissue Value: 5-10mm Siliques vs. Whole Plant
  misc_feature: MA Experiment ID: 20000264 Result: Down-regulated in Transcription
  misc_feature: MA Experiment 20000264 PARAMETER Experiment Name: At_Open_Flower_P Parameter: Age (day) Value: 21
  misc_feature: MA Experiment 20000264 PARAMETER Experiment Name: At_Open_Flower_P Parameter: Plant Line Value: WS
  misc_feature: MA Experiment 20000264 PARAMETER Experiment Name: At_Open_Flower_P Parameter: Tissue Value: Open Flower vs. Whole Plant
  misc_feature: MA Experiment ID: 20000265 Result: Down-regulated in Transcription
  misc_feature: MA Experiment 20000265 PARAMETER Experiment Name: At_Open_Flower_P Parameter: Age (day) Value: 21
  misc_feature: MA Experiment 20000265 PARAMETER Experiment Name: At_Open_Flower_P Parameter: Plant Line Value: WS
  misc_feature: MA Experiment 20000265 PARAMETER Experiment Name: At_Open_Flower_P Parameter: Tissue Value: Closed Flower vs. Whole Plant
  misc_feature: MA Experiment ID: 20000439 Result: Down-regulated in Transcription
  misc_feature: MA Experiment 20000439 PARAMETER Experiment Name: At_Roots__P Parameter: Age (day) Value: 14 vs. 21
  misc_feature: MA Experiment 20000439 PARAMETER Experiment Name: At_Roots__P Parameter: Organism Value: A. thaliana
  misc_feature: MA Experiment 20000439 PARAMETER Experiment Name: At_Roots__P Parameter: Tissue Value: Roots vs. Whole Plant
  misc_feature: MA Experiment ID: 20001248 Result: Up-regulated in Transcription
  misc_feature: MA Experiment 20001248 PARAMETER Experiment Name: At_Far-red-induction_P Parameter: Age (day) Value: 7
  misc_feature: MA Experiment 20001248 PARAMETER Experiment Name: At_Far-red-induction_P Parameter: Light Value: Far-red vs. White
  misc_feature: MA Experiment 20001248 PARAMETER Experiment Name: At_Far-red-induction_P Parameter: Organism Value: A. thaliana
  misc_feature: MA Experiment 20001248 PARAMETER Experiment Name: At_Far-red-induction_P Parameter: Plant Line Value: Columbia
  misc_feature: MA Experiment 20001248 PARAMETER Experiment Name: At_Far-red-induction_P Parameter: Timepoint (hr) Value: 4
  misc_feature: MA Experiment 20001248 PARAMETER Experiment Name: At_Far-red-induction_P Parameter: Tissue Value: Whole Plant
  misc_feature: MA Experiment ID: 20001451 Result: Up-regulated in Transcription
  misc_feature: MA Experiment 20001451 PARAMETER Experiment Name: At_Far-red-induction_P Parameter: Age (day) Value: 7
  misc_feature: MA Experiment 20001451 PARAMETER Experiment Name: At_Far-red-induction_P Parameter: Light Value: Far-red vs. White
  misc_feature: MA Experiment 20001451 PARAMETER Experiment Name: At_Far-red-induction_P Parameter: Organism Value: A. thaliana
  misc_feature: MA Experiment 20001451 PARAMETER Experiment Name: At_Far-red-induction_P Parameter: Plant Line Value: Columbia
  misc_feature: MA Experiment 20001451 PARAMETER Experiment Name: At_Far-red-induction_P Parameter: Timepoint (hr) Value: 24
  misc_feature: MA Experiment 20001451 PARAMETER Experiment Name: At_Far-red-induction_P Parameter: Tissue Value: Whole Plant
  misc_feature: MA Experiment ID: 20001905 Result: Down-regulated in Transcription
  misc_feature: MA Experiment 20001905 PARAMETER Experiment Name: At_Drought_Reproduction_P Parameter: Age (day) Value: 40
  misc_feature: MA Experiment 20001905 PARAMETER Experiment Name: At_Drought_Reproduction_P Parameter: Organism Value: A. thaliana
  misc_feature: MA Experiment 20001905 PARAMETER Experiment Name: At_Drought_Reproduction_P Parameter: Plant Line Value: WS
  misc_feature: MA Experiment 20001905 PARAMETER Experiment Name: At_Drought_Reproduction_P Parameter: Timepoint (day) Value: 10
  misc_feature: MA Experiment 20001905 PARAMETER Experiment Name: At_Drought_Reproduction_P Parameter: Tissue Value: Rosettes
  misc_feature: MA Experiment 20001905 PARAMETER Experiment Name: At_Drought_Reproduction_P Parameter: Treatment Value: Drought vs. No Drought
ttgagtgtctctctaggtaaacatggtagcagaagaagcaagaaaagaagccatggctaaatcagtatctggcgggaagattacttattttgtggtggcttcatgtgtcatggccgccatgggcggtgtcatcttcggctacgacatcggggtttcaggtggagtgatgtcaatggggccatttctaaaaagatttttcccaaaagtgtataagctccaagaagaagatagaagaagaagaggcaatagcaataaccactactgccttttcaatagccaacttcttacatccttcacatcttctctatacgtttccggtctcatcgctactctgttagcttcgtccgtgactcgttcatggggtcgcaagccctctatatttcttggcggtgtgtcctttctcgccggcgctgctcttggtggctctgctcaaaacgttgctatgctcattattgcgcgtctcttgctcggcgtaggagttggattcgctaaccagtcggttcctctgtatctctccgagatggcgccggcaaaatacagaggagcaatcagcaatggtttccagctctgtatcggaattggatttctatctgcaaatgtaataaactacgaaacccaaaatatcaaacatggttggagaatctctttagccacagctgcaatacctgcttcaatcctcactttaggatcactgtttctcccggaaacgccgaatagtatcatccagaccaccggagatgttcacaagaccgagcttatgcttcgccgtgtccgtggaactaacgacgttcaagatgagcttactgatctcgttgaagcgagttctggttctgatacagattcaaacgcgtttttgaaactgcttcaaagaaaatataggcctgagttagtgatggctttggtgatacctttctttcagcaagttactggaatcaatgttgttgctttctacgcaccggttttgtatagaaccgttgggtttggagagagtggttcgttgatgtcgaccctcgtgactggaatcgtgggaacctcgtcgacgttgttgtcgatgcttgtcgttgacagaatcggtagaaagactctgtttttgattggagggttacagatgctcgtgtcgcaagttaccattggtgtgatcgttatggtggctgatgttcacgacggtgtgatcaaggaagggtatggttacgcggttgtggttttggtgtgtgtctacgtggccgggtttggttggtcttggggtccattaggatggcttgtaccgagtgagatttttccgttggagataagatcggtggcgcagagtgtaactgtggcagtgagttttgtgtttacttttgcggtggctcaaagtgcaccaccgatgttgtgtaagtttcgagctgggattttcttcttttatggagggtggttggtggtaatgacggtagcggtgcagctgtttttgccggagactaagaatgttccaatcgagaaggtggttggactttgggagaagcattggttttggaggagaatgacgagcaagcgtgatatccaagaaaccaccattcttagccattgaaaacaataaaaaaaccagcacctcatgatttgagatgagacgcatcttttgttgccaaaaaaattattgcatataagttttaaaattttcaaagttcaaactaaattaaggatatttttttactattcacgtaacaataatcaaatcacatgatccaagattcgattattgttcaaattattttgtaaatttagccatagtttcattttttcacttatatgtttgtgaaataacgatttgtgtttggaattaaaattaggggtgttttataaatatagtaaaactaggatagtgataatgtaatatattgaacgttaaaggacaaagatggg

SEQ ID NO: 86766 - protein, 514 aa, Arabidopsis thaliana
  peptide (1)..(514): Ceres Seq. ID no. 12693275
  misc_feature (27)..(491): Pfam Name: Sugar (and other) transporter Pfam Description: Sugar (and other) transporter
  misc_feature (1)..(514): Homolog of NCBI NO: 30697543 NR Description: hexose transporter, putative [Arabidopsis >gi|4127417|emb|CAA05384.1| monosaccharide transporter thaliana] >gi|9758468|dbj|BAB08997.1| monosaccharide transporter
  misc_feature (167)..(514): Homolog of NCBI NO: 22135848 NR Description: AT5g61520/k11j9_40 [Arabidopsis thaliana]
  misc_feature (18)..(508): Homolog of NCBI NO: 1708191 NR Description: Hexose carrier protein HEX6
  misc_feature (1)..(500): Homolog of NCBI NO: 5803244 NR Description: Similar to hexose carrier protein HEX6 &RCCHCP_1
  misc_feature (18)..(506): Homolog of NCBI NO: 34915514 NR Description: monosaccharide transporter 3 [Oryza sativa
  misc_feature (17)..(505): Homolog of NCBI NO: 37536854 NR Description: putative monosaccharide transporter [Oryza sativa
  misc_feature (18)..(509): Homolog of NCBI NO: 100347 NR Description: monosaccharide transport protein MST1 - common >gi|19885|emb|CAA47324.1| monosaccharid transporter [Nicotiana
  misc_feature (18)..(499): Homolog of NCBI NO: 34899540 NR Description: putative hexose carrier protein HEX6 [Oryza
  misc_feature (18)..(500): Homolog of NCBI NO: 347855 NR Description: glucose transporter [Saccharum hybrid cultivar
  misc_feature (18)..(505): Homolog of NCBI NO: 30349804 NR Description: monosaccharide-H+ symporter [Datisca glomerata]
MVAEEARKEAMAKSVSGGKITYFVVASCVMAAMGGVIFGYDIGVSGGVMSMGPFLKRFFPKVYKLQEEDRRRRGNSNNHYCLFNSQLLTSFTSSLYVSGLIATLLASSVTRSWGRKPSIFLGGVSFLAGAALGGSAQNVAMLIIARLLLGVGVGFANQSVPLYLSEMAPAKYRGAISNGFQLCIGIGFLSANVINYETQNIKHGWRISLATAAIPASILTLGSLFLPETPNSIIQTTGDVHKTELMLRRVRGTNDVQDELTDLVEASSGSDTDSNAFLKLLQRKYRPELVMALVIPFFQQVTGINVVAFYAPVLYRTVGFGESGSLMSTLVTGIVGTSSTLLSMLVVDRIGRKTLFLIGGLQMLVSQVTIGVIVMVADVHDGVIKEGYGYAVVVLVCVYVAGFGWSWGPLGWLVPSEIFPLEIRSVAQSVTVAVSFVFTFAVAQSAPPMLCKFRAGIFFFYGGWLVVMTVAVQLFLPETKNVPIEKVVGLWEKHWFWRRMTSKRDIQETTILSH

SEQ ID NO: 86767 - protein, 504 aa, Arabidopsis thaliana; identical to SEQ ID NO: 73783
  peptide (1)..(504): Ceres Seq. ID no. 12693276
  misc_feature (17)..(481): Pfam Name: Sugar (and other) transporter Pfam Description: Sugar (and other) transporter
  misc_feature (1)..(504): Homolog of NCBI NO: 30697543 NR Description: hexose transporter, putative [Arabidopsis >gi|4127417|emb|CAA05384.1| monosaccharide transporter thaliana] >gi|9758468|dbj|BAB08997.1| monosaccharide transporter
  misc_feature (157)..(504): Homolog of NCBI NO: 22135848 NR Description: AT5g61520/k11j9_40 [Arabidopsis thaliana]
  misc_feature (8)..(498): Homolog of NCBI NO: 1708191 NR Description: Hexose carrier protein HEX6
  misc_feature (1)..(490): Homolog of NCBI NO: 5803244 NR Description: Similar to hexose carrier protein HEX6 &RCCHCP_1
  misc_feature (8)..(496): Homolog of NCBI NO: 34915514 NR Description: monosaccharide transporter 3 [Oryza sativa
  misc_feature (7)..(495): Homolog of NCBI NO: 37536854 NR Description: putative monosaccharide transporter [Oryza sativa
  misc_feature (8)..(499): Homolog of NCBI NO: 100347 NR Description: monosaccharide transport protein MST1 - common >gi|19885|emb|CAA47324.1| monosaccharid transporter [Nicotiana
  misc_feature (8)..(489): Homolog of NCBI NO: 34899540 NR Description: putative hexose carrier protein HEX6 [Oryza
  misc_feature (8)..(490): Homolog of NCBI NO: 347855 NR Description: glucose transporter [Saccharum hybrid cultivar
  misc_feature (8)..(495): Homolog of NCBI NO: 30349804 NR Description: monosaccharide-H+ symporter [Datisca glomerata]

SEQ ID NO: 86768 - protein, 485 aa, Arabidopsis thaliana; identical to SEQ ID NO: 73784
  peptide (1)..(485): Ceres Seq. ID no. 12693277
  misc_feature (1)..(462): Pfam Name: Sugar (and other) transporter Pfam Description: Sugar (and other) transporter
  misc_feature (1)..(485): Homolog of NCBI NO: 30697543 NR Description: hexose transporter, putative [Arabidopsis >gi|4127417|emb|CAA05384.1| monosaccharide transporter thaliana] >gi|9758468|dbj|BAB08997.1| monosaccharide transporter
  misc_feature (138)..(485): Homolog of NCBI NO: 22135848 NR Description: AT5g61520/k11j9_40 [Arabidopsis thaliana]
  misc_feature (1)..(479): Homolog of NCBI NO: 1708191 NR Description: Hexose carrier protein HEX6
  misc_feature (1)..(471): Homolog of NCBI NO: 5803244 NR Description: Similar to hexose carrier protein HEX6 &RCCHCP_1
  misc_feature (1)..(477): Homolog of NCBI NO: 34915514 NR Description: monosaccharide transporter 3 [Oryza sativa
  misc_feature (1)..(476): Homolog of NCBI NO: 37536854 NR Description: putative monosaccharide transporter [Oryza sativa
  misc_feature (1)..(480): Homolog of NCBI NO: 100347 NR Description: monosaccharide transport protein MST1 - common >gi|19885|emb|CAA47324.1| monosaccharid transporter [Nicotiana
  misc_feature (1)..(470): Homolog of NCBI NO: 34899540 NR Description: putative hexose carrier protein HEX6 [Oryza
  misc_feature (1)..(471): Homolog of NCBI NO: 347855 NR Description: glucose transporter [Saccharum hybrid cultivar
  misc_feature (1)..(476): Homolog of NCBI NO: 30349804 NR Description: monosaccharide-H+ symporter [Datisca glomerata]

SEQ ID NO: 86769 - DNA, 1291 bp, Arabidopsis thaliana
  misc_feature (1)..(1291): Ceres Seq. ID no. 12693278
  misc_feature: MA Experiment ID: 108469 Result: Down-regulated in Transcription
  misc_feature: MA Experiment ID: 108569 Result: Up-regulated in Transcription
  misc_feature: MA Experiment 108569 PARAMETER Experiment Name: At_0.001%_MeJA__cDNA_P Parameter: Timepoint (hr) Value: 6
  misc_feature: MA Experiment 108569 PARAMETER Experiment Name: At_0.001%_MeJA__cDNA_P Parameter: Tissue Value: Aerial
  misc_feature: MA Experiment 108569 PARAMETER Experiment Name: At_0.001%_MeJA__cDNA_P Parameter: Treatment Value: 0.001% MeJA vs. No Treatment
  misc_feature: MA Experiment ID: 108573 Result: Up-regulated in Transcription
  misc_feature: MA Experiment 108573 PARAMETER Experiment Name: At_Drought_cDNA_P Parameter: Timepoint (hr) Value: 6
  misc_feature: MA Experiment 108573 PARAMETER Experiment Name: At_Drought_cDNA_P Parameter: Tissue Value: Aerial
  misc_feature: MA Experiment 108573 PARAMETER Experiment Name: At_Drought_cDNA_P Parameter: Treatment Value: Drought vs. No Drought
  misc_feature: MA Experiment ID: 108585 Result: Up-regulated in Transcription
  misc_feature: MA Experiment 108585 PARAMETER Experiment Name: At_5mM_NaNP_cDNA_P Parameter: Timepoint (hr) Value: 6
  misc_feature: MA Experiment 108585 PARAMETER Experiment Name: At_5mM_NaNP_cDNA_P Parameter: Tissue Value: Aerial
  misc_feature: MA Experiment 108585 PARAMETER Experiment Name: At_5mM_NaNP_cDNA_P Parameter: Treatment Value: null
ctacacgaattcgattctctcttatctcgacgagaaaaccctactgcgaaaaaactccgatctctctggcgagaagtaaatttttatctctgagcttggtttcaccatttctctatctctatctcctcgctgggttacggtttggtaaggtcagtgttctctaaggctgaaatttgggggtttctcagtctcgatgtggtcgtgctccgttaggattcttcacaatcattagggttatatttcttacaaactgatgctcattttctcttccctgtctatggctttatctgtgatccttcaaaagcttagtgtcttcggccctggtttgaatccttctttcccttactgcatcgccaatcactcctttgcctcccgttaattgagttgctctctttcaacttaattacattagtctgcttcctttgctgtctagtctggatagtgttgcaaatcaagtagtatcttctttagacattcttggctgagagatttacactaaaagcatagaataagaaacccctgtttggttagtatctacccgagtctcgtagtcctacacagatccggatcctagtttcgaagctagttcttgtttagctgaagctcagacccaaaatgctccaagaaccgtcggctgcattctccctccggcgtaactcattcagacgccgatctcccagatcaaatgtcgatgacagaggctggaatccgctccatatcaaagccagaaaaggcgatctgaaatctgtcaagcagcttctcgaccaaggaatggatgtgaatgctctagcatggggacccaaatcaaaaggagtgagtgcacttcaccttgcagcagagggaggtcacattgaagtcatggatttactcctagaacgtggggccaacattgatgctaaaacatggggctcatgcgggtggactcctctccacgctgcagccaaagagcggaagagagaagcagtgaagtttctggtggagaacggcgcattcttggcagatgatataactgataccaggtttaatccgccggtgcattactgtcacggccttgaatgggcgtacgaggaaatgaagaagcttaacagcgagtcttcttcttcatctggtggagacacatcttccagttctgacaactgaacttcttcttggttgtttctcggtgtgttttgttttgttttctagttgagactacttatcagaactattatggttggtgtttgatcttatgggctatgtgaaacattgaaactgcggatacattcatgtaatcttcagtgtgttattttgc

SEQ ID NO: 86770 - protein, 174 aa, Arabidopsis thaliana; identical to SEQ ID NO: 24022
  peptide (1)..(174): Ceres Seq. ID no. 12693279
  misc_feature (28)..(60): Pfam Name: Ankyrin repeat Pfam Description: Ankyrin repeat
  misc_feature (1)..(174): Homolog of NCBI NO: 15240185 NR Description: putative protein; protein id: At5g61230.1, by cDNA: gi_14517559 [Arabidopsis thaliana] gene_id:MAF19.22~unknown protein [Arabidopsis thaliana]
  misc_feature (1)..(174): Homolog of NCBI NO: 11357401 NR Description: hypothetical protein F13G24.40 - Arabidopsis >gi|6562298|emb|CAB62596.1| putative protein [Arabidopsis
  misc_feature (1)..(174): Homolog of NCBI NO: 18415625 NR Description: putative protein; protein id: At5g07840.1, by cDNA: gi_16226368 [Arabidopsis thaliana] gene_id:MXM12.8~unknown protein [Arabidopsis thaliana]
  misc_feature (26)..(126): Homolog of NCBI NO: 28373837 NR Description: Chain A, 4ank: A Designed Ankyrin Repeat Protein
  misc_feature (29)..(141): Homolog of NCBI NO: 28373837 NR Description: Chain A, 4ank: A Designed Ankyrin Repeat Protein
  misc_feature (29)..(126): Homolog of NCBI NO: 28373835 NR Description: Chain A, 3ank: A Designed Ankyrin Repeat Protein Three Identical Consensus Repeats >gi|28373836|pdb|1N0Q|B Chain
  misc_feature (24)..(141): Homolog of NCBI NO: 28274852 NR Description: ankyrin repeat protein E4_2 [synthetic construct]
  misc_feature (26)..(125): Homolog of NCBI NO: 28373666 NR Description: Chain A, Sank E3_5: An Artificial Ankyrin Repeat >gi|28274848|gb|AAO25689.1| ankyrin repeat protein E3_5
  misc_feature (6)..(133): Homolog of NCBI NO: 25295712 NR Description: probable ankyrin [imported] - Arabidopsis >gi|4335756|gb|AAD17433.1| putative ankyrin [Arabidopsis
  misc_feature (6)..(133): Homolog of NCBI NO: 30678058 NR Description: ankyrin -related [Arabidopsis thaliana] putative ankyrin [Arabidopsis thaliana]

SEQ ID NO: 86771 - protein, 122 aa, Arabidopsis thaliana; identical to SEQ ID NO: 24023
  peptide (1)..(122): Ceres Seq. ID no. 12693280
  misc_feature (1)..(122): Homolog of NCBI NO: 15240185 NR Description: putative protein; protein id: At5g61230.1, by cDNA: gi_14517559 [Arabidopsis thaliana] gene_id:MAF19.22~unknown protein [Arabidopsis thaliana]
  misc_feature (1)..(122): Homolog of NCBI NO: 11357401 NR Description: hypothetical protein F13G24.40 - Arabidopsis >gi|6562298|emb|CAB62596.1| putative protein [Arabidopsis
  misc_feature (1)..(122): Homolog of NCBI NO: 18415625 NR Description: putative protein; protein id: At5g07840.1, by cDNA: gi_16226368 [Arabidopsis thaliana] gene_id:MXM12.8~unknown protein [Arabidopsis thaliana]
  misc_feature (1)..(74): Homolog of NCBI NO: 28373837 NR Description: Chain A, 4ank: A Designed Ankyrin Repeat Protein
  misc_feature (1)..(89): Homolog of NCBI NO: 28373837 NR Description: Chain A, 4ank: A Designed Ankyrin Repeat Protein
  misc_feature (1)..(74): Homolog of NCBI NO: 28373835 NR Description: Chain A, 3ank: A Designed Ankyrin Repeat Protein Three Identical Consensus Repeats >gi|28373836|pdb|1N0Q|B Chain
  misc_feature (1)..(89): Homolog of NCBI NO: 28274852 NR Description: ankyrin repeat protein E4_2 [synthetic construct]
  misc_feature (1)..(73): Homolog of NCBI NO: 28373666 NR Description: Chain A, Sank E3_5: An Artificial Ankyrin Repeat >gi|28274848|gb|AAO25689.1| ankyrin repeat protein E3_5
  misc_feature (1)..(81): Homolog of NCBI NO: 25295712 NR Description: probable ankyrin [imported] - Arabidopsis >gi|4335756|gb|AAD17433.1| putative ankyrin [Arabidopsis
  misc_feature (1)..(81): Homolog of NCBI NO: 30678058 NR Description: ankyrin -related [Arabidopsis thaliana] putative ankyrin [Arabidopsis thaliana]

SEQ ID NO: 86772 - protein, 93 aa, Arabidopsis thaliana; identical to SEQ ID NO: 24024
  peptide (1)..(93): Ceres Seq. ID no. 12693281
  misc_feature (1)..(93): Homolog of NCBI NO: 15240185 NR Description: putative protein; protein id: At5g61230.1, by cDNA: gi_14517559 [Arabidopsis thaliana] gene_id:MAF19.22~unknown protein [Arabidopsis thaliana]
  misc_feature (1)..(93): Homolog of NCBI NO: 11357401 NR Description: hypothetical protein F13G24.40 - Arabidopsis >gi|6562298|emb|CAB62596.1| putative protein [Arabidopsis
  misc_feature (1)..(93): Homolog of NCBI NO: 18415625 NR Description: putative protein; protein id: At5g07840.1, by cDNA: gi_16226368 [Arabidopsis thaliana] gene_id:MXM12.8~unknown protein [Arabidopsis thaliana]
  misc_feature (1)..(45): Homolog of NCBI NO: 28373837 NR Description: Chain A, 4ank: A Designed Ankyrin Repeat Protein
  misc_feature (1)..(60): Homolog of NCBI NO: 28373837 NR Description: Chain A, 4ank: A Designed Ankyrin Repeat Protein
  misc_feature (1)..(45): Homolog of NCBI NO: 28373835 NR Description: Chain A, 3ank: A Designed Ankyrin Repeat Protein Three Identical Consensus Repeats >gi|28373836|pdb|1N0Q|B Chain
  misc_feature (1)..(60): Homolog of NCBI NO: 28274852 NR Description: ankyrin repeat protein E4_2 [synthetic construct]
  misc_feature (1)..(44): Homolog of NCBI NO: 28373666 NR Description: Chain A, Sank E3_5: An Artificial Ankyrin Repeat >gi|28274848|gb|AAO25689.1| ankyrin repeat protein E3_5
  misc_feature (1)..(52): Homolog of NCBI NO: 25295712 NR Description: probable ankyrin [imported] - Arabidopsis >gi|4335756|gb|AAD17433.1| putative ankyrin [Arabidopsis
  misc_feature (1)..(52): Homolog of NCBI NO: 30678058 NR Description: ankyrin -related [Arabidopsis thaliana] putative ankyrin [Arabidopsis thaliana]

SEQ ID NO: 86773 - DNA, 1162 bp, Arabidopsis thaliana
  misc_feature (1)..(1162): Ceres Seq. ID no. 12693291
  misc_feature: MA Experiment ID: 108464 Result: Down-regulated in Transcription
  misc_feature: MA Experiment 108464 PARAMETER Experiment Name: At_Germinating_Seeds_cDNA_P Parameter: Age (day) Value: 4 vs. 0
  misc_feature: MA Experiment 108464 PARAMETER Experiment Name: At_Germinating_Seeds_cDNA_P Parameter: Tissue Value: Germinating Seeds
  misc_feature: MA Experiment ID: 20000113 Result: Down-regulated in Transcription
  misc_feature: MA Experiment 20000113 PARAMETER Experiment Name: At_42deg_Heat_cDNA_P Parameter: Temperature (deg C) Value: 42 vs. 22
  misc_feature: MA Experiment 20000113 PARAMETER Experiment Name: At_42deg_Heat_cDNA_P Parameter: Timepoint (hr) Value: 8
  misc_feature: MA Experiment 20000113 PARAMETER Experiment Name: At_42deg_Heat_cDNA_P Parameter: Tissue Value: Aerial
atagaacaatcaacaattacacttattttgctatcgtttgagcatctcaaaaatttctccggggagatttgtttgtatatatactcttccacaaagaagatgctcaaggtccctgaacaccaagttgctggtcacattgctagtgatgggaagctcggtccactcgtagatgaccaaggccggttcttcaagccacttcagggagattctcgtggcgaacacgaggctaagttctatgagtctttcacatcgaacatgaaggttccagatcacatccatagatacttcccggtgtatcacggcactcagctagttgaagcatctgatggatctggcaagcttcctcatcttgttcttgatgatgttgtttcagggtacgcaaacccgtcggtaatggatgttaagattggatctaggacatggtacccggatgtatcagaagaatacttcaagaaatgtattaagaaagatagacagaccaccacggtttcgttggggttcagggtttcaggttttaagatttttgatcaccaagaatcaagtttttggagagctgagaagaagcttgttcttgggtataatgcagatggtgctagattggctctgaggaagtttgtgtcatcgaactctcccgctgactctaacttgacaccaaactgtgcttttgcatcagaggtttatggcggttgtaacgggatcttagcgcagttgttggagcttaaagattggttcgaaacccaaacgctttaccatttcaattcctgctcgattctgatgatttacgagaatgaatcaatcttgatgcaaggaggagatgatgcaccggcaccacgggcacaagtgaagctggtggatttcgcgcatgttcttgatggaaacggtgtcatcgaccataatttcttgggtggactctgctctttcataaagttcatcaaagatattcttcagagcgttgaaaagcacgatgaaaccgatacttccctacttgagaacgggcgctagagaaacgtcgttcttcccggctccatttcaaataatctccaagtttttcctttcttggactagttgggttttggacatgaacgtttgtccctttcaattgtataatttcgttaactaaaccattgtactttctcattagagaaatatatcgagagtttca

SEQ ID NO: 86774 - protein, 333 aa, Arabidopsis thaliana; identical to SEQ ID NO: 30773
  peptide (1)..(333): Ceres Seq. ID no. 12693292
  misc_feature (49)..(312): Pfam Name: Inositol polyphosphate kinase Pfam Description: Inositol polyphosphate kinase
  misc_feature (34)..(333): Homolog of NCBI NO: 15240350 NR Description: putative protein; protein id: At5g61760.1, by cDNA: 19114., supported by cDNA: gi_15724265, supported by gi_18252262 [Arabidopsis thaliana] >gi|10176869|dbj|BAB10076.1|
  misc_feature (34)..(333): Homolog of NCBI NO: 21553994 NR Description: putative inositol hexaphosphate kinase
  misc_feature (35)..(320): Homolog of NCBI NO: 21592823 NR Description: putative inositol hexaphosphate kinase
  misc_feature (35)..(320): Homolog of NCBI NO: 15240776 NR Description: putative protein; protein id: At5g07370.1, by cDNA: 32892. [Arabidopsis thaliana] >gi|11358275|pir||T49876
  misc_feature (35)..(320): Homolog of NCBI NO: 8919088 NR Description: putative inositol hexaphosphate kinase
  misc_feature (34)..(332): Homolog of NCBI NO: 13509208 NR Description: hypothetical protein [Linum usitatissimum]
  misc_feature (34)..(313): Homolog of NCBI NO: 13509210 NR Description: hypothetical protein [Linum usitatissimum]
  misc_feature (41)..(315): Homolog of NCBI NO: 21430778 NR Description: SD14726p [Drosophila melanogaster]
  misc_feature (41)..(315): Homolog of NCBI NO: 24580674 NR Description: CG13688-PA [Drosophila melanogaster]
  misc_feature (37)..(265): Homolog of NCBI NO: 19705555 NR Description: inositol polyphosphate multikinase [Rattus >gi|13162658|gb|AAG42923.1| inositol polyphosphate multikinase

SEQ ID NO: 86775 - protein, 300 aa, Arabidopsis thaliana; identical to SEQ ID NO: 30774
  peptide (1)..(300): Ceres Seq. ID no. 12693293
  misc_feature (16)..(279): Pfam Name: Inositol polyphosphate kinase Pfam Description: Inositol polyphosphate kinase
  misc_feature (1)..(300): Homolog of NCBI NO: 15240350 NR Description: putative protein; protein id: At5g61760.1, by cDNA: 19114., supported by cDNA: gi_15724265, supported by gi_18252262 [Arabidopsis thaliana] >gi|10176869|dbj|BAB10076.1|
  misc_feature (1)..(300): Homolog of NCBI NO: 21553994 NR Description: putative inositol hexaphosphate kinase
  misc_feature (2)..(287): Homolog of NCBI NO: 21592823 NR Description: putative inositol hexaphosphate kinase
  misc_feature (2)..(287): Homolog of NCBI NO: 15240776 NR Description: putative protein; protein id: At5g07370.1, by cDNA: 32892. [Arabidopsis thaliana] >gi|11358275|pir||T49876
  misc_feature (2)..(287): Homolog of NCBI NO: 8919088 NR Description: putative inositol hexaphosphate kinase
  misc_feature (1)..(299): Homolog of NCBI NO: 13509208 NR Description: hypothetical protein [Linum usitatissimum]
  misc_feature (1)..(280): Homolog of NCBI NO: 13509210 NR Description: hypothetical protein [Linum usitatissimum]
  misc_feature (8)..(282): Homolog of NCBI NO: 21430778 NR Description: SD14726p [Drosophila melanogaster]
  misc_feature (8)..(282): Homolog of NCBI NO: 24580674 NR Description: CG13688-PA [Drosophila melanogaster]
  misc_feature (4)..(232): Homolog of NCBI NO: 19705555 NR Description: inositol polyphosphate multikinase [Rattus >gi|13162658|gb|AAG42923.1| inositol polyphosphate multikinase

SEQ ID NO: 86776 - protein, 248 aa, Arabidopsis thaliana; identical to SEQ ID NO: 30775
  peptide (1)..(248): Ceres Seq. ID no. 12693294
  misc_feature (1)..(227): Pfam Name: Inositol polyphosphate kinase Pfam Description: Inositol polyphosphate kinase
  misc_feature (1)..(248): Homolog of NCBI NO: 15240350 NR Description: putative protein; protein id: At5g61760.1, by cDNA: 19114., supported by cDNA: gi_15724265, supported by gi_18252262 [Arabidopsis thaliana] >gi|10176869|dbj|BAB10076.1|
  misc_feature (1)..(248): Homolog of NCBI NO: 21553994 NR Description: putative inositol hexaphosphate kinase
  misc_feature (1)..(235): Homolog of NCBI NO: 21592823 NR Description: putative inositol hexaphosphate kinase
  misc_feature (1)..(235): Homolog of NCBI NO: 15240776 NR Description: putative protein; protein id: At5g07370.1, by cDNA: 32892. [Arabidopsis thaliana] >gi|11358275|pir||T49876
  misc_feature (1)..(235): Homolog of NCBI NO: 8919088 NR Description: putative inositol hexaphosphate kinase
  misc_feature (1)..(247): Homolog of NCBI NO: 13509208 NR Description: hypothetical protein [Linum usitatissimum]
  misc_feature (1)..(228): Homolog of NCBI NO: 13509210 NR Description: hypothetical protein [Linum usitatissimum]
  misc_feature (1)..(230): Homolog of NCBI NO: 21430778 NR Description: SD14726p [Drosophila melanogaster]
  misc_feature (1)..(230): Homolog of NCBI NO: 24580674 NR Description: CG13688-PA [Drosophila melanogaster]
  misc_feature (1)..(180): Homolog of NCBI NO: 19705555 NR Description: inositol polyphosphate multikinase [Rattus >gi|13162658|gb|AAG42923.1| inositol polyphosphate multikinase

SEQ ID NO: 86777 - DNA, 767 bp, Arabidopsis thaliana
  misc_feature (1)..(767): Ceres Seq. ID no. 12693299
  misc_feature: MA Experiment ID: 20000173 Result: Up-regulated in Transcription
  misc_feature: MA Experiment 20000173 PARAMETER Experiment Name: At_42deg_Heat_P Parameter: Age (day) Value: 14
  misc_feature: MA Experiment 20000173 PARAMETER Experiment Name: At_42deg_Heat_P Parameter: Organism Value: A. thaliana
  misc_feature: MA Experiment 20000173 PARAMETER Experiment Name: At_42deg_Heat_P Parameter: Plant Line Value: WS
  misc_feature: MA Experiment 20000173 PARAMETER Experiment Name: At_42deg_Heat_P Parameter: Temperature (deg C) Value: 42 vs. 22
  misc_feature: MA Experiment 20000173 PARAMETER Experiment Name: At_42deg_Heat_P Parameter: Timepoint (hr) Value: 6
  misc_feature: MA Experiment 20000173 PARAMETER Experiment Name: At_42deg_Heat_P Parameter: Tissue Value: Aerial
  misc_feature: MA Experiment ID: 20000180 Result: Down-regulated in Transcription
  misc_feature: MA Experiment 20000180 PARAMETER Experiment Name: At_Germinating_Seeds_P Parameter: Age (hr) Value: 24 vs. 0
  misc_feature: MA Experiment 20000180 PARAMETER Experiment Name: At_Germinating_Seeds_P Parameter: Tissue Value: Germinating Seeds
  misc_feature: MA Experiment ID: 20000184 Result: Down-regulated in Transcription
  misc_feature: MA Experiment 20000184 PARAMETER Experiment Name: At_Shoots__P Parameter: Age (day) Value: 7
  misc_feature: MA Experiment 20000184 PARAMETER Experiment Name: At_Shoots__P Parameter: Tissue Value: Shoots vs. Whole Plant
  misc_feature: MA Experiment ID: 20000234 Result: Up-regulated in Transcription
  misc_feature: MA Experiment 20000234 PARAMETER Experiment Name: At_Siliques_P Parameter: Age (day) Value: 21
  misc_feature: MA Experiment 20000234 PARAMETER Experiment Name: At_Siliques_P Parameter: Organism Value: A. thaliana
  misc_feature: MA Experiment 20000234 PARAMETER Experiment Name: At_Siliques_P Parameter: Plant Line Value: WS
  misc_feature: MA Experiment 20000234 PARAMETER Experiment Name: At_Siliques_P Parameter: Tissue Value: Less Than 5mm Siliques vs. Whole Plant
  misc_feature: MA Experiment ID: 20000264 Result: Up-regulated in Transcription
  misc_feature: MA Experiment 20000264 PARAMETER Experiment Name: At_Open_Flower_P Parameter: Age (day) Value: 21
  misc_feature: MA Experiment 20000264 PARAMETER Experiment Name: At_Open_Flower_P Parameter: Plant Line Value: WS
  misc_feature: MA Experiment 20000264 PARAMETER Experiment Name: At_Open_Flower_P Parameter: Tissue Value: Open Flower vs. Whole Plant
  misc_feature: MA Experiment ID: 20000265 Result: Up-regulated in Transcription
  misc_feature: MA Experiment 20000265 PARAMETER Experiment Name: At_Open_Flower_P Parameter: Age (day) Value: 21
  misc_feature: MA Experiment 20000265 PARAMETER Experiment Name: At_Open_Flower_P Parameter: Plant Line Value: WS
  misc_feature: MA Experiment 20000265 PARAMETER Experiment Name: At_Open_Flower_P Parameter: Tissue Value: Closed Flower vs. Whole Plant
  misc_feature: MA Experiment ID: 20000495 Result: Up-regulated in Transcription
  misc_feature: MA Experiment 20000495 PARAMETER Experiment Name: At_Guard_Cells_P Parameter: Harvest Date Value: 8/2/2002
  misc_feature: MA Experiment 20000495 PARAMETER Experiment Name: At_Guard_Cells_P Parameter: Organism Value: A. thaliana
  misc_feature: MA Experiment 20000495 PARAMETER Experiment Name: At_Guard_Cells_P Parameter: Tissue Value: Guard Cells vs. Leaves
  misc_feature: MA Experiment ID: 20001555 Result: Up-regulated in Transcription
  misc_feature: MA Experiment 20001555 PARAMETER Experiment Name: At_Drought_Soil_Dry_P Parameter: Age (day) Value: 24
  misc_feature: MA Experiment 20001555 PARAMETER Experiment Name: At_Drought_Soil_Dry_P Parameter: Organism Value: A. thaliana
  misc_feature: MA Experiment 20001555 PARAMETER Experiment Name: At_Drought_Soil_Dry_P Parameter: Plant Line Value: WS
  misc_feature: MA Experiment 20001555 PARAMETER Experiment Name: At_Drought_Soil_Dry_P Parameter: Post Timepoint (hr) Value: None
  misc_feature: MA Experiment 20001555 PARAMETER Experiment Name: At_Drought_Soil_Dry_P Parameter: Post-Treatment Value: None
  misc_feature: MA Experiment 20001555 PARAMETER Experiment Name: At_Drought_Soil_Dry_P Parameter: Timepoint (day) Value: 10
  misc_feature: MA Experiment 20001555 PARAMETER Experiment Name: At_Drought_Soil_Dry_P Parameter: Treatment Value: Drought vs. No Drought
  misc_feature: MA Experiment ID: 20001556 Result: Up-regulated in Transcription
  misc_feature: MA Experiment 20001556 PARAMETER Experiment Name: At_Drought_Soil_Dry_P Parameter: Age (day) Value: 26
  misc_feature: MA Experiment 20001556 PARAMETER Experiment Name: At_Drought_Soil_Dry_P Parameter: Organism Value: A. thaliana
  misc_feature: MA Experiment 20001556 PARAMETER Experiment Name: At_Drought_Soil_Dry_P Parameter: Plant Line Value: WS
  misc_feature: MA Experiment 20001556 PARAMETER Experiment Name: At_Drought_Soil_Dry_P Parameter: Post Timepoint (hr) Value: None
  misc_feature: MA Experiment 20001556 PARAMETER Experiment Name: At_Drought_Soil_Dry_P Parameter: Post-Treatment Value: None
  misc_feature: MA Experiment 20001556 PARAMETER Experiment Name: At_Drought_Soil_Dry_P Parameter: Timepoint (day) Value: 12
  misc_feature: MA Experiment 20001556 PARAMETER Experiment Name: At_Drought_Soil_Dry_P Parameter: Treatment Value: Drought vs. No Drought
  misc_feature: MA Experiment ID: 20001557 Result: Up-regulated in Transcription
  misc_feature: MA Experiment 20001557 PARAMETER Experiment Name: At_Drought_Soil_Dry_P Parameter: Age (day) Value: 27
  misc_feature: MA Experiment 20001557 PARAMETER Experiment Name: At_Drought_Soil_Dry_P Parameter: Organism Value: A. thaliana
  misc_feature: MA Experiment 20001557 PARAMETER Experiment Name: At_Drought_Soil_Dry_P Parameter: Plant Line Value: WS
  misc_feature: MA Experiment 20001557 PARAMETER Experiment Name: At_Drought_Soil_Dry_P Parameter: Post Timepoint (hr) Value: 3
  misc_feature: MA Experiment 20001557 PARAMETER Experiment Name: At_Drought_Soil_Dry_P Parameter: Post-Treatment Value: Re-Water vs. No Drought
  misc_feature: MA Experiment 20001557 PARAMETER Experiment Name: At_Drought_Soil_Dry_P Parameter: Timepoint (day) Value: 13
  misc_feature: MA Experiment 20001557 PARAMETER Experiment Name: At_Drought_Soil_Dry_P Parameter: Treatment Value: Drought vs. No Drought
  misc_feature: MA Experiment ID: 20001558 Result: Up-regulated in Transcription
  misc_feature: MA Experiment 20001558 PARAMETER Experiment Name: At_Drought_Soil_Dry_P Parameter: Age (day) Value: 27
  misc_feature: MA Experiment 20001558 PARAMETER Experiment Name: At_Drought_Soil_Dry_P Parameter: Organism Value: A. thaliana
  misc_feature: MA Experiment 20001558 PARAMETER Experiment Name: At_Drought_Soil_Dry_P Parameter: Plant Line Value: WS
  misc_feature: MA Experiment 20001558 PARAMETER Experiment Name: At_Drought_Soil_Dry_P Parameter: Post Timepoint (hr) Value: 6
  misc_feature: MA Experiment 20001558 PARAMETER Experiment Name: At_Drought_Soil_Dry_P Parameter: Post-Treatment Value: Re-Water vs. No Drought
  misc_feature: MA Experiment 20001558 PARAMETER Experiment Name: At_Drought_Soil_Dry_P Parameter: Timepoint (day) Value: 13
  misc_feature: MA Experiment 20001558 PARAMETER Experiment Name: At_Drought_Soil_Dry_P Parameter: Treatment Value: Drought vs. No Drought
  misc_feature: MA Experiment ID: 20001560 Result: Up-regulated in Transcription
  misc_feature: MA Experiment 20001560 PARAMETER Experiment Name: At_Drought_Soil_Dry_P Parameter: Age (day) Value: 28
  misc_feature: MA Experiment 20001560 PARAMETER Experiment Name: At_Drought_Soil_Dry_P Parameter: Organism Value: A. thaliana
  misc_feature: MA Experiment 20001560 PARAMETER Experiment Name: At_Drought_Soil_Dry_P Parameter: Plant Line Value: WS
  misc_feature: MA Experiment 20001560 PARAMETER Experiment Name: At_Drought_Soil_Dry_P Parameter: Post Timepoint (hr) Value: None
  misc_feature: MA Experiment 20001560 PARAMETER Experiment Name: At_Drought_Soil_Dry_P Parameter: Post-Treatment Value: None
  misc_feature: MA Experiment 20001560 PARAMETER Experiment Name: At_Drought_Soil_Dry_P Parameter: Timepoint (day) Value: 14
  misc_feature: MA Experiment 20001560 PARAMETER Experiment Name: At_Drought_Soil_Dry_P Parameter: Treatment Value: Drought vs. No Drought
  misc_feature: MA Experiment ID: 20001911 Result: Up-regulated in Transcription
  misc_feature: MA Experiment 20001911 PARAMETER Experiment Name: At_Drought_Reproduction_P Parameter: Age (day) Value: 40
  misc_feature: MA Experiment 20001911 PARAMETER Experiment Name: At_Drought_Reproduction_P Parameter: Organism Value: A. thaliana
  misc_feature: MA Experiment 20001911 PARAMETER Experiment Name: At_Drought_Reproduction_P Parameter: Plant Line Value: WS
  misc_feature: MA Experiment 20001911 PARAMETER Experiment Name: At_Drought_Reproduction_P Parameter: Timepoint (day) Value: 10
  misc_feature: MA Experiment 20001911 PARAMETER Experiment Name: At_Drought_Reproduction_P Parameter: Tissue Value: Flowers
  misc_feature: MA Experiment 20001911 PARAMETER Experiment Name: At_Drought_Reproduction_P Parameter: Treatment Value: Drought vs. No Drought
tccgcctccgtcatagaacgcagaactgggtggatcaccgtggtcgtcaaattcctagctcctcgactccaaaaaaaaatcataaacgtattaccgtctcttgttttcctcgtaaggtattatatcggtcgaagtctccaatcatcggtctgagtaatctctgacaatggctgcaagagttttggcaagtgtgattgtgatgggctctggaatcatagccagggcttgtactcaggcatatcgtcaggcgcttgcaaatgcatcaaaaaccggggttgcgcatgaagcgacacagactattaagagagggttgactataggtgaagcagaagctagacagattcttggtgtaactgagaaatcatcttgggacgagattcttaagaaatacgacacgttgttcgaacgcaatgcgcagaatggaagcttctatctccaatctaaggtccatagagctaaggaatgcttagagactgcataccagaagagtacaacaacaagcgcatgaacaagcaataaaacaataggagcaaatcaggaacatatcttttgatacaagttatagttttaggacagaagtttgaaattgagtggagatagccgcaaaagttgaaattgagacaaggtcggtgatggccggaatgctgccagtaaccgactcaccggcgttgttaaaagtcttgttattttgtttaataatattgacttttctagttcttaggtaaactagttgaattctagcatgtctattgaattatctgagtttg

SEQ ID NO: 86778 - protein, 113 aa, Arabidopsis thaliana; identical to SEQ ID NO: 42406
  peptide (1)..(113): Ceres Seq. ID no. 12693300
  misc_feature (1)..(113): Pfam Name: Uncharacterised protein family (UPF0108) Pfam Description: Uncharacterised protein family (UPF0108)
  misc_feature (1)..(113): Homolog of NCBI NO: 18424521 NR Description: auxin-regulated protein; protein id: At5g61880.1, by cDNA: 146274., supported by cDNA: gi_14517497 [Arabidopsis >gi|14517498|gb|AAK62639.1| AT5g61880/mac9_180 [Arabidopsis
  misc_feature (12)..(113): Homolog of NCBI NO: 10176880 NR Description: gene_id:MAC9.20~unknown protein [Arabidopsis
  misc_feature (1)..(106): Homolog of NCBI NO: 18411133 NR Description: putative protein; protein id: At3g59280.1, by cDNA: gi_14190486 [Arabidopsis thaliana] AT3g59280/F25L23_140 [Arabidopsis thaliana]
  misc_feature (1)..(106): Homolog of NCBI NO: 11357639 NR Description: hypothetical protein F25L23.140 - Arabidopsis >gi|7801678|emb|CAB91598.1| putative protein [Arabidopsis
  misc_feature (1)..(112): Homolog of NCBI NO: 34905796 NR Description: P0401G10.24 [Oryza sativa (japonica
  misc_feature (12)..(108): Homolog of NCBI NO: 37535410 NR Description: putative pol polyprotein [Oryza sativa (japonica group)] >gi|10140747|gb|AAG13579.1| putative pol polyprotein sativa] >gi|31432696|gb|AAP54294.1| putative pol polyprotein
  misc_feature (4)..(103): Homolog of NCBI NO: 19112141 NR Description: conserved hypothetical protein; similar to S. YJL104W [Schizosaccharomyces pombe] Hypothetical protein C713.10 in chromosome II

SEQ ID NO: 86779 - protein, 102 aa, Arabidopsis thaliana; identical to SEQ ID NO: 42407
  peptide (1)..(102): Ceres Seq. ID no. 12693301
  misc_feature (1)..(102): Pfam Name: Uncharacterised protein family (UPF0108) Pfam Description: Uncharacterised protein family (UPF0108)
  misc_feature (1)..(102): Homolog of NCBI NO: 18424521 NR Description: auxin-regulated protein; protein id: At5g61880.1, by cDNA: 146274., supported by cDNA: gi_14517497 [Arabidopsis >gi|14517498|gb|AAK62639.1| AT5g61880/mac9_180 [Arabidopsis
  misc_feature (1)..(102): Homolog of NCBI NO: 10176880 NR Description: gene_id:MAC9.20~unknown protein [Arabidopsis
  misc_feature (1)..(95): Homolog of NCBI NO: 18411133 NR Description: putative protein; protein id: At3g59280.1, by cDNA: gi_14190486 [Arabidopsis thaliana] AT3g59280/F25L23_140 [Arabidopsis thaliana]
  misc_feature (1)..(95): Homolog of NCBI NO: 11357639 NR Description: hypothetical protein F25L23.140 - Arabidopsis >gi|7801678|emb|CAB91598.1| putative protein [Arabidopsis
  misc_feature (1)..(101): Homolog of NCBI NO: 34905796 NR Description: P0401G10.24 [Oryza sativa (japonica
  misc_feature (1)..(97): Homolog of NCBI NO: 37535410 NR Description: putative pol polyprotein [Oryza sativa (japonica group)] >gi|10140747|gb|AAG13579.1| putative pol polyprotein sativa] >gi|31432696|gb|AAP54294.1| putative pol polyprotein
  misc_feature (1)..(92): Homolog of NCBI NO: 19112141 NR Description: conserved hypothetical protein; similar to S. YJL104W [Schizosaccharomyces pombe] Hypothetical protein C713.10 in chromosome II

SEQ ID NO: 86780 - DNA, 809 bp, Arabidopsis thaliana
  misc_feature (1)..(809): Ceres Seq. ID no. 12693313
  misc_feature: MA Experiment ID: 108469 Result: Down-regulated in Transcription
  misc_feature: MA Experiment ID: 108561 Result: Down-regulated in Transcription
  misc_feature: MA Experiment 108561 PARAMETER Experiment Name: At_100uM_ABA_cDNA_P Parameter: Timepoint (hr) Value: 6
  misc_feature: MA Experiment 108561 PARAMETER Experiment Name: At_100uM_ABA_cDNA_P Parameter: Tissue Value: Aerial
  misc_feature: MA Experiment 108561 PARAMETER Experiment Name: At_100uM_ABA_cDNA_P Parameter: Treatment Value: 100uM ABA vs. No Treatment
  misc_feature: MA Experiment ID: 108572 Result: Down-regulated in Transcription
  misc_feature: MA Experiment 108572 PARAMETER Experiment Name: At_Drought_cDNA_P Parameter: Timepoint (hr) Value: 1
  misc_feature: MA Experiment 108572 PARAMETER Experiment Name: At_Drought_cDNA_P Parameter: Tissue Value: Aerial
  misc_feature: MA Experiment 108572 PARAMETER Experiment Name: At_Drought_cDNA_P Parameter: Treatment Value: Drought vs. No Drought
  misc_feature: MA Experiment ID: 108573 Result: Down-regulated in Transcription
  misc_feature: MA Experiment 108573 PARAMETER Experiment Name: At_Drought_cDNA_P Parameter: Timepoint (hr) Value: 6
  misc_feature: MA Experiment 108573 PARAMETER Experiment Name: At_Drought_cDNA_P Parameter: Tissue Value: Aerial
  misc_feature: MA Experiment 108573 PARAMETER Experiment Name: At_Drought_cDNA_P Parameter: Treatment Value: Drought vs. No Drought
  misc_feature: MA Experiment ID: 108574 Result: Up-regulated in Transcription
  misc_feature: MA Experiment 108574 PARAMETER Experiment Name: At_Wounding__cDNA_P Parameter: Timepoint (hr) Value: 1
  misc_feature: MA Experiment 108574 PARAMETER Experiment Name: At_Wounding__cDNA_P Parameter: Tissue Value: Aerial
  misc_feature: MA Experiment 108574 PARAMETER Experiment Name: At_Wounding__cDNA_P Parameter: Treatment Value: Wounding vs. No Wounding
  misc_feature: MA Experiment ID: 108577 Result: Down-regulated in Transcription
  misc_feature: MA Experiment 108577 PARAMETER Experiment Name: At_42deg_Heat_cDNA_P Parameter: Temperature (deg C) Value: 42 vs. 22
  misc_feature: MA Experiment 108577 PARAMETER Experiment Name: At_42deg_Heat_cDNA_P Parameter: Timepoint (hr) Value: 6
  misc_feature: MA Experiment 108577 PARAMETER Experiment Name: At_42deg_Heat_cDNA_P Parameter: Tissue Value: Aerial
  misc_feature: MA Experiment ID: 108579 Result: Up-regulated in Transcription
  misc_feature: MA Experiment 108579 PARAMETER Experiment Name: At_4deg_Cold_cDNA_P Parameter: Temperature (deg C) Value: 4 vs. 22
  misc_feature: MA Experiment 108579 PARAMETER Experiment Name: At_4deg_Cold_cDNA_P Parameter: Timepoint (hr) Value: 6
  misc_feature: MA Experiment 108579 PARAMETER Experiment Name: At_4deg_Cold_cDNA_P Parameter: Tissue Value: Aerial
  misc_feature: MA Experiment ID: 108585 Result: Down-regulated in Transcription
  misc_feature: MA Experiment 108585 PARAMETER Experiment Name: At_5mM_NaNP_cDNA_P Parameter: Timepoint (hr) Value: 6
  misc_feature: MA Experiment 108585 PARAMETER Experiment Name: At_5mM_NaNP_cDNA_P Parameter: Tissue Value: Aerial
  misc_feature: MA Experiment 108585 PARAMETER Experiment Name: At_5mM_NaNP_cDNA_P Parameter: Treatment Value: null
  misc_feature: MA Experiment ID: 108594 Result: Up-regulated in Transcription
  misc_feature: MA Experiment 108594 PARAMETER Experiment Name: At_Ler-rhl_Root_cDNA_P Parameter: Plant Line Value: null
  misc_feature: MA Experiment ID: 108607 Result: Down-regulated in Transcription
  misc_feature: MA Experiment 108607 PARAMETER Experiment Name: At_100uM_ABA_cDNA_P Parameter: Timepoint (hr) Value: 4
  misc_feature: MA Experiment 108607 PARAMETER Experiment Name: At_100uM_ABA_cDNA_P Parameter: Tissue Value: Aerial
  misc_feature: MA Experiment 108607 PARAMETER Experiment Name: At_100uM_ABA_cDNA_P Parameter: Treatment Value: 100uM ABA vs. No Treatment
  misc_feature: MA Experiment ID: 108668 Result: Down-regulated in Transcription
  misc_feature: MA Experiment 108668 PARAMETER Experiment Name: At_2mM_SA_cDNA_P Parameter: Plant Line Value: WS
  misc_feature: MA Experiment 108668 PARAMETER Experiment Name: At_2mM_SA_cDNA_P Parameter: Timepoint (hr) Value: 6
  misc_feature: MA Experiment 108668 PARAMETER Experiment Name: At_2mM_SA_cDNA_P Parameter: Treatment Value: 2mM SA vs. No Treatment
  misc_feature: MA Experiment ID: 20000069 Result: Up-regulated in Transcription
  misc_feature: MA Experiment 20000069 PARAMETER Experiment Name: At_100uM_ABA_Mutants_cDNA_P Parameter: Plant Line Value: CS23
  misc_feature: MA Experiment 20000069 PARAMETER Experiment Name: At_100uM_ABA_Mutants_cDNA_P Parameter: Timepoint (hr) Value: 6
  misc_feature: MA Experiment 20000069 PARAMETER Experiment Name: At_100uM_ABA_Mutants_cDNA_P Parameter: Tissue Value: Aerial
  misc_feature: MA Experiment 20000069 PARAMETER Experiment Name: At_100uM_ABA_Mutants_cDNA_P Parameter: Treatment Value: 100uM ABA vs. No Treatment
  misc_feature: MA Experiment ID: 20000070 Result: Up-regulated in Transcription
  misc_feature: MA Experiment 20000070 PARAMETER Experiment Name: At_100uM_ABA_Mutants_cDNA_P Parameter: Plant Line Value: CS24
  misc_feature: MA Experiment 20000070 PARAMETER Experiment Name: At_100uM_ABA_Mutants_cDNA_P Parameter: Timepoint (hr) Value: 6
  misc_feature: MA Experiment 20000070 PARAMETER Experiment Name: At_100uM_ABA_Mutants_cDNA_P Parameter: Tissue Value: Aerial
  misc_feature: MA Experiment 20000070 PARAMETER Experiment Name: At_100uM_ABA_Mutants_cDNA_P Parameter: Treatment Value: 100uM ABA vs. No Treatment
  misc_feature: MA Experiment ID: 20000071 Result: Up-regulated in Transcription
  misc_feature: MA Experiment 20000071 PARAMETER Experiment Name: At_100uM_ABA_Mutants_cDNA_P Parameter: Plant Line Value: CS8104
  misc_feature: MA Experiment 20000071 PARAMETER Experiment Name: At_100uM_ABA_Mutants_cDNA_P Parameter: Timepoint (hr) Value: 6
  misc_feature: MA Experiment 20000071 PARAMETER Experiment Name: At_100uM_ABA_Mutants_cDNA_P Parameter: Tissue Value: Aerial
  misc_feature: MA Experiment 20000071 PARAMETER Experiment Name: At_100uM_ABA_Mutants_cDNA_P Parameter: Treatment Value: 100uM ABA vs. No Treatment
  misc_feature: MA Experiment ID: 20000072 Result: Up-regulated in Transcription
  misc_feature: MA Experiment 20000072 PARAMETER Experiment Name: At_100uM_ABA_Mutants_cDNA_P Parameter: Plant Line Value: CS8105
  misc_feature: MA Experiment 20000072 PARAMETER Experiment Name: At_100uM_ABA_Mutants_cDNA_P Parameter: Timepoint (hr) Value: 6
  misc_feature: MA Experiment 20000072 PARAMETER Experiment Name: At_100uM_ABA_Mutants_cDNA_P Parameter: Tissue Value: Aerial
  misc_feature: MA Experiment 20000072 PARAMETER Experiment Name: At_100uM_ABA_Mutants_cDNA_P Parameter: Treatment Value: 100uM ABA vs. No Treatment
  misc_feature: MA Experiment ID: 20000086 Result: Up-regulated in Transcription
  misc_feature: MA Experiment 20000086 PARAMETER Experiment Name: At_100uM_ABA_Mutants_cDNA_P Parameter: Plant Line Value: CS22
  misc_feature: MA Experiment 20000086 PARAMETER Experiment Name: At_100uM_ABA_Mutants_cDNA_P Parameter: Timepoint (hr) Value: 6
  misc_feature: MA Experiment 20000086 PARAMETER Experiment Name: At_100uM_ABA_Mutants_cDNA_P Parameter: Tissue Value: Aerial
  misc_feature: MA Experiment 20000086 PARAMETER Experiment Name: At_100uM_ABA_Mutants_cDNA_P Parameter: Treatment Value: 100uM ABA vs. No Treatment
  misc_feature: MA Experiment ID: 20000088 Result: Up-regulated in Transcription
  misc_feature: MA Experiment 20000088 PARAMETER Experiment Name: At_100uM_ABA_Mutants_cDNA_P Parameter: Plant Line Value: Landsberg
  misc_feature: MA Experiment 20000088 PARAMETER Experiment Name: At_100uM_ABA_Mutants_cDNA_P Parameter: Timepoint (hr) Value: 6
  misc_feature: MA Experiment 20000088 PARAMETER Experiment Name: At_100uM_ABA_Mutants_cDNA_P Parameter: Tissue Value: Aerial
  misc_feature: MA Experiment 20000088 PARAMETER Experiment Name: At_100uM_ABA_Mutants_cDNA_P Parameter: Treatment Value: 100uM ABA vs. No Treatment
  misc_feature: MA Experiment ID: 20000089 Result: Up-regulated in Transcription
  misc_feature: MA Experiment ID: 20000090 Result: Up-regulated in Transcription
  misc_feature: MA Experiment ID: 20000111 Result: Down-regulated in Transcription
  misc_feature: MA Experiment 20000111 PARAMETER Experiment Name: At_42deg_Heat_cDNA_P Parameter: Temperature (deg C) Value: 42 vs. 22
  misc_feature: MA Experiment 20000111 PARAMETER Experiment Name: At_42deg_Heat_cDNA_P Parameter: Timepoint (hr) Value: 6
  misc_feature: MA Experiment 20000111 PARAMETER Experiment Name: At_42deg_Heat_cDNA_P Parameter: Tissue Value: Aerial
  misc_feature: MA Experiment ID: 20000169 Result: Down-regulated in Transcription
  misc_feature: MA Experiment 20000169 PARAMETER Experiment Name: At_100uM_ABA_P Parameter: Age (day) Value: 14
  misc_feature: MA Experiment 20000169 PARAMETER Experiment Name: At_100uM_ABA_P Parameter: Organism Value: A. thaliana
  misc_feature: MA Experiment 20000169 PARAMETER Experiment Name: At_100uM_ABA_P Parameter: Plant Line Value: WS
  misc_feature: MA Experiment 20000169 PARAMETER Experiment Name: At_100uM_ABA_P Parameter: Timepoint (hr) Value: 6
  misc_feature: MA Experiment 20000169 PARAMETER Experiment Name: At_100uM_ABA_P Parameter: Tissue Value: Aerial
  misc_feature: MA Experiment 20000169 PARAMETER Experiment Name: At_100uM_ABA_P Parameter: Treatment Value: 100uM ABA vs. No Treatment
  misc_feature: MA Experiment ID: 20000173 Result: Down-regulated in Transcription
  misc_feature: MA Experiment 20000173 PARAMETER Experiment Name: At_42deg_Heat_P Parameter: Age (day) Value: 14
  misc_feature: MA Experiment 20000173 PARAMETER Experiment Name: At_42deg_Heat_P Parameter: Organism Value: A. thaliana
  misc_feature: MA Experiment 20000173 PARAMETER Experiment Name: At_42deg_Heat_P Parameter: Plant Line Value: WS
  misc_feature: MA Experiment 20000173 PARAMETER Experiment Name: At_42deg_Heat_P Parameter: Temperature (deg C) Value: 42 vs. 22
  misc_feature: MA Experiment 20000173 PARAMETER Experiment Name: At_42deg_Heat_P Parameter: Timepoint (hr) Value: 6
  misc_feature: MA Experiment 20000173 PARAMETER Experiment Name: At_42deg_Heat_P Parameter: Tissue Value: Aerial
  misc_feature: MA Experiment ID: 20000182 Result: Down-regulated in Transcription
  misc_feature: MA Experiment 20000182 PARAMETER Experiment Name: At_2mM_SA_P Parameter: Age (day) Value: 14
  misc_feature: MA Experiment 20000182 PARAMETER Experiment Name: At_2mM_SA_P Parameter: Organism Value: A. thaliana
  misc_feature: MA Experiment 20000182 PARAMETER Experiment Name: At_2mM_SA_P Parameter: Plant Line Value: WS
  misc_feature: MA Experiment 20000182 PARAMETER Experiment Name: At_2mM_SA_P Parameter: Timepoint (hr) Value: 6
  misc_feature: MA Experiment 20000182 PARAMETER Experiment Name: At_2mM_SA_P Parameter: Tissue Value: Aerial
  misc_feature: MA Experiment 20000182 PARAMETER Experiment Name: At_2mM_SA_P Parameter: Treatment Value: 2mM SA vs. No Treatment
  misc_feature: MA Experiment ID: 20000184 Result: Down-regulated in Transcription
  misc_feature: MA Experiment 20000184 PARAMETER Experiment Name: At_Shoots__P Parameter: Age (day) Value: 7
  misc_feature: MA Experiment 20000184 PARAMETER Experiment Name: At_Shoots__P Parameter: Tissue Value: Shoots vs. Whole Plant
  misc_feature: MA Experiment ID: 20000185 Result: Down-regulated in Transcription
  misc_feature: MA Experiment 20000185 PARAMETER Experiment Name: At_Roots__P Parameter: Age (day) Value: 7 vs. 21
  misc_feature: MA Experiment 20000185 PARAMETER Experiment Name: At_Roots__P Parameter: Organism Value: A. thaliana
  misc_feature: MA Experiment 20000185 PARAMETER Experiment Name: At_Roots__P Parameter: Tissue Value: Roots vs. Whole Plant
  misc_feature: MA Experiment ID: 20000211 Result: Up-regulated in Transcription
  misc_feature: MA Experiment 20000211 PARAMETER Experiment Name: At_0.001percent_MeJA__P Parameter: Age (day) Value: 14
  misc_feature: MA Experiment 20000211 PARAMETER Experiment Name: At_0.001percent_MeJA__P Parameter: Organism Value: A. thaliana
  misc_feature: MA Experiment 20000211 PARAMETER Experiment Name: At_0.001percent_MeJA__P Parameter: Plant Line Value: WS
  misc_feature: MA Experiment 20000211 PARAMETER Experiment Name: At_0.001percent_MeJA__P Parameter: Timepoint (hr) Value: 1
  misc_feature: MA Experiment 20000211 PARAMETER Experiment Name: At_0.001percent_MeJA__P Parameter: Tissue Value: Aerial
  misc_feature: MA Experiment 20000211 PARAMETER Experiment Name: At_0.001percent_MeJA__P Parameter: Treatment Value: 0.001percent MeJA vs. No Treatment
  misc_feature: MA Experiment ID: 20000213 Result: Up-regulated in Transcription
  misc_feature: MA Experiment 20000213 PARAMETER Experiment Name: At_4deg_Cold_P Parameter: Timepoint (hr) Value: 2
  misc_feature: MA Experiment ID: 20000214 Result: Up-regulated in Transcription
  misc_feature: MA Experiment 20000214 PARAMETER Experiment Name: At_4deg_Cold_P Parameter: Timepoint (hr) Value: 6
  misc_feature: MA Experiment ID: 20000234 Result: Up-regulated in Transcription
  misc_feature: MA Experiment 20000234 PARAMETER Experiment Name: At_Siliques_P Parameter: Age (day) Value: 21
  misc_feature: MA Experiment 20000234 PARAMETER Experiment Name: At_Siliques_P Parameter: Organism Value: A. thaliana
  misc_feature: MA Experiment 20000234 PARAMETER Experiment Name: At_Siliques_P Parameter: Plant Line Value: WS
  misc_feature: MA Experiment 20000234 PARAMETER Experiment Name: At_Siliques_P Parameter: Tissue Value: Less Than 5mm Siliques vs. Whole Plant
  misc_feature: MA Experiment ID: 20000264 Result: Up-regulated in Transcription
  misc_feature: MA Experiment 20000264 PARAMETER Experiment Name: At_Open_Flower_P Parameter: Age (day) Value: 21
  misc_feature: MA Experiment 20000264 PARAMETER Experiment Name: At_Open_Flower_P Parameter: Plant Line Value: WS
  misc_feature: MA Experiment 20000264 PARAMETER Experiment Name: At_Open_Flower_P Parameter: Tissue Value: Open Flower vs. Whole Plant
  misc_feature: MA Experiment ID: 20000268 Result: Down-regulated in Transcription
  misc_feature: MA Experiment 20000268 PARAMETER Experiment Name: At_100mM_NaCl__P Parameter: Age (day) Value: 14
  misc_feature: MA Experiment 20000268 PARAMETER Experiment Name: At_100mM_NaCl__P Parameter: Organism Value: A. thaliana
  misc_feature: MA Experiment 20000268 PARAMETER Experiment Name: At_100mM_NaCl__P Parameter: Plant Line Value: WS
  misc_feature: MA Experiment 20000268 PARAMETER Experiment Name: At_100mM_NaCl__P Parameter: Timepoint (hr) Value: 6
  misc_feature: MA Experiment 20000268 PARAMETER Experiment Name: At_100mM_NaCl__P Parameter: Tissue Value: Whole Plant
  misc_feature: MA Experiment 20000268 PARAMETER Experiment Name: At_100mM_NaCl__P Parameter: Treatment Value: 100mM NaCl vs. No Treatment
  misc_feature: MA Experiment ID: 20000286 Result: Up-regulated in Transcription
  misc_feature: MA Experiment 20000286 PARAMETER Experiment Name: At_Open_Flower_P Parameter: Age (day) Value: 21
  misc_feature: MA Experiment 20000286 PARAMETER Experiment Name: At_Open_Flower_P Parameter: Plant Line Value: WS
  misc_feature: MA Experiment 20000286 PARAMETER Experiment Name: At_Open_Flower_P Parameter: Tissue Value: Half Open vs. Whole Plant
  misc_feature: MA Experiment ID: 20000436 Result: Down-regulated in Transcription
  misc_feature: MA Experiment 20000436 PARAMETER Experiment Name: At_Drought_P Parameter: Age (day) Value: 7
  misc_feature: MA Experiment 20000436 PARAMETER Experiment Name: At_Drought_P Parameter: Organism Value: A. thaliana
  misc_feature: MA Experiment 20000436 PARAMETER Experiment Name: At_Drought_P Parameter: Plant Line Value: WS
  misc_feature: MA Experiment 20000436 PARAMETER Experiment Name: At_Drought_P Parameter: Timepoint (hr) Value: 12
  misc_feature: MA Experiment 20000436 PARAMETER Experiment Name: At_Drought_P Parameter: Tissue Value: Whole Plant
  misc_feature: MA Experiment 20000436 PARAMETER Experiment Name: At_Drought_P Parameter: Treatment Value: Drought vs. No Drought
  misc_feature: MA Experiment ID: 20000438 Result: Down-regulated in Transcription
  misc_feature: MA Experiment 20000438 PARAMETER Experiment Name: At_Shoots__P Parameter: Age (day) Value: 14
  misc_feature: MA Experiment 20000438 PARAMETER Experiment Name: At_Shoots__P Parameter: Tissue Value: Shoots vs. Whole Plant
  misc_feature: MA Experiment ID: 20000439 Result: Down-regulated in Transcription
  misc_feature: MA Experiment 20000439 PARAMETER Experiment Name: At_Roots__P Parameter: Age (day) Value: 14 vs. 21
  misc_feature: MA Experiment 20000439 PARAMETER Experiment Name: At_Roots__P Parameter: Organism Value: A. thaliana
  misc_feature: MA Experiment 20000439 PARAMETER Experiment Name: At_Roots__P Parameter: Tissue Value: Roots vs. Whole Plant
  misc_feature: MA Experiment ID: 20000445 Result: Down-regulated in Transcription
  misc_feature: MA Experiment 20000445 PARAMETER Experiment Name: At_100uM_NAA__P Parameter: Age (day) Value: 14
  misc_feature: MA Experiment 20000445 PARAMETER Experiment Name: At_100uM_NAA__P Parameter: Organism Value: A. thaliana
  misc_feature: MA Experiment 20000445 PARAMETER Experiment Name: At_100uM_NAA__P Parameter: Plant Line Value: WS
  misc_feature: MA Experiment 20000445 PARAMETER Experiment Name: At_100uM_NAA__P Parameter: Timepoint (hr) Value: 6
  misc_feature: MA Experiment 20000445 PARAMETER Experiment Name: At_100uM_NAA__P Parameter: Tissue Value: Aerial
  misc_feature: MA Experiment 20000445 PARAMETER Experiment Name: At_100uM_NAA__P Parameter: Treatment Value: 100uM NAA vs. No Treatment
  misc_feature: MA Experiment ID: 20000460 Result: Down-regulated in Transcription
  misc_feature: MA Experiment 20000460 PARAMETER Experiment Name: At_10percent_PEG_P Parameter: Age (day) Value: 12
  misc_feature: MA Experiment 20000460 PARAMETER Experiment Name: At_10percent_PEG_P Parameter: Organism Value: A. thaliana
  misc_feature: MA Experiment 20000460 PARAMETER Experiment Name: At_10percent_PEG_P Parameter: Plant Line Value: WS
  misc_feature: MA Experiment 20000460 PARAMETER Experiment Name: At_10percent_PEG_P Parameter: Timepoint (day) Value: 12
  misc_feature: MA Experiment 20000460 PARAMETER Experiment Name: At_10percent_PEG_P Parameter: Tissue Value: Whole Plant
  misc_feature: MA Experiment 20000460 PARAMETER Experiment Name: At_10percent_PEG_P Parameter: Treatment Value: 10percent PEG vs. No Treatment
  misc_feature: MA Experiment ID: 20000495 Result: Down-regulated in Transcription
  misc_feature: MA Experiment 20000495 PARAMETER Experiment Name: At_Guard_Cells_P Parameter: Harvest Date Value: 8/2/2002
  misc_feature: MA Experiment 20000495 PARAMETER Experiment Name: At_Guard_Cells_P Parameter: Organism Value: A. thaliana
  misc_feature: MA Experiment 20000495 PARAMETER Experiment Name: At_Guard_Cells_P Parameter: Tissue Value: Guard Cells vs. Leaves
  misc_feature: MA Experiment ID: 20000496 Result: Down-regulated in Transcription
  misc_feature: MA Experiment 20000496 PARAMETER Experiment Name: At_Guard_Cells_P Parameter: Harvest Date Value: 7/19/2002
  misc_feature: MA Experiment 20000496 PARAMETER Experiment Name: At_Guard_Cells_P Parameter: Organism Value: Canola
  misc_feature: MA Experiment 20000496 PARAMETER Experiment Name: At_Guard_Cells_P Parameter: Tissue Value: Guard Cells vs. Leaves
  misc_feature: MA Experiment ID: 20001247 Result: Down-regulated in Transcription
  misc_feature: MA Experiment 20001247 PARAMETER Experiment Name: At_Far-red-induction_P Parameter: Age (day) Value: 7
  misc_feature: MA Experiment 20001247 PARAMETER Experiment Name: At_Far-red-induction_P Parameter: Light Value: Far-red vs. White
  misc_feature: MA Experiment 20001247 PARAMETER Experiment Name: At_Far-red-induction_P Parameter: Organism Value: A. thaliana
  misc_feature: MA Experiment 20001247 PARAMETER Experiment Name: At_Far-red-induction_P Parameter: Plant Line Value: Columbia
  misc_feature: MA Experiment 20001247 PARAMETER Experiment Name: At_Far-red-induction_P Parameter: Timepoint (hr) Value: 1
  misc_feature: MA Experiment 20001247 PARAMETER Experiment Name: At_Far-red-induction_P Parameter: Tissue Value: Whole Plant
  misc_feature: MA Experiment ID: 20001248 Result: Up-regulated in Transcription
  misc_feature: MA Experiment 20001248 PARAMETER Experiment Name: At_Far-red-induction_P Parameter: Age (day) Value: 7
  misc_feature: MA Experiment 20001248 PARAMETER Experiment Name: At_Far-red-induction_P Parameter: Light Value: Far-red vs. White
  misc_feature: MA Experiment 20001248 PARAMETER Experiment Name: At_Far-red-induction_P Parameter: Organism Value: A. thaliana
  misc_feature: MA Experiment 20001248 PARAMETER Experiment Name: At_Far-red-induction_P Parameter: Plant Line Value: Columbia
  misc_feature: MA Experiment 20001248 PARAMETER Experiment Name: At_Far-red-induction_P Parameter: Timepoint (hr) Value: 4
  misc_feature: MA Experiment 20001248 PARAMETER Experiment Name: At_Far-red-induction_P Parameter: Tissue Value: Whole Plant
  misc_feature: MA Experiment ID: 20001450 Result: Down-regulated in Transcription
  misc_feature: MA Experiment 20001450 PARAMETER Experiment Name: At_Far-red-induction_P Parameter: Age (day) Value: 7
  misc_feature: MA Experiment 20001450 PARAMETER Experiment Name: At_Far-red-induction_P Parameter: Light Value: Far-red vs. White
  misc_feature: MA Experiment 20001450 PARAMETER Experiment Name: At_Far-red-induction_P Parameter: Organism Value: A. thaliana
  misc_feature: MA Experiment 20001450 PARAMETER Experiment Name: At_Far-red-induction_P Parameter: Plant Line Value: Columbia
  misc_feature: MA Experiment 20001450 PARAMETER Experiment Name: At_Far-red-induction_P Parameter: Timepoint (hr) Value: 8
  misc_feature: MA Experiment 20001450 PARAMETER Experiment Name: At_Far-red-induction_P Parameter: Tissue Value: Whole Plant
  misc_feature: MA Experiment ID: 20001451 Result: Down-regulated in Transcription
  misc_feature: MA Experiment 20001451 PARAMETER Experiment Name: At_Far-red-induction_P Parameter: Age (day) Value: 7
  misc_feature: MA Experiment 20001451 PARAMETER Experiment Name: At_Far-red-induction_P Parameter: Light Value: Far-red vs. White
  misc_feature: MA Experiment 20001451 PARAMETER Experiment Name: At_Far-red-induction_P Parameter: Organism Value: A. thaliana
  misc_feature: MA Experiment 20001451 PARAMETER Experiment Name: At_Far-red-induction_P Parameter: Plant Line Value: Columbia
  misc_feature: MA Experiment 20001451 PARAMETER Experiment Name: At_Far-red-induction_P Parameter: Timepoint (hr) Value: 24
  misc_feature: MA Experiment 20001451 PARAMETER Experiment Name: At_Far-red-induction_P Parameter: Tissue Value: Whole Plant
  misc_feature: MA Experiment ID: 20001503 Result: Down-regulated in Transcription
  misc_feature: MA Experiment 20001503 PARAMETER Experiment Name: At_Far-red-enriched_P Parameter: Age (day) Value: 7
  misc_feature: MA Experiment 20001503 PARAMETER Experiment Name: At_Far-red-enriched_P Parameter: Light Value: Far-red enriched vs. White
  misc_feature: MA Experiment 20001503 PARAMETER Experiment Name: At_Far-red-enriched_P Parameter: Organism Value: A. thaliana
  misc_feature: MA Experiment 20001503 PARAMETER Experiment Name: At_Far-red-enriched_P Parameter: Plant Line Value: Columbia
  misc_feature: MA Experiment 20001503 PARAMETER Experiment Name: At_Far-red-enriched_P Parameter: Timepoint (day) Value: 3
  misc_feature: MA Experiment 20001503 PARAMETER Experiment Name: At_Far-red-enriched_P Parameter: Tissue Value: Whole Plant
  misc_feature: MA Experiment ID: 20001555 Result: Down-regulated in Transcription
  misc_feature: MA Experiment 20001555 PARAMETER Experiment Name: At_Drought_Soil_Dry_P Parameter: Age (day) Value: 24
  misc_feature: MA Experiment 20001555 PARAMETER Experiment Name: At_Drought_Soil_Dry_P Parameter: Organism Value: A. thaliana
  misc_feature: MA Experiment 20001555 PARAMETER Experiment Name: At_Drought_Soil_Dry_P Parameter: Plant Line Value: WS
  misc_feature: MA Experiment 20001555 PARAMETER Experiment Name: At_Drought_Soil_Dry_P Parameter: Post Timepoint (hr) Value: None
  misc_feature: MA Experiment 20001555 PARAMETER Experiment Name: At_Drought_Soil_Dry_P Parameter: Post-Treatment Value: None
  misc_feature: MA Experiment 20001555 PARAMETER Experiment Name: At_Drought_Soil_Dry_P Parameter: Timepoint (day) Value: 10
  misc_feature: MA Experiment 20001555 PARAMETER Experiment Name: At_Drought_Soil_Dry_P Parameter: Treatment Value: Drought vs. No Drought
  misc_feature: MA Experiment ID: 20001556 Result: Down-regulated in Transcription
  misc_feature: MA Experiment 20001556 PARAMETER Experiment Name: At_Drought_Soil_Dry_P Parameter: Age (day) Value: 26
  misc_feature: MA Experiment 20001556 PARAMETER Experiment Name: At_Drought_Soil_Dry_P Parameter: Organism Value: A. thaliana
  misc_feature: MA Experiment 20001556 PARAMETER Experiment Name: At_Drought_Soil_Dry_P Parameter: Plant Line Value: WS
  misc_feature: MA Experiment 20001556 PARAMETER Experiment Name: At_Drought_Soil_Dry_P Parameter: Post Timepoint (hr) Value: None
  misc_feature: MA Experiment 20001556 PARAMETER Experiment Name: At_Drought_Soil_Dry_P Parameter: Post-Treatment Value: None
  misc_feature: MA Experiment 20001556 PARAMETER Experiment Name: At_Drought_Soil_Dry_P Parameter: Timepoint (day) Value: 12
  misc_feature: MA Experiment 20001556 PARAMETER Experiment Name: At_Drought_Soil_Dry_P Parameter: Treatment Value: Drought vs. No Drought
  misc_feature: MA Experiment ID: 20001557 Result: Up-regulated in Transcription
  misc_feature: MA Experiment 20001557 PARAMETER Experiment Name: At_Drought_Soil_Dry_P Parameter: Age (day) Value: 27
  misc_feature: MA Experiment 20001557 PARAMETER Experiment Name: At_Drought_Soil_Dry_P Parameter: Organism Value: A. thaliana
  misc_feature: MA Experiment 20001557 PARAMETER Experiment Name: At_Drought_Soil_Dry_P Parameter: Plant Line Value: WS
  misc_feature: MA Experiment 20001557 PARAMETER Experiment Name: At_Drought_Soil_Dry_P Parameter: Post Timepoint (hr) Value: 3
  misc_feature: MA Experiment 20001557 PARAMETER Experiment Name: At_Drought_Soil_Dry_P Parameter: Post-Treatment Value: Re-Water vs. No Drought
  misc_feature: MA Experiment 20001557 PARAMETER Experiment Name: At_Drought_Soil_Dry_P Parameter: Timepoint (day) Value: 13
  misc_feature: MA Experiment 20001557 PARAMETER Experiment Name: At_Drought_Soil_Dry_P Parameter: Treatment Value: Drought vs. No Drought
  misc_feature: MA Experiment ID: 20001757 Result: Up-regulated in Transcription
  misc_feature: MA Experiment 20001757 PARAMETER Experiment Name: At_50mM_NH4NO3_L-to-H_P Parameter: Timepoint (hr) Value: 6
  misc_feature: MA Experiment 20001757 PARAMETER Experiment Name: At_50mM_NH4NO3_L-to-H_P Parameter: Tissue Value: Leaf
  misc_feature: MA Experiment 20001757 PARAMETER Experiment Name: At_50mM_NH4NO3_L-to-H_P Parameter: Treatment Value: 50mM NH4NO3 vs 100mM Mannitol
  misc_feature: MA Experiment ID: 20001905 Result: Down-regulated in Transcription
  misc_feature: MA Experiment 20001905 PARAMETER Experiment Name: At_Drought_Reproduction_P Parameter: Age (day) Value: 40
  misc_feature: MA Experiment 20001905 PARAMETER Experiment Name: At_Drought_Reproduction_P Parameter: Organism Value: A. thaliana
  misc_feature: MA Experiment 20001905 PARAMETER Experiment Name: At_Drought_Reproduction_P Parameter: Plant Line Value: WS
  misc_feature: MA Experiment 20001905 PARAMETER Experiment Name: At_Drought_Reproduction_P Parameter: Timepoint (day) Value: 10
  misc_feature: MA Experiment 20001905 PARAMETER Experiment Name: At_Drought_Reproduction_P Parameter: Tissue Value: Rosettes
  misc_feature: MA Experiment 20001905 PARAMETER Experiment Name: At_Drought_Reproduction_P Parameter: Treatment Value: Drought vs. No Drought
  misc_feature: MA Experiment ID: 20001911 Result: Down-regulated in Transcription
  misc_feature: MA Experiment 20001911 PARAMETER Experiment Name: At_Drought_Reproduction_P Parameter: Age (day) Value: 40
  misc_feature: MA Experiment 20001911 PARAMETER Experiment Name: At_Drought_Reproduction_P Parameter: Organism Value: A. thaliana
  misc_feature: MA Experiment 20001911 PARAMETER Experiment Name: At_Drought_Reproduction_P Parameter: Plant Line Value: WS
  misc_feature: MA Experiment 20001911 PARAMETER Experiment Name: At_Drought_Reproduction_P Parameter: Timepoint (day) Value: 10
  misc_feature: MA Experiment 20001911 PARAMETER Experiment Name: At_Drought_Reproduction_P Parameter: Tissue Value: Flowers
  misc_feature: MA Experiment 20001911 PARAMETER Experiment Name: At_Drought_Reproduction_P Parameter: Treatment Value: Drought vs. No Drought
actagaaaacatatcattatcacactttcataaagctcataacatacataaaaaatgggtgaatcttttagattattcaatcatcatcacttcctcacaacttttctcataatcatagccatgctcaaattggttcatacaacaacaacaacaactacaacaacaacaacaaacaccgagttcgtaaaatcatcatgcactttcacaacgtacccaagactctgtttctcttcactctcaactcatgctagtctcatccaaacaagccccaagctcatggctcatgcggctctcaacatcacattagcctcggctaaagtaacttcagcaatgatggtgcgtctctcgaatagtcggctcaagcctaaagaagtctcggccatgagagactgcgtcgaggagttaggtgacacgttggaggagcttaggaaatcgattggtgagatgtgtcagctaagtggctcgaactatgaagtttacataagcgatatacagacttgggtcagtgcggctttgacagatgtgaacacatgtactgacggatttgaaggagaagatatggacgggaaggttaaggttttggttagagggaggattttggttattgctcatttaacaagtaatgctttagctttgattaatcactttgcttctattcatggctaaagagagttatgataagtactgttagtttgttttttattgatttttctagtgattttgtgtgtataatgataatataatgtatgtgtctttatgattccagaatcaatatgtaacaaatgaagtgtttcatgaaaattgatttt

SEQ ID NO: 86781 - protein, 203 aa, Arabidopsis thaliana
  peptide (1)..(203): Ceres Seq. ID no. 12693314
  misc_feature (1)..(203): Homolog of NCBI NO: 30697666 NR Description: pectinesterase family [Arabidopsis thaliana]
  misc_feature (1)..(203): Homolog of NCBI NO: 24417332 NR Description: unknown [Arabidopsis thaliana]
  misc_feature (9)..(203): Homolog of NCBI NO: 8096279 NR Description: DC1.2 homologue [Nicotiana tabacum]
  misc_feature (13)..(202): Homolog of NCBI NO: 15241799 NR Description: ripening-related protein - like; protein id: supported by cDNA: 9669., supported by cDNA: gi_14423453,
  misc_feature (13)..(202): Homolog of NCBI NO: 21618088 NR Description: ripening-related protein-like [Arabidopsis
  misc_feature (15)..(202): Homolog of NCBI NO: 7488727 NR Description: 21K protein precursor - alfalfa
  misc_feature (18)..(200): Homolog of NCBI NO: 7406663 NR Description: putative ripening-related protein [Vitis vinifera]
  misc_feature (13)..(199): Homolog of NCBI NO: 15232790 NR Description: putative protein; protein id: At3g47380.1
  misc_feature (42)..(202): Homolog of NCBI NO: 112717 NR Description: 21 KD PROTEIN PRECURSOR (1.2 PROTEIN)
  misc_feature (29)..(200): Homolog of NCBI NO: 30696750 NR Description: hypothetical protein [Arabidopsis thaliana]
MGESFRLFNHHHFLTTFLIIIAMLKLVHTTTTTTTTTTTNTEFVKSSCTFTTYPRLCFSSLSTHASLIQTSPKLMAHAALNITLASAKVTSAMMVRLSNSRLKPKEVSAMRDCVEELGDTLEELRKSIGEMCQLSGSNYEVYISDIQTWVSAALTDVNTCTDGFEGEDMDGKVKVLVRGRILVIAHLTSNALALINHFASIHG

SEQ ID NO: 86782 - protein, 181 aa, Arabidopsis thaliana
  peptide (1)..(181): Ceres Seq. ID no. 12693315
  misc_feature (1)..(181): Homolog of NCBI NO: 30697666 NR Description: pectinesterase family [Arabidopsis thaliana]
  misc_feature (1)..(181): Homolog of NCBI NO: 24417332 NR Description: unknown [Arabidopsis thaliana]
  misc_feature (1)..(181): Homolog of NCBI NO: 8096279 NR Description: DC1.2 homologue [Nicotiana tabacum]
  misc_feature (1)..(180): Homolog of NCBI NO: 15241799 NR Description: ripening-related protein - like; protein id: supported by cDNA: 9669., supported by cDNA: gi_14423453,
  misc_feature (1)..(180): Homolog of NCBI NO: 21618088 NR Description: ripening-related protein-like [Arabidopsis
  misc_feature (1)..(180): Homolog of NCBI NO: 7488727 NR Description: 21K protein precursor - alfalfa
  misc_feature (1)..(178): Homolog of NCBI NO: 7406663 NR Description: putative ripening-related protein [Vitis vinifera]
  misc_feature (1)..(177): Homolog of NCBI NO: 15232790 NR Description: putative protein; protein id: At3g47380.1
  misc_feature (20)..(180): Homolog of NCBI NO: 112717 NR Description: 21 KD PROTEIN PRECURSOR (1.2 PROTEIN)
  misc_feature (7)..(178): Homolog of NCBI NO: 30696750 NR Description: hypothetical protein [Arabidopsis thaliana]
MLKLVHTTTTTTTTTTTNTEFVKSSCTFTTYPRLCFSSLSTHASLIQTSPKLMAHAALNITLASAKVTSAMMVRLSNSRLKPKEVSAMRDCVEELGDTLEELRKSIGEMCQLSGSNYEVYISDIQTWVSAALTDVNTCTDGFEGEDMDGKVKVLVRGRILVIAHLTSNALALINHFASIHG

SEQ ID NO: 86783 - protein, 129 aa, Arabidopsis thaliana; identical to SEQ ID NO: 26452
  peptide (1)..(129): Ceres Seq. ID no. 12693316
  misc_feature (1)..(129): Homolog of NCBI NO: 30697666 NR Description: pectinesterase family [Arabidopsis thaliana]
  misc_feature (1)..(129): Homolog of NCBI NO: 24417332 NR Description: unknown [Arabidopsis thaliana]
  misc_feature (1)..(129): Homolog of NCBI NO: 8096279 NR Description: DC1.2 homologue [Nicotiana tabacum]
  misc_feature (1)..(128): Homolog of NCBI NO: 15241799 NR Description: ripening-related protein - like; protein id: supported by cDNA: 9669., supported by cDNA: gi_14423453,
  misc_feature (1)..(128): Homolog of NCBI NO: 21618088 NR Description: ripening-related protein-like [Arabidopsis
  misc_feature (1)..(128): Homolog of NCBI NO: 7488727 NR Description: 21K protein precursor - alfalfa
  misc_feature (1)..(126): Homolog of NCBI NO: 7406663 NR Description: putative ripening-related protein [Vitis vinifera]
  misc_feature (1)..(125): Homolog of NCBI NO: 15232790 NR Description: putative protein; protein id: At3g47380.1
  misc_feature (1)..(128): Homolog of NCBI NO: 112717 NR Description: 21 KD PROTEIN PRECURSOR (1.2 PROTEIN)
  misc_feature (1)..(126): Homolog of NCBI NO: 30696750 NR Description: hypothetical protein [Arabidopsis thaliana]

SEQ ID NO: 86784 - DNA, 1811 bp, Arabidopsis thaliana
  misc_feature (1)..(1811): Ceres Seq. ID no. 12693391
  misc_feature: MA Experiment ID: 108573 Result: Up-regulated in Transcription
  misc_feature: MA Experiment 108573 PARAMETER Experiment Name: At_Drought_cDNA_P Parameter: Timepoint (hr) Value: 6
  misc_feature: MA Experiment 108573 PARAMETER Experiment Name: At_Drought_cDNA_P Parameter: Tissue Value: Aerial
  misc_feature: MA Experiment 108573 PARAMETER Experiment Name: At_Drought_cDNA_P Parameter: Treatment Value: Drought vs. No Drought
  misc_feature: MA Experiment ID: 108595 Result: Down-regulated in Transcription
  misc_feature: MA Experiment 108595 PARAMETER Experiment Name: At_Ler-pi_Ovule_cDNA_P Parameter: Plant Line Value: null
  misc_feature: MA Experiment ID: 20000093 Result: Up-regulated in Transcription
  misc_feature: MA Experiment 20000093 PARAMETER Experiment Name: At_42deg_Heat_cDNA_P Parameter: Temperature (deg C) Value: 42 vs. 22
  misc_feature: MA Experiment 20000093 PARAMETER Experiment Name: At_42deg_Heat_cDNA_P Parameter: Timepoint (hr) Value: 0.5
  misc_feature: MA Experiment 20000093 PARAMETER Experiment Name: At_42deg_Heat_cDNA_P Parameter: Tissue Value: Aerial
  misc_feature: MA Experiment ID: 20000112 Result: Up-regulated in Transcription
  misc_feature: MA Experiment 20000112 PARAMETER Experiment Name: At_42deg_Heat_cDNA_P Parameter: Temperature (deg C) Value: 42 vs. 22
  misc_feature: MA Experiment 20000112 PARAMETER Experiment Name: At_42deg_Heat_cDNA_P Parameter: Timepoint (hr) Value: 2
  misc_feature: MA Experiment 20000112 PARAMETER Experiment Name: At_42deg_Heat_cDNA_P Parameter: Tissue Value: Aerial
  misc_feature: MA Experiment ID: 20000113 Result: Up-regulated in Transcription
  misc_feature: MA Experiment 20000113 PARAMETER Experiment Name: At_42deg_Heat_cDNA_P Parameter: Temperature (deg C) Value: 42 vs. 22
  misc_feature: MA Experiment 20000113 PARAMETER Experiment Name: At_42deg_Heat_cDNA_P Parameter: Timepoint (hr) Value: 8
  misc_feature: MA Experiment 20000113 PARAMETER Experiment Name: At_42deg_Heat_cDNA_P Parameter: Tissue Value: Aerial
  misc_feature: MA Experiment ID: 20000144 Result: Up-regulated in Transcription
  misc_feature: MA Experiment 20000144 PARAMETER Experiment Name: At_42deg_Heat_cDNA_P Parameter: Temperature (deg C) Value: 42 vs. 22
  misc_feature: MA Experiment 20000144 PARAMETER Experiment Name: At_42deg_Heat_cDNA_P Parameter: Timepoint (hr) Value: 1
  misc_feature: MA Experiment 20000144 PARAMETER Experiment Name: At_42deg_Heat_cDNA_P Parameter: Tissue Value: Aerial
  misc_feature: MA Experiment ID: 20000171 Result: Up-regulated in Transcription
  misc_feature: MA Experiment 20000171 PARAMETER Experiment Name: At_42deg_Heat_P Parameter: Age (day) Value: 14
  misc_feature: MA Experiment 20000171 PARAMETER Experiment Name: At_42deg_Heat_P Parameter: Organism Value: A. thaliana
  misc_feature: MA Experiment 20000171 PARAMETER Experiment Name: At_42deg_Heat_P Parameter: Plant Line Value: WS
  misc_feature: MA Experiment 20000171 PARAMETER Experiment Name: At_42deg_Heat_P Parameter: Temperature (deg C) Value: 42 vs. 22
  misc_feature: MA Experiment 20000171 PARAMETER Experiment Name: At_42deg_Heat_P Parameter: Timepoint (hr) Value: 1
  misc_feature: MA Experiment 20000171 PARAMETER Experiment Name: At_42deg_Heat_P Parameter: Tissue Value: Aerial
  misc_feature: MA Experiment ID: 20000286 Result: Up-regulated in Transcription
  misc_feature: MA Experiment 20000286 PARAMETER Experiment Name: At_Open_Flower_P Parameter: Age (day) Value: 21
  misc_feature: MA Experiment 20000286 PARAMETER Experiment Name: At_Open_Flower_P Parameter: Plant Line Value: WS
  misc_feature: MA Experiment 20000286 PARAMETER Experiment Name: At_Open_Flower_P Parameter: Tissue Value: Half Open vs. Whole Plant
  misc_feature: MA Experiment ID: 20000794 Result: Up-regulated in Transcription
  misc_feature: MA Experiment 20000794 PARAMETER Experiment Name: At_Petals_P Parameter: Age (day) Value: 23-25 days
  misc_feature: MA Experiment 20000794 PARAMETER Experiment Name: At_Petals_P Parameter: Plant Line Value: WS
  misc_feature: MA Experiment 20000794 PARAMETER Experiment Name: At_Petals_P Parameter: Tissue Value: Petals vs. Whole plant
  misc_feature: MA Experiment ID: 20001451 Result: Up-regulated in Transcription
  misc_feature: MA Experiment 20001451 PARAMETER Experiment Name: At_Far-red-induction_P Parameter: Age (day) Value: 7
  misc_feature: MA Experiment 20001451 PARAMETER Experiment Name: At_Far-red-induction_P Parameter: Light Value: Far-red vs. White
  misc_feature: MA Experiment 20001451 PARAMETER Experiment Name: At_Far-red-induction_P Parameter: Organism Value: A. thaliana
  misc_feature: MA Experiment 20001451 PARAMETER Experiment Name: At_Far-red-induction_P Parameter: Plant Line Value: Columbia
  misc_feature: MA Experiment 20001451 PARAMETER Experiment Name: At_Far-red-induction_P Parameter: Timepoint (hr) Value: 24
  misc_feature: MA Experiment 20001451 PARAMETER Experiment Name: At_Far-red-induction_P Parameter: Tissue Value: Whole Plant
aattcgatttggattgcagaaaaagaaaagaaaagaaaagactaaaaatttggacgataagcagaaaagagagaggagggcctctcgccctcttattaaaaccttgccttctccaaatctgaagatttctcaatcctaaaatcttttttttttcctctttctccgtttctttattttcggaatccaagatcgtgggtcgatcggtttttacacaatccgatcacgacccatctgctctttttcatcctattttgcttcccttgaggtaaatggaaatggaatcatgtaagctcttcatcggtggtatatcttgggaaaccagtgaagatcgtcttcgtgactattttcacagttttggtgaggttttagaggctgttattatgaaggatcgtgccactggccgtgctcgtggctttggtttcgttgtctttgctgatcctaatgttgctgaaagagtcgtcttgcttaaacatatcattgatggtaaaattgttgaggcaaagaaggctgttccaagagatgatcacgtagtatttaataaaagtaacagcagccttcagggatcacctggcccatcaaactccaagaagatctttgtgggaggtttggcatcatccgtgacagaggctgagttcaaaaagtattttgctcagtttgggatgatcactgatgttgtggtgatgtatgaccacagaacccagcggcctagaggctttgggttcatttcatatgactctgaggaagctgttgacaaagtactgcagaagacattccacgaactcaatggtaagatggtggaggtcaaactggctgttcctaaggatatggctctcaacacaatgcggaaccaaatgaatgtaaatagctttggcactagtagaatcagttcattactgaatgagtacacccagggattcagcccgagtccaatctctggttatggagtgaaacctgaagttaggtacagtccagcagtaggtaataggggaggattctcaccgtttggacatggatacggaatcgagctgaattttgagccaaaccagactcagaactacggttctggttccagtggaggctttggacgaccctttagccctggatatgctgcgagtctcggcaggttcggtagccaaatggagtcgggaggagctagtgttgggaacggttctgtcctaaatgcagcaccaaagaaccatttatggggaaatggtggtctaggttacatgtcaaactctccgatatcaagaagcagcttcagtggaaactctggaatgtcttcactaggcagcattggtgacaactggggaacagttgcacgtgcacgcagtagctaccacggtgagagaggaggtgtaggattagaagcaatgagaggagttcatgttggtggttacagcagcggctcaagcatcttggaggcagactctctgtacagcgactcgatgtggctttcgctgcctgcaaaggcagaggaaggattgggaatgggaccattggacttcatgtctagaggaccagctggatacatcaacaggcaaccaaacggaggaattgcagcttagagaagtgacaaatctataccatggagatcagatgattgcagaagagagtttttagaagaggaaaaaagtttattaaaaaaaaaaaaattattggtaccaaaaagcttaaagcttttatttactttttactattttgatttgttgttatagctttcttttcacccttttttctaatttggggttttgtttcttttgtttttatcgttaaagaaaaaagatgtaaacttgagtgatataaaaagagac

SEQ ID NO: 86785 - protein, 431 aa, Arabidopsis thaliana; identical to SEQ ID NO: 26118
  peptide (1)..(431): Ceres Seq. ID no. 12693392
  misc_feature (108)..(178): Pfam Name: RNA recognition motif. (a.k.a. RRM, RBD, or RNP domain) Pfam Description: RNA recognition motif. (a.k.a. RRM, RBD, or RNP
  misc_feature (1)..(431): Homolog of NCBI NO: 18422817 NR Description: heterogeneous nuclear ribonucleoprotein (hnRNP), protein id: At5g47620.1, supported by cDNA: 1876. [Arabidopsis
  misc_feature (1)..(431): Homolog of NCBI NO: 21553963 NR Description: RNA-binding protein-like [Arabidopsis thaliana]
  misc_feature (1)..(357): Homolog of NCBI NO: 9758790 NR Description: RNA-binding protein-like [Arabidopsis thaliana]
  misc_feature (1)..(374): Homolog of NCBI NO: 6648193 NR Description: putative RNA-binding protein [Arabidopsis
  misc_feature (1)..(374): Homolog of NCBI NO: 15292697 NR Description: putative RNA-binding protein [Arabidopsis
  misc_feature (1)..(374): Homolog of NCBI NO: 30680456 NR Description: heterogeneous nuclear ribonucleoprotein (hnRNP),
  misc_feature (1)..(374): Homolog of NCBI NO: 18398061 NR Description: heterogeneous nuclear ribonucleoprotein (hnRNP), protein id: At3g07810.1, supported by cDNA: gi_15292696, by cDNA: gi_16930692 [Arabidopsis thaliana]
  misc_feature (1)..(380): Homolog of NCBI NO: 38175737 NR Description: putative heterogeneous nuclear ribonucleoprotein
  misc_feature (7)..(398): Homolog of NCBI NO: 7487039 NR Description: hypothetical protein T15N24.100 - Arabidopsis
  misc_feature (7)..(398): Homolog of NCBI NO: 18416794 NR Description: heterogeneous nuclear ribonucleoprotein (hnRNP), protein id: At4g26650.1, supported by cDNA: gi_16930502, by cDNA: gi_20453244 [Arabidopsis thaliana]

SEQ ID NO: 86786 - protein, 429 aa, Arabidopsis thaliana; identical to SEQ ID NO: 26119
  peptide (1)..(429): Ceres Seq. ID no. 12693393
  misc_feature (106)..(176): Pfam Name: RNA recognition motif. (a.k.a. RRM, RBD, or RNP domain) Pfam Description: RNA recognition motif. (a.k.a. RRM, RBD, or RNP
  misc_feature (1)..(429): Homolog of NCBI NO: 18422817 NR Description: heterogeneous nuclear ribonucleoprotein (hnRNP), protein id: At5g47620.1, supported by cDNA: 1876. [Arabidopsis
  misc_feature (1)..(429): Homolog of NCBI NO: 21553963 NR Description: RNA-binding protein-like [Arabidopsis thaliana]
  misc_feature (1)..(355): Homolog of NCBI NO: 9758790 NR Description: RNA-binding protein-like [Arabidopsis thaliana]
  misc_feature (1)..(372): Homolog of NCBI NO: 6648193 NR Description: putative RNA-binding protein [Arabidopsis
  misc_feature (1)..(372): Homolog of NCBI NO: 30680456 NR Description: heterogeneous nuclear ribonucleoprotein (hnRNP),
  misc_feature (1)..(372): Homolog of NCBI NO: 18398061 NR Description: heterogeneous nuclear ribonucleoprotein (hnRNP), protein id: At3g07810.1, supported by cDNA: gi_15292696, by cDNA: gi_16930692 [Arabidopsis thaliana]
  misc_feature (1)..(372): Homolog of NCBI NO: 15292697 NR Description: putative RNA-binding protein [Arabidopsis
  misc_feature (1)..(378): Homolog of NCBI NO: 38175737 NR Description: putative heterogeneous nuclear ribonucleoprotein
  misc_feature (5)..(396): Homolog of NCBI NO: 7487039 NR Description: hypothetical protein T15N24.100 - Arabidopsis
  misc_feature (5)..(396): Homolog of NCBI NO: 18416794 NR Description: heterogeneous nuclear ribonucleoprotein (hnRNP), protein id: At4g26650.1, supported by cDNA: gi_16930502, by cDNA: gi_20453244 [Arabidopsis thaliana]

SEQ ID NO: 86787 - protein, 394 aa, Arabidopsis thaliana; identical to SEQ ID NO: 26120
  peptide (1)..(394): Ceres Seq. ID no. 12693394
  misc_feature (71)..(141): Pfam Name: RNA recognition motif. (a.k.a. RRM, RBD, or RNP domain) Pfam Description: RNA recognition motif. (a.k.a. RRM, RBD, or RNP
  misc_feature (1)..(394): Homolog of NCBI NO: 18422817 NR Description: heterogeneous nuclear ribonucleoprotein (hnRNP), protein id: At5g47620.1, supported by cDNA: 1876. [Arabidopsis
  misc_feature (1)..(394): Homolog of NCBI NO: 21553963 NR Description: RNA-binding protein-like [Arabidopsis thaliana]
  misc_feature (1)..(320): Homolog of NCBI NO: 9758790 NR Description: RNA-binding protein-like [Arabidopsis thaliana]
  misc_feature (1)..(337): Homolog of NCBI NO: 6648193 NR Description: putative RNA-binding protein [Arabidopsis
  misc_feature (1)..(337): Homolog of NCBI NO: 30680456 NR Description: heterogeneous nuclear ribonucleoprotein (hnRNP),
  misc_feature (1)..(337): Homolog of NCBI NO: 18398061 NR Description: heterogeneous nuclear ribonucleoprotein (hnRNP), protein id: At3g07810.1, supported by cDNA: gi_15292696, by cDNA: gi_16930692 [Arabidopsis thaliana]
  misc_feature (1)..(337): Homolog of NCBI NO: 15292697 NR Description: putative RNA-binding protein [Arabidopsis
  misc_feature (1)..(343): Homolog of NCBI NO: 38175737 NR Description: putative heterogeneous nuclear ribonucleoprotein
  misc_feature (1)..(361): Homolog of NCBI NO: 7487039 NR Description: hypothetical protein T15N24.100 - Arabidopsis
  misc_feature (1)..(361): Homolog of NCBI NO: 18416794 NR Description: heterogeneous nuclear ribonucleoprotein (hnRNP), protein id: At4g26650.1, supported by cDNA: gi_16930502, by cDNA: gi_20453244 [Arabidopsis thaliana]

SEQ ID NO: 86788 - DNA, 678 bp, Arabidopsis thaliana
  misc_feature (1)..(678): Ceres Seq. ID no. 12693399
  misc_feature: MA Experiment ID: 20001906 Result: Up-regulated in Transcription
  misc_feature: MA Experiment 20001906 PARAMETER Experiment Name: At_Drought_Reproduction_P Parameter: Age (day) Value: 35
  misc_feature: MA Experiment 20001906 PARAMETER Experiment Name: At_Drought_Reproduction_P Parameter: Organism Value: A. thaliana
  misc_feature: MA Experiment 20001906 PARAMETER Experiment Name: At_Drought_Reproduction_P Parameter: Plant Line Value: WS
  misc_feature: MA Experiment 20001906 PARAMETER Experiment Name: At_Drought_Reproduction_P Parameter: Timepoint (day) Value: 5
  misc_feature: MA Experiment 20001906 PARAMETER Experiment Name: At_Drought_Reproduction_P Parameter: Tissue Value: Siliques
  misc_feature: MA Experiment 20001906 PARAMETER Experiment Name: At_Drought_Reproduction_P Parameter: Treatment Value: Drought vs. No Drought
  misc_feature: MA Experiment ID: 20001908 Result: Up-regulated in Transcription
  misc_feature: MA Experiment 20001908 PARAMETER Experiment Name: At_Drought_Reproduction_P Parameter: Age (day) Value: 40
  misc_feature: MA Experiment 20001908 PARAMETER Experiment Name: At_Drought_Reproduction_P Parameter: Organism Value: A. thaliana
  misc_feature: MA Experiment 20001908 PARAMETER Experiment Name: At_Drought_Reproduction_P Parameter: Plant Line Value: WS
  misc_feature: MA Experiment 20001908 PARAMETER Experiment Name: At_Drought_Reproduction_P Parameter: Timepoint (day) Value: 10
  misc_feature: MA Experiment 20001908 PARAMETER Experiment Name: At_Drought_Reproduction_P Parameter: Tissue Value: Siliques
  misc_feature: MA Experiment 20001908 PARAMETER Experiment Name: At_Drought_Reproduction_P Parameter: Treatment Value: Drought vs. No Drought
atggaacgtggaggcttccatggctaccgcaagctgtccgtgaacaacaccactccttctccaccagagggcagtatgcgtcctccagaattcaaccagcctaacaaaaccagtaatggtggtgaggaggagtgcacggtgagggagcaagacaggttcatgcctattgccaacgtgatacggatcatgcggaggatcttacctgctcacgccaagatctcagatgactccaaggagacgatccaagagtgtgtttcggagtacatcagcttcataacaggggaggctaatgagcggtgccagcgggaacagcgcaagaccatcactgctgaggacgtcttgtgggcaatgagcaagctcggttttgatgactacatcgaacccctcacgttgtacctccaccgctacagagagttggaaggtgaaagaggggttagctgcagtgctgggtccgttagtatgaccaacggcttggtggtcaagaggcctaatgggaccatgaccgagtatggagcctacgggcctgtgccagggattcacatggcgcagtaccattatcgtcatcagaacgggtttgttttcagtggtaacgaacctaattctaagatgagtggttcatcttcaggagcaagtggcgccagagttgaagtatttccgactcaacaacataagtactga

SEQ ID NO: 86789 - protein, 225 aa, Arabidopsis thaliana
  peptide (1)..(225): Ceres Seq. ID no. 12693400
  misc_feature (1)..(225): Homolog of NCBI NO: 30695265 NR Description: leafy cotyledon 1-related L1L protein
  misc_feature (23)..(225): Homolog of NCBI NO: 9758795 NR Description: contains similarity to CCAAT-box-binding
  misc_feature (23)..(225): Homolog of NCBI NO: 28393564 NR Description: unknown protein [Arabidopsis thaliana]
  misc_feature (1)..(202): Homolog of NCBI NO: 22536010 NR Description: LEC1-like protein [Phaseolus coccineus]
  misc_feature (38)..(190): Homolog of NCBI NO: 15321716 NR Description: leafy cotyledon1 [Zea mays]
  misc_feature (39)..(170): Homolog of NCBI NO: 30349365 NR Description: leafy cotyledon 1 [Oryza sativa (indica
  misc_feature (45)..(212): Homolog of NCBI NO: 3282674 NR Description: CCAAT-box binding factor HAP3 homolog
  misc_feature (45)..(212): Homolog of NCBI NO: 15219151 NR Description: CCAAT-box binding factor HAP3 homolog; protein At1g21970.1 [Arabidopsis thaliana] >gi|25402948|pir||G86352
MERGGFHGYRKLSVNNTTPSPPEGSMRPPEFNQPNKTSNGGEEECTVREQDRFMPIANVIRIMRRILPAHAKISDDSKETIQECVSEYISFITGEANERCQREQRKTITAEDVLWAMSKLGFDDYIEPLTLYLHRYRELEGERGVSCSAGSVSMTNGLVVKRPNGTMTEYGAYGPVPGIHMAQYHYRHQNGFVFSGNEPNSKMSGSSSGASGARVEVFPTQQHKY

SEQ ID NO: 86790 - protein, 200 aa, Arabidopsis thaliana; identical to SEQ ID NO: 72879
  peptide (1)..(200): Ceres Seq. ID no. 12693401
  misc_feature (1)..(200): Homolog of NCBI NO: 30695265 NR Description: leafy cotyledon 1-related L1L protein
  misc_feature (1)..(200): Homolog of NCBI NO: 9758795 NR Description: contains similarity to CCAAT-box-binding
  misc_feature (1)..(200): Homolog of NCBI NO: 28393564 NR Description: unknown protein [Arabidopsis thaliana]
  misc_feature (1)..(177): Homolog of NCBI NO: 22536010 NR Description: LEC1-like protein [Phaseolus coccineus]
  misc_feature (13)..(165): Homolog of NCBI NO: 15321716 NR Description: leafy cotyledon1 [Zea mays]
  misc_feature (14)..(145): Homolog of NCBI NO: 30349365 NR Description: leafy cotyledon 1 [Oryza sativa (indica
  misc_feature (20)..(187): Homolog of NCBI NO: 3282674 NR Description: CCAAT-box binding factor HAP3 homolog
  misc_feature (20)..(187): Homolog of NCBI NO: 15219151 NR Description: CCAAT-box binding factor HAP3 homolog; protein At1g21970.1 [Arabidopsis thaliana] >gi|25402948|pir||G86352

SEQ ID NO: 86791 - protein, 172 aa, Arabidopsis thaliana; identical to SEQ ID NO: 72880
  peptide (1)..(172): Ceres Seq. ID no. 12693402
  misc_feature (1)..(172): Homolog of NCBI NO: 30695265 NR Description: leafy cotyledon 1-related L1L protein
  misc_feature (1)..(172): Homolog of NCBI NO: 9758795 NR Description: contains similarity to CCAAT-box-binding
  misc_feature (1)..(172): Homolog of NCBI NO: 28393564 NR Description: unknown protein [Arabidopsis thaliana]
  misc_feature (1)..(149): Homolog of NCBI NO: 22536010 NR Description: LEC1-like protein [Phaseolus coccineus]
  misc_feature (1)..(137): Homolog of NCBI NO: 15321716 NR Description: leafy cotyledon1 [Zea mays]
  misc_feature (1)..(117): Homolog of NCBI NO: 30349365 NR Description: leafy cotyledon 1 [Oryza sativa (indica
  misc_feature (1)..(159): Homolog of NCBI NO: 3282674 NR Description: CCAAT-box binding factor HAP3 homolog
  misc_feature (1)..(159): Homolog of NCBI NO: 15219151 NR Description: CCAAT-box binding factor HAP3 homolog; protein At1g21970.1 [Arabidopsis thaliana] >gi|25402948|pir||G86352

SEQ ID NO: 86792 - DNA, 1254 bp, Arabidopsis thaliana
  misc_feature (1)..(1254): Ceres Seq. ID no. 12693411
  misc_feature: MA Experiment ID: 20000171 Result: Up-regulated in Transcription
  misc_feature: MA Experiment 20000171 PARAMETER Experiment Name: At_42deg_Heat_P Parameter: Age (day) Value: 14
  misc_feature: MA Experiment 20000171 PARAMETER Experiment Name: At_42deg_Heat_P Parameter: Organism Value: A. thaliana
  misc_feature: MA Experiment 20000171 PARAMETER Experiment Name: At_42deg_Heat_P Parameter: Plant Line Value: WS
  misc_feature: MA Experiment 20000171 PARAMETER Experiment Name: At_42deg_Heat_P Parameter: Temperature (deg C) Value: 42 vs. 22
  misc_feature: MA Experiment 20000171 PARAMETER Experiment Name: At_42deg_Heat_P Parameter: Timepoint (hr) Value: 1
  misc_feature: MA Experiment 20000171 PARAMETER Experiment Name: At_42deg_Heat_P Parameter: Tissue Value: Aerial
  misc_feature: MA Experiment ID: 20000173 Result: Up-regulated in Transcription
  misc_feature: MA Experiment 20000173 PARAMETER Experiment Name: At_42deg_Heat_P Parameter: Age (day) Value: 14
  misc_feature: MA Experiment 20000173 PARAMETER Experiment Name: At_42deg_Heat_P Parameter: Organism Value: A. thaliana
  misc_feature: MA Experiment 20000173 PARAMETER Experiment Name: At_42deg_Heat_P Parameter: Plant Line Value: WS
  misc_feature: MA Experiment 20000173 PARAMETER Experiment Name: At_42deg_Heat_P Parameter: Temperature (deg C) Value: 42 vs. 22
  misc_feature: MA Experiment 20000173 PARAMETER Experiment Name: At_42deg_Heat_P Parameter: Timepoint (hr) Value: 6
  misc_feature: MA Experiment 20000173 PARAMETER Experiment Name: At_42deg_Heat_P Parameter: Tissue Value: Aerial
atgactctgacaatacgttttgacttgtgtagtttattgtatattcagtttaactctgtcacccgccgtgttcaaccttgctggttcagagttccacaggttggtatggttgccatcaacgatgggattctacttcgtaatcacatccacaggattctcaaagcatttccgtttaagaagtcccaaacttcggaacccttctctgtatcagcaaatcctcctccggtggtacaacaacatctgtctccggaggcattgtcggggcaaaaaactcagattggagctggtcaatcaaactggcatccccctgattgggcgattgagcctcgtgccggtgtctactctctggaagttgtgaaagacggccagatccttgatcggattcatctagatagacgaaggcatatcttcgggagacaacatcagacttgtgattttgtccttgatcatcagtctgtttcccgccagcatgccgcagttgttcctcacaagaatggcagcatctttgtgattgacttgggatcagctcatggtacgtttgttgcaaatgagaggttgactaaagatactcctgtagagcttgaagtgggtcaatccttacgatttgctgcctccacaagaatctaccttctgagaaagaacagtgaggctctcttttctcgccctccacctccagctgagattaagcttcctccacctcctgatgcttctgatgaggaagctgttgttgcttacaataccttgctgaatcgatatggtttaagcaatggagaatctggtggtatgttagggaaaaggaaagagaagaccggatcagaagcgggagtggctaagaggatgaagaaagtgagagtgagcttcagggatcaactaggaggagagctggctgagattgttggcatgtctgatggagcagacgtggaaacagagcctggtcctataaatgtcaaagaaggaagcctcgttgggaaatatgaatcactggtgcgagtgacactcatacccaaaggcaaagtgaaggaagagaaagcctttacaggaggaacaagaggaggtgtaacagatcgactccaggaagctatgaatatgttgaaacggggtccaaaaacagggatttacgatgacctttacggtggtgactcacttgccaaggctgttggtacgtcatgggcttctgtgagtcaaccagcagctgaaactgaatgtggaggggttggtgaagaagatgataacgacgatctgtttggtgactaa

SEQ ID NO: 86793 - protein, 417 aa, Arabidopsis thaliana
  peptide (1)..(417): Ceres Seq. ID no. 12693412
  misc_feature (135)..(203): Pfam Name: FHA domain Pfam Description: FHA domain
  misc_feature (58)..(417): Homolog of NCBI NO: 15238804 NR Description: unknown protein; protein id: At5g47790.1, by cDNA: gi_18700140 [Arabidopsis thaliana] gene_id:MCA23.11~unknown protein [Arabidopsis thaliana]
  misc_feature (78)..(417): Homolog of NCBI NO: 24414059 NR Description: hypothetical protein~similar to Arabidopsis
  misc_feature (103)..(353): Homolog of NCBI NO: 38174471 NR Description: Unknown (protein for MGC:69160) [Xenopus laevis]
  misc_feature (103)..(217): Homolog of NCBI NO: 32766445 NR Description: Unknown (protein for MGC:63827) [Danio rerio]
  misc_feature (103)..(360): Homolog of NCBI NO: 27807053 NR Description: protein phosphatase 1, regulatory (inhibitor)
  misc_feature (103)..(353): Homolog of NCBI NO: 27732693 NR Description: similar to expressed sequence AU044684;
  misc_feature (103)..(218): Homolog of NCBI NO: 13699256 NR Description: protein phosphatase 1 regulatory inhibitor
  misc_feature (103)..(218): Homolog of NCBI NO: 22122685 NR Description: expressed sequence AU044684; hypothetical protein [Mus musculus] >gi|19344095|gb|AAH25479.1| Similar to protein
  misc_feature (103)..(290): Homolog of NCBI NO: 19922418 NR Description: Nuclear inhibitor of PP1 CG8980-PA
  misc_feature (103)..(293): Homolog of NCBI NO: 34898708 NR Description: contains ESTs
MTLTIRFDLCSLLYIQFNSVTRRVQPCWFRVPQVGMVAINDGILLRNHIHRILKAFPFKKSQTSEPFSVSANPPPVVQQHLSPEALSGQKTQIGAGQSNWHPPDWAIEPRAGVYSLEVVKDGQILDRIHLDRRRHIFGRQHQTCDFVLDHQSVSRQHAAVVPHKNGSIFVIDLGSAHGTFVANERLTKDTPVELEVGQSLRFAASTRIYLLRKNSEALFSRPPPPAEIKLPPPPDASDEEAVVAYNTLLNRYGLSNGESGGMLGKRKEKTGSEAGVAKRMKKVRVSFRDQLGGELAEIVGMSDGADVETEPGPINVKEGSLVGKYESLVRVTLIPKGKVKEEKAFTGGTRGGVTDRLQEAMNMLKRGPKTGIYDDLYGGDSLAKAVGTSWASVSQPAAETECGGVGEEDDNDDLFGD

SEQ ID NO: 86794 - protein, 382 aa, Arabidopsis thaliana
  peptide (1)..(382): Ceres Seq. ID no. 12693413
  misc_feature (100)..(168): Pfam Name: FHA domain Pfam Description: FHA domain
  misc_feature (23)..(382): Homolog of NCBI NO: 15238804 NR Description: unknown protein; protein id: At5g47790.1, by cDNA: gi_18700140 [Arabidopsis thaliana] gene_id:MCA23.11~unknown protein [Arabidopsis thaliana]
  misc_feature (43)..(382): Homolog of NCBI NO: 24414059 NR Description: hypothetical protein~similar to Arabidopsis
  misc_feature (68)..(318): Homolog of NCBI NO: 38174471 NR Description: Unknown (protein for MGC:69160) [Xenopus laevis]
  misc_feature (68)..(182): Homolog of NCBI NO: 32766445 NR Description: Unknown (protein for MGC:63827) [Danio rerio]
  misc_feature (68)..(325): Homolog of NCBI NO: 27807053 NR Description: protein phosphatase 1, regulatory (inhibitor)
  misc_feature (68)..(318): Homolog of NCBI NO: 27732693 NR Description: similar to expressed sequence AU044684;
  misc_feature (68)..(183): Homolog of NCBI NO: 13699256 NR Description: protein phosphatase 1 regulatory inhibitor
  misc_feature (68)..(183): Homolog of NCBI NO: 22122685 NR Description: expressed sequence AU044684; hypothetical protein [Mus musculus] >gi|19344095|gb|AAH25479.1| Similar to protein
  misc_feature (68)..(255): Homolog of NCBI NO: 19922418 NR Description: Nuclear inhibitor of PP1 CG8980-PA
  misc_feature (68)..(258): Homolog of NCBI NO: 34898708 NR Description: contains ESTs
MVAINDGILLRNHIHRILKAFPFKKSQTSEPFSVSANPPPVVQQHLSPEALSGQKTQIGAGQSNWHPPDWAIEPRAGVYSLEVVKDGQILDRIHLDRRRHIFGRQHQTCDFVLDHQSVSRQHAAVVPHKNGSIFVIDLGSAHGTFVANERLTKDTPVELEVGQSLRFAASTRIYLLRKNSEALFSRPPPPAEIKLPPPPDASDEEAVVAYNTLLNRYGLSNGESGGMLGKRKEKTGSEAGVAKRMKKVRVSFRDQLGGELAEIVGMSDGADVETEPGPINVKEGSLVGKYESLVRVTLIPKGKVKEEKAFTGGTRGGVTDRLQEAMNMLKRGPKTGIYDDLYGGDSLAKAVGTSWASVSQPAAETECGGVGEEDDNDDLFGD

SEQ ID NO: 86795 - DNA, 2691 bp, Arabidopsis thaliana
  misc_feature (1)..(2691): Ceres Seq. ID no. 12693429
  misc_feature: MA Experiment ID: 20000314 Result: Down-regulated in Transcription
  misc_feature: MA Experiment 20000314 PARAMETER Experiment Name: At_14day_Shoots-Roots_Sub_P Parameter: Age (day) Value: 14
  misc_feature: MA Experiment 20000314 PARAMETER Experiment Name: At_14day_Shoots-Roots_Sub_P Parameter: Organism Value: A. thaliana
  misc_feature: MA Experiment 20000314 PARAMETER Experiment Name: At_14day_Shoots-Roots_Sub_P Parameter: Plant Line Value: WS
  misc_feature: MA Experiment 20000314 PARAMETER Experiment Name: At_14day_Shoots-Roots_Sub_P Parameter: Tissue Value: Roots vs. Whole Plant
  misc_feature: MA Experiment ID: 20000315 Result: Down-regulated in Transcription
  misc_feature: MA Experiment 20000315 PARAMETER Experiment Name: At_14day_Shoots-Roots_Sub_P Parameter: Age (day) Value: 14
  misc_feature: MA Experiment 20000315 PARAMETER Experiment Name: At_14day_Shoots-Roots_Sub_P Parameter: Organism Value: A. thaliana
  misc_feature: MA Experiment 20000315 PARAMETER Experiment Name: At_14day_Shoots-Roots_Sub_P Parameter: Plant Line Value: WS
  misc_feature: MA Experiment 20000315 PARAMETER Experiment Name: At_14day_Shoots-Roots_Sub_P Parameter: Tissue Value: Shoots vs. Whole Plant
  misc_feature: MA Experiment ID: 20000327 Result: Down-regulated in Transcription
  misc_feature: MA Experiment 20000327 PARAMETER Experiment Name: At_42deg_Heat_Sub_P Parameter: Age (day) Value: 14
  misc_feature: MA Experiment 20000327 PARAMETER Experiment Name: At_42deg_Heat_Sub_P Parameter: Organism Value: A. thaliana
  misc_feature: MA Experiment 20000327 PARAMETER Experiment Name: At_42deg_Heat_Sub_P Parameter: Plant Line Value: WS
  misc_feature: MA Experiment 20000327 PARAMETER Experiment Name: At_42deg_Heat_Sub_P Parameter: Temperature (deg C) Value: 42 vs. 22
  misc_feature: MA Experiment 20000327 PARAMETER Experiment Name: At_42deg_Heat_Sub_P Parameter: Timepoint (hr) Value: 1
  misc_feature: MA Experiment 20000327 PARAMETER Experiment Name: At_42deg_Heat_Sub_P Parameter: Tissue Value: Aerial
  misc_feature: MA Experiment ID: 20000328 Result: Down-regulated in Transcription
  misc_feature: MA Experiment 20000328 PARAMETER Experiment Name: At_42deg_Heat_Sub_P Parameter: Age (day) Value: 14
  misc_feature: MA Experiment 20000328 PARAMETER Experiment Name: At_42deg_Heat_Sub_P Parameter: Organism Value: A. thaliana
  misc_feature: MA Experiment 20000328 PARAMETER Experiment Name: At_42deg_Heat_Sub_P Parameter: Plant Line Value: WS
  misc_feature: MA Experiment 20000328 PARAMETER Experiment Name: At_42deg_Heat_Sub_P Parameter: Temperature (deg C) Value: 42 vs. 22
  misc_feature: MA Experiment 20000328 PARAMETER Experiment Name: At_42deg_Heat_Sub_P Parameter: Timepoint (hr) Value: 6
  misc_feature: MA Experiment 20000328 PARAMETER Experiment Name: At_42deg_Heat_Sub_P Parameter: Tissue Value: Aerial
  misc_feature: MA Experiment ID: 20000329 Result: Up-regulated in Transcription
  misc_feature: MA Experiment 20000329 PARAMETER Experiment Name: At_4deg_Cold_Sub_P Parameter: Age (day) Value: 14
  misc_feature: MA Experiment 20000329 PARAMETER Experiment Name: At_4deg_Cold_Sub_P Parameter: Organism Value: A. thaliana
  misc_feature: MA Experiment 20000329 PARAMETER Experiment Name: At_4deg_Cold_Sub_P Parameter: Plant Line Value: WS
  misc_feature: MA Experiment 20000329 PARAMETER Experiment Name: At_4deg_Cold_Sub_P Parameter: Temperature (deg C) Value: 4 vs. 22
  misc_feature: MA Experiment 20000329 PARAMETER Experiment Name: At_4deg_Cold_Sub_P Parameter: Timepoint (hr) Value: 6
  misc_feature: MA Experiment 20000329 PARAMETER Experiment Name: At_4deg_Cold_Sub_P Parameter: Tissue Value: Aerial
  misc_feature: MA Experiment ID: 20000355 Result: Down-regulated in Transcription
  misc_feature: MA Experiment 20000355 PARAMETER Experiment Name: At_Siliques_Sub_P Parameter: Age (day) Value: 21
  misc_feature: MA Experiment 20000355 PARAMETER Experiment Name: At_Siliques_Sub_P Parameter: Organism Value: A. thaliana
  misc_feature: MA Experiment 20000355 PARAMETER Experiment Name: At_Siliques_Sub_P Parameter: Plant Line Value: WS
  misc_feature: MA Experiment 20000355 PARAMETER Experiment Name: At_Siliques_Sub_P Parameter: Tissue Value: Less Than 5mm Siliques vs. Whole Plant
atgagacgaggcaattcaagtaacgaccatgaacttgggattctacgaggagctaactcggacaccaactcggacacggagagcatcgctagcgaccgtggtgcctttagcggtccgcttggccggcctaaacgtgcgtccaagaaaaacgcaagattcgccgacgatcttcccaagagaagcaatagtgttgctggcggccgtggtgatgacgatgagtacgtggagatcacgctagacatcagggacgactcggtggccgtccatagtgtccaacaagcagctggaggtggaggccacctggaggacccggagctagcccttcttacgaagaagactctcgagagcagcctcaacaacaccacctccttatctttcttccgaagcacctcctcacgcatcaagaacgcctcccgcgagctccgccgcgtgttctctagacgtccctccccggccgtgcggcggtttgaccgcacgagctccgcggccatccacgcactcaaaggtctcaagttcattgccaccaagacggccgcatggccggccgtcgaccaacgtttcgataaactctccgctgattccaacggcctcttactctctgccaagttttgggaatgcttaggaatgaataaggaatctaaagacttcgctgaccagctctttagagcattagctcgccggaataacgtctccggcgatgcaatcacaaaggaacaggtggacaaagatgaagatgggcgagtaacagaagaagaggtggctgagattattagtcttagtgcttctgcaaacaagctctcaaatattcaaaagcaagccaaagaatatgcggcactgataatggaagagttggacccagacaatgctgggtttattatgatcgaaaacttggaaatgttgctattacaagcaccaaaccagtcggtgcggatgggagacagcaggatacttagtcagatgttaagtcagaagcttagaccggcaaaagagagcaaccctttagtgagatggtcggagaaaatcaaatatttcatacttgacaattggcagagactatggataatgatgttatggcttggcatctgtggtggcctctttacttataaattcattcagtacaagaacaaagctgcctatggtgtcatgggttattgcgtttgtgtcgccaaaggaggcgccgagactctcaaattcaacatggctctcatattgttgcctgtttgtcgaaacaccatcacttggcttaggaacaagactaagcttggtactgtcgttccttttgatgatagtcttaacttccacaaggttattgcaagcgggatagtcgtcggtgttttactccatgcgggtgcccatttaacgtgtgattttccacgtttaattgccgcggatgaggacacctatgagccgatggaaaaatactttggggatcaaccgactagctactggtggtttgtgaaaggagtggaaggatggactggcattgtgatggttgtgctaatggctatagcctttacactcgcgacgccttggttccgacgtaacaagcttaacttacctaacttcctcaagaagcttaccggtttcaacgccttttggtacacccaccatttgttcatcattgtttatgctcttctcattgtccatggtatcaagctctacctcacaaagatttggtatcagaaaacgacatggatgtatcttgctgtacccatccttctatatgcatcggagaggctgctccgtgctttcagatcaagcatcaaaccggttaagatgatcaaggtggctgtttaccccgggaacgtgttgtctctacacatgacgaagccacaaggattcaaatacaaaagtggacagttcatgttggtgaactgccgagccgtatctccattcgaatggcatcctttctcaatcacatcagctcccggagacgattacctgagcgtacatatccgcactctcggtgactggacacgtaagctcaggaccgttttctccgaggtttgcaaacctcctaccgccggtaaaagcggtcttctccgagcagacggaggagatggaaacctcccgttcccgaaggtccttatcgacggtccatacggtgctcccgcacaagactacaagaaatacgacgtggtactcctcgtaggtctcggcattggagccacgcctatgatcagtatccttaaggacatcatcaacaacatgaaaggtcctgaccgcgacagcgacattgagaacaataacagtaacaacaatagtaaagggtttaagacaaggaaagcttatttctactgggtgactagggaacaaggatcattcgagtggttcaagggaataatggacgagatttcggagttagacgaggaaggaatcatcgagcttcacaattattgcacgagtgtgtacgaggaaggtgatgcaagagtggctctcattgccatgcttcagtcgttgcaacacgctaagaacggtgtggatgttgtgtcgggtacacgtgtcaagtcccacttcgctaaacctaactggagacaagtctacaagaagatcgctgttcaacatcccggcaaaagaataggagtcttctactgtggaatgccaggaatgataaaggaattaaaaaatctagctttggatttttctcgaaagacaactaccaagtttgacttccacaaagagaacttctag

SEQ ID NO: 86796 - protein, 896 aa, Arabidopsis thaliana
  peptide (1)..(896): Ceres Seq. ID no. 12693430
  misc_feature (382)..(895): Pfam Name: Ferric reductase like transmembrane component Pfam Description: Ferric reductase like transmembrane component
  misc_feature (218)..(896): Homolog of NCBI NO: 15241361 NR Description: respiratory burst oxidase protein; protein id: [Arabidopsis thaliana] >gi|9758253|dbj|BAB08752.1| respiratory
  misc_feature (218)..(896): Homolog of NCBI NO: 26449420 NR Description: putative respiratory burst oxidase protein
  misc_feature (23)..(240): Homolog of NCBI NO: 15241361 NR Description: respiratory burst oxidase protein; protein id: [Arabidopsis thaliana] >gi|9758253|dbj|BAB08752.1| respiratory
  misc_feature (23)..(240): Homolog of NCBI NO: 26449420 NR Description: putative respiratory burst oxidase protein
  misc_feature (240)..(896): Homolog of NCBI NO: 3242781 NR Description: respiratory burst oxidase protein A [Arabidopsis
  misc_feature (69)..(252): Homolog of NCBI NO: 3242781 NR Description: respiratory burst oxidase protein A [Arabidopsis
  misc_feature (240)..(896): Homolog of NCBI NO: 15240778 NR Description: respiratory burst oxidase protein A; protein id: [Arabidopsis thaliana] >gi|11282606|pir||T49878 respiratory burst
  misc_feature (69)..(252): Homolog of NCBI NO: 15240778 NR Description: respiratory burst oxidase protein A; protein id: [Arabidopsis thaliana] >gi|11282606|pir||T49878 respiratory burst
  misc_feature (240)..(896): Homolog of NCBI NO: 30686753 NR Description: respiratory burst oxidase (NADPH oxidase),
  misc_feature (116)..(242): Homolog of NCBI NO: 30686753 NR Description: respiratory burst oxidase (NADPH oxidase),
MRRGNSSNDHELGILRGANSDTNSDTESIASDRGAFSGPLGRPKRASKKNARFADDLPKRSNSVAGGRGDDDEYVEITLDIRDDSVAVHSVQQAAGGGGHLEDPELALLTKKTLESSLNNTTSLSFFRSTSSRIKNASRELRRVFSRRPSPAVRRFDRTSSAAIHALKGLKFIATKTAAWPAVDQRFDKLSADSNGLLLSAKFWECLGMNKESKDFADQLFRALARRNNVSGDAITKEQVDKDEDGRVTEEEVAEIISLSASANKLSNIQKQAKEYAALIMEELDPDNAGFIMIENLEMLLLQAPNQSVRMGDSRILSQMLSQKLRPAKESNPLVRWSEKIKYFILDNWQRLWIMMLWLGICGGLFTYKFIQYKNKAAYGVMGYCVCVAKGGAETLKFNMALILLPVCRNTITWLRNKTKLGTVVPFDDSLNFHKVIASGIVVGVLLHAGAHLTCDFPRLIAADEDTYEPMEKYFGDQPTSYWWFVKGVEGWTGIVMVVLMAIAFTLATPWFRRNKLNLPNFLKKLTGFNAFWYTHHLFIIVYALLIVHGIKLYLTKIWYQKTTWMYLAVPILLYASERLLRAFRSSIKPVKMIKVAVYPGNVLSLHMTKPQGFKYKSGQFMLVNCRAVSPFEWHPFSITSAPGDDYLSVHIRTLGDWTRKLRTVFSEVCKPPTAGKSGLLRADGGDGNLPFPKVLIDGPYGAPAQDYKKYDVVLLVGLGIGATPMISILKDIINNMKGPDRDSDIENNNSNNNSKGFKTRKAYFYWVTREQGSFEWFKGIMDEISELDEEGIIELHNYCTSVYEEGDARVALIAMLQSLQHAKNGVDVVSGTRVKSHFAKPNWRQVYKKIAVQHPGKRIGVFYCGMPGMIKELKNLALDFSRKTTTKFDFHKENF

SEQ ID NO: 86797 - protein, 688 aa, Arabidopsis thaliana
  peptide (1)..(688): Ceres Seq. ID no. 12693431
  misc_feature (174)..(687): Pfam Name: Ferric reductase like transmembrane component Pfam Description: Ferric reductase like transmembrane component
  misc_feature (10)..(688): Homolog of NCBI NO: 15241361 NR Description: respiratory burst oxidase protein; protein id: [Arabidopsis thaliana] >gi|9758253|dbj|BAB08752.1| respiratory
  misc_feature (10)..(688): Homolog of NCBI NO: 26449420 NR Description: putative respiratory burst oxidase protein
  misc_feature (1)..(32): Homolog of NCBI NO: 15241361 NR Description: respiratory burst oxidase protein; protein id: [Arabidopsis thaliana] >gi|9758253|dbj|BAB08752.1| respiratory
  misc_feature (1)..(32): Homolog of NCBI NO: 26449420 NR Description: putative respiratory burst oxidase protein
  misc_feature (32)..(688): Homolog of NCBI NO: 3242781 NR Description: respiratory burst oxidase protein A [Arabidopsis
  misc_feature (1)..(44): Homolog of NCBI NO: 3242781 NR Description: respiratory burst oxidase protein A [Arabidopsis
  misc_feature (32)..(688): Homolog of NCBI NO: 15240778 NR Description: respiratory burst oxidase protein A; protein id: [Arabidopsis thaliana] >gi|11282606|pir||T49878 respiratory burst
  misc_feature (1)..(44): Homolog of NCBI NO: 15240778 NR Description: respiratory burst oxidase protein A; protein id: [Arabidopsis thaliana] >gi|11282606|pir||T49878 respiratory burst
  misc_feature (32)..(688): Homolog of NCBI NO: 30686753 NR Description: respiratory burst oxidase (NADPH oxidase),
  misc_feature (1)..(34): Homolog of NCBI NO: 30686753 NR Description: respiratory burst oxidase (NADPH oxidase),
MNKESKDFADQLFRALARRNNVSGDAITKEQVDKDEDGRVTEEEVAEIISLSASANKLSNIQKQAKEYAALIMEELDPDNAGFIMIENLEMLLLQAPNQSVRMGDSRILSQMLSQKLRPAKESNPLVRWSEKIKYFILDNWQRLWIMMLWLGICGGLFTYKFIQYKNKAAYGVMGYCVCVAKGGAETLKFNMALILLPVCRNTITWLRNKTKLGTVVPFDDSLNFHKVIASGIVVGVLLHAGAHLTCDFPRLIAADEDTYEPMEKYFGDQPTSYWWFVKGVEGWTGIVMVVLMAIAFTLATPWFRRNKLNLPNFLKKLTGFNAFWYTHHLFIIVYALLIVHGIKLYLTKIWYQKTTWMYLAVPILLYASERLLRAFRSSIKPVKMIKVAVYPGNVLSLHMTKPQGFKYKSGQFMLVNCRAVSPFEWHPFSITSAPGDDYLSVHIRTLGDWTRKLRTVFSEVCKPPTAGKSGLLRADGGDGNLPFPKVLIDGPYGAPAQDYKKYDVVLLVGLGIGATPMISILKDIINNMKGPDRDSDIENNNSNNNSKGFKTRKAYFYWVTREQGSFEWFKGIMDEISELDEEGIIELHNYCTSVYEEGDARVALIAMLQSLQHAKNGVDVVSGTRVKSHFAKPNWRQVYKKIAVQHPGKRIGVFYCGMPGMIKELKNLALDFSRKTTTKFDFHKENF

SEQ ID NO: 86798 - protein, 616 aa, Arabidopsis thaliana
  peptide (1)..(616): Ceres Seq. ID no. 12693432
  misc_feature (102)..(615): Pfam Name: Ferric reductase like transmembrane component Pfam Description: Ferric reductase like transmembrane component
  misc_feature (1)..(616): Homolog of NCBI NO: 15241361 NR Description: respiratory burst oxidase protein; protein id: [Arabidopsis thaliana] >gi|9758253|dbj|BAB08752.1| respiratory
  misc_feature (1)..(616): Homolog of NCBI NO: 26449420 NR Description: putative respiratory burst oxidase protein
  misc_feature (1)..(616): Homolog of NCBI NO: 3242781 NR Description: respiratory burst oxidase protein A [Arabidopsis
  misc_feature (1)..(616): Homolog of NCBI NO: 15240778 NR Description: respiratory burst oxidase protein A; protein id: [Arabidopsis thaliana] >gi|11282606|pir||T49878 respiratory burst
  misc_feature (1)..(616): Homolog of NCBI NO: 30686753 NR Description: respiratory burst oxidase (NADPH oxidase),
  misc_feature (1)..(616): Homolog of NCBI NO: 7484891 NR Description: cytochrome b245 beta chain homolog F13M23.230 -
  misc_feature (1)..(616): Homolog of NCBI NO: 30680952 NR Description: respiratory burst oxidase protein B (NADPH (RbohB) [Arabidopsis thaliana] >gi|3242783|gb|AAC39476.1|
  misc_feature (1)..(480): Homolog of NCBI NO: 17384016 NR Description: NADPH oxidase [Nicotiana tabacum]
  misc_feature (479)..(616): Homolog of NCBI NO: 17384016 NR Description: NADPH oxidase [Nicotiana tabacum]
  misc_feature (1)..(480): Homolog of NCBI NO: 28268678 NR Description: respiratory burst oxidase homolog [Nicotiana
MEELDPDNAGFIMIENLEMLLLQAPNQSVRMGDSRILSQMLSQKLRPAKESNPLVRWSEKIKYFILDNWQRLWIMMLWLGICGGLFTYKFIQYKNKAAYGVMGYCVCVAKGGAETLKFNMALILLPVCRNTITWLRNKTKLGTVVPFDDSLNFHKVIASGIVVGVLLHAGAHLTCDFPRLIAADEDTYEPMEKYFGDQPTSYWWFVKGVEGWTGIVMVVLMAIAFTLATPWFRRNKLNLPNFLKKLTGFNAFWYTHHLFIIVYALLIVHGIKLYLTKIWYQKTTWMYLAVPILLYASERLLRAFRSSIKPVKMIKVAVYPGNVLSLHMTKPQGFKYKSGQFMLVNCRAVSPFEWHPFSITSAPGDDYLSVHIRTLGDWTRKLRTVFSEVCKPPTAGKSGLLRADGGDGNLPFPKVLIDGPYGAPAQDYKKYDVVLLVGLGIGATPMISILKDIINNMKGPDRDSDIENNNSNNNSKGFKTRKAYFYWVTREQGSFEWFKGIMDEISELDEEGIIELHNYCTSVYEEGDARVALIAMLQSLQHAKNGVDVVSGTRVKSHFAKPNWRQVYKKIAVQHPGKRIGVFYCGMPGMIKELKNLALDFSRKTTTKFDFHKENF

SEQ ID NO: 86799 - DNA, 1053 bp, Arabidopsis thaliana
  misc_feature (1)..(1053): Ceres Seq. ID no. 12693497
  misc_feature: MA Experiment ID: 20000180 Result: Down-regulated in Transcription
  misc_feature: MA Experiment 20000180 PARAMETER Experiment Name: At_Germinating_Seeds_P Parameter: Age (hr) Value: 24 vs. 0
  misc_feature: MA Experiment 20000180 PARAMETER Experiment Name: At_Germinating_Seeds_P Parameter: Tissue Value: Germinating Seeds
  misc_feature: MA Experiment ID: 20000184 Result: Down-regulated in Transcription
  misc_feature: MA Experiment 20000184 PARAMETER Experiment Name: At_Shoots__P Parameter: Age (day) Value: 7
  misc_feature: MA Experiment 20000184 PARAMETER Experiment Name: At_Shoots__P Parameter: Tissue Value: Shoots vs. Whole Plant
  misc_feature: MA Experiment ID: 20000227 Result: Up-regulated in Transcription
  misc_feature: MA Experiment 20000227 PARAMETER Experiment Name: At_Root-Tips-vs-Tops_P Parameter: Tissue Value: Root Tips vs. Root Tops
  misc_feature: MA Experiment ID: 20000438 Result: Down-regulated in Transcription
  misc_feature: MA Experiment 20000438 PARAMETER Experiment Name: At_Shoots__P Parameter: Age (day) Value: 14
  misc_feature: MA Experiment 20000438 PARAMETER Experiment Name: At_Shoots__P Parameter: Tissue Value: Shoots vs. Whole Plant
  misc_feature: MA Experiment ID: 20001458 Result: Up-regulated in Transcription
  misc_feature: MA Experiment 20001458 PARAMETER Experiment Name: At_50mM_NH4NO3_L-to-H_P Parameter: Age (day) Value: Undefined
  misc_feature: MA Experiment 20001458 PARAMETER Experiment Name: At_50mM_NH4NO3_L-to-H_P Parameter: Organism Value: Undefined
  misc_feature: MA Experiment 20001458 PARAMETER Experiment Name: At_50mM_NH4NO3_L-to-H_P Parameter: Plant Line Value: Undefined
  misc_feature: MA Experiment 20001458 PARAMETER Experiment Name: At_50mM_NH4NO3_L-to-H_P Parameter: Timepoint (hr) Value: 2
  misc_feature: MA Experiment 20001458 PARAMETER Experiment Name: At_50mM_NH4NO3_L-to-H_P Parameter: Tissue Value: Siliques
  misc_feature: MA Experiment 20001458 PARAMETER Experiment Name: At_50mM_NH4NO3_L-to-H_P Parameter: Treatment Value: 50mM NH4NO3 vs. 100mM Manitol
  misc_feature: MA Experiment ID: 20001555 Result: Up-regulated in Transcription
  misc_feature: MA Experiment 20001555 PARAMETER Experiment Name: At_Drought_Soil_Dry_P Parameter: Age (day) Value: 24
  misc_feature: MA Experiment 20001555 PARAMETER Experiment Name: At_Drought_Soil_Dry_P Parameter: Organism Value: A. thaliana
  misc_feature: MA Experiment 20001555 PARAMETER Experiment Name: At_Drought_Soil_Dry_P Parameter: Plant Line Value: WS
  misc_feature: MA Experiment 20001555 PARAMETER Experiment Name: At_Drought_Soil_Dry_P Parameter: Post Timepoint (hr) Value: None
  misc_feature: MA Experiment 20001555 PARAMETER Experiment Name: At_Drought_Soil_Dry_P Parameter: Post-Treatment Value: None
  misc_feature: MA Experiment 20001555 PARAMETER Experiment Name: At_Drought_Soil_Dry_P Parameter: Timepoint (day) Value: 10
  misc_feature: MA Experiment 20001555 PARAMETER Experiment Name: At_Drought_Soil_Dry_P Parameter: Treatment Value: Drought vs. No Drought
  misc_feature: MA Experiment ID: 20001556 Result: Up-regulated in Transcription
  misc_feature: MA Experiment 20001556 PARAMETER Experiment Name: At_Drought_Soil_Dry_P Parameter: Age (day) Value: 26
  misc_feature: MA Experiment 20001556 PARAMETER Experiment Name: At_Drought_Soil_Dry_P Parameter: Organism Value: A. thaliana
  misc_feature: MA Experiment 20001556 PARAMETER Experiment Name: At_Drought_Soil_Dry_P Parameter: Plant Line Value: WS
  misc_feature: MA Experiment 20001556 PARAMETER Experiment Name: At_Drought_Soil_Dry_P Parameter: Post Timepoint (hr) Value: None
  misc_feature: MA Experiment 20001556 PARAMETER Experiment Name: At_Drought_Soil_Dry_P Parameter: Post-Treatment Value: None
  misc_feature: MA Experiment 20001556 PARAMETER Experiment Name: At_Drought_Soil_Dry_P Parameter: Timepoint (day) Value: 12
  misc_feature: MA Experiment 20001556 PARAMETER Experiment Name: At_Drought_Soil_Dry_P Parameter: Treatment Value: Drought vs. No Drought
  misc_feature: MA Experiment ID: 20001557 Result: Up-regulated in Transcription
  misc_feature: MA Experiment 20001557 PARAMETER Experiment Name: At_Drought_Soil_Dry_P Parameter: Age (day) Value: 27
  misc_feature: MA Experiment 20001557 PARAMETER Experiment Name: At_Drought_Soil_Dry_P Parameter: Organism Value: A. thaliana
  misc_feature: MA Experiment 20001557 PARAMETER Experiment Name: At_Drought_Soil_Dry_P Parameter: Plant Line Value: WS
  misc_feature: MA Experiment 20001557 PARAMETER Experiment Name: At_Drought_Soil_Dry_P Parameter: Post Timepoint (hr) Value: 3
  misc_feature: MA Experiment 20001557 PARAMETER Experiment Name: At_Drought_Soil_Dry_P Parameter: Post-Treatment Value: Re-Water vs. No Drought
  misc_feature: MA Experiment 20001557 PARAMETER Experiment Name: At_Drought_Soil_Dry_P Parameter: Timepoint (day) Value: 13
  misc_feature: MA Experiment 20001557 PARAMETER Experiment Name: At_Drought_Soil_Dry_P Parameter: Treatment Value: Drought vs. No Drought
  misc_feature: MA Experiment ID: 20001558 Result: Up-regulated in Transcription
  misc_feature: MA Experiment 20001558 PARAMETER Experiment Name: At_Drought_Soil_Dry_P Parameter: Age (day) Value: 27
  misc_feature: MA Experiment 20001558 PARAMETER Experiment Name: At_Drought_Soil_Dry_P Parameter: Organism Value: A. thaliana
  misc_feature: MA Experiment 20001558 PARAMETER Experiment Name: At_Drought_Soil_Dry_P Parameter: Plant Line Value: WS
  misc_feature: MA Experiment 20001558 PARAMETER Experiment Name: At_Drought_Soil_Dry_P Parameter: Post Timepoint (hr) Value: 6
  misc_feature: MA Experiment 20001558 PARAMETER Experiment Name: At_Drought_Soil_Dry_P Parameter: Post-Treatment Value: Re-Water vs. No Drought
  misc_feature: MA Experiment 20001558 PARAMETER Experiment Name: At_Drought_Soil_Dry_P Parameter: Timepoint (day) Value: 13
  misc_feature: MA Experiment 20001558 PARAMETER Experiment Name: At_Drought_Soil_Dry_P Parameter: Treatment Value: Drought vs. No Drought
  misc_feature: MA Experiment ID: 20001560 Result: Up-regulated in Transcription
  misc_feature: MA Experiment 20001560 PARAMETER Experiment Name: At_Drought_Soil_Dry_P Parameter: Age (day) Value: 28
  misc_feature: MA Experiment 20001560 PARAMETER Experiment Name: At_Drought_Soil_Dry_P Parameter: Organism Value: A. thaliana
  misc_feature: MA Experiment 20001560 PARAMETER Experiment Name: At_Drought_Soil_Dry_P Parameter: Plant Line Value: WS
  misc_feature: MA Experiment 20001560 PARAMETER Experiment Name: At_Drought_Soil_Dry_P Parameter: Post Timepoint (hr) Value: None
  misc_feature: MA Experiment 20001560 PARAMETER Experiment Name: At_Drought_Soil_Dry_P Parameter: Post-Treatment Value: None
  misc_feature: MA Experiment 20001560 PARAMETER Experiment Name: At_Drought_Soil_Dry_P Parameter: Timepoint (day) Value: 14
  misc_feature: MA Experiment 20001560 PARAMETER Experiment Name: At_Drought_Soil_Dry_P Parameter: Treatment Value: Drought vs. No Drought
atgtctaccggagaagaaggtcacatggcgatggcagatagaggctctagaaagagaagagtcggcgttaagaaaggtactaaagcggcgaggaacaaaaagcaaaaatcaaaaccttctacttccgataggtttaaggttacaatgaagaatcaaaagctatttcagaagagagcacgagattacaattccgatgacgatgaagaagaagatgatgaatcgaagaaacaaccagaagtaacaattcgtgagaagatcttctctgatgctaacatgggaccaaattacgaagagattggagaagaagataatgatgagaattcagatggtgaagatcatggagagattgaatctggaatcactaagtttgctactgatggatgtaatgctttcaaaatcgcttttaaagctattatgaagaagactaaaggagatgatacattgggcccagttttatcagcacataagcatcttattggagagaagctagctgaagatgaagctgaaaagaaagctaaaggtcaagctagaaaggctaaacatttgatgatgatttatcttaacaattgcttttttaagattgctgagaagggacatgttaaacctggaagttatttggattctcatgaaaagattcttattggtgttgctactaaaggagtggtcaagcttttcaatgctgtcaacaaggctcaacatgctcagaagggtttgaatccttcaaggtctaaagacgctaaagtgctgaagaagcgaagaaaagaagcattcttgtctgagttagggaaaacaaaaacagacaccaagccttcaactttggatgaacatagaagcaagttagtattctgtcttgagctggcttctatagagaaaggatcaccttcagtagcgagagccgctcacaaatctgaagacgaagctcctgtttgggctcctctacgagataattacatgttagcaaacccaaaactgaaggactgggacaagaaacaggaaacaagcgagggagatgattttgccggtttgtcaggagatgaaagttatgaagactga

SEQ ID NO: 86800 - protein, 350 aa, Arabidopsis thaliana
  peptide (1)..(350): Ceres Seq. ID no. 12693498
  misc_feature (1)..(350): Homolog of NCBI NO: 15238917 NR Description: unknown protein; protein id: At5g48240.1 thaliana] >gi|8777414|dbj|BAA97004.1| gene_id:MIF21.13~unknown
MSTGEEGHMAMADRGSRKRRVGVKKGTKAARNKKQKSKPSTSDRFKVTMKNQKLFQKRARDYNSDDDEEEDDESKKQPEVTIREKIFSDANMGPNYEEIGEEDNDENSDGEDHGEIESGITKFATDGCNAFKIAFKAIMKKTKGDDTLGPVLSAHKHLIGEKLAEDEAEKKAKGQARKAKHLMMIYLNNCFFKIAEKGHVKPGSYLDSHEKILIGVATKGVVKLFNAVNKAQHAQKGLNPSRSKDAKVLKKRRKEAFLSELGKTKTDTKPSTLDEHRSKLVFCLELASIEKGSPSVARAAHKSEDEAPVWAPLRDNYMLANPKLKDWDKKQETSEGDDFAGLSGDESYED

SEQ ID NO: 86801 - protein, 342 aa, Arabidopsis thaliana
  peptide (1)..(342): Ceres Seq. ID no. 12693499
  misc_feature (1)..(342): Homolog of NCBI NO: 15238917 NR Description: unknown protein; protein id: At5g48240.1 thaliana] >gi|8777414|dbj|BAA97004.1| gene_id:MIF21.13~unknown
MAMADRGSRKRRVGVKKGTKAARNKKQKSKPSTSDRFKVTMKNQKLFQKRARDYNSDDDEEEDDESKKQPEVTIREKIFSDANMGPNYEEIGEEDNDENSDGEDHGEIESGITKFATDGCNAFKIAFKAIMKKTKGDDTLGPVLSAHKHLIGEKLAEDEAEKKAKGQARKAKHLMMIYLNNCFFKIAEKGHVKPGSYLDSHEKILIGVATKGVVKLFNAVNKAQHAQKGLNPSRSKDAKVLKKRRKEAFLSELGKTKTDTKPSTLDEHRSKLVFCLELASIEKGSPSVARAAHKSEDEAPVWAPLRDNYMLANPKLKDWDKKQETSEGDDFAGLSGDESYED

SEQ ID NO: 86802 - protein, 340 aa, Arabidopsis thaliana
  peptide (1)..(340): Ceres Seq. ID no. 12693500
  misc_feature (1)..(340): Homolog of NCBI NO: 15238917 NR Description: unknown protein; protein id: At5g48240.1 thaliana] >gi|8777414|dbj|BAA97004.1| gene_id:MIF21.13~unknown
MADRGSRKRRVGVKKGTKAARNKKQKSKPSTSDRFKVTMKNQKLFQKRARDYNSDDDEEEDDESKKQPEVTIREKIFSDANMGPNYEEIGEEDNDENSDGEDHGEIESGITKFATDGCNAFKIAFKAIMKKTKGDDTLGPVLSAHKHLIGEKLAEDEAEKKAKGQARKAKHLMMIYLNNCFFKIAEKGHVKPGSYLDSHEKILIGVATKGVVKLFNAVNKAQHAQKGLNPSRSKDAKVLKKRRKEAFLSELGKTKTDTKPSTLDEHRSKLVFCLELASIEKGSPSVARAAHKSEDEAPVWAPLRDNYMLANPKLKDWDKKQETSEGDDFAGLSGDESYED

SEQ ID NO: 86803 - DNA, 999 bp, Arabidopsis thaliana
  misc_feature (1)..(999): Ceres Seq. ID no. 12693731
  misc_feature: MA Experiment ID: 20000169 Result: Down-regulated in Transcription
  misc_feature: MA Experiment 20000169 PARAMETER Experiment Name: At_100uM_ABA_P Parameter: Age (day) Value: 14
  misc_feature: MA Experiment 20000169 PARAMETER Experiment Name: At_100uM_ABA_P Parameter: Organism Value: A. thaliana
  misc_feature: MA Experiment 20000169 PARAMETER Experiment Name: At_100uM_ABA_P Parameter: Plant Line Value: WS
  misc_feature: MA Experiment 20000169 PARAMETER Experiment Name: At_100uM_ABA_P Parameter: Timepoint (hr) Value: 6
  misc_feature: MA Experiment 20000169 PARAMETER Experiment Name: At_100uM_ABA_P Parameter: Tissue Value: Aerial
  misc_feature: MA Experiment 20000169 PARAMETER Experiment Name: At_100uM_ABA_P Parameter: Treatment Value: 100uM ABA vs. No Treatment
  misc_feature: MA Experiment ID: 20000182 Result: Up-regulated in Transcription
  misc_feature: MA Experiment 20000182 PARAMETER Experiment Name: At_2mM_SA_P Parameter: Age (day) Value: 14
  misc_feature: MA Experiment 20000182 PARAMETER Experiment Name: At_2mM_SA_P Parameter: Organism Value: A. thaliana
  misc_feature: MA Experiment 20000182 PARAMETER Experiment Name: At_2mM_SA_P Parameter: Plant Line Value: WS
  misc_feature: MA Experiment 20000182 PARAMETER Experiment Name: At_2mM_SA_P Parameter: Timepoint (hr) Value: 6
  misc_feature: MA Experiment 20000182 PARAMETER Experiment Name: At_2mM_SA_P Parameter: Tissue Value: Aerial
  misc_feature: MA Experiment 20000182 PARAMETER Experiment Name: At_2mM_SA_P Parameter: Treatment Value: 2mM SA vs. No Treatment
  misc_feature: MA Experiment ID: 20000211 Result: Up-regulated in Transcription
  misc_feature: MA Experiment 20000211 PARAMETER Experiment Name: At_0.001percent_MeJA__P Parameter: Age (day) Value: 14
  misc_feature: MA Experiment 20000211 PARAMETER Experiment Name: At_0.001percent_MeJA__P Parameter: Organism Value: A. thaliana
  misc_feature: MA Experiment 20000211 PARAMETER Experiment Name: At_0.001percent_MeJA__P Parameter: Plant Line Value: WS
  misc_feature: MA Experiment 20000211 PARAMETER Experiment Name: At_0.001percent_MeJA__P Parameter: Timepoint (hr) Value: 1
  misc_feature: MA Experiment 20000211 PARAMETER Experiment Name: At_0.001percent_MeJA__P Parameter: Tissue Value: Aerial
  misc_feature: MA Experiment 20000211 PARAMETER Experiment Name: At_0.001percent_MeJA__P Parameter: Treatment Value: 0.001percent MeJA vs. No Treatment
  misc_feature: MA Experiment ID: 20000438 Result: Down-regulated in Transcription
  misc_feature: MA Experiment 20000438 PARAMETER Experiment Name: At_Shoots__P Parameter: Age (day) Value: 14
  misc_feature: MA Experiment 20000438 PARAMETER Experiment Name: At_Shoots__P Parameter: Tissue Value: Shoots vs. Whole Plant
  misc_feature: MA Experiment ID: 20000527 Result: Up-regulated in Transcription
  misc_feature: MA Experiment 20000527 PARAMETER Experiment Name: At_10percent_PEG_P Parameter: Age (day) Value: 20
  misc_feature: MA Experiment 20000527 PARAMETER Experiment Name: At_10percent_PEG_P Parameter: Organism Value: A. thaliana
  misc_feature: MA Experiment 20000527 PARAMETER Experiment Name: At_10percent_PEG_P Parameter: Plant Line Value: WS
  misc_feature: MA Experiment 20000527 PARAMETER Experiment Name: At_10percent_PEG_P Parameter: Timepoint (day) Value: 20
  misc_feature: MA Experiment 20000527 PARAMETER Experiment Name: At_10percent_PEG_P Parameter: Tissue Value: Whole Plant
  misc_feature: MA Experiment 20000527 PARAMETER Experiment Name: At_10percent_PEG_P Parameter: Treatment Value: 10percent PEG vs. No Treatment
  misc_feature: MA Experiment ID: 20000573 Result: Up-regulated in Transcription
  misc_feature: MA Experiment 20000573 PARAMETER Experiment Name: At_100uM_ABA_Mutants__P Parameter: Organism Value: A. thaliana
  misc_feature: MA Experiment 20000573 PARAMETER Experiment Name: At_100uM_ABA_Mutants__P Parameter: Plant Line Value: CS22 vs. Ler wt
  misc_feature: MA Experiment 20000573 PARAMETER Experiment Name: At_100uM_ABA_Mutants__P Parameter: Timepoint (hr) Value: N/A
  misc_feature: MA Experiment 20000573 PARAMETER Experiment Name: At_100uM_ABA_Mutants__P Parameter: Tissue Value: Whole Plant
  misc_feature: MA Experiment 20000573 PARAMETER Experiment Name: At_100uM_ABA_Mutants__P Parameter: Treatment Value: None
  misc_feature: MA Experiment ID: 20000574 Result: Up-regulated in Transcription
  misc_feature: MA Experiment 20000574 PARAMETER Experiment Name: At_100uM_ABA_Mutants__P Parameter: Organism Value: A. thaliana
  misc_feature: MA Experiment 20000574 PARAMETER Experiment Name: At_100uM_ABA_Mutants__P Parameter: Plant Line Value: CS23 vs. Ler wt
  misc_feature: MA Experiment 20000574 PARAMETER Experiment Name: At_100uM_ABA_Mutants__P Parameter: Timepoint (hr) Value: N/A
  misc_feature: MA Experiment 20000574 PARAMETER Experiment Name: At_100uM_ABA_Mutants__P Parameter: Tissue Value: Whole Plant
  misc_feature: MA Experiment 20000574 PARAMETER Experiment Name: At_100uM_ABA_Mutants__P Parameter: Treatment Value: None
  misc_feature: MA Experiment ID: 20000575 Result: Down-regulated in Transcription
  misc_feature: MA Experiment 20000575 PARAMETER Experiment Name: At_100uM_ABA_Mutants__P Parameter: Organism Value: A. thaliana
  misc_feature: MA Experiment 20000575 PARAMETER Experiment Name: At_100uM_ABA_Mutants__P Parameter: Plant Line Value: CS22
  misc_feature: MA Experiment 20000575 PARAMETER Experiment Name: At_100uM_ABA_Mutants__P Parameter: Timepoint (hr) Value: 6
  misc_feature: MA Experiment 20000575 PARAMETER Experiment Name: At_100uM_ABA_Mutants__P Parameter: Tissue Value: Whole Plant
  misc_feature: MA Experiment 20000575 PARAMETER Experiment Name: At_100uM_ABA_Mutants__P Parameter: Treatment Value: 1uM ABA vs. No Treatment
  misc_feature: MA Experiment ID: 20000576 Result: Down-regulated in Transcription
  misc_feature: MA Experiment 20000576 PARAMETER Experiment Name: At_100uM_ABA_Mutants__P Parameter: Organism Value: A. thaliana
  misc_feature: MA Experiment 20000576 PARAMETER Experiment Name: At_100uM_ABA_Mutants__P Parameter: Plant Line Value: CS23
  misc_feature: MA Experiment 20000576 PARAMETER Experiment Name: At_100uM_ABA_Mutants__P Parameter: Timepoint (hr) Value: 6
  misc_feature: MA Experiment 20000576 PARAMETER Experiment Name: At_100uM_ABA_Mutants__P Parameter: Tissue Value: Whole Plant
  misc_feature: MA Experiment 20000576 PARAMETER Experiment Name: At_100uM_ABA_Mutants__P Parameter: Treatment Value: 1uM ABA vs. No Treatment
  misc_feature: MA Experiment ID: 20000709 Result: Up-regulated in Transcription
  misc_feature: MA Experiment 20000709 PARAMETER Experiment Name: At_15mM_NH4NO3_L-to-H_P Parameter: Age (hr) Value: 14
  misc_feature: MA Experiment 20000709 PARAMETER Experiment Name: At_15mM_NH4NO3_L-to-H_P Parameter: Organism Value: A. thaliana
  misc_feature: MA Experiment 20000709 PARAMETER Experiment Name: At_15mM_NH4NO3_L-to-H_P Parameter: Plant Line Value: WS
  misc_feature: MA Experiment 20000709 PARAMETER Experiment Name: At_15mM_NH4NO3_L-to-H_P Parameter: Timepoint (hr) Value: 4
  misc_feature: MA Experiment 20000709 PARAMETER Experiment Name: At_15mM_NH4NO3_L-to-H_P Parameter: Tissue Value: Aerial
  misc_feature: MA Experiment 20000709 PARAMETER Experiment Name: At_15mM_NH4NO3_L-to-H_P Parameter: Treatment Value: 15mM NH4NO3 vs. 30mM Mannitol
  misc_feature: MA Experiment ID: 20001248 Result: Up-regulated in Transcription
  misc_feature: MA Experiment 20001248 PARAMETER Experiment Name: At_Far-red-induction_P Parameter: Age (day) Value: 7
  misc_feature: MA Experiment 20001248 PARAMETER Experiment Name: At_Far-red-induction_P Parameter: Light Value: Far-red vs. White
  misc_feature: MA Experiment 20001248 PARAMETER Experiment Name: At_Far-red-induction_P Parameter: Organism Value: A. thaliana
  misc_feature: MA Experiment 20001248 PARAMETER Experiment Name: At_Far-red-induction_P Parameter: Plant Line Value: Columbia
  misc_feature: MA Experiment 20001248 PARAMETER Experiment Name: At_Far-red-induction_P Parameter: Timepoint (hr) Value: 4
  misc_feature: MA Experiment 20001248 PARAMETER Experiment Name: At_Far-red-induction_P Parameter: Tissue Value: Whole Plant
  misc_feature: MA Experiment ID: 20001450 Result: Down-regulated in Transcription
  misc_feature: MA Experiment 20001450 PARAMETER Experiment Name: At_Far-red-induction_P Parameter: Age (day) Value: 7
  misc_feature: MA Experiment 20001450 PARAMETER Experiment Name: At_Far-red-induction_P Parameter: Light Value: Far-red vs. White
  misc_feature: MA Experiment 20001450 PARAMETER Experiment Name: At_Far-red-induction_P Parameter: Organism Value: A. thaliana
  misc_feature: MA Experiment 20001450 PARAMETER Experiment Name: At_Far-red-induction_P Parameter: Plant Line Value: Columbia
  misc_feature: MA Experiment 20001450 PARAMETER Experiment Name: At_Far-red-induction_P Parameter: Timepoint (hr) Value: 8
  misc_feature: MA Experiment 20001450 PARAMETER Experiment Name: At_Far-red-induction_P Parameter: Tissue Value: Whole Plant
  misc_feature: MA Experiment ID: 20001451 Result: Down-regulated in Transcription
  misc_feature: MA Experiment 20001451 PARAMETER Experiment Name: At_Far-red-induction_P Parameter: Age (day) Value: 7
  misc_feature: MA Experiment 20001451 PARAMETER Experiment Name: At_Far-red-induction_P Parameter: Light Value: Far-red vs. White
  misc_feature: MA Experiment 20001451 PARAMETER Experiment Name: At_Far-red-induction_P Parameter: Organism Value: A. thaliana
  misc_feature: MA Experiment 20001451 PARAMETER Experiment Name: At_Far-red-induction_P Parameter: Plant Line Value: Columbia
  misc_feature: MA Experiment 20001451 PARAMETER Experiment Name: At_Far-red-induction_P Parameter: Timepoint (hr) Value: 24
  misc_feature: MA Experiment 20001451 PARAMETER Experiment Name: At_Far-red-induction_P Parameter: Tissue Value: Whole Plant
  misc_feature: MA Experiment ID: 20001770 Result: Up-regulated in Transcription
  misc_feature: MA Experiment 20001770 PARAMETER Experiment Name: At_Far-red-enriched-adult_P Parameter: Age (day) Value: 28
  misc_feature: MA Experiment 20001770 PARAMETER Experiment Name: At_Far-red-enriched-adult_P Parameter: Light Value: Far-red enriched vs. White
  misc_feature: MA Experiment 20001770 PARAMETER Experiment Name: At_Far-red-enriched-adult_P Parameter: Organism Value: A. thaliana
  misc_feature: MA Experiment 20001770 PARAMETER Experiment Name: At_Far-red-enriched-adult_P Parameter: Plant Line Value: Columbia
  misc_feature: MA Experiment 20001770 PARAMETER Experiment Name: At_Far-red-enriched-adult_P Parameter: Timepoint (hr) Value: 8
  misc_feature: MA Experiment 20001770 PARAMETER Experiment Name: At_Far-red-enriched-adult_P Parameter: Tissue Value: Aerial
  misc_feature: MA Experiment ID: 20001904 Result: Down-regulated in Transcription
  misc_feature: MA Experiment 20001904 PARAMETER Experiment Name: At_Drought_Reproduction_P Parameter: Age (day) Value: 37
  misc_feature: MA Experiment 20001904 PARAMETER Experiment Name: At_Drought_Reproduction_P Parameter: Organism Value: A. thaliana
  misc_feature: MA Experiment 20001904 PARAMETER Experiment Name: At_Drought_Reproduction_P Parameter: Plant Line Value: WS
  misc_feature: MA Experiment 20001904 PARAMETER Experiment Name: At_Drought_Reproduction_P Parameter: Timepoint (day) Value: 7
  misc_feature: MA Experiment 20001904 PARAMETER Experiment Name: At_Drought_Reproduction_P Parameter: Tissue Value: Rosettes
  misc_feature: MA Experiment 20001904 PARAMETER Experiment Name: At_Drought_Reproduction_P Parameter: Treatment Value: Drought vs. No Drought
atggtgacagacttcaaatccctactaccagttatcgacatcagtcctttactggccaaatgtgatgatttcgacatggctgaggatgcgggggttgtggaagtagtcggaaaactggacagggcatgtcgggacgtcggattcttctacgtgattggtcatggaatatcggatgatcttataaataaggtgaaagagatgacgcatcagttcttcgagcttccttacgaggagaaacttaagatcaagattactccaactgctggatacagaggataccaaagaattggagtaaattttacgagtgggaaacaagatatgcacgaagccattgattgttacagagagttcaagcaagggaaacatggggacatcggaaaggtcttggaagggccaaaccagtggccaggaaatcctcaagagtacaaagatttaatggagaagtatattaagctgtgcacagatctttctagaaatatcttaaggggaatctcattagcccttggtggatcaccttatgagtttgagggaaagatgcttagagaccctttttgggtaatgcgtatcattggttatccaggtgtaaaccaagaaaatgttattggatgtggagctcacactgactatggcttgttgacgcttataaatcaagatgatgataaaactgctcttcaggtgaaaaacgtggacggtgattggataccagctattccgatccctggatcatttatctgcaacatcggtgacatgttaacgatactatcaaacggagtttaccaatccacactacataaagtaatcaataactctcctaaataccgtgtatgtgttgcatttttctacgagactaacttcgaggcggaggtagagccacttgatatctttaaagagaagcatccacgaaaagaaacatctcaagttgccaaaagagtcgtctatggacagcatctgattaacaaagtcctgacaacctttgcaaatttagtggaaaacagttaa

SEQ ID NO: 86804 - protein, 332 aa, Arabidopsis thaliana
  peptide (1)..(332): Ceres Seq. ID no. 12693732
  misc_feature (183)..(283): Pfam Name: 2OG-Fe(II) oxygenase superfamily Pfam Description: 2OG-Fe(II) oxygenase superfamily
  misc_feature (1)..(332): Homolog of NCBI NO: 11255891 NR Description: hypothetical protein T9C5.210 - Arabidopsis >gi|6561962|emb|CAB62466.1| putative protein [Arabidopsis
  misc_feature (1)..(332): Homolog of NCBI NO: 19423910 NR Description: unknown protein [Arabidopsis thaliana]
  misc_feature (1)..(332): Homolog of NCBI NO: 22331716 NR Description: oxidoreductase (din11), putative; protein id: [Arabidopsis thaliana] >gi|24030245|gb|AAN41298.1| unknown
  misc_feature (3)..(332): Homolog of NCBI NO: 15229181 NR Description: putative protein; protein id: At3g49630.1
  misc_feature (1)..(326): Homolog of NCBI NO: 18409039 NR Description: flavonol synthase - like protein; protein id:
  misc_feature (1)..(326): Homolog of NCBI NO: 21554579 NR Description: flavonol synthase-like protein [Arabidopsis
  misc_feature (1)..(326): Homolog of NCBI NO: 11255902 NR Description: flavonol synthase-like protein - Arabidopsis
  misc_feature (1)..(325): Homolog of NCBI NO: 6984228 NR Description: putative flavonol synthase-like protein
  misc_feature (1)..(123): Homolog of NCBI NO: 10834554 NR Description: 2-oxoacid-dependent oxidase [Arabidopsis thaliana]
  misc_feature (4)..(294): Homolog of NCBI NO: 23130050 NR Description: hypothetical protein [Nostoc punctiforme]
MVTDFKSLLPVIDISPLLAKCDDFDMAEDAGVVEVVGKLDRACRDVGFFYVIGHGISDDLINKVKEMTHQFFELPYEEKLKIKITPTAGYRGYQRIGVNFTSGKQDMHEAIDCYREFKQGKHGDIGKVLEGPNQWPGNPQEYKDLMEKYIKLCTDLSRNILRGISLALGGSPYEFEGKMLRDPFWVMRIIGYPGVNQENVIGCGAHTDYGLLTLINQDDDKTALQVKNVDGDWIPAIPIPGSFICNIGDMLTILSNGVYQSTLHKVINNSPKYRVCVAFFYETNFEAEVEPLDIFKEKHPRKETSQVAKRVVYGQHLINKVLTTFANLVENS

SEQ ID NO: 86805 - protein, 307 aa, Arabidopsis thaliana
  peptide (1)..(307): Ceres Seq. ID no. 12693733
  misc_feature (158)..(258): Pfam Name: 2OG-Fe(II) oxygenase superfamily Pfam Description: 2OG-Fe(II) oxygenase superfamily
  misc_feature (1)..(307): Homolog of NCBI NO: 11255891 NR Description: hypothetical protein T9C5.210 - Arabidopsis >gi|6561962|emb|CAB62466.1| putative protein [Arabidopsis
  misc_feature (1)..(307): Homolog of NCBI NO: 22331716 NR Description: oxidoreductase (din11), putative; protein id: [Arabidopsis thaliana] >gi|24030245|gb|AAN41298.1| unknown
  misc_feature (1)..(307): Homolog of NCBI NO: 19423910 NR Description: unknown protein [Arabidopsis thaliana]
  misc_feature (1)..(307): Homolog of NCBI NO: 15229181 NR Description: putative protein; protein id: At3g49630.1
  misc_feature (1)..(301): Homolog of NCBI NO: 18409039 NR Description: flavonol synthase - like protein; protein id:
  misc_feature (1)..(301): Homolog of NCBI NO: 21554579 NR Description: flavonol synthase-like protein [Arabidopsis
  misc_feature (1)..(301): Homolog of NCBI NO: 11255902 NR Description: flavonol synthase-like protein - Arabidopsis
  misc_feature (1)..(300): Homolog of NCBI NO: 6984228 NR Description: putative flavonol synthase-like protein
  misc_feature (1)..(98): Homolog of NCBI NO: 10834554 NR Description: 2-oxoacid-dependent oxidase [Arabidopsis thaliana]
  misc_feature (1)..(269): Homolog of NCBI NO: 23130050 NR Description: hypothetical protein [Nostoc punctiforme]
MAEDAGVVEVVGKLDRACRDVGFFYVIGHGISDDLINKVKEMTHQFFELPYEEKLKIKITPTAGYRGYQRIGVNFTSGKQDMHEAIDCYREFKQGKHGDIGKVLEGPNQWPGNPQEYKDLMEKYIKLCTDLSRNILRGISLALGGSPYEFEGKMLRDPFWVMRIIGYPGVNQENVIGCGAHTDYGLLTLINQDDDKTALQVKNVDGDWIPAIPIPGSFICNIGDMLTILSNGVYQSTLHKVINNSPKYRVCVAFFYETNFEAEVEPLDIFKEKHPRKETSQVAKRVVYGQHLINKVLTTFANLVENS

SEQ ID NO: 86806 - protein, 266 aa, Arabidopsis thaliana
  peptide (1)..(266): Ceres Seq. ID no. 12693734
  misc_feature (117)..(217): Pfam Name: 2OG-Fe(II) oxygenase superfamily Pfam Description: 2OG-Fe(II) oxygenase superfamily
  misc_feature (1)..(266): Homolog of NCBI NO: 11255891 NR Description: hypothetical protein T9C5.210 - Arabidopsis >gi|6561962|emb|CAB62466.1| putative protein [Arabidopsis
  misc_feature (1)..(266): Homolog of NCBI NO: 22331716 NR Description: oxidoreductase (din11), putative; protein id: [Arabidopsis thaliana] >gi|24030245|gb|AAN41298.1| unknown
  misc_feature (1)..(266): Homolog of NCBI NO: 19423910 NR Description: unknown protein [Arabidopsis thaliana]
  misc_feature (1)..(266): Homolog of NCBI NO: 15229181 NR Description: putative protein; protein id: At3g49630.1
  misc_feature (1)..(260): Homolog of NCBI NO: 18409039 NR Description: flavonol synthase - like protein; protein id:
  misc_feature (1)..(260): Homolog of NCBI NO: 21554579 NR Description: flavonol synthase-like protein [Arabidopsis
  misc_feature (1)..(260): Homolog of NCBI NO: 11255902 NR Description: flavonol synthase-like protein - Arabidopsis
  misc_feature (1)..(259): Homolog of NCBI NO: 6984228 NR Description: putative flavonol synthase-like protein
  misc_feature (1)..(57): Homolog of NCBI NO: 10834554 NR Description: 2-oxoacid-dependent oxidase [Arabidopsis thaliana]
  misc_feature (1)..(228): Homolog of NCBI NO: 23130050 NR Description: hypothetical protein [Nostoc punctiforme]
MTHQFFELPYEEKLKIKITPTAGYRGYQRIGVNFTSGKQDMHEAIDCYREFKQGKHGDIGKVLEGPNQWPGNPQEYKDLMEKYIKLCTDLSRNILRGISLALGGSPYEFEGKMLRDPFWVMRIIGYPGVNQENVIGCGAHTDYGLLTLINQDDDKTALQVKNVDGDWIPAIPIPGSFICNIGDMLTILSNGVYQSTLHKVINNSPKYRVCVAFFYETNFEAEVEPLDIFKEKHPRKETSQVAKRVVYGQHLINKVLTTFANLVENS

SEQ ID NO: 86807 - DNA, 2043 bp, Arabidopsis thaliana
  misc_feature (1)..(2043): Ceres Seq. ID no. 12693742
  misc_feature: MA Experiment ID: 20000307 Result: Down-regulated in Transcription
  misc_feature: MA Experiment 20000307 PARAMETER Experiment Name: At_Germinating_Seeds_Sub_P Parameter: Age (hr) Value: 24 vs. 0
  misc_feature: MA Experiment 20000307 PARAMETER Experiment Name: At_Germinating_Seeds_Sub_P Parameter: Organism Value: A. thaliana
  misc_feature: MA Experiment 20000307 PARAMETER Experiment Name: At_Germinating_Seeds_Sub_P Parameter: Plant Line Value: WS
  misc_feature: MA Experiment 20000307 PARAMETER Experiment Name: At_Germinating_Seeds_Sub_P Parameter: Tissue Value: Germinating Seeds
  misc_feature: MA Experiment ID: 20000315 Result: Down-regulated in Transcription
  misc_feature: MA Experiment 20000315 PARAMETER Experiment Name: At_14day_Shoots-Roots_Sub_P Parameter: Age (day) Value: 14
  misc_feature: MA Experiment 20000315 PARAMETER Experiment Name: At_14day_Shoots-Roots_Sub_P Parameter: Organism Value: A. thaliana
  misc_feature: MA Experiment 20000315 PARAMETER Experiment Name: At_14day_Shoots-Roots_Sub_P Parameter: Plant Line Value: WS
  misc_feature: MA Experiment 20000315 PARAMETER Experiment Name: At_14day_Shoots-Roots_Sub_P Parameter: Tissue Value: Shoots vs. Whole Plant
  misc_feature: MA Experiment ID: 20000328 Result: Down-regulated in Transcription
  misc_feature: MA Experiment 20000328 PARAMETER Experiment Name: At_42deg_Heat_Sub_P Parameter: Age (day) Value: 14
  misc_feature: MA Experiment 20000328 PARAMETER Experiment Name: At_42deg_Heat_Sub_P Parameter: Organism Value: A. thaliana
  misc_feature: MA Experiment 20000328 PARAMETER Experiment Name: At_42deg_Heat_Sub_P Parameter: Plant Line Value: WS
  misc_feature: MA Experiment 20000328 PARAMETER Experiment Name: At_42deg_Heat_Sub_P Parameter: Temperature (deg C) Value: 42 vs. 22
  misc_feature: MA Experiment 20000328 PARAMETER Experiment Name: At_42deg_Heat_Sub_P Parameter: Timepoint (hr) Value: 6
  misc_feature: MA Experiment 20000328 PARAMETER Experiment Name: At_42deg_Heat_Sub_P Parameter: Tissue Value: Aerial
atgaatcagacgccatggaagttcaaaacttttcgagaccttctactgaaatctgtagcggagagagatctcttcactgggaaatcacttcacgcgctctacgtgaaatccattgtagcttcgtccacttatctctcaaatcacttcgtgaatctctactccaaatgtggtcgcctttcctacgcacgagccgcgttctactccacggaagaacccaatgtcttctcttacaatgtaattgtcaaagcttacgcgaaagattcgaaaatccatattgcacgccagttgttcgacgaaattccccaaccagacactgtctcttacaatactcttatctcggggtacgctgatgctagagaaacttttgccgcaatggttctgtttaagagaatgagaaaattgggatttgaggttgatgggtttacgttatcagggttgatagcagcttgttgtgaccgtgttgatttgataaagcagcttcactgtttctctgtctcgggagggtttgattcgtactcgtctgtgaataacgcgtttgttacgtattatagtaaaggcgggcttttgagagaggcggtatcggtgttttatgggatggatgaattaagagatgaagtttcgtggaattcgatgattgtggcttatgggcagcacaaggaaggagcaaaggcattagctttgtataaagaaatgatctttaaaggattcaagattgatatgtttacattggcaagtgttttaaatgctctcactagcttggatcatttgatcggtggccgtcagttccacggtaagctgatcaaggctggatttcaccagaactcacatgtgggaagtggtttgattgatttttactcaaaatgcgggggttgtgatggtatgtatgatagtgagaaggtatttcaagagattctatcttttgtctgtgtcacaagcgcttgctcgaatctctcctctccttctcagtgcaagcagattcatggcttggcgatcaaatctcacatcccttcgaatagaatctctgtgaacaacgcgttgatttcgttgtattacaaaagcggaaacctgcaagacgcaaggtgggtatttgatagaatgccggaacttaatgcggtatctttcaattgtatgatcaaaggttatgcgcagcacgggcatggaacagaagctttgcttttataccaacggatgctggactcgggtattgcgcctaacaagataacctttgtagccgttctttctgcttgtgcgcactgtggtaaggtcgacgagggtcaggagtacttcaacaccatgaaggagacgttcaagatcgaaccagaggctgagcactattcttgtatgattgatcttttaggccgagcagggaagctagaagaggcagagagattcatagatgcaatgccttataagccaggctctgttgcttgggctgctttgctcggggcttgtaggaaacacaaaaacatggctcttgcagagagagcagctaatgagcttatggtgatgcaaccattagctgccacgccatatgtgatgctagcaaacatgtatgcagatgccaggaaatgggaagagatggcctcggtgaggaaatcaatgagggggaaaaggataaggaagaaaccgggatgtagttggatcgaagtgaagaagaaaaagcatgtattcgtcgcagaagattggtctcatccgatgatacgagaagtgaatgaatatctagaggagatgatgaagaagatgaagaaagttgggtatgtgatggataagaaatgggcaatggtaaaagaggatgaagcaggcgaaggggacgaagaaatgcggttaggacatcacagcgagaagctagcggtggcttttgggttgatgtcgactagagatggagaagaattagttgtagttaagaatttgaggatatgtggggattgtcacaatgctatcaagtttatgtctgcggttgcaggtagagagatcattgtaagagataaccttcggtttcattgcttcaaagatggcaagtgttcatgtggggattattggtga

SEQ ID NO: 86808 - protein, 680 aa, Arabidopsis thaliana
  peptide (1)..(680): Ceres Seq. ID no. 12693743
  misc_feature (443)..(477): Pfam Name: PPR repeat Pfam Description: PPR repeat
  misc_feature (306)..(680): Homolog of NCBI NO: 15229194 NR Description: putative protein; protein id: At3g49710.1
  misc_feature (1)..(533): Homolog of NCBI NO: 15229194 NR Description: putative protein; protein id: At3g49710.1
  misc_feature (309)..(680): Homolog of NCBI NO: 15237421 NR Description: putative protein; protein id: At5g16860.1
  misc_feature (1)..(297): Homolog of NCBI NO: 15237421 NR Description: putative protein; protein id: At5g16860.1
  misc_feature (309)..(680): Homolog of NCBI NO: 21741755 NR Description: OSJNBa0060B20.9 [Oryza sativa (japonica
  misc_feature (80)..(366): Homolog of NCBI NO: 21741755 NR Description: OSJNBa0060B20.9 [Oryza sativa (japonica
  misc_feature (230)..(680): Homolog of NCBI NO: 32487551 NR Description: OSJNBa0013K16.3 [Oryza sativa (japonica
  misc_feature (16)..(231): Homolog of NCBI NO: 32487551 NR Description: OSJNBa0013K16.3 [Oryza sativa (japonica
  misc_feature (15)..(288): Homolog of NCBI NO: 21741755 NR Description: OSJNBa0060B20.9 [Oryza sativa (japonica
  misc_feature (78)..(680): Homolog of NCBI NO: 15222566 NR Description: hypothetical protein; protein id: At1g25360.1
MNQTPWKFKTFRDLLLKSVAERDLFTGKSLHALYVKSIVASSTYLSNHFVNLYSKCGRLSYARAAFYSTEEPNVFSYNVIVKAYAKDSKIHIARQLFDEIPQPDTVSYNTLISGYADARETFAAMVLFKRMRKLGFEVDGFTLSGLIAACCDRVDLIKQLHCFSVSGGFDSYSSVNNAFVTYYSKGGLLREAVSVFYGMDELRDEVSWNSMIVAYGQHKEGAKALALYKEMIFKGFKIDMFTLASVLNALTSLDHLIGGRQFHGKLIKAGFHQNSHVGSGLIDFYSKCGGCDGMYDSEKVFQEILSFVCVTSACSNLSSPSQCKQIHGLAIKSHIPSNRISVNNALISLYYKSGNLQDARWVFDRMPELNAVSFNCMIKGYAQHGHGTEALLLYQRMLDSGIAPNKITFVAVLSACAHCGKVDEGQEYFNTMKETFKIEPEAEHYSCMIDLLGRAGKLEEAERFIDAMPYKPGSVAWAALLGACRKHKNMALAERAANELMVMQPLAATPYVMLANMYADARKWEEMASVRKSMRGKRIRKKPGCSWIEVKKKKHVFVAEDWSHPMIREVNEYLEEMMKKMKKVGYVMDKKWAMVKEDEAGEGDEEMRLGHHSEKLAVAFGLMSTRDGEELVVVKNLRICGDCHNAIKFMSAVAGREIIVRDNLRFHCFKDGKCSCGDYW

SEQ ID NO: 86809 - protein, 556 aa, Arabidopsis thaliana
  peptide (1)..(556): Ceres Seq. ID no. 12693744
  misc_feature (319)..(353): Pfam Name: PPR repeat Pfam Description: PPR repeat
  misc_feature (182)..(556): Homolog of NCBI NO: 15229194 NR Description: putative protein; protein id: At3g49710.1
  misc_feature (1)..(409): Homolog of NCBI NO: 15229194 NR Description: putative protein; protein id: At3g49710.1
  misc_feature (185)..(556): Homolog of NCBI NO: 15237421 NR Description: putative protein; protein id: At5g16860.1
  misc_feature (1)..(173): Homolog of NCBI NO: 15237421 NR Description: putative protein; protein id: At5g16860.1
  misc_feature (185)..(556): Homolog of NCBI NO: 21741755 NR Description: OSJNBa0060B20.9 [Oryza sativa (japonica
  misc_feature (1)..(242): Homolog of NCBI NO: 21741755 NR Description: OSJNBa0060B20.9 [Oryza sativa (japonica
  misc_feature (106)..(556): Homolog of NCBI NO: 32487551 NR Description: OSJNBa0013K16.3 [Oryza sativa (japonica
  misc_feature (1)..(107): Homolog of NCBI NO: 32487551 NR Description: OSJNBa0013K16.3 [Oryza sativa (japonica
  misc_feature (1)..(164): Homolog of NCBI NO: 21741755 NR Description: OSJNBa0060B20.9 [Oryza sativa (japonica
  misc_feature (1)..(556): Homolog of NCBI NO: 15222566 NR Description: hypothetical protein; protein id: At1g25360.1
MVLFKRMRKLGFEVDGFTLSGLIAACCDRVDLIKQLHCFSVSGGFDSYSSVNNAFVTYYSKGGLLREAVSVFYGMDELRDEVSWNSMIVAYGQHKEGAKALALYKEMIFKGFKIDMFTLASVLNALTSLDHLIGGRQFHGKLIKAGFHQNSHVGSGLIDFYSKCGGCDGMYDSEKVFQEILSFVCVTSACSNLSSPSQCKQIHGLAIKSHIPSNRISVNNALISLYYKSGNLQDARWVFDRMPELNAVSFNCMIKGYAQHGHGTEALLLYQRMLDSGIAPNKITFVAVLSACAHCGKVDEGQEYFNTMKETFKIEPEAEHYSCMIDLLGRAGKLEEAERFIDAMPYKPGSVAWAALLGACRKHKNMALAERAANELMVMQPLAATPYVMLANMYADARKWEEMASVRKSMRGKRIRKKPGCSWIEVKKKKHVFVAEDWSHPMIREVNEYLEEMMKKMKKVGYVMDKKWAMVKEDEAGEGDEEMRLGHHSEKLAVAFGLMSTRDGEELVVVKNLRICGDCHNAIKFMSAVAGREIIVRDNLRFHCFKDGKCSCGDYW

SEQ ID NO: 86810 - protein, 550 aa, Arabidopsis thaliana
  peptide (1)..(550): Ceres Seq. ID no. 12693745
  misc_feature (313)..(347): Pfam Name: PPR repeat Pfam Description: PPR repeat
  misc_feature (176)..(550): Homolog of NCBI NO: 15229194 NR Description: putative protein; protein id: At3g49710.1
  misc_feature (1)..(403): Homolog of NCBI NO: 15229194 NR Description: putative protein; protein id: At3g49710.1
  misc_feature (179)..(550): Homolog of NCBI NO: 15237421 NR Description: putative protein; protein id: At5g16860.1
  misc_feature (1)..(167): Homolog of NCBI NO: 15237421 NR Description: putative protein; protein id: At5g16860.1
  misc_feature (179)..(550): Homolog of NCBI NO: 21741755 NR Description: OSJNBa0060B20.9 [Oryza sativa (japonica
  misc_feature (1)..(236): Homolog of NCBI NO: 21741755 NR Description: OSJNBa0060B20.9 [Oryza sativa (japonica
  misc_feature (100)..(550): Homolog of NCBI NO: 32487551 NR Description: OSJNBa0013K16.3 [Oryza sativa (japonica
  misc_feature (1)..(101): Homolog of NCBI NO: 32487551 NR Description: OSJNBa0013K16.3 [Oryza sativa (japonica
  misc_feature (1)..(158): Homolog of NCBI NO: 21741755 NR Description: OSJNBa0060B20.9 [Oryza sativa (japonica
  misc_feature (1)..(550): Homolog of NCBI NO: 15222566 NR Description: hypothetical protein; protein id: At1g25360.1
MRKLGFEVDGFTLSGLIAACCDRVDLIKQLHCFSVSGGFDSYSSVNNAFVTYYSKGGLLREAVSVFYGMDELRDEVSWNSMIVAYGQHKEGAKALALYKEMIFKGFKIDMFTLASVLNALTSLDHLIGGRQFHGKLIKAGFHQNSHVGSGLIDFYSKCGGCDGMYDSEKVFQEILSFVCVTSACSNLSSPSQCKQIHGLAIKSHIPSNRISVNNALISLYYKSGNLQDARWVFDRMPELNAVSFNCMIKGYAQHGHGTEALLLYQRMLDSGIAPNKITFVAVLSACAHCGKVDEGQEYFNTMKETFKIEPEAEHYSCMIDLLGRAGKLEEAERFIDAMPYKPGSVAWAALLGACRKHKNMALAERAANELMVMQPLAATPYVMLANMYADARKWEEMASVRKSMRGKRIRKKPGCSWIEVKKKKHVFVAEDWSHPMIREVNEYLEEMMKKMKKVGYVMDKKWAMVKEDEAGEGDEEMRLGHHSEKLAVAFGLMSTRDGEELVVVKNLRICGDCHNAIKFMSAVAGREIIVRDNLRFHCFKDGKCSCGDYW

SEQ ID NO: 86811 - DNA, 1824 bp, Arabidopsis thaliana
  misc_feature (1)..(1824): Ceres Seq. ID no. 12693766
  misc_feature: MA Experiment ID: 20000182 Result: Up-regulated in Transcription
  misc_feature: MA Experiment 20000182 PARAMETER Experiment Name: At_2mM_SA_P Parameter: Age (day) Value: 14
  misc_feature: MA Experiment 20000182 PARAMETER Experiment Name: At_2mM_SA_P Parameter: Organism Value: A. thaliana
  misc_feature: MA Experiment 20000182 PARAMETER Experiment Name: At_2mM_SA_P Parameter: Plant Line Value: WS
  misc_feature: MA Experiment 20000182 PARAMETER Experiment Name: At_2mM_SA_P Parameter: Timepoint (hr) Value: 6
  misc_feature: MA Experiment 20000182 PARAMETER Experiment Name: At_2mM_SA_P Parameter: Tissue Value: Aerial
  misc_feature: MA Experiment 20000182 PARAMETER Experiment Name: At_2mM_SA_P Parameter: Treatment Value: 2mM SA vs. No Treatment
  misc_feature: MA Experiment ID: 20001905 Result: Up-regulated in Transcription
  misc_feature: MA Experiment 20001905 PARAMETER Experiment Name: At_Drought_Reproduction_P Parameter: Age (day) Value: 40
  misc_feature: MA Experiment 20001905 PARAMETER Experiment Name: At_Drought_Reproduction_P Parameter: Organism Value: A. thaliana
  misc_feature: MA Experiment 20001905 PARAMETER Experiment Name: At_Drought_Reproduction_P Parameter: Plant Line Value: WS
  misc_feature: MA Experiment 20001905 PARAMETER Experiment Name: At_Drought_Reproduction_P Parameter: Timepoint (day) Value: 10
  misc_feature: MA Experiment 20001905 PARAMETER Experiment Name: At_Drought_Reproduction_P Parameter: Tissue Value: Rosettes
  misc_feature: MA Experiment 20001905 PARAMETER Experiment Name: At_Drought_Reproduction_P Parameter: Treatment Value: Drought vs. No Drought
atgagtgactcatcatcagtcattgtccgaagctcaaatttcattgtcgtgattctcttcctcaacctcgtcactttcttctcccttgtctcctccaatgaacttgtctttgctgtgggtgaaactggttcactacaagtgactccaagaacagaggtgatatattcacctggtctgaaacgaggtataacatcgatatgtgagagattacatatccatggattacaaagaagacttgagcacattgatagatatgcacattcactaaagttgactcttttgagtaataatgcttccaacagtatcgacgtttgcttccacaggaattcgtcgcgtgcaattggaatgtgtcctgataatcagtggaagagagtgtccaaagggttaccttgggttgggataatgtcaccttttgactataagattcttgatataagaacatttggtggctcatctaatgtcagcaccgtggagttggttgctaaacaagagtttttcatataccggattgtgtttttaatcatggggatagtgttactgagtttggcttctagacttagcaaatcagttgcgttttactatatcggtgcaatgtctattgggattgtcattcttgtaactcttatcattaatcaggggataaagcgtctaccaactagagggaagagtcgttttcagttatttttctactcgtctatgatagaaatcagtgaagatttgtacatccctctggcgattcttttggttgtgtttgtatttatgttgggagcgtggtcaggattttggactgtcaagaaatttgttgtgacaaaagatggttctgttgacattagtacatcaatctttgtctcttggtccatccgagcttttgctgtggctctgatccttcagagctctttagatccattacttgctggaggagcgttgataactggaattctcatctcattgattctaaagagtattagcagaaagctgttagctcaaagaatatatgagcaagatgatgaaactgagagttgtagccccggcttgatccatgctacctcgtttgcttctcctcttcctagaggttccaacaagaagttgaggacagtaccattatctgagtcagatatctttccttcttcattccacaaaacaccagaagggagaaggaagctaacgaaggaagagttgcaaaaattcactaaagagagcacggaaaatgcattgaaggaattggtttcttcacctggttttggcgaatgggcggtgaaaaatgctaaaagaatcactgtaaatccgataaaggaatcgtcaaaagaaggttcctctggttctgaaaagcaagcagctaggggaacttctgaaccagtcggagagtgtacgaagaaaaagaagcaaagagttcgttataaagaaagaaataaaccctcagataagagcataacagagaagaagaagaagatgtcttatcaagacccacaacatcccgttagtgctcctcctcctcaagggtatcctcctaaggaaggatatccaccagcagggtatcctccaccagcaggttatcctccaccacaatatcctcaagcgggatatcctccagcaggttatcctccaccgcagcaaggatacggtcaaggatatccagcacaaggctatcctccaccgcaatatcctcaaggtcatccaccacaatatccttatcaaggtcctccaccaccgcattatggtcaggctccaccgaaaaataagaaagataagaaggattcaggaggcttcatggaaggatgtttggctatgctctgctgttgcgttctcttggaagcttgcttttga

SEQ ID NO: 86812 - protein, 607 aa, Arabidopsis thaliana
  peptide (1)..(607): Ceres Seq. ID no. 12693767
  misc_feature (465)..(592): Pfam Name: DivIVA protein Pfam Description: DivIVA protein
  misc_feature (234)..(561): Homolog of NCBI NO: 15229624 NR Description: putative protein; protein id: At3g49840.1
  misc_feature (5)..(236): Homolog of NCBI NO: 15229624 NR Description: putative protein; protein id: At3g49840.1
  misc_feature (420)..(607): Homolog of NCBI NO: 15229624 NR Description: putative protein; protein id: At3g49840.1
  misc_feature (8)..(243): Homolog of NCBI NO: 15240786 NR Description: putative protein; protein id: At5g67610.1 thaliana] >gi|9757882|dbj|BAB08469.1| to unknown protein [Arabidopsis thaliana]
  misc_feature (344)..(436): Homolog of NCBI NO: 15240786 NR Description: putative protein; protein id: At5g67610.1 thaliana] >gi|9757882|dbj|BAB08469.1| to unknown protein [Arabidopsis thaliana]
  misc_feature (163)..(333): Homolog of NCBI NO: 15240786 NR Description: putative protein; protein id: At5g67610.1 thaliana] >gi|9757882|dbj|BAB08469.1| to unknown protein [Arabidopsis thaliana]
  misc_feature (52)..(236): Homolog of NCBI NO: 29244642 NR Description: unknown protein [Oryza sativa (japonica
  misc_feature (364)..(447): Homolog of NCBI NO: 29244642 NR Description: unknown protein [Oryza sativa (japonica
  misc_feature (236)..(309): Homolog of NCBI NO: 29244642 NR Description: unknown protein [Oryza sativa (japonica
  misc_feature (57)..(293): Homolog of NCBI NO: 25403356 NR Description: protein F1K23.6 [imported] - Arabidopsis thaliana
MSDSSSVIVRSSNFIVVILFLNLVTFFSLVSSNELVFAVGETGSLQVTPRTEVIYSPGLKRGITSICERLHIHGLQRRLEHIDRYAHSLKLTLLSNNASNSIDVCFHRNSSRAIGMCPDNQWKRVSKGLPWVGIMSPFDYKILDIRTFGGSSNVSTVELVAKQEFFIYRIVFLIMGIVLLSLASRLSKSVAFYYIGAMSIGIVILVTLIINQGIKRLPTRGKSRFQLFFYSSMIEISEDLYIPLAILLVVFVFMLGAWSGFWTVKKFVVTKDGSVDISTSIFVSWSIRAFAVALILQSSLDPLLAGGALITGILISLILKSISRKLLAQRIYEQDDETESCSPGLIHATSFASPLPRGSNKKLRTVPLSESDIFPSSFHKTPEGRRKLTKEELQKFTKESTENALKELVSSPGFGEWAVKNAKRITVNPIKESSKEGSSGSEKQAARGTSEPVGECTKKKKQRVRYKERNKPSDKSITEKKKKMSYQDPQHPVSAPPPQGYPPKEGYPPAGYPPPAGYPPPQYPQAGYPPAGYPPPQQGYGQGYPAQGYPPPQYPQGHPPQYPYQGPPPPHYGQAPPKNKKDKKDSGGFMEGCLAMLCCCVLLEACF

SEQ ID NO: 86813 - protein, 492 aa, Arabidopsis thaliana
  peptide (1)..(492): Ceres Seq. ID no. 12693768
  misc_feature (350)..(477): Pfam Name: DivIVA protein Pfam Description: DivIVA protein
  misc_feature (119)..(446): Homolog of NCBI NO: 15229624 NR Description: putative protein; protein id: At3g49840.1
  misc_feature (1)..(121): Homolog of NCBI NO: 15229624 NR Description: putative protein; protein id: At3g49840.1
  misc_feature (305)..(492): Homolog of NCBI NO: 15229624 NR Description: putative protein; protein id: At3g49840.1
  misc_feature (1)..(128): Homolog of NCBI NO: 15240786 NR Description: putative protein; protein id: At5g67610.1 thaliana] >gi|9757882|dbj|BAB08469.1| to unknown protein [Arabidopsis thaliana]
  misc_feature (229)..(321): Homolog of NCBI NO: 15240786 NR Description: putative protein; protein id: At5g67610.1 thaliana] >gi|9757882|dbj|BAB08469.1| to unknown protein [Arabidopsis thaliana]
  misc_feature (48)..(218): Homolog of NCBI NO: 15240786 NR Description: putative protein; protein id: At5g67610.1 thaliana] >gi|9757882|dbj|BAB08469.1| to unknown protein [Arabidopsis thaliana]
  misc_feature (1)..(121): Homolog of NCBI NO: 29244642 NR Description: unknown protein [Oryza sativa (japonica
  misc_feature (249)..(332): Homolog of NCBI NO: 29244642 NR Description: unknown protein [Oryza sativa (japonica
  misc_feature (121)..(194): Homolog of NCBI NO: 29244642 NR Description: unknown protein [Oryza sativa (japonica
  misc_feature (1)..(178): Homolog of NCBI NO: 25403356 NR Description: protein F1K23.6 [imported] - Arabidopsis thaliana
MCPDNQWKRVSKGLPWVGIMSPFDYKILDIRTFGGSSNVSTVELVAKQEFFIYRIVFLIMGIVLLSLASRLSKSVAFYYIGAMSIGIVILVTLIINQGIKRLPTRGKSRFQLFFYSSMIEISEDLYIPLAILLVVFVFMLGAWSGFWTVKKFVVTKDGSVDISTSIFVSWSIRAFAVALILQSSLDPLLAGGALITGILISLILKSISRKLLAQRIYEQDDETESCSPGLIHATSFASPLPRGSNKKLRTVPLSESDIFPSSFHKTPEGRRKLTKEELQKFTKESTENALKELVSSPGFGEWAVKNAKRITVNPIKESSKEGSSGSEKQAARGTSEPVGECTKKKKQRVRYKERNKPSDKSITEKKKKMSYQDPQHPVSAPPPQGYPPKEGYPPAGYPPPAGYPPPQYPQAGYPPAGYPPPQQGYGQGYPAQGYPPPQYPQGHPPQYPYQGPPPPHYGQAPPKNKKDKKDSGGFMEGCLAMLCCCVLLEACF

SEQ ID NO: 86814 - protein, 473 aa, Arabidopsis thaliana
  peptide (1)..(473): Ceres Seq. ID no. 12693769
  misc_feature (331)..(458): Pfam Name: DivIVA protein Pfam Description: DivIVA protein
  misc_feature (100)..(427): Homolog of NCBI NO: 15229624 NR Description: putative protein; protein id: At3g49840.1
  misc_feature (1)..(102): Homolog of NCBI NO: 15229624 NR Description: putative protein; protein id: At3g49840.1
  misc_feature (286)..(473): Homolog of NCBI NO: 15229624 NR Description: putative protein; protein id: At3g49840.1
  misc_feature (1)..(109): Homolog of NCBI NO: 15240786 NR Description: putative protein; protein id: At5g67610.1 thaliana] >gi|9757882|dbj|BAB08469.1| to unknown protein [Arabidopsis thaliana]
  misc_feature (210)..(302): Homolog of NCBI NO: 15240786 NR Description: putative protein; protein id: At5g67610.1 thaliana] >gi|9757882|dbj|BAB08469.1| to unknown protein [Arabidopsis thaliana]
  misc_feature (29)..(199): Homolog of NCBI NO: 15240786 NR Description: putative protein; protein id: At5g67610.1 thaliana] >gi|9757882|dbj|BAB08469.1| to unknown protein [Arabidopsis thaliana]
  misc_feature (1)..(102): Homolog of NCBI NO: 29244642 NR Description: unknown protein [Oryza sativa (japonica
  misc_feature (230)..(313): Homolog of NCBI NO: 29244642 NR Description: unknown protein [Oryza sativa (japonica
  misc_feature (102)..(175): Homolog of NCBI NO: 29244642 NR Description: unknown protein [Oryza sativa (japonica
  misc_feature (1)..(159): Homolog of NCBI NO: 25403356 NR Description: protein F1K23.6 [imported] - Arabidopsis thaliana
MSPFDYKILDIRTFGGSSNVSTVELVAKQEFFIYRIVFLIMGIVLLSLASRLSKSVAFYYIGAMSIGIVILVTLIINQGIKRLPTRGKSRFQLFFYSSMIEISEDLYIPLAILLVVFVFMLGAWSGFWTVKKFVVTKDGSVDISTSIFVSWSIRAFAVALILQSSLDPLLAGGALITGILISLILKSISRKLLAQRIYEQDDETESCSPGLIHATSFASPLPRGSNKKLRTVPLSESDIFPSSFHKTPEGRRKLTKEELQKFTKESTENALKELVSSPGFGEWAVKNAKRITVNPIKESSKEGSSGSEKQAARGTSEPVGECTKKKKQRVRYKERNKPSDKSITEKKKKMSYQDPQHPVSAPPPQGYPPKEGYPPAGYPPPAGYPPPQYPQAGYPPAGYPPPQQGYGQGYPAQGYPPPQYPQGHPPQYPYQGPPPPHYGQAPPKNKKDKKDSGGFMEGCLAMLCCCVLLEACF

SEQ ID NO: 86815 - DNA, 942 bp, Arabidopsis thaliana
  misc_feature (1)..(942): Ceres Seq. ID no. 12693772
  misc_feature: MA Experiment ID: 108434 Result: Up-regulated in Transcription
  misc_feature: MA Experiment 108434 PARAMETER Experiment Name: At_Root_Tips_cDNA_P Parameter: Tissue Value: Root Tips
  misc_feature: MA Experiment ID: 108462 Result: Down-regulated in Transcription
  misc_feature: MA Experiment 108462 PARAMETER Experiment Name: At_Germinating_Seeds_cDNA_P Parameter: Age (day) Value: 2 vs. 0
  misc_feature: MA Experiment 108462 PARAMETER Experiment Name: At_Germinating_Seeds_cDNA_P Parameter: Tissue Value: Germinating Seeds
  misc_feature: MA Experiment ID: 108463 Result: Down-regulated in Transcription
  misc_feature: MA Experiment 108463 PARAMETER Experiment Name: At_Germinating_Seeds_cDNA_P Parameter: Age (day) Value: 3 vs. 0
  misc_feature: MA Experiment 108463 PARAMETER Experiment Name: At_Germinating_Seeds_cDNA_P Parameter: Tissue Value: Germinating Seeds
  misc_feature: MA Experiment ID: 108464 Result: Down-regulated in Transcription
  misc_feature: MA Experiment 108464 PARAMETER Experiment Name: At_Germinating_Seeds_cDNA_P Parameter: Age (day) Value: 4 vs. 0
  misc_feature: MA Experiment 108464 PARAMETER Experiment Name: At_Germinating_Seeds_cDNA_P Parameter: Tissue Value: Germinating Seeds
  misc_feature: MA Experiment ID: 108573 Result: Down-regulated in Transcription
  misc_feature: MA Experiment 108573 PARAMETER Experiment Name: At_Drought_cDNA_P Parameter: Timepoint (hr) Value: 6
  misc_feature: MA Experiment 108573 PARAMETER Experiment Name: At_Drought_cDNA_P Parameter: Tissue Value: Aerial
  misc_feature: MA Experiment 108573 PARAMETER Experiment Name: At_Drought_cDNA_P Parameter: Treatment Value: Drought vs. No Drought
  misc_feature: MA Experiment ID: 20000496 Result: Up-regulated in Transcription
  misc_feature: MA Experiment 20000496 PARAMETER Experiment Name: At_Guard_Cells_P Parameter: Harvest Date Value: 7/19/2002
  misc_feature: MA Experiment 20000496 PARAMETER Experiment Name: At_Guard_Cells_P Parameter: Organism Value: Canola
  misc_feature: MA Experiment 20000496 PARAMETER Experiment Name: At_Guard_Cells_P Parameter: Tissue Value: Guard Cells vs. Leaves
  misc_feature: MA Experiment ID: 20001558 Result: Up-regulated in Transcription
  misc_feature: MA Experiment 20001558 PARAMETER Experiment Name: At_Drought_Soil_Dry_P Parameter: Age (day) Value: 27
  misc_feature: MA Experiment 20001558 PARAMETER Experiment Name: At_Drought_Soil_Dry_P Parameter: Organism Value: A. thaliana
  misc_feature: MA Experiment 20001558 PARAMETER Experiment Name: At_Drought_Soil_Dry_P Parameter: Plant Line Value: WS
  misc_feature: MA Experiment 20001558 PARAMETER Experiment Name: At_Drought_Soil_Dry_P Parameter: Post Timepoint (hr) Value: 6
  misc_feature: MA Experiment 20001558 PARAMETER Experiment Name: At_Drought_Soil_Dry_P Parameter: Post-Treatment Value: Re-Water vs. No Drought
  misc_feature: MA Experiment 20001558 PARAMETER Experiment Name: At_Drought_Soil_Dry_P Parameter: Timepoint (day) Value: 13
  misc_feature: MA Experiment 20001558 PARAMETER Experiment Name: At_Drought_Soil_Dry_P Parameter: Treatment Value: Drought vs. No Drought
  misc_feature: MA Experiment ID: 20001560 Result: Up-regulated in Transcription
  misc_feature: MA Experiment 20001560 PARAMETER Experiment Name: At_Drought_Soil_Dry_P Parameter: Age (day) Value: 28
  misc_feature: MA Experiment 20001560 PARAMETER Experiment Name: At_Drought_Soil_Dry_P Parameter: Organism Value: A. thaliana
  misc_feature: MA Experiment 20001560 PARAMETER Experiment Name: At_Drought_Soil_Dry_P Parameter: Plant Line Value: WS
  misc_feature: MA Experiment 20001560 PARAMETER Experiment Name: At_Drought_Soil_Dry_P Parameter: Post Timepoint (hr) Value: None
  misc_feature: MA Experiment 20001560 PARAMETER Experiment Name: At_Drought_Soil_Dry_P Parameter: Post-Treatment Value: None
  misc_feature: MA Experiment 20001560 PARAMETER Experiment Name: At_Drought_Soil_Dry_P Parameter: Timepoint (day) Value: 14
  misc_feature: MA Experiment 20001560 PARAMETER Experiment Name: At_Drought_Soil_Dry_P Parameter: Treatment Value: Drought vs. No Drought
acgcagttcacggtaagacatagaaacaaagtagagagatttcacggcgacggtattggaatggctaaacgggagttaagtggaggagatagcagcagcgaagatgaagatcccaagtggagagctgcaatcaattcgatagccaccaccaccgtttacggcgcctccgccacgaaacccgcagctactcagtcacataactatggagattttcgtctcaaacctaaaaaactaacacatgggcaaatcaaggtgaagaatcttttgaatgaaatggtggagaagactttagactttgttgaagatcctgtcaatattcctgaggataaacccgagaatgactgtggagttcggttatttaagcggtgtgctactggcattgtatttgatcatgtagatgagattagaggacctaaaaagaagcctaatttacgccctgacaaaggagttgaaggaagctctaaagagtttaagaaacgagtaaaatcaattgctgttgatggttcggatattttaactgctgctgtggaagcggcgaagaaagcctcggctagattagatgcgaaagaagtggcagcgaaagataaagctaagaaagaggaagagagaatcgcagagttgaagaaagtaagaggagaaaaatggttaccttctattgaaagggcaatgaaaaaggaaatgaagcgtatcaaacataccgcatggaagtctgcaatgtcgtgagctttcttcttttgaacttattatcaattttggagtctcattaattgaagaagaaacacagaatcattcactcttggctacaaaacttttactgaaagaagattatgaaattattatgtagagtagagagagattatttgttcttaatgtagtgagagtgaagttcttcagagatgttgtcatcattgtcgtctttgatccagacgaagtcttctaatc

SEQ ID NO: 86816 - protein, 240 aa, Arabidopsis thaliana
  peptide (1)..(240): Ceres Seq. ID no. 12693773
  misc_feature (21)..(240): Homolog of NCBI NO: 15229629 NR Description: putative protein; protein id: At3g49890.1, by cDNA: 35969. [Arabidopsis thaliana] >gi|11285662|pir||T46055
  misc_feature (21)..(240): Homolog of NCBI NO: 21593080 NR Description: unknown [Arabidopsis thaliana]
TQFTVRHRNKVERFHGDGIGMAKRELSGGDSSSEDEDPKWRAAINSIATTTVYGASATKPAATQSHNYGDFRLKPKKLTHGQIKVKNLLNEMVEKTLDFVEDPVNIPEDKPENDCGVRLFKRCATGIVFDHVDEIRGPKKKPNLRPDKGVEGSSKEFKKRVKSIAVDGSDILTAAVEAAKKASARLDAKEVAAKDKAKKEEERIAELKKVRGEKWLPSIERAMKKEMKRIKHTAWKSAMS

SEQ ID NO: 86817 - protein, 220 aa, Arabidopsis thaliana
  peptide (1)..(220): Ceres Seq. ID no. 12693774
  misc_feature (1)..(220): Homolog of NCBI NO: 15229629 NR Description: putative protein; protein id: At3g49890.1, by cDNA: 35969. [Arabidopsis thaliana] >gi|11285662|pir||T46055
  misc_feature (1)..(220): Homolog of NCBI NO: 21593080 NR Description: unknown [Arabidopsis thaliana]
MAKRELSGGDSSSEDEDPKWRAAINSIATTTVYGASATKPAATQSHNYGDFRLKPKKLTHGQIKVKNLLNEMVEKTLDFVEDPVNIPEDKPENDCGVRLFKRCATGIVFDHVDEIRGPKKKPNLRPDKGVEGSSKEFKKRVKSIAVDGSDILTAAVEAAKKASARLDAKEVAAKDKAKKEEERIAELKKVRGEKWLPSIERAMKKEMKRIKHTAWKSAMS

SEQ ID NO: 86818 - protein, 149 aa, Arabidopsis thaliana
  peptide (1)..(149): Ceres Seq. ID no. 12693775
  misc_feature (1)..(149): Homolog of NCBI NO: 15229629 NR Description: putative protein; protein id: At3g49890.1, by cDNA: 35969. [Arabidopsis thaliana] >gi|11285662|pir||T46055
  misc_feature (1)..(149): Homolog of NCBI NO: 21593080 NR Description: unknown [Arabidopsis thaliana]
MVEKTLDFVEDPVNIPEDKPENDCGVRLFKRCATGIVFDHVDEIRGPKKKPNLRPDKGVEGSSKEFKKRVKSIAVDGSDILTAAVEAAKKASARLDAKEVAAKDKAKKEEERIAELKKVRGEKWLPSIERAMKKEMKRIKHTAWKSAMS

SEQ ID NO: 86819 - DNA, 714 bp, Arabidopsis thaliana
  misc_feature (1)..(714): Ceres Seq. ID no. 12693776
  misc_feature: MA Experiment ID: 108434 Result: Up-regulated in Transcription
  misc_feature: MA Experiment 108434 PARAMETER Experiment Name: At_Root_Tips_cDNA_P Parameter: Tissue Value: Root Tips
  misc_feature: MA Experiment ID: 108462 Result: Down-regulated in Transcription
  misc_feature: MA Experiment 108462 PARAMETER Experiment Name: At_Germinating_Seeds_cDNA_P Parameter: Age (day) Value: 2 vs. 0
  misc_feature: MA Experiment 108462 PARAMETER Experiment Name: At_Germinating_Seeds_cDNA_P Parameter: Tissue Value: Germinating Seeds
  misc_feature: MA Experiment ID: 108463 Result: Down-regulated in Transcription
  misc_feature: MA Experiment 108463 PARAMETER Experiment Name: At_Germinating_Seeds_cDNA_P Parameter: Age (day) Value: 3 vs. 0
  misc_feature: MA Experiment 108463 PARAMETER Experiment Name: At_Germinating_Seeds_cDNA_P Parameter: Tissue Value: Germinating Seeds
  misc_feature: MA Experiment ID: 108488 Result: Up-regulated in Transcription
  misc_feature: MA Experiment ID: 108489 Result: Up-regulated in Transcription
  misc_feature: MA Experiment ID: 108573 Result: Down-regulated in Transcription
  misc_feature: MA Experiment 108573 PARAMETER Experiment Name: At_Drought_cDNA_P Parameter: Timepoint (hr) Value: 6
  misc_feature: MA Experiment 108573 PARAMETER Experiment Name: At_Drought_cDNA_P Parameter: Tissue Value: Aerial
  misc_feature: MA Experiment 108573 PARAMETER Experiment Name: At_Drought_cDNA_P Parameter: Treatment Value: Drought vs. No Drought
  misc_feature: MA Experiment ID: 108595 Result: Down-regulated in Transcription
  misc_feature: MA Experiment 108595 PARAMETER Experiment Name: At_Ler-pi_Ovule_cDNA_P Parameter: Plant Line Value: null
  misc_feature: MA Experiment ID: 20000227 Result: Up-regulated in Transcription
  misc_feature: MA Experiment 20000227 PARAMETER Experiment Name: At_Root-Tips-vs-Tops_P Parameter: Tissue Value: Root Tips vs. Root Tops
  misc_feature: MA Experiment ID: 20000437 Result: Down-regulated in Transcription
  misc_feature: MA Experiment 20000437 PARAMETER Experiment Name: At_Drought_P Parameter: Age (day) Value: 8
  misc_feature: MA Experiment 20000437 PARAMETER Experiment Name: At_Drought_P Parameter: Organism Value: A. thaliana
  misc_feature: MA Experiment 20000437 PARAMETER Experiment Name: At_Drought_P Parameter: Plant Line Value: WS
  misc_feature: MA Experiment 20000437 PARAMETER Experiment Name: At_Drought_P Parameter: Timepoint (hr) Value: 24
  misc_feature: MA Experiment 20000437 PARAMETER Experiment Name: At_Drought_P Parameter: Tissue Value: Whole Plant
  misc_feature: MA Experiment 20000437 PARAMETER Experiment Name: At_Drought_P Parameter: Treatment Value: Drought vs. No Drought
  misc_feature: MA Experiment ID: 20000573 Result: Down-regulated in Transcription
  misc_feature: MA Experiment 20000573 PARAMETER Experiment Name: At_100uM_ABA_Mutants__P Parameter: Organism Value: A. thaliana
  misc_feature: MA Experiment 20000573 PARAMETER Experiment Name: At_100uM_ABA_Mutants__P Parameter: Plant Line Value: CS22 vs. Ler wt
  misc_feature: MA Experiment 20000573 PARAMETER Experiment Name: At_100uM_ABA_Mutants__P Parameter: Timepoint (hr) Value: N/A
  misc_feature: MA Experiment 20000573 PARAMETER Experiment Name: At_100uM_ABA_Mutants__P Parameter: Tissue Value: Whole Plant
  misc_feature: MA Experiment 20000573 PARAMETER Experiment Name: At_100uM_ABA_Mutants__P Parameter: Treatment Value: None
  misc_feature: MA Experiment ID: 20000574 Result: Down-regulated in Transcription
  misc_feature: MA Experiment 20000574 PARAMETER Experiment Name: At_100uM_ABA_Mutants__P Parameter: Organism Value: A. thaliana
  misc_feature: MA Experiment 20000574 PARAMETER Experiment Name: At_100uM_ABA_Mutants__P Parameter: Plant Line Value: CS23 vs. Ler wt
  misc_feature: MA Experiment 20000574 PARAMETER Experiment Name: At_100uM_ABA_Mutants__P Parameter: Timepoint (hr) Value: N/A
  misc_feature: MA Experiment 20000574 PARAMETER Experiment Name: At_100uM_ABA_Mutants__P Parameter: Tissue Value: Whole Plant
  misc_feature: MA Experiment 20000574 PARAMETER Experiment Name: At_100uM_ABA_Mutants__P Parameter: Treatment Value: None
  misc_feature: MA Experiment ID: 20000794 Result: Down-regulated in Transcription
  misc_feature: MA Experiment 20000794 PARAMETER Experiment Name: At_Petals_P Parameter: Age (day) Value: 23-25 days
  misc_feature: MA Experiment 20000794 PARAMETER Experiment Name: At_Petals_P Parameter: Plant Line Value: WS
  misc_feature: MA Experiment 20000794 PARAMETER Experiment Name: At_Petals_P Parameter: Tissue Value: Petals vs. Whole plant
  misc_feature: MA Experiment ID: 20001557 Result: Up-regulated in Transcription
  misc_feature: MA Experiment 20001557 PARAMETER Experiment Name: At_Drought_Soil_Dry_P Parameter: Age (day) Value: 27
  misc_feature: MA Experiment 20001557 PARAMETER Experiment Name: At_Drought_Soil_Dry_P Parameter: Organism Value: A. thaliana
  misc_feature: MA Experiment 20001557 PARAMETER Experiment Name: At_Drought_Soil_Dry_P Parameter: Plant Line Value: WS
  misc_feature: MA Experiment 20001557 PARAMETER Experiment Name: At_Drought_Soil_Dry_P Parameter: Post Timepoint (hr) Value: 3
  misc_feature: MA Experiment 20001557 PARAMETER Experiment Name: At_Drought_Soil_Dry_P Parameter: Post-Treatment Value: Re-Water vs. No Drought
  misc_feature: MA Experiment 20001557 PARAMETER Experiment Name: At_Drought_Soil_Dry_P Parameter: Timepoint (day) Value: 13
  misc_feature: MA Experiment 20001557 PARAMETER Experiment Name: At_Drought_Soil_Dry_P Parameter: Treatment Value: Drought vs. No Drought
  misc_feature: MA Experiment ID: 20001558 Result: Up-regulated in Transcription
  misc_feature: MA Experiment 20001558 PARAMETER Experiment Name: At_Drought_Soil_Dry_P Parameter: Age (day) Value: 27
  misc_feature: MA Experiment 20001558 PARAMETER Experiment Name: At_Drought_Soil_Dry_P Parameter: Organism Value: A. thaliana
  misc_feature: MA Experiment 20001558 PARAMETER Experiment Name: At_Drought_Soil_Dry_P Parameter: Plant Line Value: WS
  misc_feature: MA Experiment 20001558 PARAMETER Experiment Name: At_Drought_Soil_Dry_P Parameter: Post Timepoint (hr) Value: 6
  misc_feature: MA Experiment 20001558 PARAMETER Experiment Name: At_Drought_Soil_Dry_P Parameter: Post-Treatment Value: Re-Water vs. No Drought
  misc_feature: MA Experiment 20001558 PARAMETER Experiment Name: At_Drought_Soil_Dry_P Parameter: Timepoint (day) Value: 13
  misc_feature: MA Experiment 20001558 PARAMETER Experiment Name: At_Drought_Soil_Dry_P Parameter: Treatment Value: Drought vs. No Drought
  misc_feature: MA Experiment ID: 20001560 Result: Up-regulated in Transcription
  misc_feature: MA Experiment 20001560 PARAMETER Experiment Name: At_Drought_Soil_Dry_P Parameter: Age (day) Value: 28
  misc_feature: MA Experiment 20001560 PARAMETER Experiment Name: At_Drought_Soil_Dry_P Parameter: Organism Value: A. thaliana
  misc_feature: MA Experiment 20001560 PARAMETER Experiment Name: At_Drought_Soil_Dry_P Parameter: Plant Line Value: WS
  misc_feature: MA Experiment 20001560 PARAMETER Experiment Name: At_Drought_Soil_Dry_P Parameter: Post Timepoint (hr) Value: None
  misc_feature: MA Experiment 20001560 PARAMETER Experiment Name: At_Drought_Soil_Dry_P Parameter: Post-Treatment Value: None
  misc_feature: MA Experiment 20001560 PARAMETER Experiment Name: At_Drought_Soil_Dry_P Parameter: Timepoint (day) Value: 14
  misc_feature: MA Experiment 20001560 PARAMETER Experiment Name: At_Drought_Soil_Dry_P Parameter: Treatment Value: Drought vs. No Drought
  misc_feature: MA Experiment ID: 20001757 Result: Up-regulated in Transcription
  misc_feature: MA Experiment 20001757 PARAMETER Experiment Name: At_50mM_NH4NO3_L-to-H_P Parameter: Timepoint (hr) Value: 6
  misc_feature: MA Experiment 20001757 PARAMETER Experiment Name: At_50mM_NH4NO3_L-to-H_P Parameter: Tissue Value: Leaf
  misc_feature: MA Experiment 20001757 PARAMETER Experiment Name: At_50mM_NH4NO3_L-to-H_P Parameter: Treatment Value: 50mM NH4NO3 vs 100mM Mannitol
tcctcatccccttaaaaaaccctaagagtagagactctctcaatcccggcggcgaagatgaagtacaacccaagagtgacctcttctcgcagaaagaacaggaaggctcatttcacagcttcctccagcgagaggcgtgtgataatgagctctcctctctccaccgatcttcgtcagaagtacaatgtcagatccatgccgatccgtaaagacgacgaggttcagatcgttcgtggtacttacaagggacgtgaaggcaaagttgttcaggtttaccgtcgcaaatgggtgattcacatcgagagaatcacgagggagaaggtgaatggaacaaccgtgaacgttgggattcagccgtcgaaagttgtgataacgaagcttcgtcttgataaagataggaaatcgcttttggagaggaaggctaagggacgtgctgctgctgataaggagaagggtactaagtttacgtctgaggatgttatgcagaacgttgattaagtaagaaggaagaagaaatcttcttgaaaggttttatcttttagagttatcttcaatcgctttttaattttcaagttttggatattttggaatgttgtcagtggatctttatggtgctagacatgagaacttatgttttgattttgagtatttgaagtttggttatggaagtttatctctttgtctcattctttataatgatgtgtttgtttggtt

SEQ ID NO: 86820 - protein, 146 aa, Arabidopsis thaliana; identical to SEQ ID NO: 35384
  peptide (1)..(146): Ceres Seq. ID no. 12693777
  misc_feature (1)..(146): Homolog of NCBI NO: 15229631 NR Description: 60S RIBOSOMAL PROTEIN - like; protein id: supported by cDNA: gi_16323425 [Arabidopsis thaliana]
  misc_feature (1)..(145): Homolog of NCBI NO: 3914740 NR Description: 60S ribosomal protein L26
  misc_feature (1)..(146): Homolog of NCBI NO: 15240766 NR Description: 60S ribosomal protein L26; protein id: supported by cDNA: 2561., supported by cDNA: gi_17473655, by cDNA: gi_20148598 [Arabidopsis thaliana]
  misc_feature (1)..(141): Homolog of NCBI NO: 34895672 NR Description: putative ribosomal protein L26 [Oryza sativa
  misc_feature (1)..(119): Homolog of NCBI NO: 3747050 NR Description: ribosomal protein L26 [Zea mays]
  misc_feature (1)..(141): Homolog of NCBI NO: 132827 NR Description: 60S RIBOSOMAL PROTEIN L26 >gi|71312|pir||R5RT26
  misc_feature (1)..(141): Homolog of NCBI NO: 4506621 NR Description: ribosomal protein L26; 60S ribosomal protein L26 sapiens] >gi|6677777|ref|NP_033106.1| ribosomal protein L26 [Mus >gi|20881715|ref|XP_122248.1| ribosomal protein L26 [Mus
  misc_feature (1)..(139): Homolog of NCBI NO: 7705813 NR Description: ribosomal protein L26-like 1; ribosomal protein
  misc_feature (1)..(141): Homolog of NCBI NO: 27729769 NR Description: similar to ribosomal protein L26 - mouse [Rattus
  misc_feature (1)..(141): Homolog of NCBI NO: 292435 NR Description: ribosomal protein L26

SEQ ID NO: 86821 - protein, 117 aa, Arabidopsis thaliana; identical to SEQ ID NO: 35385
  peptide (1)..(117): Ceres Seq. ID no. 12693778
  misc_feature (1)..(117): Homolog of NCBI NO: 15229631 NR Description: 60S RIBOSOMAL PROTEIN - like; protein id: supported by cDNA: gi_16323425 [Arabidopsis thaliana]
  misc_feature (1)..(116): Homolog of NCBI NO: 3914740 NR Description: 60S ribosomal protein L26
  misc_feature (1)..(117): Homolog of NCBI NO: 15240766 NR Description: 60S ribosomal protein L26; protein id: supported by cDNA: 2561., supported by cDNA: gi_17473655, by cDNA: gi_20148598 [Arabidopsis thaliana]
  misc_feature (1)..(112): Homolog of NCBI NO: 34895672 NR Description: putative ribosomal protein L26 [Oryza sativa
  misc_feature (1)..(90): Homolog of NCBI NO: 3747050 NR Description: ribosomal protein L26 [Zea mays]
  misc_feature (1)..(112): Homolog of NCBI NO: 132827 NR Description: 60S RIBOSOMAL PROTEIN L26 >gi|71312|pir||R5RT26
  misc_feature (1)..(112): Homolog of NCBI NO: 4506621 NR Description: ribosomal protein L26; 60S ribosomal protein L26 sapiens] >gi|6677777|ref|NP_033106.1| ribosomal protein L26 [Mus >gi|20881715|ref|XP_122248.1| ribosomal protein L26 [Mus
  misc_feature (1)..(110): Homolog of NCBI NO: 7705813 NR Description: ribosomal protein L26-like 1; ribosomal protein
  misc_feature (1)..(112): Homolog of NCBI NO: 27729769 NR Description: similar to ribosomal protein L26 - mouse [Rattus
  misc_feature (1)..(112): Homolog of NCBI NO: 292435 NR Description: ribosomal protein L26

SEQ ID NO: 86822 - protein, 100 aa, Arabidopsis thaliana; identical to SEQ ID NO: 35386
  peptide (1)..(100): Ceres Seq. ID no. 12693779
  misc_feature (1)..(100): Homolog of NCBI NO: 15229631 NR Description: 60S RIBOSOMAL PROTEIN - like; protein id: supported by cDNA: gi_16323425 [Arabidopsis thaliana]
  misc_feature (1)..(99): Homolog of NCBI NO: 3914740 NR Description: 60S ribosomal protein L26
  misc_feature (1)..(100): Homolog of NCBI NO: 15240766 NR Description: 60S ribosomal protein L26; protein id: supported by cDNA: 2561., supported by cDNA: gi_17473655, by cDNA: gi_20148598 [Arabidopsis thaliana]
  misc_feature (1)..(95): Homolog of NCBI NO: 34895672 NR Description: putative ribosomal protein L26 [Oryza sativa
  misc_feature (1)..(73): Homolog of NCBI NO: 3747050 NR Description: ribosomal protein L26 [Zea mays]
  misc_feature (1)..(95): Homolog of NCBI NO: 132827 NR Description: 60S RIBOSOMAL PROTEIN L26 >gi|71312|pir||R5RT26
  misc_feature (1)..(95): Homolog of NCBI NO: 4506621 NR Description: ribosomal protein L26; 60S ribosomal protein L26 sapiens] >gi|6677777|ref|NP_033106.1| ribosomal protein L26 [Mus >gi|20881715|ref|XP_122248.1| ribosomal protein L26 [Mus
  misc_feature (1)..(93): Homolog of NCBI NO: 7705813 NR Description: ribosomal protein L26-like 1; ribosomal protein
  misc_feature (1)..(95): Homolog of NCBI NO: 27729769 NR Description: similar to ribosomal protein L26 - mouse [Rattus
  misc_feature (1)..(95): Homolog of NCBI NO: 292435 NR Description: ribosomal protein L26

SEQ ID NO: 86823 - DNA, 2919 bp, Arabidopsis thaliana
  misc_feature (1)..(2919): Ceres Seq. ID no. 12694023
  misc_feature: MA Experiment ID: 20000315 Result: Down-regulated in Transcription
  misc_feature: MA Experiment 20000315 PARAMETER Experiment Name: At_14day_Shoots-Roots_Sub_P Parameter: Age (day) Value: 14
  misc_feature: MA Experiment 20000315 PARAMETER Experiment Name: At_14day_Shoots-Roots_Sub_P Parameter: Organism Value: A. thaliana
  misc_feature: MA Experiment 20000315 PARAMETER Experiment Name: At_14day_Shoots-Roots_Sub_P Parameter: Plant Line Value: WS
  misc_feature: MA Experiment 20000315 PARAMETER Experiment Name: At_14day_Shoots-Roots_Sub_P Parameter: Tissue Value: Shoots vs. Whole Plant
atgggacctccgagaactccgttaagtaagatagataagtccaatccttatactccatgtggttccaaagttacagaggagaagattcttgtcactgttcggatgagaccattaaattggagggaacatgccaaatatgatctcattgcttgggaatgtcccgatgatgagactatcgtctttaagaatccgaatcctgacaaggctccaacaaaatattcatttgataaagtttttgagccaacttgtgcaactcaagaggtgtatgaaggtggttctagggacgttgcactatctgcattagcaggaacaaatgcaactatttttgcttatggtcagactagtagtggcaagacgtttacaatgaggggggttactgaaagtgttgttaaagatatatacgaacatataagaaaaactcaagaaaggagctttgtcttgaaagtatctgctttggagatttataacgagaccgtggttgaccttttaaatcgtgatactgggccccttagactgttagatgatccagagaaaggaaccattgtggaaaatctggtggaggaagtggtagaaagcaggcaacatttacagcatttaattagcatttgtgaagatcaaaggcaagtaggtgaaactgctttaaacgacaaaagttcaagatcgcatcagattattcggctgaccatccatagcagtctcagggaaatagcaggctgtgtgcagtctttcatggcaactctgaatcttgttgatcttgctggaagcgaacgtgcttttcaaacaaacgcagatggtctaagattgaaggaaggaagccacattaaccgtagtttattgacacttactacagtgatcagaaaactgagttctggaagaaaaagggatcacgtgccgtatagagactcaaagctgacaagaattttgcaaaattcacttggcgggaatgctagaacagcaattatatgtacgattagtccggcactgagtcatgttgaacagacaaaaaagacactttcttttgccatgagtgcgaaggaagtcaccaattgcgctaaagtaaacatgaaccaggatgattgtatagagctttgtctttggcttactaaagcttttctttggcctttcattgcaaatgtggttttgtttctgagtagcaatcatcatcctatagttgtctcagaaaaaaagctgctgaaacatctgcagcaaaaagtagctaaactcgagtcagagttaagaagcccggagcccagttcatccacctgcttaaagtctctgttaattgagaaagagatgaaaatccaacagatggaatccgaaatgaaagagctaaagcgtcagagagacattgcacagtctgaacttgatctagaaagaaaagcaaaggagcggaagggatcaagtgagtgtgaacctttttctcaagtggcaaggtgtctctcataccatacaaaggaggaatccattccaagcaaatctgttccgtcaagccgcagaacagctcgtgataggagaaaggataatgtgaggcagtctttaacttcggcggatccaacagcgctagtccaagaaattcgtttgcttgaaaaacatcaaaagaagttgggtgaagaagcaaaccaagcactggatctaattcacaaagaagtgacatcccataaactgggtgatcaacaagctgcagaaaaagttgcgaaaatgctgtcagaaatcagggacatgcagaagagcaaccttttaactgaggaaattgtagttggtgataaagccaacctgaaggaagaaataaatcggttgaattctcaagaaattgcagctttggagaagaagctagagtgtgttcagaacactattgacatgcttgtctcgtcttttcagacagatgaacagactccagatttcaggacccaggtgaaaaagaagagacttcttcccttcggcttaagtaatagtcctaacctacagcatatgatccggggaccatgttcacctctttctgggactgaaaataaggatcctgagagcaatgttgtgtctgctaattcagccccagtgtcttttggagctactccaccaaagagggatgataaccgatgtcgtacacagtcaagggaaggaacgcctgtatcacgacaagcaaattcagtcgatattaagagaatgaatcgaatgtataagaatgctgccgaagagaatatacgtaatatcaaatcttatgttactggattgaaagaacgtgtggcgaagcttcaataccagaagcagctgcttgtttgccaggtgttagaactggaggcaaacgagacaggcgctgcttcggagtacgatgcaaccgatgaatctcagatggattggccattgtgttttgaagagcagagaaagcaaatcataatgttatggcatctgtgccacatttcaatcattcacagaacacaattctacatgttattcaaaggagacccagctgatcaaatctacatggaggttgagctccgcaggctgacatggctcgaacagcacttggctgagcttgggaatgcgagtcctgcattgcttggtgatgaaccagcaagctacgtagcatcgagtataagagctttgaagcaggagagagagtatttggcgaaacgggtaaacacaaagctaggagcagaggaaagagagatgctatacctgaaatgggatgtcccgccggtgggaaaacagaggagacaacagttcatcaacaaactctggacagatcctcacaacatgcaacacgtgagagagagtgcggagatcgtggctaagcttgtcggattctgtgactcgggagagaccataaggaaagaaatgtttgagctcaactttgcatctccttcagataagaagacttggatgatgggttggaacttcatatccaacttgttgcatctctag

SEQ ID NO: 86824 - protein, 972 aa, Arabidopsis thaliana
  peptide (1)..(972): Ceres Seq. ID no. 12694024
  misc_feature (401)..(785): Pfam Name: Myosin tail Pfam Description: Myosin tail
  misc_feature (390)..(972): Homolog of NCBI NO: 19570249 NR Description: kinesin-like protein NACK2 [Nicotiana tabacum]
  misc_feature (5)..(447): Homolog of NCBI NO: 19570249 NR Description: kinesin-like protein NACK2 [Nicotiana tabacum]
  misc_feature (390)..(972): Homolog of NCBI NO: 22796151 NR Description: kinesin-like protein [Arabidopsis thaliana]
  misc_feature (390)..(972): Homolog of NCBI NO: 30690898 NR Description: kinesin -related protein [Arabidopsis thaliana]
  misc_feature (390)..(972): Homolog of NCBI NO: 21954474 NR Description: kinesin-like protein [Arabidopsis thaliana]
  misc_feature (390)..(972): Homolog of NCBI NO: 11358478 NR Description: kinesin-like protein - Arabidopsis thaliana
  misc_feature (390)..(970): Homolog of NCBI NO: 34914660 NR Description: putative kinesin [Oryza sativa (japonica
  misc_feature (3)..(359): Homolog of NCBI NO: 34914660 NR Description: putative kinesin [Oryza sativa (japonica
  misc_feature (4)..(972): Homolog of NCBI NO: 22329653 NR Description: kinesin heavy chain isolog, putative; protein id:
  misc_feature (1)..(576): Homolog of NCBI NO: 21954474 NR Description: kinesin-like protein [Arabidopsis thaliana]
MGPPRTPLSKIDKSNPYTPCGSKVTEEKILVTVRMRPLNWREHAKYDLIAWECPDDETIVFKNPNPDKAPTKYSFDKVFEPTCATQEVYEGGSRDVALSALAGTNATIFAYGQTSSGKTFTMRGVTESVVKDIYEHIRKTQERSFVLKVSALEIYNETVVDLLNRDTGPLRLLDDPEKGTIVENLVEEVVESRQHLQHLISICEDQRQVGETALNDKSSRSHQIIRLTIHSSLREIAGCVQSFMATLNLVDLAGSERAFQTNADGLRLKEGSHINRSLLTLTTVIRKLSSGRKRDHVPYRDSKLTRILQNSLGGNARTAIICTISPALSHVEQTKKTLSFAMSAKEVTNCAKVNMNQDDCIELCLWLTKAFLWPFIANVVLFLSSNHHPIVVSEKKLLKHLQQKVAKLESELRSPEPSSSTCLKSLLIEKEMKIQQMESEMKELKRQRDIAQSELDLERKAKERKGSSECEPFSQVARCLSYHTKEESIPSKSVPSSRRTARDRRKDNVRQSLTSADPTALVQEIRLLEKHQKKLGEEANQALDLIHKEVTSHKLGDQQAAEKVAKMLSEIRDMQKSNLLTEEIVVGDKANLKEEINRLNSQEIAALEKKLECVQNTIDMLVSSFQTDEQTPDFRTQVKKKRLLPFGLSNSPNLQHMIRGPCSPLSGTENKDPESNVVSANSAPVSFGATPPKRDDNRCRTQSREGTPVSRQANSVDIKRMNRMYKNAAEENIRNIKSYVTGLKERVAKLQYQKQLLVCQVLELEANETGAASEYDATDESQMDWPLCFEEQRKQIIMLWHLCHISIIHRTQFYMLFKGDPADQIYMEVELRRLTWLEQHLAELGNASPALLGDEPASYVASSIRALKQEREYLAKRVNTKLGAEEREMLYLKWDVPPVGKQRRQQFINKLWTDPHNMQHVRESAEIVAKLVGFCDSGETIRKEMFELNFASPSDKKTWMMGWNFISNLLHL

SEQ ID NO: 86825 - protein, 938 aa, Arabidopsis thaliana
  peptide (1)..(938): Ceres Seq. ID no. 12694025
  misc_feature (367)..(751): Pfam Name: Myosin tail Pfam Description: Myosin tail
  misc_feature (356)..(938): Homolog of NCBI NO: 19570249 NR Description: kinesin-like protein NACK2 [Nicotiana tabacum]
  misc_feature (1)..(413): Homolog of NCBI NO: 19570249 NR Description: kinesin-like protein NACK2 [Nicotiana tabacum]
  misc_feature (356)..(938): Homolog of NCBI NO: 22796151 NR Description: kinesin-like protein [Arabidopsis thaliana]
  misc_feature (356)..(938): Homolog of NCBI NO: 30690898 NR Description: kinesin -related protein [Arabidopsis thaliana]
  misc_feature (356)..(938): Homolog of NCBI NO: 21954474 NR Description: kinesin-like protein [Arabidopsis thaliana]
  misc_feature (356)..(938): Homolog of NCBI NO: 11358478 NR Description: kinesin-like protein - Arabidopsis thaliana
  misc_feature (356)..(936): Homolog of NCBI NO: 34914660 NR Description: putative kinesin [Oryza sativa (japonica
  misc_feature (1)..(325): Homolog of NCBI NO: 34914660 NR Description: putative kinesin [Oryza sativa (japonica
  misc_feature (1)..(938): Homolog of NCBI NO: 22329653 NR Description: kinesin heavy chain isolog, putative; protein id:
  misc_feature (1)..(542): Homolog of NCBI NO: 21954474 NR Description: kinesin-like protein [Arabidopsis thaliana]
MRPLNWREHAKYDLIAWECPDDETIVFKNPNPDKAPTKYSFDKVFEPTCATQEVYEGGSRDVALSALAGTNATIFAYGQTSSGKTFTMRGVTESVVKDIYEHIRKTQERSFVLKVSALEIYNETVVDLLNRDTGPLRLLDDPEKGTIVENLVEEVVESRQHLQHLISICEDQRQVGETALNDKSSRSHQIIRLTIHSSLREIAGCVQSFMATLNLVDLAGSERAFQTNADGLRLKEGSHINRSLLTLTTVIRKLSSGRKRDHVPYRDSKLTRILQNSLGGNARTAIICTISPALSHVEQTKKTLSFAMSAKEVTNCAKVNMNQDDCIELCLWLTKAFLWPFIANVVLFLSSNHHPIVVSEKKLLKHLQQKVAKLESELRSPEPSSSTCLKSLLIEKEMKIQQMESEMKELKRQRDIAQSELDLERKAKERKGSSECEPFSQVARCLSYHTKEESIPSKSVPSSRRTARDRRKDNVRQSLTSADPTALVQEIRLLEKHQKKLGEEANQALDLIHKEVTSHKLGDQQAAEKVAKMLSEIRDMQKSNLLTEEIVVGDKANLKEEINRLNSQEIAALEKKLECVQNTIDMLVSSFQTDEQTPDFRTQVKKKRLLPFGLSNSPNLQHMIRGPCSPLSGTENKDPESNVVSANSAPVSFGATPPKRDDNRCRTQSREGTPVSRQANSVDIKRMNRMYKNAAEENIRNIKSYVTGLKERVAKLQYQKQLLVCQVLELEANETGAASEYDATDESQMDWPLCFEEQRKQIIMLWHLCHISIIHRTQFYMLFKGDPADQIYMEVELRRLTWLEQHLAELGNASPALLGDEPASYVASSIRALKQEREYLAKRVNTKLGAEEREMLYLKWDVPPVGKQRRQQFINKLWTDPHNMQHVRESAEIVAKLVGFCDSGETIRKEMFELNFASPSDKKTWMMGWNFISNLLHL

SEQ ID NO: 86826 - protein, 851 aa, Arabidopsis thaliana
  peptide (1)..(851): Ceres Seq. ID no. 12694026
  misc_feature (280)..(664): Pfam Name: Myosin tail Pfam Description: Myosin tail
  misc_feature (269)..(851): Homolog of NCBI NO: 19570249 NR Description: kinesin-like protein NACK2 [Nicotiana tabacum]
  misc_feature (1)..(326): Homolog of NCBI NO: 19570249 NR Description: kinesin-like protein NACK2 [Nicotiana tabacum]
  misc_feature (269)..(851): Homolog of NCBI NO: 22796151 NR Description: kinesin-like protein [Arabidopsis thaliana]
  misc_feature (269)..(851): Homolog of NCBI NO: 30690898 NR Description: kinesin -related protein [Arabidopsis thaliana]
  misc_feature (269)..(851): Homolog of NCBI NO: 21954474 NR Description: kinesin-like protein [Arabidopsis thaliana]
  misc_feature (269)..(851): Homolog of NCBI NO: 11358478 NR Description: kinesin-like protein - Arabidopsis thaliana
  misc_feature (269)..(849): Homolog of NCBI NO: 34914660 NR Description: putative kinesin [Oryza sativa (japonica
  misc_feature (1)..(238): Homolog of NCBI NO: 34914660 NR Description: putative kinesin [Oryza sativa (japonica
  misc_feature (1)..(851): Homolog of NCBI NO: 22329653 NR Description: kinesin heavy chain isolog, putative; protein id:
  misc_feature (1)..(455): Homolog of NCBI NO: 21954474 NR Description: kinesin-like protein [Arabidopsis thaliana]
MRGVTESVVKDIYEHIRKTQERSFVLKVSALEIYNETVVDLLNRDTGPLRLLDDPEKGTIVENLVEEVVESRQHLQHLISICEDQRQVGETALNDKSSRSHQIIRLTIHSSLREIAGCVQSFMATLNLVDLAGSERAFQTNADGLRLKEGSHINRSLLTLTTVIRKLSSGRKRDHVPYRDSKLTRILQNSLGGNARTAIICTISPALSHVEQTKKTLSFAMSAKEVTNCAKVNMNQDDCIELCLWLTKAFLWPFIANVVLFLSSNHHPIVVSEKKLLKHLQQKVAKLESELRSPEPSSSTCLKSLLIEKEMKIQQMESEMKELKRQRDIAQSELDLERKAKERKGSSECEPFSQVARCLSYHTKEESIPSKSVPSSRRTARDRRKDNVRQSLTSADPTALVQEIRLLEKHQKKLGEEANQALDLIHKEVTSHKLGDQQAAEKVAKMLSEIRDMQKSNLLTEEIVVGDKANLKEEINRLNSQEIAALEKKLECVQNTIDMLVSSFQTDEQTPDFRTQVKKKRLLPFGLSNSPNLQHMIRGPCSPLSGTENKDPESNVVSANSAPVSFGATPPKRDDNRCRTQSREGTPVSRQANSVDIKRMNRMYKNAAEENIRNIKSYVTGLKERVAKLQYQKQLLVCQVLELEANETGAASEYDATDESQMDWPLCFEEQRKQIIMLWHLCHISIIHRTQFYMLFKGDPADQIYMEVELRRLTWLEQHLAELGNASPALLGDEPASYVASSIRALKQEREYLAKRVNTKLGAEEREMLYLKWDVPPVGKQRRQQFINKLWTDPHNMQHVRESAEIVAKLVGFCDSGETIRKEMFELNFASPSDKKTWMMGWNFISNLLHL

SEQ ID NO: 86827 - DNA, 1980 bp, Arabidopsis thaliana
  misc_feature (1)..(1980): Ceres Seq. ID no. 12694119
  misc_feature: MA Experiment ID: 20000184 Result: Down-regulated in Transcription
  misc_feature: MA Experiment 20000184 PARAMETER Experiment Name: At_Shoots__P Parameter: Age (day) Value: 7
  misc_feature: MA Experiment 20000184 PARAMETER Experiment Name: At_Shoots__P Parameter: Tissue Value: Shoots vs. Whole Plant
  misc_feature: MA Experiment ID: 20001248 Result: Up-regulated in Transcription
  misc_feature: MA Experiment 20001248 PARAMETER Experiment Name: At_Far-red-induction_P Parameter: Age (day) Value: 7
  misc_feature: MA Experiment 20001248 PARAMETER Experiment Name: At_Far-red-induction_P Parameter: Light Value: Far-red vs. White
  misc_feature: MA Experiment 20001248 PARAMETER Experiment Name: At_Far-red-induction_P Parameter: Organism Value: A. thaliana
  misc_feature: MA Experiment 20001248 PARAMETER Experiment Name: At_Far-red-induction_P Parameter: Plant Line Value: Columbia
  misc_feature: MA Experiment 20001248 PARAMETER Experiment Name: At_Far-red-induction_P Parameter: Timepoint (hr) Value: 4
  misc_feature: MA Experiment 20001248 PARAMETER Experiment Name: At_Far-red-induction_P Parameter: Tissue Value: Whole Plant
  misc_feature: MA Experiment ID: 20001450 Result: Up-regulated in Transcription
  misc_feature: MA Experiment 20001450 PARAMETER Experiment Name: At_Far-red-induction_P Parameter: Age (day) Value: 7
  misc_feature: MA Experiment 20001450 PARAMETER Experiment Name: At_Far-red-induction_P Parameter: Light Value: Far-red vs. White
  misc_feature: MA Experiment 20001450 PARAMETER Experiment Name: At_Far-red-induction_P Parameter: Organism Value: A. thaliana
  misc_feature: MA Experiment 20001450 PARAMETER Experiment Name: At_Far-red-induction_P Parameter: Plant Line Value: Columbia
  misc_feature: MA Experiment 20001450 PARAMETER Experiment Name: At_Far-red-induction_P Parameter: Timepoint (hr) Value: 8
  misc_feature: MA Experiment 20001450 PARAMETER Experiment Name: At_Far-red-induction_P Parameter: Tissue Value: Whole Plant
atgagggatgctggtaaggtcaatggtttatcggcttcggttcccgacccgcctcctaatgctaaccctaaccttgagtttcgaattgcaccggggcatccagtagagattgaaacgaatgaacaacctcattctaaccgtttcaacgctgttattgagaagatagagaggctctataaggttgttatatgtttgatttttcacattcacaacatttttgcataccatgcaatagcactgttgcattcacacatctctgaaaagtgtatgcttacttcagagaataaatctcaggggaacgatagcagtgatggggaagagttagacggtgctcctgatgatgatgagtatgacactgaagattcatttatagatgatgctgaactggatgagtatttcgaagttgataattcaacagttaaacatgatggattttatgtaaatagaggcaagttggaggaaccttcaacaacatctaaccagcaacccaaaaaacggcgacgaaaagattcagcaaaaccctgtcgtgatgcagttgacgtatccgataaacacaccaagttgtctataacagctaggaaaaaggagtcacctttgccttctggagcgcaagatgcaaatacttcagtacctctggatgatgtgaagcattctgatagagcaaatcatcagtctaggaatgatacaagtcacaagtcaagggaaactggatcctctagtgcccttcatcagaaatacagcaacaaaagcttacaccaacaatctacgtccctgctaggaaaatctccccccaatgtctttgcagaggtaacagtagtccgtcagaaagaaaacaatggtatgcatcagctggcaaatgtaacgggaagcagacaatctagtcaagcgtctaaaaaagatggttctaatgtgaagtctaaaacctcaatcctcgagaaagccataagggaactggagaaggtggttgtggaatcaaggcctcctgctatcactgaaaatcaagaagctgatacctcatcccaggcagtgaagagaagattgcccagggatgttaaattgaaacttgctaaagttgctaggattgcgcaggcaagccagggaaaacattcaacagagttaatcaaccgtcttatgagcattgttggtcacctaatccagcttaggtctcttaagaggaacttgaaaatcatgattgatatgggagattctgcaacccgagaaaaggatactaggttcaagcaaatcaacaatgaagttcttgatatgataaaggccaaagtttctttgatggaatcacaggcaatcaaaccagaaggtgcaacatcagacgattttcaggactcagtagaaaagccatctttgaagaagtttgtcatggatgcggcattggaggataaattgtgtgacctatatgacatatttatcgacggattggatgaagatcaaggtccacaaacaaaaaagctatatgtcaatttggctgaactctggccaaatagattgatggattatcgtgggatcaaacatgcaattttccgggcaaaggagagacgaaaagcattgtatggaaaccttgcgaaagagatggatcaaacaaagatgaagaagagtatgaagcagttggtaccaagaacagactgtactgctcagcccaacaccgaattagtggttcagagacaacacagtggggaaaaaaaattgattgttgatccaaatgcaaccagcacttccgtggtcactagtcaaactatggttgacagatcaaatcagcagcagcctgagaagctaaagggaatctcaagctcttgcaatcctacagaggaaacaagagtggtcaagagaaagaacgaggctgtaatggctgagaaacaagtcgttcttgccctgaagaagcccgaacatccacagacacgtgtaatcccagctcctcagaatctgaacatcccacgaacaaccccggacctgaacttgccaagttga

SEQ ID NO: 86828 - protein, 659 aa, Arabidopsis thaliana
  peptide (1)..(659): Ceres Seq. ID no. 12694120
  misc_feature (1)..(659): Homolog of NCBI NO: 15223894 NR Description: unknown protein; protein id: At1g77310.1
  misc_feature (1)..(476): Homolog of NCBI NO: 7486999 NR Description: hypothetical protein T14N5.16 - Arabidopsis >gi|3540209|gb|AAC34359.1| Hypothetical protein [Arabidopsis
  misc_feature (193)..(641): Homolog of NCBI NO: 20161447 NR Description: B1065E10.22 [Oryza sativa (japonica
  misc_feature (31)..(59): Homolog of NCBI NO: 20161447 NR Description: B1065E10.22 [Oryza sativa (japonica
  misc_feature (291)..(412): Homolog of NCBI NO: 16506638 NR Description: wound-responsive protein 14.05 [Castanea sativa]
  misc_feature (94)..(258): Homolog of NCBI NO: 20161447 NR Description: B1065E10.22 [Oryza sativa (japonica
  misc_feature (478)..(638): Homolog of NCBI NO: 4106388 NR Description: unknown [Arabidopsis thaliana]
MRDAGKVNGLSASVPDPPPNANPNLEFRIAPGHPVEIETNEQPHSNRFNAVIEKIERLYKVVICLIFHIHNIFAYHAIALLHSHISEKCMLTSENKSQGNDSSDGEELDGAPDDDEYDTEDSFIDDAELDEYFEVDNSTVKHDGFYVNRGKLEEPSTTSNQQPKKRRRKDSAKPCRDAVDVSDKHTKLSITARKKESPLPSGAQDANTSVPLDDVKHSDRANHQSRNDTSHKSRETGSSSALHQKYSNKSLHQQSTSLLGKSPPNVFAEVTVVRQKENNGMHQLANVTGSRQSSQASKKDGSNVKSKTSILEKAIRELEKVVVESRPPAITENQEADTSSQAVKRRLPRDVKLKLAKVARIAQASQGKHSTELINRLMSIVGHLIQLRSLKRNLKIMIDMGDSATREKDTRFKQINNEVLDMIKAKVSLMESQAIKPEGATSDDFQDSVEKPSLKKFVMDAALEDKLCDLYDIFIDGLDEDQGPQTKKLYVNLAELWPNRLMDYRGIKHAIFRAKERRKALYGNLAKEMDQTKMKKSMKQLVPRTDCTAQPNTELVVQRQHSGEKKLIVDPNATSTSVVTSQTMVDRSNQQQPEKLKGISSSCNPTEETRVVKRKNEAVMAEKQVVLALKKPEHPQTRVIPAPQNLNIPRTTPDLNLPS

SEQ ID NO: 86829 - protein, 570 aa, Arabidopsis thaliana
  peptide (1)..(570): Ceres Seq. ID no. 12694121
  misc_feature (1)..(570): Homolog of NCBI NO: 15223894 NR Description: unknown protein; protein id: At1g77310.1
  misc_feature (1)..(387): Homolog of NCBI NO: 7486999 NR Description: hypothetical protein T14N5.16 - Arabidopsis >gi|3540209|gb|AAC34359.1| Hypothetical protein [Arabidopsis
  misc_feature (104)..(552): Homolog of NCBI NO: 20161447 NR Description: B1065E10.22 [Oryza sativa (japonica
  misc_feature (202)..(323): Homolog of NCBI NO: 16506638 NR Description: wound-responsive protein 14.05 [Castanea sativa]
  misc_feature (5)..(169): Homolog of NCBI NO: 20161447 NR Description: B1065E10.22 [Oryza sativa (japonica
  misc_feature (389)..(549): Homolog of NCBI NO: 4106388 NR Description: unknown [Arabidopsis thaliana]
MLTSENKSQGNDSSDGEELDGAPDDDEYDTEDSFIDDAELDEYFEVDNSTVKHDGFYVNRGKLEEPSTTSNQQPKKRRRKDSAKPCRDAVDVSDKHTKLSITARKKESPLPSGAQDANTSVPLDDVKHSDRANHQSRNDTSHKSRETGSSSALHQKYSNKSLHQQSTSLLGKSPPNVFAEVTVVRQKENNGMHQLANVTGSRQSSQASKKDGSNVKSKTSILEKAIRELEKVVVESRPPAITENQEADTSSQAVKRRLPRDVKLKLAKVARIAQASQGKHSTELINRLMSIVGHLIQLRSLKRNLKIMIDMGDSATREKDTRFKQINNEVLDMIKAKVSLMESQAIKPEGATSDDFQDSVEKPSLKKFVMDAALEDKLCDLYDIFIDGLDEDQGPQTKKLYVNLAELWPNRLMDYRGIKHAIFRAKERRKALYGNLAKEMDQTKMKKSMKQLVPRTDCTAQPNTELVVQRQHSGEKKLIVDPNATSTSVVTSQTMVDRSNQQQPEKLKGISSSCNPTEETRVVKRKNEAVMAEKQVVLALKKPEHPQTRVIPAPQNLNIPRTTPDLNLPS

SEQ ID NO: 86830 - protein, 379 aa, Arabidopsis thaliana
  peptide (1)..(379): Ceres Seq. ID no. 12694122
  misc_feature (1)..(379): Homolog of NCBI NO: 15223894 NR Description: unknown protein; protein id: At1g77310.1
  misc_feature (1)..(196): Homolog of NCBI NO: 7486999 NR Description: hypothetical protein T14N5.16 - Arabidopsis >gi|3540209|gb|AAC34359.1| Hypothetical protein [Arabidopsis
  misc_feature (1)..(361): Homolog of NCBI NO: 20161447 NR Description: B1065E10.22 [Oryza sativa (japonica
  misc_feature (11)..(132): Homolog of NCBI NO: 16506638 NR Description: wound-responsive protein 14.05 [Castanea sativa]
  misc_feature (198)..(358): Homolog of NCBI NO: 4106388 NR Description: unknown [Arabidopsis thaliana]
MHQLANVTGSRQSSQASKKDGSNVKSKTSILEKAIRELEKVVVESRPPAITENQEADTSSQAVKRRLPRDVKLKLAKVARIAQASQGKHSTELINRLMSIVGHLIQLRSLKRNLKIMIDMGDSATREKDTRFKQINNEVLDMIKAKVSLMESQAIKPEGATSDDFQDSVEKPSLKKFVMDAALEDKLCDLYDIFIDGLDEDQGPQTKKLYVNLAELWPNRLMDYRGIKHAIFRAKERRKALYGNLAKEMDQTKMKKSMKQLVPRTDCTAQPNTELVVQRQHSGEKKLIVDPNATSTSVVTSQTMVDRSNQQQPEKLKGISSSCNPTEETRVVKRKNEAVMAEKQVVLALKKPEHPQTRVIPAPQNLNIPRTTPDLNLPS

SEQ ID NO: 86831 - DNA, 960 bp, Arabidopsis thaliana
  misc_feature (1)..(960): Ceres Seq. ID no. 12694131
  misc_feature: MA Experiment ID: 20001451 Result: Down-regulated in Transcription
  misc_feature: MA Experiment 20001451 PARAMETER Experiment Name: At_Far-red-induction_P Parameter: Age (day) Value: 7
  misc_feature: MA Experiment 20001451 PARAMETER Experiment Name: At_Far-red-induction_P Parameter: Light Value: Far-red vs. White
  misc_feature: MA Experiment 20001451 PARAMETER Experiment Name: At_Far-red-induction_P Parameter: Organism Value: A. thaliana
  misc_feature: MA Experiment 20001451 PARAMETER Experiment Name: At_Far-red-induction_P Parameter: Plant Line Value: Columbia
  misc_feature: MA Experiment 20001451 PARAMETER Experiment Name: At_Far-red-induction_P Parameter: Timepoint (hr) Value: 24
  misc_feature: MA Experiment 20001451 PARAMETER Experiment Name: At_Far-red-induction_P Parameter: Tissue Value: Whole Plant
gaaaaaaagcgactaacagaagaaaaaaacgaaaaggattattccgccgtagaatccatattctctccctcatcactttgataaacaagagtctcatttttcgcttttccaaagggaacaacttcttcggattattatctatggcagagaagcttgagccggtgaaggttttgtactgcggagtttgctctcttccagcggaatactgcgaattcggtcccgatttcgctagatgtaagccctggctcgtcgaaaacgccccagatctctatcctgatctcctcaaagaagcaaatgagaaggcagcagataatgtttctgacaaactccagtcggtgggaatctcttcaggtggtgctgatggggcaccatcttcagctcagactggagggacatccaagaaggaggaagtgaagcgcctacctggggggaaagttaaaaagaaagatcgacaggaagttatcattgaaaaggttgtacgcaacaaacgcaagtgtatcaccattgtgaaaggactagaactgtttgggataaaactcagtgatgcctctaaaaagcttggtaagaagtttgccactggagcatcagttgtcaagggaccaactgaaaaggagcaaattgatgttcaaggggatataatctatgatatcgttgaattcattacagacacttggcccgacgtacctgaaagatccattttcttcatcgaagatgggaagaaggttcaggctggttgatgatcacctttgtcctcgttttttggcatggcgggttcatgtagacgagctagttcctgagttttcctatgtgtttggaggaaatcgcatcttgattataactttcaacgtaacgtatagttggatttatcatactattttcttattcgggttgcgatagttccagacatgtttctccaaacatttctctttttgggggtcttaatatttaaaatgtgtcttg

SEQ ID NO: 86832 - protein, 244 aa, Arabidopsis thaliana
  peptide (1)..(244): Ceres Seq. ID no. 12694132
  misc_feature (47)..(244): Homolog of NCBI NO: 22326739 NR Description: putative protein; protein id: At5g11900.1, by cDNA: gi_17381203 [Arabidopsis thaliana]
  misc_feature (129)..(244): Homolog of NCBI NO: 11357422 NR Description: hypothetical protein F14F18.70 - Arabidopsis >gi|7573357|emb|CAB87663.1| putative protein [Arabidopsis
  misc_feature (47)..(128): Homolog of NCBI NO: 11357422 NR Description: hypothetical protein F14F18.70 - Arabidopsis >gi|7573357|emb|CAB87663.1| putative protein [Arabidopsis
  misc_feature (48)..(227): Homolog of NCBI NO: 34903554 NR Description: P0001B06.29 [Oryza sativa (japonica
  misc_feature (47)..(239): Homolog of NCBI NO: 19113595 NR Description: hypothetical protein [Schizosaccharomyces pombe]
  misc_feature (53)..(240): Homolog of NCBI NO: 4755083 NR Description: density regulated protein drp1 [Homo sapiens]
  misc_feature (36)..(240): Homolog of NCBI NO: 13386092 NR Description: RIKEN cDNA 1500003K04 [Mus musculus]
  misc_feature (55)..(220): Homolog of NCBI NO: 6322474 NR Description: Hypothetical ORF; Yjr014wp [Saccharomyces
  misc_feature (101)..(240): Homolog of NCBI NO: 39584755 NR Description: Hypothetical protein CBG13210 [Caenorhabditis
  misc_feature (143)..(240): Homolog of NCBI NO: 34872329 NR Description: similar to density-regulated protein [Rattus
KKATNRRKKRKGLFRRRIHILSLITLINKSLIFRFSKGNNFFGLLSMAEKLEPVKVLYCGVCSLPAEYCEFGPDFARCKPWLVENAPDLYPDLLKEANEKAADNVSDKLQSVGISSGGADGAPSSAQTGGTSKKEEVKRLPGGKVKKKDRQEVIIEKVVRNKRKCITIVKGLELFGIKLSDASKKLGKKFATGASVVKGPTEKEQIDVQGDIIYDIVEFITDTWPDVPERSIFFIEDGKKVQAG

SEQ ID NO: 86833 - protein, 198 aa, Arabidopsis thaliana; identical to SEQ ID NO: 49606
  peptide (1)..(198): Ceres Seq. ID no. 12694133
  misc_feature (1)..(198): Homolog of NCBI NO: 22326739 NR Description: putative protein; protein id: At5g11900.1, by cDNA: gi_17381203 [Arabidopsis thaliana]
  misc_feature (83)..(198): Homolog of NCBI NO: 11357422 NR Description: hypothetical protein F14F18.70 - Arabidopsis >gi|7573357|emb|CAB87663.1| putative protein [Arabidopsis
  misc_feature (1)..(82): Homolog of NCBI NO: 11357422 NR Description: hypothetical protein F14F18.70 - Arabidopsis >gi|7573357|emb|CAB87663.1| putative protein [Arabidopsis
  misc_feature (2)..(181): Homolog of NCBI NO: 34903554 NR Description: P0001B06.29 [Oryza sativa (japonica
  misc_feature (1)..(193): Homolog of NCBI NO: 19113595 NR Description: hypothetical protein [Schizosaccharomyces pombe]
  misc_feature (7)..(194): Homolog of NCBI NO: 4755083 NR Description: density regulated protein drp1 [Homo sapiens]
  misc_feature (1)..(194): Homolog of NCBI NO: 13386092 NR Description: RIKEN cDNA 1500003K04 [Mus musculus]
  misc_feature (9)..(174): Homolog of NCBI NO: 6322474 NR Description: Hypothetical ORF; Yjr014wp [Saccharomyces
  misc_feature (55)..(194): Homolog of NCBI NO: 39584755 NR Description: Hypothetical protein CBG13210 [Caenorhabditis
  misc_feature (97)..(194): Homolog of NCBI NO: 34872329 NR Description: similar to density-regulated protein [Rattus

SEQ ID NO: 86834 - DNA, 1382 bp, Arabidopsis thaliana
  misc_feature (1)..(1382): Ceres Seq. ID no. 12694145
  misc_feature: MA Experiment ID: 20000166 Result: Up-regulated in Transcription
  misc_feature: MA Experiment 20000166 PARAMETER Experiment Name: At_100uM_ABA_P Parameter: Age (day) Value: 14
  misc_feature: MA Experiment 20000166 PARAMETER Experiment Name: At_100uM_ABA_P Parameter: Organism Value: A. thaliana
  misc_feature: MA Experiment 20000166 PARAMETER Experiment Name: At_100uM_ABA_P Parameter: Plant Line Value: WS
  misc_feature: MA Experiment 20000166 PARAMETER Experiment Name: At_100uM_ABA_P Parameter: Timepoint (hr) Value: 1
  misc_feature: MA Experiment 20000166 PARAMETER Experiment Name: At_100uM_ABA_P Parameter: Tissue Value: Aerial
  misc_feature: MA Experiment 20000166 PARAMETER Experiment Name: At_100uM_ABA_P Parameter: Treatment Value: 100uM ABA vs. No Treatment
  misc_feature: MA Experiment ID: 20000173 Result: Down-regulated in Transcription
  misc_feature: MA Experiment 20000173 PARAMETER Experiment Name: At_42deg_Heat_P Parameter: Age (day) Value: 14
  misc_feature: MA Experiment 20000173 PARAMETER Experiment Name: At_42deg_Heat_P Parameter: Organism Value: A. thaliana
  misc_feature: MA Experiment 20000173 PARAMETER Experiment Name: At_42deg_Heat_P Parameter: Plant Line Value: WS
  misc_feature: MA Experiment 20000173 PARAMETER Experiment Name: At_42deg_Heat_P Parameter: Temperature (deg C) Value: 42 vs. 22
  misc_feature: MA Experiment 20000173 PARAMETER Experiment Name: At_42deg_Heat_P Parameter: Timepoint (hr) Value: 6
  misc_feature: MA Experiment 20000173 PARAMETER Experiment Name: At_42deg_Heat_P Parameter: Tissue Value: Aerial
  misc_feature: MA Experiment ID: 20000184 Result: Down-regulated in Transcription
  misc_feature: MA Experiment 20000184 PARAMETER Experiment Name: At_Shoots__P Parameter: Age (day) Value: 7
  misc_feature: MA Experiment 20000184 PARAMETER Experiment Name: At_Shoots__P Parameter: Tissue Value: Shoots vs. Whole Plant
  misc_feature: MA Experiment ID: 20000436 Result: Up-regulated in Transcription
  misc_feature: MA Experiment 20000436 PARAMETER Experiment Name: At_Drought_P Parameter: Age (day) Value: 7
  misc_feature: MA Experiment 20000436 PARAMETER Experiment Name: At_Drought_P Parameter: Organism Value: A. thaliana
  misc_feature: MA Experiment 20000436 PARAMETER Experiment Name: At_Drought_P Parameter: Plant Line Value: WS
  misc_feature: MA Experiment 20000436 PARAMETER Experiment Name: At_Drought_P Parameter: Timepoint (hr) Value: 12
  misc_feature: MA Experiment 20000436 PARAMETER Experiment Name: At_Drought_P Parameter: Tissue Value: Whole Plant
  misc_feature: MA Experiment 20000436 PARAMETER Experiment Name: At_Drought_P Parameter: Treatment Value: Drought vs. No Drought
  misc_feature: MA Experiment ID: 20000437 Result: Up-regulated in Transcription
  misc_feature: MA Experiment 20000437 PARAMETER Experiment Name: At_Drought_P Parameter: Age (day) Value: 8
  misc_feature: MA Experiment 20000437 PARAMETER Experiment Name: At_Drought_P Parameter: Organism Value: A. thaliana
  misc_feature: MA Experiment 20000437 PARAMETER Experiment Name: At_Drought_P Parameter: Plant Line Value: WS
  misc_feature: MA Experiment 20000437 PARAMETER Experiment Name: At_Drought_P Parameter: Timepoint (hr) Value: 24
  misc_feature: MA Experiment 20000437 PARAMETER Experiment Name: At_Drought_P Parameter: Tissue Value: Whole Plant
  misc_feature: MA Experiment 20000437 PARAMETER Experiment Name: At_Drought_P Parameter: Treatment Value: Drought vs. No Drought
ccaaaatctagggttttcttctcgcccaatttcacttttcttctacgaaattctccattcctgccggctgtcgggttttctgaatcgattctccttcaccaacttcttctctggttctgttcgattctgattttttttcaaggtcaattttttcttctctttaaactctgcaaaatcgtgatcgattaaattcacctcagggttttttgatttctgaaagaagttaatcttcttcgaaggcgattgcaaaagagtgctctgctgtgaatttccactgagatgcaatcaaaaccgggaagagaaaacgaagaggaagtcaataatcaccatgctgttcagcagccgatgatgtatgcagagccctggtggaaaaacaactcctttggtgttgtacctcaagcgagaccttctggaattccatcaaattcctcttctttggattgccccaatggttccgagtcaaacgatgttcattcagcatctgaagacggtgcgttgaatggtgaaaacgatggcacttggaaggattcacaagctgcaacttcctctcgttcagataatcacggaatggaaggaaatgacccagcgctctctatccgtaacatgcatgatcagccacttgtacaaccaccagagcttgttggacactatatcgcttgtgtcccaaacccatatcaggatccatattatgggggattgatgggagcatatggtcatcagcaattgggttttcgtccatatcttggaatgcctcgtgaaagaacagctctgccacttgacatggcacaagagcccgtttatgtgaatgcaaagcagtacgagggaattctaaggcgaagaaaagcacgtgccaaggcagagctagagaggaaagtcatccgggacagaaagccatatcttcacgagtcaagacacaagcatgcaatgagaagggcacgagcgagtggaggccggtttgcgaagaaaagtgaggtagaagcgggagaggatgcaggagggagagacagagaaaggggttcagcaaccaactcatcaggctctgaacaagttgagacagactctaatgagaccctgaattcttctggtgcaccataataaaaaaagccaaagctctgagaggagagagagacacacactttggctaatataatcattgcctcaaaccggcaaatcattcttggctttttcgtttttgtgtttgctagttgttcttgtcagagtctcatattgtgtgggtttaacagttatgatgaatgtacaaagagcgagttatgttaggtgttagattttggagacaagagactaaggaatagcaagtaggtcttgtttttattctttgaccttttttttctcttttgcaaaattgaaaaatacgtttgctt

SEQ ID NO: 86835 - protein, 271 aa, Arabidopsis thaliana
  peptide (1)..(271): Ceres Seq. ID no. 12694146
  misc_feature (170)..(226): Pfam Name: CCAAT-binding transcription factor (CBF-B/NF-YA) Pfam Description: CCAAT-binding transcription factor
  misc_feature (1)..(271): Homolog of NCBI NO: 30684143 NR Description: CCAAT box binding factor/ transcription factor [Arabidopsis thaliana] >gi|2398521|emb|CAA74048.1| transcription
  misc_feature (1)..(271): Homolog of NCBI NO: 18416875 NR Description: CCAAT box binding factor/ transcription factor protein id: At5g12840.1 [Arabidopsis thaliana]
  misc_feature (39)..(266): Homolog of NCBI NO: 9293997 NR Description: CCAAT-binding transcription factor B subunit
  misc_feature (39)..(266): Homolog of NCBI NO: 18402799 NR Description: CCAAT-binding factor B chain, putative; protein At3g20910.1, supported by cDNA: 37744., supported by cDNA: [Arabidopsis thaliana] >gi|15724232|gb|AAL06509.1|AF412056_1
  misc_feature (2)..(263): Homolog of NCBI NO: 1173618 NR Description: CCAAT-binding factor B subunit homolog
  misc_feature (2)..(263): Homolog of NCBI NO: 1586551 NR Description: CCAAT-binding factor:SUBUNIT=B
  misc_feature (2)..(263): Homolog of NCBI NO: 7488444 NR Description: CCAAT-binding factor B chain homolog (clone
  misc_feature (1)..(260): Homolog of NCBI NO: 27552556 NR Description: putative CCAAT-binding transcription factor
  misc_feature (58)..(271): Homolog of NCBI NO: 34395137 NR Description: putative transcription factor [Oryza sativa
  misc_feature (57)..(253): Homolog of NCBI NO: 38640734 NR Description: transcription factor WAPB [Triticum aestivum]
MQSKPGRENEEEVNNHHAVQQPMMYAEPWWKNNSFGVVPQARPSGIPSNSSSLDCPNGSESNDVHSASEDGALNGENDGTWKDSQAATSSRSDNHGMEGNDPALSIRNMHDQPLVQPPELVGHYIACVPNPYQDPYYGGLMGAYGHQQLGFRPYLGMPRERTALPLDMAQEPVYVNAKQYEGILRRRKARAKAELERKVIRDRKPYLHESRHKHAMRRARASGGRFAKKSEVEAGEDAGGRDRERGSATNSSGSEQVETDSNETLNSSGAP

SEQ ID NO: 86836 - protein, 249 aa, Arabidopsis thaliana
  peptide (1)..(249): Ceres Seq. ID no. 12694147
  misc_feature (148)..(204): Pfam Name: CCAAT-binding transcription factor (CBF-B/NF-YA) Pfam Description: CCAAT-binding transcription factor
  misc_feature (1)..(249): Homolog of NCBI NO: 30684143 NR Description: CCAAT box binding factor/ transcription factor [Arabidopsis thaliana] >gi|2398521|emb|CAA74048.1| transcription
  misc_feature (1)..(249): Homolog of NCBI NO: 18416875 NR Description: CCAAT box binding factor/ transcription factor protein id: At5g12840.1 [Arabidopsis thaliana]
  misc_feature (17)..(244): Homolog of NCBI NO: 9293997 NR Description: CCAAT-binding transcription factor B subunit
  misc_feature (17)..(244): Homolog of NCBI NO: 18402799 NR Description: CCAAT-binding factor B chain, putative; protein At3g20910.1, supported by cDNA: 37744., supported by cDNA: [Arabidopsis thaliana] >gi|15724232|gb|AAL06509.1|AF412056_1
  misc_feature (1)..(241): Homolog of NCBI NO: 1173618 NR Description: CCAAT-binding factor B subunit homolog
  misc_feature (1)..(241): Homolog of NCBI NO: 1586551 NR Description: CCAAT-binding factor:SUBUNIT=B
  misc_feature (1)..(241): Homolog of NCBI NO: 7488444 NR Description: CCAAT-binding factor B chain homolog (clone
  misc_feature (1)..(238): Homolog of NCBI NO: 27552556 NR Description: putative CCAAT-binding transcription factor
  misc_feature (36)..(249): Homolog of NCBI NO: 34395137 NR Description: putative transcription factor [Oryza sativa
  misc_feature (35)..(231): Homolog of NCBI NO: 38640734 NR Description: transcription factor WAPB [Triticum aestivum]
MMYAEPWWKNNSFGVVPQARPSGIPSNSSSLDCPNGSESNDVHSASEDGALNGENDGTWKDSQAATSSRSDNHGMEGNDPALSIRNMHDQPLVQPPELVGHYIACVPNPYQDPYYGGLMGAYGHQQLGFRPYLGMPRERTALPLDMAQEPVYVNAKQYEGILRRRKARAKAELERKVIRDRKPYLHESRHKHAMRRARASGGRFAKKSEVEAGEDAGGRDRERGSATNSSGSEQVETDSNETLNSSGAP

SEQ ID NO: 86837 - protein, 248 aa, Arabidopsis thaliana
  peptide (1)..(248): Ceres Seq. ID no. 12694148
  misc_feature (147)..(203): Pfam Name: CCAAT-binding transcription factor (CBF-B/NF-YA) Pfam Description: CCAAT-binding transcription factor
  misc_feature (1)..(248): Homolog of NCBI NO: 30684143 NR Description: CCAAT box binding factor/ transcription factor [Arabidopsis thaliana] >gi|2398521|emb|CAA74048.1| transcription
  misc_feature (1)..(248): Homolog of NCBI NO: 18416875 NR Description: CCAAT box binding factor/ transcription factor protein id: At5g12840.1 [Arabidopsis thaliana]
  misc_feature (16)..(243): Homolog of NCBI NO: 9293997 NR Description: CCAAT-binding transcription factor B subunit
  misc_feature (16)..(243): Homolog of NCBI NO: 18402799 NR Description: CCAAT-binding factor B chain, putative; protein At3g20910.1, supported by cDNA: 37744., supported by cDNA: [Arabidopsis thaliana] >gi|15724232|gb|AAL06509.1|AF412056_1
  misc_feature (1)..(240): Homolog of NCBI NO: 1173618 NR Description: CCAAT-binding factor B subunit homolog
  misc_feature (1)..(240): Homolog of NCBI NO: 1586551 NR Description: CCAAT-binding factor:SUBUNIT=B
  misc_feature (1)..(240): Homolog of NCBI NO: 7488444 NR Description: CCAAT-binding factor B chain homolog (clone
  misc_feature (1)..(237): Homolog of NCBI NO: 27552556 NR Description: putative CCAAT-binding transcription factor
  misc_feature (35)..(248): Homolog of NCBI NO: 34395137 NR Description: putative transcription factor [Oryza sativa
  misc_feature (34)..(230): Homolog of NCBI NO: 38640734 NR Description: transcription factor WAPB [Triticum aestivum]
MYAEPWWKNNSFGVVPQARPSGIPSNSSSLDCPNGSESNDVHSASEDGALNGENDGTWKDSQAATSSRSDNHGMEGNDPALSIRNMHDQPLVQPPELVGHYIACVPNPYQDPYYGGLMGAYGHQQLGFRPYLGMPRERTALPLDMAQEPVYVNAKQYEGILRRRKARAKAELERKVIRDRKPYLHESRHKHAMRRARASGGRFAKKSEVEAGEDAGGRDRERGSATNSSGSEQVETDSNETLNSSGAP

SEQ ID NO: 86838 - DNA, 1048 bp, Arabidopsis thaliana
  misc_feature (1)..(1048): Ceres Seq. ID no. 12694169
  misc_feature: MA Experiment ID: 20000166 Result: Up-regulated in Transcription
  misc_feature: MA Experiment 20000166 PARAMETER Experiment Name: At_100uM_ABA_P Parameter: Age (day) Value: 14
  misc_feature: MA Experiment 20000166 PARAMETER Experiment Name: At_100uM_ABA_P Parameter: Organism Value: A. thaliana
  misc_feature: MA Experiment 20000166 PARAMETER Experiment Name: At_100uM_ABA_P Parameter: Plant Line Value: WS
  misc_feature: MA Experiment 20000166 PARAMETER Experiment Name: At_100uM_ABA_P Parameter: Timepoint (hr) Value: 1
  misc_feature: MA Experiment 20000166 PARAMETER Experiment Name: At_100uM_ABA_P Parameter: Tissue Value: Aerial
  misc_feature: MA Experiment 20000166 PARAMETER Experiment Name: At_100uM_ABA_P Parameter: Treatment Value: 100uM ABA vs. No Treatment
  misc_feature: MA Experiment ID: 20000173 Result: Up-regulated in Transcription
  misc_feature: MA Experiment 20000173 PARAMETER Experiment Name: At_42deg_Heat_P Parameter: Age (day) Value: 14
  misc_feature: MA Experiment 20000173 PARAMETER Experiment Name: At_42deg_Heat_P Parameter: Organism Value: A. thaliana
  misc_feature: MA Experiment 20000173 PARAMETER Experiment Name: At_42deg_Heat_P Parameter: Plant Line Value: WS
  misc_feature: MA Experiment 20000173 PARAMETER Experiment Name: At_42deg_Heat_P Parameter: Temperature (deg C) Value: 42 vs. 22
  misc_feature: MA Experiment 20000173 PARAMETER Experiment Name: At_42deg_Heat_P Parameter: Timepoint (hr) Value: 6
  misc_feature: MA Experiment 20000173 PARAMETER Experiment Name: At_42deg_Heat_P Parameter: Tissue Value: Aerial
  misc_feature: MA Experiment ID: 20000182 Result: Up-regulated in Transcription
  misc_feature: MA Experiment 20000182 PARAMETER Experiment Name: At_2mM_SA_P Parameter: Age (day) Value: 14
  misc_feature: MA Experiment 20000182 PARAMETER Experiment Name: At_2mM_SA_P Parameter: Organism Value: A. thaliana
  misc_feature: MA Experiment 20000182 PARAMETER Experiment Name: At_2mM_SA_P Parameter: Plant Line Value: WS
  misc_feature: MA Experiment 20000182 PARAMETER Experiment Name: At_2mM_SA_P Parameter: Timepoint (hr) Value: 6
  misc_feature: MA Experiment 20000182 PARAMETER Experiment Name: At_2mM_SA_P Parameter: Tissue Value: Aerial
  misc_feature: MA Experiment 20000182 PARAMETER Experiment Name: At_2mM_SA_P Parameter: Treatment Value: 2mM SA vs. No Treatment
  misc_feature: MA Experiment ID: 20000227 Result: Down-regulated in Transcription
  misc_feature: MA Experiment 20000227 PARAMETER Experiment Name: At_Root-Tips-vs-Tops_P Parameter: Tissue Value: Root Tips vs. Root Tops
  misc_feature: MA Experiment ID: 20000264 Result: Up-regulated in Transcription
  misc_feature: MA Experiment 20000264 PARAMETER Experiment Name: At_Open_Flower_P Parameter: Age (day) Value: 21
  misc_feature: MA Experiment 20000264 PARAMETER Experiment Name: At_Open_Flower_P Parameter: Plant Line Value: WS
  misc_feature: MA Experiment 20000264 PARAMETER Experiment Name: At_Open_Flower_P Parameter: Tissue Value: Open Flower vs. Whole Plant
  misc_feature: MA Experiment ID: 20000286 Result: Up-regulated in Transcription
  misc_feature: MA Experiment 20000286 PARAMETER Experiment Name: At_Open_Flower_P Parameter: Age (day) Value: 21
  misc_feature: MA Experiment 20000286 PARAMETER Experiment Name: At_Open_Flower_P Parameter: Plant Line Value: WS
  misc_feature: MA Experiment 20000286 PARAMETER Experiment Name: At_Open_Flower_P Parameter: Tissue Value: Half Open vs. Whole Plant
  misc_feature: MA Experiment ID: 20000437 Result: Up-regulated in Transcription
  misc_feature: MA Experiment 20000437 PARAMETER Experiment Name: At_Drought_P Parameter: Age (day) Value: 8
  misc_feature: MA Experiment 20000437 PARAMETER Experiment Name: At_Drought_P Parameter: Organism Value: A. thaliana
  misc_feature: MA Experiment 20000437 PARAMETER Experiment Name: At_Drought_P Parameter: Plant Line Value: WS
  misc_feature: MA Experiment 20000437 PARAMETER Experiment Name: At_Drought_P Parameter: Timepoint (hr) Value: 24
  misc_feature: MA Experiment 20000437 PARAMETER Experiment Name: At_Drought_P Parameter: Tissue Value: Whole Plant
  misc_feature: MA Experiment 20000437 PARAMETER Experiment Name: At_Drought_P Parameter: Treatment Value: Drought vs. No Drought
  misc_feature: MA Experiment ID: 20000453 Result: Up-regulated in Transcription
  misc_feature: MA Experiment 20000453 PARAMETER Experiment Name: At_100uM_ABA_P Parameter: Age (day) Value: 15
  misc_feature: MA Experiment 20000453 PARAMETER Experiment Name: At_100uM_ABA_P Parameter: Organism Value: A. thaliana
  misc_feature: MA Experiment 20000453 PARAMETER Experiment Name: At_100uM_ABA_P Parameter: Plant Line Value: WS
  misc_feature: MA Experiment 20000453 PARAMETER Experiment Name: At_100uM_ABA_P Parameter: Timepoint (hr) Value: 24
  misc_feature: MA Experiment 20000453 PARAMETER Experiment Name: At_100uM_ABA_P Parameter: Tissue Value: Aerial
  misc_feature: MA Experiment 20000453 PARAMETER Experiment Name: At_100uM_ABA_P Parameter: Treatment Value: 100uM ABA vs. No Treatment
  misc_feature: MA Experiment ID: 20000574 Result: Up-regulated in Transcription
  misc_feature: MA Experiment 20000574 PARAMETER Experiment Name: At_100uM_ABA_Mutants__P Parameter: Organism Value: A. thaliana
  misc_feature: MA Experiment 20000574 PARAMETER Experiment Name: At_100uM_ABA_Mutants__P Parameter: Plant Line Value: CS23 vs. Ler wt
  misc_feature: MA Experiment 20000574 PARAMETER Experiment Name: At_100uM_ABA_Mutants__P Parameter: Timepoint (hr) Value: N/A
  misc_feature: MA Experiment 20000574 PARAMETER Experiment Name: At_100uM_ABA_Mutants__P Parameter: Tissue Value: Whole Plant
  misc_feature: MA Experiment 20000574 PARAMETER Experiment Name: At_100uM_ABA_Mutants__P Parameter: Treatment Value: None
  misc_feature: MA Experiment ID: 20000794 Result: Up-regulated in Transcription
  misc_feature: MA Experiment 20000794 PARAMETER Experiment Name: At_Petals_P Parameter: Age (day) Value: 23-25 days
  misc_feature: MA Experiment 20000794 PARAMETER Experiment Name: At_Petals_P Parameter: Plant Line Value: WS
  misc_feature: MA Experiment 20000794 PARAMETER Experiment Name: At_Petals_P Parameter: Tissue Value: Petals vs. Whole plant
  misc_feature: MA Experiment ID: 20001560 Result: Down-regulated in Transcription
  misc_feature: MA Experiment 20001560 PARAMETER Experiment Name: At_Drought_Soil_Dry_P Parameter: Age (day) Value: 28
  misc_feature: MA Experiment 20001560 PARAMETER Experiment Name: At_Drought_Soil_Dry_P Parameter: Organism Value: A. thaliana
  misc_feature: MA Experiment 20001560 PARAMETER Experiment Name: At_Drought_Soil_Dry_P Parameter: Plant Line Value: WS
  misc_feature: MA Experiment 20001560 PARAMETER Experiment Name: At_Drought_Soil_Dry_P Parameter: Post Timepoint (hr) Value: None
  misc_feature: MA Experiment 20001560 PARAMETER Experiment Name: At_Drought_Soil_Dry_P Parameter: Post-Treatment Value: None
  misc_feature: MA Experiment 20001560 PARAMETER Experiment Name: At_Drought_Soil_Dry_P Parameter: Timepoint (day) Value: 14
  misc_feature: MA Experiment 20001560 PARAMETER Experiment Name: At_Drought_Soil_Dry_P Parameter: Treatment Value: Drought vs. No Drought
  misc_feature: MA Experiment ID: 20001905 Result: Up-regulated in Transcription
  misc_feature: MA Experiment 20001905 PARAMETER Experiment Name: At_Drought_Reproduction_P Parameter: Age (day) Value: 40
  misc_feature: MA Experiment 20001905 PARAMETER Experiment Name: At_Drought_Reproduction_P Parameter: Organism Value: A. thaliana
  misc_feature: MA Experiment 20001905 PARAMETER Experiment Name: At_Drought_Reproduction_P Parameter: Plant Line Value: WS
  misc_feature: MA Experiment 20001905 PARAMETER Experiment Name: At_Drought_Reproduction_P Parameter: Timepoint (day) Value: 10
  misc_feature: MA Experiment 20001905 PARAMETER Experiment Name: At_Drought_Reproduction_P Parameter: Tissue Value: Rosettes
  misc_feature: MA Experiment 20001905 PARAMETER Experiment Name: At_Drought_Reproduction_P Parameter: Treatment Value: Drought vs. No Drought
  misc_feature: MA Experiment ID: 20001906 Result: Up-regulated in Transcription
  misc_feature: MA Experiment 20001906 PARAMETER Experiment Name: At_Drought_Reproduction_P Parameter: Age (day) Value: 35
  misc_feature: MA Experiment 20001906 PARAMETER Experiment Name: At_Drought_Reproduction_P Parameter: Organism Value: A. thaliana
  misc_feature: MA Experiment 20001906 PARAMETER Experiment Name: At_Drought_Reproduction_P Parameter: Plant Line Value: WS
  misc_feature: MA Experiment 20001906 PARAMETER Experiment Name: At_Drought_Reproduction_P Parameter: Timepoint (day) Value: 5
  misc_feature: MA Experiment 20001906 PARAMETER Experiment Name: At_Drought_Reproduction_P Parameter: Tissue Value: Siliques
  misc_feature: MA Experiment 20001906 PARAMETER Experiment Name: At_Drought_Reproduction_P Parameter: Treatment Value: Drought vs. No Drought
  misc_feature: MA Experiment ID: 20001911 Result: Up-regulated in Transcription
  misc_feature: MA Experiment 20001911 PARAMETER Experiment Name: At_Drought_Reproduction_P Parameter: Age (day) Value: 40
  misc_feature: MA Experiment 20001911 PARAMETER Experiment Name: At_Drought_Reproduction_P Parameter: Organism Value: A. thaliana
  misc_feature: MA Experiment 20001911 PARAMETER Experiment Name: At_Drought_Reproduction_P Parameter: Plant Line Value: WS
  misc_feature: MA Experiment 20001911 PARAMETER Experiment Name: At_Drought_Reproduction_P Parameter: Timepoint (day) Value: 10
  misc_feature: MA Experiment 20001911 PARAMETER Experiment Name: At_Drought_Reproduction_P Parameter: Tissue Value: Flowers
  misc_feature: MA Experiment 20001911 PARAMETER Experiment Name: At_Drought_Reproduction_P Parameter: Treatment Value: Drought vs. No Drought
aaaaaaccaagttcaacacaatccatcacatccatttcaatagaagacgaagaacgtttcagaatcatcaaccaaattcagaaaatttcagccatgacaggatcacaagaagaccaacctaagatcatcattgatcaagagcaacccaaaactctagaaacagagcaccaaccagaaccttcttcatcgtctccggatcagaagaaatggggtactcacgtgatgggagctccggcagctccagttgctcatcccgataaccaacaggcggcggcgtgggtcgctggagataaccagcagacgcagtaccaaccgtacgtcatctactctcctgtcgaacatccaacaactaacaaccctctcgagccagtcatcggaatgttccatacctggagtcgcaaggcagaaaccgtcgcacgtaacctctggcacaatctgaagacaggaccgtctatgtcggaaacggcgtgggggaaggttaatttgacggccaaagcgataacaaaaggaggattcgagtcgcttttcagacagattttcggaacagagccaaacgagacgctgaagaaaactttcgcttgttatctctcgacgacgacaggtcctgttgctggaactgtctatctttcgaatgctcgtgtcgctttttgtagcgatcgtcctctgtacttcacagcaccttctggtcaagaatcttggagctactacagggtggttgtacctttggcgaatgtagcgacggtgaatccggtggtggtgaaagagactccacctgagaagtatattcagttgacgacggtggatggtcatgacttctggttcatgggttttgtgaattatgagaaggctacgcatcatctgctgaccagtgtctccgattttcaaaccgcacacggctctgtgtctggttaaaacttactattcctctaatgtttttctttagttgtgtggttggtttctgctgcttctcatgtttctatatgtttatgtaaattatataccagagctggacttttgtgtgttgattcagagttggtttcacttattc

SEQ ID NO: 86839 - protein, 303 aa, Arabidopsis thaliana
  peptide (1)..(303): Ceres Seq. ID no. 12694170
  misc_feature (174)..(252): Pfam Name: GRAM domain Pfam Description: GRAM domain
  misc_feature (32)..(303): Homolog of NCBI NO: 15240044 NR Description: ABA-responsive protein - like; protein id:
  misc_feature (49)..(271): Homolog of NCBI NO: 11281146 NR Description: ABA-responsive protein - barley
  misc_feature (30)..(291): Homolog of NCBI NO: 18399985 NR Description: Expressed protein; protein id: At2g22475.1, by cDNA: 32573. [Arabidopsis thaliana]
  misc_feature (30)..(291): Homolog of NCBI NO: 21592789 NR Description: unknown [Arabidopsis thaliana]
  misc_feature (30)..(291): Homolog of NCBI NO: 26452129 NR Description: unknown protein [Arabidopsis thaliana]
  misc_feature (105)..(295): Homolog of NCBI NO: 34902414 NR Description: Putative FH protein interacting protein FIP1
  misc_feature (124)..(291): Homolog of NCBI NO: 34906818 NR Description: contains EST C91668(E31216)~similar to FH protein
  misc_feature (59)..(291): Homolog of NCBI NO: 15217869 NR Description: FH protein interacting protein FIP1; protein id: supported by cDNA: 30245., supported by cDNA: gi_13877828, by cDNA: gi_15912222, supported by cDNA: gi_16323497, supported
  misc_feature (73)..(287): Homolog of NCBI NO: 29788871 NR Description: putative ABA-responsive protein [Oryza sativa
  misc_feature (71)..(295): Homolog of NCBI NO: 38344445 NR Description: OSJNBa0038O10.17 [Oryza sativa (japonica
KKPSSTQSITSISIEDEERFRIINQIQKISAMTGSQEDQPKIIIDQEQPKTLETEHQPEPSSSSPDQKKWGTHVMGAPAAPVAHPDNQQAAAWVAGDNQQTQYQPYVIYSPVEHPTTNNPLEPVIGMFHTWSRKAETVARNLWHNLKTGPSMSETAWGKVNLTAKAITKGGFESLFRQIFGTEPNETLKKTFACYLSTTTGPVAGTVYLSNARVAFCSDRPLYFTAPSGQESWSYYRVVVPLANVATVNPVVVKETPPEKYIQLTTVDGHDFWFMGFVNYEKATHHLLTSVSDFQTAHGSVSG

SEQ ID NO: 86840 - protein, 272 aa, Arabidopsis thaliana; identical to SEQ ID NO: 43518
  peptide (1)..(272): Ceres Seq. ID no. 12694171
  misc_feature (143)..(221): Pfam Name: GRAM domain Pfam Description: GRAM domain
  misc_feature (1)..(272): Homolog of NCBI NO: 15240044 NR Description: ABA-responsive protein - like; protein id:
  misc_feature (18)..(240): Homolog of NCBI NO: 11281146 NR Description: ABA-responsive protein - barley
  misc_feature (1)..(260): Homolog of NCBI NO: 18399985 NR Description: Expressed protein; protein id: At2g22475.1, by cDNA: 32573. [Arabidopsis thaliana]
  misc_feature (1)..(260): Homolog of NCBI NO: 21592789 NR Description: unknown [Arabidopsis thaliana]
  misc_feature (1)..(260): Homolog of NCBI NO: 26452129 NR Description: unknown protein [Arabidopsis thaliana]
  misc_feature (74)..(264): Homolog of NCBI NO: 34902414 NR Description: Putative FH protein interacting protein FIP1
  misc_feature (93)..(260): Homolog of NCBI NO: 34906818 NR Description: contains EST C91668(E31216)~similar to FH protein
  misc_feature (28)..(260): Homolog of NCBI NO: 15217869 NR Description: FH protein interacting protein FIP1; protein id: supported by cDNA: 30245., supported by cDNA: gi_13877828, by cDNA: gi_15912222, supported by cDNA: gi_16323497, supported
  misc_feature (42)..(256): Homolog of NCBI NO: 29788871 NR Description: putative ABA-responsive protein [Oryza sativa
  misc_feature (40)..(264): Homolog of NCBI NO: 38344445 NR Description: OSJNBa0038O10.17 [Oryza sativa (japonica

SEQ ID NO: 86841 - protein, 229 aa, Arabidopsis thaliana; identical to SEQ ID NO: 43519
  peptide (1)..(229): Ceres Seq. ID no. 12694172
  misc_feature (100)..(178): Pfam Name: GRAM domain Pfam Description: GRAM domain
  misc_feature (1)..(229): Homolog of NCBI NO: 15240044 NR Description: ABA-responsive protein - like; protein id:
  misc_feature (1)..(197): Homolog of NCBI NO: 11281146 NR Description: ABA-responsive protein - barley
  misc_feature (1)..(217): Homolog of NCBI NO: 18399985 NR Description: Expressed protein; protein id: At2g22475.1, by cDNA: 32573. [Arabidopsis thaliana]
  misc_feature (1)..(217): Homolog of NCBI NO: 21592789 NR Description: unknown [Arabidopsis thaliana]
  misc_feature (1)..(217): Homolog of NCBI NO: 26452129 NR Description: unknown protein [Arabidopsis thaliana]
  misc_feature (31)..(221): Homolog of NCBI NO: 34902414 NR Description: Putative FH protein interacting protein FIP1
  misc_feature (50)..(217): Homolog of NCBI NO: 34906818 NR Description: contains EST C91668(E31216)~similar to FH protein
  misc_feature (1)..(217): Homolog of NCBI NO: 15217869 NR Description: FH protein interacting protein FIP1; protein id: supported by cDNA: 30245., supported by cDNA: gi_13877828, by cDNA: gi_15912222, supported by cDNA: gi_16323497, supported
  misc_feature (1)..(213): Homolog of NCBI NO: 29788871 NR Description: putative ABA-responsive protein [Oryza sativa
  misc_feature (1)..(221): Homolog of NCBI NO: 38344445 NR Description: OSJNBa0038O10.17 [Oryza sativa (japonica

SEQ ID NO: 86842 - DNA, 989 bp, Arabidopsis thaliana
  misc_feature (1)..(989): Ceres Seq. ID no. 12694173
  misc_feature: MA Experiment ID: 108434 Result: Up-regulated in Transcription
  misc_feature: MA Experiment 108434 PARAMETER Experiment Name: At_Root_Tips_cDNA_P Parameter: Tissue Value: Root Tips
  misc_feature: MA Experiment ID: 108488 Result: Down-regulated in Transcription
  misc_feature: MA Experiment ID: 20000185 Result: Up-regulated in Transcription
  misc_feature: MA Experiment 20000185 PARAMETER Experiment Name: At_Roots__P Parameter: Age (day) Value: 7 vs. 21
  misc_feature: MA Experiment 20000185 PARAMETER Experiment Name: At_Roots__P Parameter: Organism Value: A. thaliana
  misc_feature: MA Experiment 20000185 PARAMETER Experiment Name: At_Roots__P Parameter: Tissue Value: Roots vs. Whole Plant
agcagctgagcgacttttgcacatttctagggttccaatcaaaatctatctgcaacaaaaatggctaatcgtttcagatcagggatctccttcttcaagaccatcgccgtaacagattctgtctcctccgttagatccaagtcgcttttcccagcgttgagaacttatgcaactgcttctgctcaaacaaccgctaatgttaaggtgcctattgctttagttggtgaaaatgggaactttgcttcatggctatacattgcagctgtgaaaatgaattccttggaaaagattgagacggatctttctgagatgattgaggcaatgaagacagctcctatttttgctcagtttacaaaggatccctctgttcctagagggacaagattggctgctattagggatgcttgtgatcaagcaaagtttgccgaacccactaagaacttcctctctttgttagctgagaatggaaagctgaagaacctagatgccattgtgaagaaatttatgcagctgacaaacgcacataggggagatgtcaaagttttggttaccacagtcattccgcttccccctgctgaggagaaagaactgactgagacgcttcaggagatcattggagcagggaagaaaatcactgtggaacaaaagattgatccaagtatctacggtggactaatcgtagagttccaacaaaaggtgttggacatgtcaatcaggacaagggcacaacagatggagaggctcctccgtgaacctgttgacttcaacaacctctgaaaatcttgagagaaatttcccccaagaaaacatgcttgtgatgaatgccaccaattgacaaataaatatggaccctcctgggaaacaatataatagctggccacttctctccctttgaattttgtcatttgctttttacatattgttgtttgcttcgaaataaagcttttcgagacatcaaatttcaatgagattgtttttgtttagatttg

SEQ ID NO: 86843 - protein, 238 aa, Arabidopsis thaliana; identical to SEQ ID NO: 28758
  peptide (1)..(238): Ceres Seq. ID no. 12694174
  misc_feature (58)..(229): Pfam Name: ATP synthase delta (OSCP) subunit Pfam Description: ATP synthase delta (OSCP) subunit
  misc_feature (1)..(238): Homolog of NCBI NO: 15240628 NR Description: delta subunit of mitochondrial F1-ATPase; protein At5g13450.1, supported by cDNA: gi_14190494, supported by cDNA: [Arabidopsis thaliana] >gi|22096334|sp|Q96251|ATPO_ARATH ATP
  misc_feature (1)..(238): Homolog of NCBI NO: 14190495 NR Description: AT5g13450/T22N19_100 [Arabidopsis thaliana]
  misc_feature (1)..(238): Homolog of NCBI NO: 1655482 NR Description: delta subunit of mitochondrial F1-ATPase
  misc_feature (1)..(235): Homolog of NCBI NO: 114682 NR Description: ATP synthase delta chain, mitochondrial precursor
  misc_feature (1)..(235): Homolog of NCBI NO: 4774163 NR Description: F1-ATP synthase delta subunit [Ipomoea batatas]
  misc_feature (1)..(234): Homolog of NCBI NO: 23507246 NR Description: oligomycin sensitivity conferring protein [Silene
  misc_feature (1)..(234): Homolog of NCBI NO: 23507248 NR Description: oligomycin sensitivity conferring protein [Silene
  misc_feature (33)..(233): Homolog of NCBI NO: 4502303 NR Description: ATP synthase, H+ transporting, mitochondrial F1 O subunit (oligomycin sensitivity conferring protein); ATP H+ transporting, mitochondrial F1 complex, O subunit; human ATP
  misc_feature (21)..(231): Homolog of NCBI NO: 27806307 NR Description: ATP synthase, H+ transporting, mitochondrial F1 O subunit (oligomycin sensitivity conferring protein) [Bos >gi|114681|sp|P13621|ATPO_BOVIN ATP synthase oligomycin
  misc_feature (34)..(233): Homolog of NCBI NO: 31208781 NR Description: ENSANGP00000011882 [Anopheles gambiae]

SEQ ID NO: 86844 - protein, 168 aa, Arabidopsis thaliana; identical to SEQ ID NO: 28759
  peptide (1)..(168): Ceres Seq. ID no. 12694175
  misc_feature (1)..(159): Pfam Name: ATP synthase delta (OSCP) subunit Pfam Description: ATP synthase delta (OSCP) subunit
  misc_feature (1)..(168): Homolog of NCBI NO: 15240628 NR Description: delta subunit of mitochondrial F1-ATPase; protein At5g13450.1, supported by cDNA: gi_14190494, supported by cDNA: [Arabidopsis thaliana] >gi|22096334|sp|Q96251|ATPO_ARATH ATP
  misc_feature (1)..(168): Homolog of NCBI NO: 14190495 NR Description: AT5g13450/T22N19_100 [Arabidopsis thaliana]
  misc_feature (1)..(168): Homolog of NCBI NO: 1655482 NR Description: delta subunit of mitochondrial F1-ATPase
  misc_feature (1)..(165): Homolog of NCBI NO: 114682 NR Description: ATP synthase delta chain, mitochondrial precursor
  misc_feature (1)..(165): Homolog of NCBI NO: 4774163 NR Description: F1-ATP synthase delta subunit [Ipomoea batatas]
  misc_feature (1)..(164): Homolog of NCBI NO: 23507246 NR Description: oligomycin sensitivity conferring protein [Silene
  misc_feature (1)..(164): Homolog of NCBI NO: 23507248 NR Description: oligomycin sensitivity conferring protein [Silene
  misc_feature (1)..(163): Homolog of NCBI NO: 4502303 NR Description: ATP synthase, H+ transporting, mitochondrial F1 O subunit (oligomycin sensitivity conferring protein); ATP H+ transporting, mitochondrial F1 complex, O subunit; human ATP
  misc_feature (1)..(161): Homolog of NCBI NO: 27806307 NR Description: ATP synthase, H+ transporting, mitochondrial F1 O subunit (oligomycin sensitivity conferring protein) [Bos >gi|114681|sp|P13621|ATPO_BOVIN ATP synthase oligomycin
  misc_feature (1)..(163): Homolog of NCBI NO: 31208781 NR Description: ENSANGP00000011882 [Anopheles gambiae]

SEQ ID NO: 86845 - protein, 155 aa, Arabidopsis thaliana; identical to SEQ ID NO: 28760
  peptide (1)..(155): Ceres Seq. ID no. 12694176
  misc_feature (1)..(146): Pfam Name: ATP synthase delta (OSCP) subunit Pfam Description: ATP synthase delta (OSCP) subunit
  misc_feature (1)..(155): Homolog of NCBI NO: 15240628 NR Description: delta subunit of mitochondrial F1-ATPase; protein At5g13450.1, supported by cDNA: gi_14190494, supported by cDNA: [Arabidopsis thaliana] >gi|22096334|sp|Q96251|ATPO_ARATH ATP
  misc_feature (1)..(155): Homolog of NCBI NO: 14190495 NR Description: AT5g13450/T22N19_100 [Arabidopsis thaliana]
  misc_feature (1)..(155): Homolog of NCBI NO: 1655482 NR Description: delta subunit of mitochondrial F1-ATPase
  misc_feature (1)..(152): Homolog of NCBI NO: 114682 NR Description: ATP synthase delta chain, mitochondrial precursor
  misc_feature (1)..(152): Homolog of NCBI NO: 4774163 NR Description: F1-ATP synthase delta subunit [Ipomoea batatas]
  misc_feature (1)..(151): Homolog of NCBI NO: 23507246 NR Description: oligomycin sensitivity conferring protein [Silene
  misc_feature (1)..(151): Homolog of NCBI NO: 23507248 NR Description: oligomycin sensitivity conferring protein [Silene
  misc_feature (1)..(150): Homolog of NCBI NO: 4502303 NR Description: ATP synthase, H+ transporting, mitochondrial F1 O subunit (oligomycin sensitivity conferring protein); ATP H+ transporting, mitochondrial F1 complex, O subunit; human ATP
  misc_feature (1)..(148): Homolog of NCBI NO: 27806307 NR Description: ATP synthase, H+ transporting, mitochondrial F1 O subunit (oligomycin sensitivity conferring protein) [Bos >gi|114681|sp|P13621|ATPO_BOVIN ATP synthase oligomycin
  misc_feature (1)..(150): Homolog of NCBI NO: 31208781 NR Description: ENSANGP00000011882 [Anopheles gambiae]

SEQ ID NO: 86846 - DNA, 996 bp, Arabidopsis thaliana
  misc_feature (1)..(996): Ceres Seq. ID no. 12694177
  misc_feature: MA Experiment ID: 108434 Result: Up-regulated in Transcription
  misc_feature: MA Experiment 108434 PARAMETER Experiment Name: At_Root_Tips_cDNA_P Parameter: Tissue Value: Root Tips
  misc_feature: MA Experiment ID: 108488 Result: Down-regulated in Transcription
  misc_feature: MA Experiment ID: 20000185 Result: Up-regulated in Transcription
  misc_feature: MA Experiment 20000185 PARAMETER Experiment Name: At_Roots__P Parameter: Age (day) Value: 7 vs. 21
  misc_feature: MA Experiment 20000185 PARAMETER Experiment Name: At_Roots__P Parameter: Organism Value: A. thaliana
  misc_feature: MA Experiment 20000185 PARAMETER Experiment Name: At_Roots__P Parameter: Tissue Value: Roots vs. Whole Plant
gctctcgacaaagcagctgagcgacttttgcacatttctagggttccaatcaaaatctatctgcaacaaaaatggctaatcgtttcagatcagggatctccttcttcaagaccatcgccgtaacagattctgtctcctccgttagatccaagtcgcttttcccagttgagaacttatgcaactgcttctgctcaaacaaccgctaatgttaaggtgcctattgctttagttggtgaaaatgggaactttgcttcatggctatacattgcagctgtgaaaatgaattccttggaaaagattgagacggatctttctgagatgattgaggcaatgaagacagctcctatttttgctcagtttacaaaggatccctctgttcctagagggacaagattggctgctattagggatgcttgtgatcaagcaaagtttgccgaacccactaagaacttcctctctttgttagctgagaatggaaagctgaagaacctagatgccattgtgaagaaatttatgcagctgacaaacgcacataggggagatgtcaaagttttggttaccacagtcattccgcttccccctgctgaggagaaagaactgactgagacgcttcaggagatcattggagcagggaagaaaatcactgtggaacaaaagattgatccaagtatctacggtggactaatcgtagagttccaacaaaaggtgttggacatgtcaatcaggacaagggcacaacagatggagaggctcctccgtgaacctgttgacttcaacaacctctgaaaatcttgagagaaatttcccccaagaaaacatgcttgtgatgaatgccaccaattgacaaataaatatggaccctcctgggaaacaatataatagctggccacttctctccctttgaattttgtcatttgctttttacatattgttgtttgcttcgaaataaagcttttcgagacatcaaatttcaatgagattgtttttgtttagatt

SEQ ID NO: 86847 - protein, 168 aa, Arabidopsis thaliana; identical to SEQ ID NO: 28759
  peptide (1)..(168): Ceres Seq. ID no. 12694178
  misc_feature (1)..(159): Pfam Name: ATP synthase delta (OSCP) subunit Pfam Description: ATP synthase delta (OSCP) subunit
  misc_feature (1)..(168): Homolog of NCBI NO: 15240628 NR Description: delta subunit of mitochondrial F1-ATPase; protein At5g13450.1, supported by cDNA: gi_14190494, supported by cDNA: [Arabidopsis thaliana] >gi|22096334|sp|Q96251|ATPO_ARATH ATP
  misc_feature (1)..(168): Homolog of NCBI NO: 14190495 NR Description: AT5g13450/T22N19_100 [Arabidopsis thaliana]
  misc_feature (1)..(168): Homolog of NCBI NO: 1655482 NR Description: delta subunit of mitochondrial F1-ATPase
  misc_feature (1)..(165): Homolog of NCBI NO: 114682 NR Description: ATP synthase delta chain, mitochondrial precursor
  misc_feature (1)..(165): Homolog of NCBI NO: 4774163 NR Description: F1-ATP synthase delta subunit [Ipomoea batatas]
  misc_feature (1)..(164): Homolog of NCBI NO: 23507246 NR Description: oligomycin sensitivity conferring protein [Silene
  misc_feature (1)..(164): Homolog of NCBI NO: 23507248 NR Description: oligomycin sensitivity conferring protein [Silene
  misc_feature (1)..(163): Homolog of NCBI NO: 4502303 NR Description: ATP synthase, H+ transporting, mitochondrial F1 O subunit (oligomycin sensitivity conferring protein); ATP H+ transporting, mitochondrial F1 complex, O subunit; human ATP
  misc_feature (1)..(161): Homolog of NCBI NO: 27806307 NR Description: ATP synthase, H+ transporting, mitochondrial F1 O subunit (oligomycin sensitivity conferring protein) [Bos >gi|114681|sp|P13621|ATPO_BOVIN ATP synthase oligomycin
  misc_feature (1)..(153): Homolog of NCBI NO: 24647054 NR Description: Oligomycin sensitivity-conferring protein [Drosophila melanogaster] >gi|12644422|sp|Q24439|ATPO_DROME ATP oligomycin sensitivity conferral protein, mitochondrial precursor

SEQ ID NO: 86848 - protein, 155 aa, Arabidopsis thaliana; identical to SEQ ID NO: 28760
  peptide (1)..(155): Ceres Seq. ID no. 12694179
  misc_feature (1)..(146): Pfam Name: ATP synthase delta (OSCP) subunit Pfam Description: ATP synthase delta (OSCP) subunit
  misc_feature (1)..(155): Homolog of NCBI NO: 15240628 NR Description: delta subunit of mitochondrial F1-ATPase; protein At5g13450.1, supported by cDNA: gi_14190494, supported by cDNA: [Arabidopsis thaliana] >gi|22096334|sp|Q96251|ATPO_ARATH ATP
  misc_feature (1)..(155): Homolog of NCBI NO: 14190495 NR Description: AT5g13450/T22N19_100 [Arabidopsis thaliana]
  misc_feature (1)..(155): Homolog of NCBI NO: 1655482 NR Description: delta subunit of mitochondrial F1-ATPase
  misc_feature (1)..(152): Homolog of NCBI NO: 114682 NR Description: ATP synthase delta chain, mitochondrial precursor
  misc_feature (1)..(152): Homolog of NCBI NO: 4774163 NR Description: F1-ATP synthase delta subunit [Ipomoea batatas]
  misc_feature (1)..(151): Homolog of NCBI NO: 23507246 NR Description: oligomycin sensitivity conferring protein [Silene
  misc_feature (1)..(151): Homolog of NCBI NO: 23507248 NR Description: oligomycin sensitivity conferring protein [Silene
  misc_feature (1)..(150): Homolog of NCBI NO: 4502303 NR Description: ATP synthase, H+ transporting, mitochondrial F1 O subunit (oligomycin sensitivity conferring protein); ATP H+ transporting, mitochondrial F1 complex, O subunit; human ATP
  misc_feature (1)..(148): Homolog of NCBI NO: 27806307 NR Description: ATP synthase, H+ transporting, mitochondrial F1 O subunit (oligomycin sensitivity conferring protein) [Bos >gi|114681|sp|P13621|ATPO_BOVIN ATP synthase oligomycin
  misc_feature (1)..(140): Homolog of NCBI NO: 24647054 NR Description: Oligomycin sensitivity-conferring protein [Drosophila melanogaster] >gi|12644422|sp|Q24439|ATPO_DROME ATP oligomycin sensitivity conferral protein, mitochondrial precursor

SEQ ID NO: 86849 - protein, 151 aa, Arabidopsis thaliana
  peptide (1)..(151): Ceres Seq. ID no. 12694180
  misc_feature (1)..(142): Pfam Name: ATP synthase delta (OSCP) subunit Pfam Description: ATP synthase delta (OSCP) subunit
  misc_feature (1)..(151): Homolog of NCBI NO: 15240628 NR Description: delta subunit of mitochondrial F1-ATPase; protein At5g13450.1, supported by cDNA: gi_14190494, supported by cDNA: [Arabidopsis thaliana] >gi|22096334|sp|Q96251|ATPO_ARATH ATP
  misc_feature (1)..(151): Homolog of NCBI NO: 14190495 NR Description: AT5g13450/T22N19_100 [Arabidopsis thaliana]
  misc_feature (1)..(151): Homolog of NCBI NO: 1655482 NR Description: delta subunit of mitochondrial F1-ATPase
  misc_feature (1)..(148): Homolog of NCBI NO: 114682 NR Description: ATP synthase delta chain, mitochondrial precursor
  misc_feature (1)..(148): Homolog of NCBI NO: 4774163 NR Description: F1-ATP synthase delta subunit [Ipomoea batatas]
  misc_feature (1)..(147): Homolog of NCBI NO: 23507246 NR Description: oligomycin sensitivity conferring protein [Silene
  misc_feature (1)..(147): Homolog of NCBI NO: 23507248 NR Description: oligomycin sensitivity conferring protein [Silene
  misc_feature (1)..(146): Homolog of NCBI NO: 4502303 NR Description: ATP synthase, H+ transporting, mitochondrial F1 O subunit (oligomycin sensitivity conferring protein); ATP H+ transporting, mitochondrial F1 complex, O subunit; human ATP
  misc_feature (1)..(144): Homolog of NCBI NO: 27806307 NR Description: ATP synthase, H+ transporting, mitochondrial F1 O subunit (oligomycin sensitivity conferring protein) [Bos >gi|114681|sp|P13621|ATPO_BOVIN ATP synthase oligomycin
  misc_feature (1)..(136): Homolog of NCBI NO: 24647054 NR Description: Oligomycin sensitivity-conferring protein [Drosophila melanogaster] >gi|12644422|sp|Q24439|ATPO_DROME ATP oligomycin sensitivity conferral protein, mitochondrial precursor
MKTAPIFAQFTKDPSVPRGTRLAAIRDACDQAKFAEPTKNFLSLLAENGKLKNLDAIVKKFMQLTNAHRGDVKVLVTTVIPLPPAEEKELTETLQEIIGAGKKITVEQKIDPSIYGGLIVEFQQKVLDMSIRTRAQQMERLLREPVDFNNL

SEQ ID NO: 86850 - DNA, 1253 bp, Arabidopsis thaliana
  misc_feature (1)..(1253): Ceres Seq. ID no. 12694209
  misc_feature: MA Experiment ID: 108434 Result: Up-regulated in Transcription
  misc_feature: MA Experiment 108434 PARAMETER Experiment Name: At_Root_Tips_cDNA_P Parameter: Tissue Value: Root Tips
  misc_feature: MA Experiment ID: 108461 Result: Up-regulated in Transcription
  misc_feature: MA Experiment 108461 PARAMETER Experiment Name: At_Germinating_Seeds_cDNA_P Parameter: Age (day) Value: 1 vs. 0
  misc_feature: MA Experiment 108461 PARAMETER Experiment Name: At_Germinating_Seeds_cDNA_P Parameter: Tissue Value: Germinating Seeds
  misc_feature: MA Experiment ID: 108462 Result: Up-regulated in Transcription
  misc_feature: MA Experiment 108462 PARAMETER Experiment Name: At_Germinating_Seeds_cDNA_P Parameter: Age (day) Value: 2 vs. 0
  misc_feature: MA Experiment 108462 PARAMETER Experiment Name: At_Germinating_Seeds_cDNA_P Parameter: Tissue Value: Germinating Seeds
  misc_feature: MA Experiment ID: 108464 Result: Up-regulated in Transcription
  misc_feature: MA Experiment 108464 PARAMETER Experiment Name: At_Germinating_Seeds_cDNA_P Parameter: Age (day) Value: 4 vs. 0
  misc_feature: MA Experiment 108464 PARAMETER Experiment Name: At_Germinating_Seeds_cDNA_P Parameter: Tissue Value: Germinating Seeds
  misc_feature: MA Experiment ID: 108577 Result: Down-regulated in Transcription
  misc_feature: MA Experiment 108577 PARAMETER Experiment Name: At_42deg_Heat_cDNA_P Parameter: Temperature (deg C) Value: 42 vs. 22
  misc_feature: MA Experiment 108577 PARAMETER Experiment Name: At_42deg_Heat_cDNA_P Parameter: Timepoint (hr) Value: 6
  misc_feature: MA Experiment 108577 PARAMETER Experiment Name: At_42deg_Heat_cDNA_P Parameter: Tissue Value: Aerial
  misc_feature: MA Experiment ID: 108595 Result: Down-regulated in Transcription
  misc_feature: MA Experiment 108595 PARAMETER Experiment Name: At_Ler-pi_Ovule_cDNA_P Parameter: Plant Line Value: null
  misc_feature: MA Experiment ID: 20000087 Result: Down-regulated in Transcription
  misc_feature: MA Experiment 20000087 PARAMETER Experiment Name: At_100uM_ABA_Mutants_cDNA_P Parameter: Plant Line Value: WS
  misc_feature: MA Experiment 20000087 PARAMETER Experiment Name: At_100uM_ABA_Mutants_cDNA_P Parameter: Timepoint (hr) Value: 6
  misc_feature: MA Experiment 20000087 PARAMETER Experiment Name: At_100uM_ABA_Mutants_cDNA_P Parameter: Tissue Value: Aerial
  misc_feature: MA Experiment 20000087 PARAMETER Experiment Name: At_100uM_ABA_Mutants_cDNA_P Parameter: Treatment Value: 100uM ABA vs. No Treatment
  misc_feature: MA Experiment ID: 20000111 Result: Down-regulated in Transcription
  misc_feature: MA Experiment 20000111 PARAMETER Experiment Name: At_42deg_Heat_cDNA_P Parameter: Temperature (deg C) Value: 42 vs. 22
  misc_feature: MA Experiment 20000111 PARAMETER Experiment Name: At_42deg_Heat_cDNA_P Parameter: Timepoint (hr) Value: 6
  misc_feature: MA Experiment 20000111 PARAMETER Experiment Name: At_42deg_Heat_cDNA_P Parameter: Tissue Value: Aerial
  misc_feature: MA Experiment ID: 20000113 Result: Down-regulated in Transcription
  misc_feature: MA Experiment 20000113 PARAMETER Experiment Name: At_42deg_Heat_cDNA_P Parameter: Temperature (deg C) Value: 42 vs. 22
  misc_feature: MA Experiment 20000113 PARAMETER Experiment Name: At_42deg_Heat_cDNA_P Parameter: Timepoint (hr) Value: 8
  misc_feature: MA Experiment 20000113 PARAMETER Experiment Name: At_42deg_Heat_cDNA_P Parameter: Tissue Value: Aerial
  misc_feature: MA Experiment ID: 20000173 Result: Down-regulated in Transcription
  misc_feature: MA Experiment 20000173 PARAMETER Experiment Name: At_42deg_Heat_P Parameter: Age (day) Value: 14
  misc_feature: MA Experiment 20000173 PARAMETER Experiment Name: At_42deg_Heat_P Parameter: Organism Value: A. thaliana
  misc_feature: MA Experiment 20000173 PARAMETER Experiment Name: At_42deg_Heat_P Parameter: Plant Line Value: WS
  misc_feature: MA Experiment 20000173 PARAMETER Experiment Name: At_42deg_Heat_P Parameter: Temperature (deg C) Value: 42 vs. 22
  misc_feature: MA Experiment 20000173 PARAMETER Experiment Name: At_42deg_Heat_P Parameter: Timepoint (hr) Value: 6
  misc_feature: MA Experiment 20000173 PARAMETER Experiment Name: At_42deg_Heat_P Parameter: Tissue Value: Aerial
  misc_feature: MA Experiment ID: 20000180 Result: Up-regulated in Transcription
  misc_feature: MA Experiment 20000180 PARAMETER Experiment Name: At_Germinating_Seeds_P Parameter: Age (hr) Value: 24 vs. 0
  misc_feature: MA Experiment 20000180 PARAMETER Experiment Name: At_Germinating_Seeds_P Parameter: Tissue Value: Germinating Seeds
  misc_feature: MA Experiment ID: 20000227 Result: Up-regulated in Transcription
  misc_feature: MA Experiment 20000227 PARAMETER Experiment Name: At_Root-Tips-vs-Tops_P Parameter: Tissue Value: Root Tips vs. Root Tops
  misc_feature: MA Experiment ID: 20000267 Result: Down-regulated in Transcription
  misc_feature: MA Experiment 20000267 PARAMETER Experiment Name: At_Drought_P Parameter: Age (day) Value: 7
  misc_feature: MA Experiment 20000267 PARAMETER Experiment Name: At_Drought_P Parameter: Organism Value: A. thaliana
  misc_feature: MA Experiment 20000267 PARAMETER Experiment Name: At_Drought_P Parameter: Plant Line Value: WS
  misc_feature: MA Experiment 20000267 PARAMETER Experiment Name: At_Drought_P Parameter: Timepoint (hr) Value: 6
  misc_feature: MA Experiment 20000267 PARAMETER Experiment Name: At_Drought_P Parameter: Tissue Value: Whole Plant
  misc_feature: MA Experiment 20000267 PARAMETER Experiment Name: At_Drought_P Parameter: Treatment Value: Drought vs. No Drought
  misc_feature: MA Experiment ID: 20000436 Result: Down-regulated in Transcription
  misc_feature: MA Experiment 20000436 PARAMETER Experiment Name: At_Drought_P Parameter: Age (day) Value: 7
  misc_feature: MA Experiment 20000436 PARAMETER Experiment Name: At_Drought_P Parameter: Organism Value: A. thaliana
  misc_feature: MA Experiment 20000436 PARAMETER Experiment Name: At_Drought_P Parameter: Plant Line Value: WS
  misc_feature: MA Experiment 20000436 PARAMETER Experiment Name: At_Drought_P Parameter: Timepoint (hr) Value: 12
  misc_feature: MA Experiment 20000436 PARAMETER Experiment Name: At_Drought_P Parameter: Tissue Value: Whole Plant
  misc_feature: MA Experiment 20000436 PARAMETER Experiment Name: At_Drought_P Parameter: Treatment Value: Drought vs. No Drought
  misc_feature: MA Experiment ID: 20000437 Result: Down-regulated in Transcription
  misc_feature: MA Experiment 20000437 PARAMETER Experiment Name: At_Drought_P Parameter: Age (day) Value: 8
  misc_feature: MA Experiment 20000437 PARAMETER Experiment Name: At_Drought_P Parameter: Organism Value: A. thaliana
  misc_feature: MA Experiment 20000437 PARAMETER Experiment Name: At_Drought_P Parameter: Plant Line Value: WS
  misc_feature: MA Experiment 20000437 PARAMETER Experiment Name: At_Drought_P Parameter: Timepoint (hr) Value: 24
  misc_feature: MA Experiment 20000437 PARAMETER Experiment Name: At_Drought_P Parameter: Tissue Value: Whole Plant
  misc_feature: MA Experiment 20000437 PARAMETER Experiment Name: At_Drought_P Parameter: Treatment Value: Drought vs. No Drought
  misc_feature: MA Experiment ID: 20001247 Result: Up-regulated in Transcription
  misc_feature: MA Experiment 20001247 PARAMETER Experiment Name: At_Far-red-induction_P Parameter: Age (day) Value: 7
  misc_feature: MA Experiment 20001247 PARAMETER Experiment Name: At_Far-red-induction_P Parameter: Light Value: Far-red vs. White
  misc_feature: MA Experiment 20001247 PARAMETER Experiment Name: At_Far-red-induction_P Parameter: Organism Value: A. thaliana
  misc_feature: MA Experiment 20001247 PARAMETER Experiment Name: At_Far-red-induction_P Parameter: Plant Line Value: Columbia
  misc_feature: MA Experiment 20001247 PARAMETER Experiment Name: At_Far-red-induction_P Parameter: Timepoint (hr) Value: 1
  misc_feature: MA Experiment 20001247 PARAMETER Experiment Name: At_Far-red-induction_P Parameter: Tissue Value: Whole Plant
  misc_feature: MA Experiment ID: 20001248 Result: Up-regulated in Transcription
  misc_feature: MA Experiment 20001248 PARAMETER Experiment Name: At_Far-red-induction_P Parameter: Age (day) Value: 7
  misc_feature: MA Experiment 20001248 PARAMETER Experiment Name: At_Far-red-induction_P Parameter: Light Value: Far-red vs. White
  misc_feature: MA Experiment 20001248 PARAMETER Experiment Name: At_Far-red-induction_P Parameter: Organism Value: A. thaliana
  misc_feature: MA Experiment 20001248 PARAMETER Experiment Name: At_Far-red-induction_P Parameter: Plant Line Value: Columbia
  misc_feature: MA Experiment 20001248 PARAMETER Experiment Name: At_Far-red-induction_P Parameter: Timepoint (hr) Value: 4
  misc_feature: MA Experiment 20001248 PARAMETER Experiment Name: At_Far-red-induction_P Parameter: Tissue Value: Whole Plant
  misc_feature: MA Experiment ID: 20001450 Result: Up-regulated in Transcription
  misc_feature: MA Experiment 20001450 PARAMETER Experiment Name: At_Far-red-induction_P Parameter: Age (day) Value: 7
  misc_feature: MA Experiment 20001450 PARAMETER Experiment Name: At_Far-red-induction_P Parameter: Light Value: Far-red vs. White
  misc_feature: MA Experiment 20001450 PARAMETER Experiment Name: At_Far-red-induction_P Parameter: Organism Value: A. thaliana
  misc_feature: MA Experiment 20001450 PARAMETER Experiment Name: At_Far-red-induction_P Parameter: Plant Line Value: Columbia
  misc_feature: MA Experiment 20001450 PARAMETER Experiment Name: At_Far-red-induction_P Parameter: Timepoint (hr) Value: 8
  misc_feature: MA Experiment 20001450 PARAMETER Experiment Name: At_Far-red-induction_P Parameter: Tissue Value: Whole Plant
  misc_feature: MA Experiment ID: 20001451 Result: Up-regulated in Transcription
  misc_feature: MA Experiment 20001451 PARAMETER Experiment Name: At_Far-red-induction_P Parameter: Age (day) Value: 7
  misc_feature: MA Experiment 20001451 PARAMETER Experiment Name: At_Far-red-induction_P Parameter: Light Value: Far-red vs. White
  misc_feature: MA Experiment 20001451 PARAMETER Experiment Name: At_Far-red-induction_P Parameter: Organism Value: A. thaliana
  misc_feature: MA Experiment 20001451 PARAMETER Experiment Name: At_Far-red-induction_P Parameter: Plant Line Value: Columbia
  misc_feature: MA Experiment 20001451 PARAMETER Experiment Name: At_Far-red-induction_P Parameter: Timepoint (hr) Value: 24
  misc_feature: MA Experiment 20001451 PARAMETER Experiment Name: At_Far-red-induction_P Parameter: Tissue Value: Whole Plant
  misc_feature: MA Experiment ID: 20001554 Result: Down-regulated in Transcription
  misc_feature: MA Experiment 20001554 PARAMETER Experiment Name: At_Drought_Soil_Dry_P Parameter: Age (day) Value: 21
  misc_feature: MA Experiment 20001554 PARAMETER Experiment Name: At_Drought_Soil_Dry_P Parameter: Organism Value: A. thaliana
  misc_feature: MA Experiment 20001554 PARAMETER Experiment Name: At_Drought_Soil_Dry_P Parameter: Plant Line Value: WS
  misc_feature: MA Experiment 20001554 PARAMETER Experiment Name: At_Drought_Soil_Dry_P Parameter: Post Timepoint (hr) Value: None
  misc_feature: MA Experiment 20001554 PARAMETER Experiment Name: At_Drought_Soil_Dry_P Parameter: Post-Treatment Value: None
  misc_feature: MA Experiment 20001554 PARAMETER Experiment Name: At_Drought_Soil_Dry_P Parameter: Timepoint (day) Value: 7
  misc_feature: MA Experiment 20001554 PARAMETER Experiment Name: At_Drought_Soil_Dry_P Parameter: Treatment Value: Drought vs. No Drought
  misc_feature: MA Experiment ID: 20001555 Result: Down-regulated in Transcription
  misc_feature: MA Experiment 20001555 PARAMETER Experiment Name: At_Drought_Soil_Dry_P Parameter: Age (day) Value: 24
  misc_feature: MA Experiment 20001555 PARAMETER Experiment Name: At_Drought_Soil_Dry_P Parameter: Organism Value: A. thaliana
  misc_feature: MA Experiment 20001555 PARAMETER Experiment Name: At_Drought_Soil_Dry_P Parameter: Plant Line Value: WS
  misc_feature: MA Experiment 20001555 PARAMETER Experiment Name: At_Drought_Soil_Dry_P Parameter: Post Timepoint (hr) Value: None
  misc_feature: MA Experiment 20001555 PARAMETER Experiment Name: At_Drought_Soil_Dry_P Parameter: Post-Treatment Value: None
  misc_feature: MA Experiment 20001555 PARAMETER Experiment Name: At_Drought_Soil_Dry_P Parameter: Timepoint (day) Value: 10
  misc_feature: MA Experiment 20001555 PARAMETER Experiment Name: At_Drought_Soil_Dry_P Parameter: Treatment Value: Drought vs. No Drought
  misc_feature: MA Experiment ID: 20001560 Result: Up-regulated in Transcription
  misc_feature: MA Experiment 20001560 PARAMETER Experiment Name: At_Drought_Soil_Dry_P Parameter: Age (day) Value: 28
  misc_feature: MA Experiment 20001560 PARAMETER Experiment Name: At_Drought_Soil_Dry_P Parameter: Organism Value: A. thaliana
  misc_feature: MA Experiment 20001560 PARAMETER Experiment Name: At_Drought_Soil_Dry_P Parameter: Plant Line Value: WS
  misc_feature: MA Experiment 20001560 PARAMETER Experiment Name: At_Drought_Soil_Dry_P Parameter: Post Timepoint (hr) Value: None
  misc_feature: MA Experiment 20001560 PARAMETER Experiment Name: At_Drought_Soil_Dry_P Parameter: Post-Treatment Value: None
  misc_feature: MA Experiment 20001560 PARAMETER Experiment Name: At_Drought_Soil_Dry_P Parameter: Timepoint (day) Value: 14
  misc_feature: MA Experiment 20001560 PARAMETER Experiment Name: At_Drought_Soil_Dry_P Parameter: Treatment Value: Drought vs. No Drought
  misc_feature: MA Experiment ID: 20001904 Result: Down-regulated in Transcription
  misc_feature: MA Experiment 20001904 PARAMETER Experiment Name: At_Drought_Reproduction_P Parameter: Age (day) Value: 37
  misc_feature: MA Experiment 20001904 PARAMETER Experiment Name: At_Drought_Reproduction_P Parameter: Organism Value: A. thaliana
  misc_feature: MA Experiment 20001904 PARAMETER Experiment Name: At_Drought_Reproduction_P Parameter: Plant Line Value: WS
  misc_feature: MA Experiment 20001904 PARAMETER Experiment Name: At_Drought_Reproduction_P Parameter: Timepoint (day) Value: 7
  misc_feature: MA Experiment 20001904 PARAMETER Experiment Name: At_Drought_Reproduction_P Parameter: Tissue Value: Rosettes
  misc_feature: MA Experiment 20001904 PARAMETER Experiment Name: At_Drought_Reproduction_P Parameter: Treatment Value: Drought vs. No Drought
  misc_feature: MA Experiment ID: 20001905 Result: Down-regulated in Transcription
  misc_feature: MA Experiment 20001905 PARAMETER Experiment Name: At_Drought_Reproduction_P Parameter: Age (day) Value: 40
  misc_feature: MA Experiment 20001905 PARAMETER Experiment Name: At_Drought_Reproduction_P Parameter: Organism Value: A. thaliana
  misc_feature: MA Experiment 20001905 PARAMETER Experiment Name: At_Drought_Reproduction_P Parameter: Plant Line Value: WS
  misc_feature: MA Experiment 20001905 PARAMETER Experiment Name: At_Drought_Reproduction_P Parameter: Timepoint (day) Value: 10
  misc_feature: MA Experiment 20001905 PARAMETER Experiment Name: At_Drought_Reproduction_P Parameter: Tissue Value: Rosettes
  misc_feature: MA Experiment 20001905 PARAMETER Experiment Name: At_Drought_Reproduction_P Parameter: Treatment Value: Drought vs. No Drought
  misc_feature: MA Experiment ID: 20001911 Result: Down-regulated in Transcription
  misc_feature: MA Experiment 20001911 PARAMETER Experiment Name: At_Drought_Reproduction_P Parameter: Age (day) Value: 40
  misc_feature: MA Experiment 20001911 PARAMETER Experiment Name: At_Drought_Reproduction_P Parameter: Organism Value: A. thaliana
  misc_feature: MA Experiment 20001911 PARAMETER Experiment Name: At_Drought_Reproduction_P Parameter: Plant Line Value: WS
  misc_feature: MA Experiment 20001911 PARAMETER Experiment Name: At_Drought_Reproduction_P Parameter: Timepoint (day) Value: 10
  misc_feature: MA Experiment 20001911 PARAMETER Experiment Name: At_Drought_Reproduction_P Parameter: Tissue Value: Flowers
  misc_feature: MA Experiment 20001911 PARAMETER Experiment Name: At_Drought_Reproduction_P Parameter: Treatment Value: Drought vs. No Drought
atctcgtccgttgttgcataagtgctatggatctcgcgtcgaatcttggtgggaagatcgataaatccgatgttctcaccgccgtcgaaaagtatgagcaatatcatgtcttccatggaggaaacgaggaagagagaaaagccaattatactgacatggttaataagtactatgaccttgctactagcttttatgagtacggatggggagaatccttccattttgcacaaagatggaaaggagaatcgcttcgagagagtattaagcgacacgagcactttcttgctcttcagcttggcatccaaccaggacaaaaggtactggatgtaggatgtggaattggtggaccgttgagggaaattgcaagattcagcaattcagttgttaccgggctcaacaataacgaataccagatcaccagaggcaaggaactaaaccgacttgcaggtgtcgacaagacatgtaactttgtcaaggctgacttcatgaagatgccattcccggaaaacagtttcgatgcagtttatgcaatagaagcaacttgccatgcacctgatgcgtatggatgctacaaagagatctacagagtgctaaagcctgggcaatgttttgctgcctatgagtggtgtatgactgatgcatttgaccctgataacgccgaacatcagaaaataaagggagagatagagattggagatggtcttcctgacattaggctgactacaaaatgcctcgaagctctgaagcaggccggttttgaagtgatatgggaaaaggatctggccaaggactcgccggtcccatggtacttacctcttgacaaaaatcatttctcactcagtagcttccgccttacagctgttggacgattcataaccaaaaacatggtcaagatccttgaatacataagacttgcacctcaaggaagccaaagggtctcaaatttcctggagcaggctgcggaaggattagtcgacggtggaaggagagagattttcacgccaatgtatttcttcttggcccggaagccagagtaagcggatgagagatggcgatggtcatcgtaggtcgaatgaagtgacaaaatttctcaatttgcagtcttattttctatgtttatcggatttgttgcagagtttcttattcaccaactatattttggatgttcgtaacatgtcacgtgttgttcatgtgcactctgcctgaaatctgaatcatgtgcacatgcccaaaatatcttggaatctttcttt

SEQ ID NO: 86851 - protein, 344 aa, Arabidopsis thaliana
  peptide (1)..(344): Ceres Seq. ID no. 12694210
  misc_feature (59)..(260): Pfam Name: ubiE/COQ5 methyltransferase family Pfam Description: ubiE/COQ5 methyltransferase family
  misc_feature (9)..(344): Homolog of NCBI NO: 15240691 NR Description: 24-sterol C-methyltransferase; protein id: supported by cDNA: gi_11066104, supported by cDNA: gi_8745240
  misc_feature (9)..(344): Homolog of NCBI NO: 21434843 NR Description: cephalopod [Arabidopsis thaliana]
  misc_feature (6)..(344): Homolog of NCBI NO: 7443720 NR Description: probable sterol 24-C-methyltransferase (EC
  misc_feature (8)..(343): Homolog of NCBI NO: 7443719 NR Description: sterol 24-C-methyltransferase (EC 2.1.1.41) -
  misc_feature (8)..(343): Homolog of NCBI NO: 7443716 NR Description: sterol 24-C-methyltransferase (EC 2.1.1.41)
  misc_feature (8)..(343): Homolog of NCBI NO: 3560474 NR Description: S-adenosyl-methionine-sterol-C- methyltransferase
  misc_feature (8)..(343): Homolog of NCBI NO: 34393309 NR Description: cycloartenol-C24-methyltransferase [Oryza sativa
  misc_feature (8)..(343): Homolog of NCBI NO: 7443715 NR Description: sterol 24-C-methyltransferase (EC 2.1.1.41) -
  misc_feature (8)..(343): Homolog of NCBI NO: 3560531 NR Description: cycloartenol-C24-methyltransferase [Oryza sativa
  misc_feature (10)..(343): Homolog of NCBI NO: 3603295 NR Description: S-adenosyl-methionine
LVRCCISAMDLASNLGGKIDKSDVLTAVEKYEQYHVFHGGNEEERKANYTDMVNKYYDLATSFYEYGWGESFHFAQRWKGESLRESIKRHEHFLALQLGIQPGQKVLDVGCGIGGPLREIARFSNSVVTGLNNNEYQITRGKELNRLAGVDKTCNFVKADFMKMPFPENSFDAVYAIEATCHAPDAYGCYKEIYRVLKPGQCFAAYEWCMTDAFDPDNAEHQKIKGEIEIGDGLPDIRLTTKCLEALKQAGFEVIWEKDLAKDSPVPWYLPLDKNHFSLSSFRLTAVGRFITKNMVKILEYIRLAPQGSQRVSNFLEQAAEGLVDGGRREIFTPMYFFLARKPE

SEQ ID NO: 86852 - protein, 336 aa, Arabidopsis thaliana; identical to SEQ ID NO: 26651
  peptide (1)..(336): Ceres Seq. ID no. 12694211
  misc_feature (51)..(252): Pfam Name: ubiE/COQ5 methyltransferase family Pfam Description: ubiE/COQ5 methyltransferase family
  misc_feature (1)..(336): Homolog of NCBI NO: 15240691 NR Description: 24-sterol C-methyltransferase; protein id: supported by cDNA: gi_11066104, supported by cDNA: gi_8745240
  misc_feature (1)..(336): Homolog of NCBI NO: 21434843 NR Description: cephalopod [Arabidopsis thaliana]
  misc_feature (1)..(336): Homolog of NCBI NO: 7443720 NR Description: probable sterol 24-C-methyltransferase (EC
  misc_feature (1)..(335): Homolog of NCBI NO: 7443719 NR Description: sterol 24-C-methyltransferase (EC 2.1.1.41) -
  misc_feature (1)..(335): Homolog of NCBI NO: 7443716 NR Description: sterol 24-C-methyltransferase (EC 2.1.1.41)
  misc_feature (1)..(335): Homolog of NCBI NO: 3560474 NR Description: S-adenosyl-methionine-sterol-C- methyltransferase
  misc_feature (1)..(335): Homolog of NCBI NO: 34393309 NR Description: cycloartenol-C24-methyltransferase [Oryza sativa
  misc_feature (1)..(335): Homolog of NCBI NO: 7443715 NR Description: sterol 24-C-methyltransferase (EC 2.1.1.41) -
  misc_feature (1)..(335): Homolog of NCBI NO: 3560531 NR Description: cycloartenol-C24-methyltransferase [Oryza sativa
  misc_feature (2)..(335): Homolog of NCBI NO: 3603295 NR Description: S-adenosyl-methionine

SEQ ID NO: 86853 - protein, 293 aa, Arabidopsis thaliana; identical to SEQ ID NO: 26652
  peptide (1)..(293): Ceres Seq. ID no. 12694212
  misc_feature (8)..(209): Pfam Name: ubiE/COQ5 methyltransferase family Pfam Description: ubiE/COQ5 methyltransferase family
  misc_feature (1)..(293): Homolog of NCBI NO: 15240691 NR Description: 24-sterol C-methyltransferase; protein id: supported by cDNA: gi_11066104, supported by cDNA: gi_8745240
  misc_feature (1)..(293): Homolog of NCBI NO: 21434843 NR Description: cephalopod [Arabidopsis thaliana]
  misc_feature (1)..(293): Homolog of NCBI NO: 7443720 NR Description: probable sterol 24-C-methyltransferase (EC
  misc_feature (1)..(292): Homolog of NCBI NO: 7443719 NR Description: sterol 24-C-methyltransferase (EC 2.1.1.41) -
  misc_feature (1)..(292): Homolog of NCBI NO: 7443716 NR Description: sterol 24-C-methyltransferase (EC 2.1.1.41)
  misc_feature (1)..(292): Homolog of NCBI NO: 3560474 NR Description: S-adenosyl-methionine-sterol-C- methyltransferase
  misc_feature (1)..(292): Homolog of NCBI NO: 34393309 NR Description: cycloartenol-C24-methyltransferase [Oryza sativa
  misc_feature (1)..(292): Homolog of NCBI NO: 7443715 NR Description: sterol 24-C-methyltransferase (EC 2.1.1.41) -
  misc_feature (1)..(292): Homolog of NCBI NO: 3560531 NR Description: cycloartenol-C24-methyltransferase [Oryza sativa
  misc_feature (1)..(292): Homolog of NCBI NO: 3603295 NR Description: S-adenosyl-methionine

SEQ ID NO: 86854 - DNA, 3507 bp, Arabidopsis thaliana
  misc_feature (1)..(3507): Ceres Seq. ID no. 12694273
  misc_feature: MA Experiment ID: 20000173 Result: Down-regulated in Transcription
  misc_feature: MA Experiment 20000173 PARAMETER Experiment Name: At_42deg_Heat_P Parameter: Age (day) Value: 14
  misc_feature: MA Experiment 20000173 PARAMETER Experiment Name: At_42deg_Heat_P Parameter: Organism Value: A. thaliana
  misc_feature: MA Experiment 20000173 PARAMETER Experiment Name: At_42deg_Heat_P Parameter: Plant Line Value: WS
  misc_feature: MA Experiment 20000173 PARAMETER Experiment Name: At_42deg_Heat_P Parameter: Temperature (deg C) Value: 42 vs. 22
  misc_feature: MA Experiment 20000173 PARAMETER Experiment Name: At_42deg_Heat_P Parameter: Timepoint (hr) Value: 6
  misc_feature: MA Experiment 20000173 PARAMETER Experiment Name: At_42deg_Heat_P Parameter: Tissue Value: Aerial
  misc_feature: MA Experiment ID: 20000182 Result: Up-regulated in Transcription
  misc_feature: MA Experiment 20000182 PARAMETER Experiment Name: At_2mM_SA_P Parameter: Age (day) Value: 14
  misc_feature: MA Experiment 20000182 PARAMETER Experiment Name: At_2mM_SA_P Parameter: Organism Value: A. thaliana
  misc_feature: MA Experiment 20000182 PARAMETER Experiment Name: At_2mM_SA_P Parameter: Plant Line Value: WS
  misc_feature: MA Experiment 20000182 PARAMETER Experiment Name: At_2mM_SA_P Parameter: Timepoint (hr) Value: 6
  misc_feature: MA Experiment 20000182 PARAMETER Experiment Name: At_2mM_SA_P Parameter: Tissue Value: Aerial
  misc_feature: MA Experiment 20000182 PARAMETER Experiment Name: At_2mM_SA_P Parameter: Treatment Value: 2mM SA vs. No Treatment
  misc_feature: MA Experiment ID: 20000227 Result: Down-regulated in Transcription
  misc_feature: MA Experiment 20000227 PARAMETER Experiment Name: At_Root-Tips-vs-Tops_P Parameter: Tissue Value: Root Tips vs. Root Tops
  misc_feature: MA Experiment ID: 20000286 Result: Up-regulated in Transcription
  misc_feature: MA Experiment 20000286 PARAMETER Experiment Name: At_Open_Flower_P Parameter: Age (day) Value: 21
  misc_feature: MA Experiment 20000286 PARAMETER Experiment Name: At_Open_Flower_P Parameter: Plant Line Value: WS
  misc_feature: MA Experiment 20000286 PARAMETER Experiment Name: At_Open_Flower_P Parameter: Tissue Value: Half Open vs. Whole Plant
  misc_feature: MA Experiment ID: 20000794 Result: Up-regulated in Transcription
  misc_feature: MA Experiment 20000794 PARAMETER Experiment Name: At_Petals_P Parameter: Age (day) Value: 23-25 days
  misc_feature: MA Experiment 20000794 PARAMETER Experiment Name: At_Petals_P Parameter: Plant Line Value: WS
  misc_feature: MA Experiment 20000794 PARAMETER Experiment Name: At_Petals_P Parameter: Tissue Value: Petals vs. Whole plant
  misc_feature: MA Experiment ID: 20001557 Result: Down-regulated in Transcription
  misc_feature: MA Experiment 20001557 PARAMETER Experiment Name: At_Drought_Soil_Dry_P Parameter: Age (day) Value: 27
  misc_feature: MA Experiment 20001557 PARAMETER Experiment Name: At_Drought_Soil_Dry_P Parameter: Organism Value: A. thaliana
  misc_feature: MA Experiment 20001557 PARAMETER Experiment Name: At_Drought_Soil_Dry_P Parameter: Plant Line Value: WS
  misc_feature: MA Experiment 20001557 PARAMETER Experiment Name: At_Drought_Soil_Dry_P Parameter: Post Timepoint (hr) Value: 3
  misc_feature: MA Experiment 20001557 PARAMETER Experiment Name: At_Drought_Soil_Dry_P Parameter: Post-Treatment Value: Re-Water vs. No Drought
  misc_feature: MA Experiment 20001557 PARAMETER Experiment Name: At_Drought_Soil_Dry_P Parameter: Timepoint (day) Value: 13
  misc_feature: MA Experiment 20001557 PARAMETER Experiment Name: At_Drought_Soil_Dry_P Parameter: Treatment Value: Drought vs. No Drought
  misc_feature: MA Experiment ID: 20001560 Result: Down-regulated in Transcription
  misc_feature: MA Experiment 20001560 PARAMETER Experiment Name: At_Drought_Soil_Dry_P Parameter: Age (day) Value: 28
  misc_feature: MA Experiment 20001560 PARAMETER Experiment Name: At_Drought_Soil_Dry_P Parameter: Organism Value: A. thaliana
  misc_feature: MA Experiment 20001560 PARAMETER Experiment Name: At_Drought_Soil_Dry_P Parameter: Plant Line Value: WS
  misc_feature: MA Experiment 20001560 PARAMETER Experiment Name: At_Drought_Soil_Dry_P Parameter: Post Timepoint (hr) Value: None
  misc_feature: MA Experiment 20001560 PARAMETER Experiment Name: At_Drought_Soil_Dry_P Parameter: Post-Treatment Value: None
  misc_feature: MA Experiment 20001560 PARAMETER Experiment Name: At_Drought_Soil_Dry_P Parameter: Timepoint (day) Value: 14
  misc_feature: MA Experiment 20001560 PARAMETER Experiment Name: At_Drought_Soil_Dry_P Parameter: Treatment Value: Drought vs. No Drought
  misc_feature: MA Experiment ID: 20001905 Result: Up-regulated in Transcription
  misc_feature: MA Experiment 20001905 PARAMETER Experiment Name: At_Drought_Reproduction_P Parameter: Age (day) Value: 40
  misc_feature: MA Experiment 20001905 PARAMETER Experiment Name: At_Drought_Reproduction_P Parameter: Organism Value: A. thaliana
  misc_feature: MA Experiment 20001905 PARAMETER Experiment Name: At_Drought_Reproduction_P Parameter: Plant Line Value: WS
  misc_feature: MA Experiment 20001905 PARAMETER Experiment Name: At_Drought_Reproduction_P Parameter: Timepoint (day) Value: 10
  misc_feature: MA Experiment 20001905 PARAMETER Experiment Name: At_Drought_Reproduction_P Parameter: Tissue Value: Rosettes
  misc_feature: MA Experiment 20001905 PARAMETER Experiment Name: At_Drought_Reproduction_P Parameter: Treatment Value: Drought vs. No Drought
atgaccgttggtgccggaatcagcgtcaccgactcagatttggtggtgctaggtcaccgtgttcttcacggcgttccggagaatgtcttagttaccccagcttcgggaaacgccttaatcgacggcgcgttcatcggcgtcacgtcagatcaaaccggaagccaccgtgtcttctcccttggcaaactcgaagacctaaggtttatgtgtgtcttccggtttaaattatggtggatgactcaaagaatggggactaatgggaaagagattccttgtgagactcagtttctaatcgtagaagcaaaccaaggttctgatttaggaggaagagatcaatcttcttcgtacgttgtattcttacctatacttgaaggagattttagagctgttcttcaagggaacgaggctaatgagctagagatttgtcttgaaagtggtgatccaaccgttgaccaattcgaagggagtcatttggtttttgtggctgctggctccgacccttttgatgtcattaccaaagctgtcaagtatgtaatgtttctcaagtctcaacttaagacttctttatgtccaaatttttttaggatgccagatatgttgaattggtttggttggtgcacttgggatgcattctataccaatgtcacagccaaagacgtcaagcaaggacttgagagtaactgtgacttaaccaaacctgcactgattctctgtagcctcaaagctggtggggttaccccaaagtttgtcataattgatgatggatggcaatctgttggcatggatgagaccagtgtagaattcaacgctgataatgctgccaattttgcaaaccggttaactcacatcaaggagaatcataagtttcaaaaggatggcaaagaaggccaccgggtggatgacccttcattgagtcttggacatgttatcacagacattaagagtaataattcgctcaagtatgtttatgtttggcatgcgataacaggatattggggaggagtcaaaccaggtgtttctggtatggaacactacgaatccaaggttgcgtatccagtttcttcaccaggagttatgtccagtgagaattgtggatgtttagaaagcataactaagaatggacttggtttggtgaatcctgagaaagtctttagcttctataatgatcttcactcataccttgcatccgttggggtcgatggtgtcaaagtagacgtccaaaacattcttgaaactcttggagctggacatggtggtcgtgtcaaacttgcaaagaagtatcaccaggctttggaagcttctatttcaagaaacttccctgacaatggtattatctcttgcatgagtcataacacagatggtctctacagcgcaaaaaagactgctgttataagagcatcagacgatttctggcctagagaccccgcttcacacacgatccacattgcttctgttgcatataacacacttttccttggagagtttatgcagccggactgggacatgtttcatagtttgcatccgatggctgaatatcatgctgcagctcgcgcggttggaggatgtgccatatatgtcagcgacaaaccgggacaacatgacttcaaccttttaagaaagctagtacttcgagacggttccatactcagagcaaagcttcccggaagaccaaccagagagttagtgtatctcccaaaagatacatctttaccagtgacattgatgccacgtgaatacgaagttttcacggtggttccggtgaaggaattttccgatggaagtaaatttgcaccggtggggcttatggagatgtttaattctggaggagccattgtgagtttaagatacgatgacgaggggactaaatttgtcgttaggatgaaacttcgaggcagtggtttggttggtgtttactcgtccgttcgacgaccacgaagtgttacggtggattcagacgacgtggagtaccgttctgtattgatttgttggttaatctgtatgggttatcgaccagaccaatacaaatcaaacagattggtccgtgttcgttttgatataataatacaaaaaaaaaatgcccaggtagaaatggggttggttaatgatgttgagcacaaaagcctttttagacgagatactgattccccagaaagaaaagcagcttccttgatggaacaaggatcactttctgcaagttttcgagaatgctcaactaaaacacctaataacagtgtgctccagagcttcaagattgtgattttatcgaataaacttaatcttttgttgccttttggtcctctggcaatactactccattacttgacagataataaggtgagcagttgtactttttgggtactattcatagcagtttcatttcttcctgttatttcccaagaaatgattcttcttgtggctcagggatggatcttcttattgagcttagtaggcatcacaccattagctgaacgtctcggatatgccaccgagcaattagcttgttacactggttcaactgttggaggtctcctaaacgctacatttggaaacgtgacagagctgatcatatcgattttcgctcttaaaagtggaatgatacgtgttgtacagctgacattgctcggctcgatactttctaacatgttacttgtacttggctgcgccttcttttgtggcgggcttgtattttcccagaaagagcaagtctttgacaaaggtaatgctgttgtgaattcgggattgcttttgatggctgtcatgggactactcttccccgcagttcttcattacacgcacagtgaggttcatgctgggtcatcagagcttgctctctcaagattcagcagttgcataatgctcgttgcctatgctgcttacctctttttccagttaaagagccagccgagctcttatacccctctcaccgaggaaactaaccagaacgaagaaacttcagacgatgatgaagatcctgagatctccaagtgggaagctattatctggctttcaatcttgacggcttgggtctctcttctttccggctatcttgttgatgccatagagggtgcttcagtctcatggaagataccaatctcttttatcagtgtcatcttacttcctatagttgggaatgcggccgagcatgcaggtgccatcatgtttgccatgaaagacaagctggatctgtctttgggagtggctattggatcctccattcagatttctatgttcgcggttcctttttgcgtggttatcggatggatgatgggtgcccaaatggacctaaatttccagctatttgagacggctactctgttcataactgttattgttgtagctttctttctccaggtaaatcttgaagctaattacgaaaccaatctcgagtatatctctctcttcaaagttgttaaatgtctttgtgtgtggtgtttttatgcaggaaggaacatcgaattacttcaaaggattgatgctcattctttgctatttgatagtcgccgctag

SEQ ID NO: 86855 - protein, 1168 aa, Arabidopsis thaliana
  peptide (1)..(1168): Ceres Seq. ID no. 12694274
  misc_feature (816)..(963): Pfam Name: Sodium/calcium exchanger protein Pfam Description: Sodium/calcium exchanger protein
  misc_feature (1)..(563): Homolog of NCBI NO: 23452226 NR Description: alkaline alpha-galactosidase seed imbibition
  misc_feature (533)..(656): Homolog of NCBI NO: 23452226 NR Description: alkaline alpha-galactosidase seed imbibition
  misc_feature (1)..(563): Homolog of NCBI NO: 29838629 NR Description: alkaline alpha galactosidase I [Cucumis melo]
  misc_feature (560)..(656): Homolog of NCBI NO: 29838629 NR Description: alkaline alpha galactosidase I [Cucumis melo]
  misc_feature (807)..(1137): Homolog of NCBI NO: 30696001 NR Description: cation exchanger, putative (CAX5) [Arabidopsis >gi|22531156|gb|AAM97082.1| H+/Ca2+ antiporter, putative thaliana] >gi|30387539|gb|AAP31935.1| At1g55730 [Arabidopsis
  misc_feature (693)..(778): Homolog of NCBI NO: 30696001 NR Description: cation exchanger, putative (CAX5) [Arabidopsis >gi|22531156|gb|AAM97082.1| H+/Ca2+ antiporter, putative thaliana] >gi|30387539|gb|AAP31935.1| At1g55730 [Arabidopsis
  misc_feature (237)..(563): Homolog of NCBI NO: 629602 NR Description: probable imbibition protein - wild cabbage
  misc_feature (1)..(226): Homolog of NCBI NO: 629602 NR Description: probable imbibition protein - wild cabbage
  misc_feature (560)..(614): Homolog of NCBI NO: 629602 NR Description: probable imbibition protein - wild cabbage
  misc_feature (1)..(563): Homolog of NCBI NO: 282994 NR Description: Sip1 protein - barley >gi|167100|gb|AAA32975.1|
MTVGAGISVTDSDLVVLGHRVLHGVPENVLVTPASGNALIDGAFIGVTSDQTGSHRVFSLGKLEDLRFMCVFRFKLWWMTQRMGTNGKEIPCETQFLIVEANQGSDLGGRDQSSSYVVFLPILEGDFRAVLQGNEANELEICLESGDPTVDQFEGSHLVFVAAGSDPFDVITKAVKYVMFLKSQLKTSLCPNFFRMPDMLNWFGWCTWDAFYTNVTAKDVKQGLESNCDLTKPALILCSLKAGGVTPKFVIIDDGWQSVGMDETSVEFNADNAANFANRLTHIKENHKFQKDGKEGHRVDDPSLSLGHVITDIKSNNSLKYVYVWHAITGYWGGVKPGVSGMEHYESKVAYPVSSPGVMSSENCGCLESITKNGLGLVNPEKVFSFYNDLHSYLASVGVDGVKVDVQNILETLGAGHGGRVKLAKKYHQALEASISRNFPDNGIISCMSHNTDGLYSAKKTAVIRASDDFWPRDPASHTIHIASVAYNTLFLGEFMQPDWDMFHSLHPMAEYHAAARAVGGCAIYVSDKPGQHDFNLLRKLVLRDGSILRAKLPGRPTRELVYLPKDTSLPVTLMPREYEVFTVVPVKEFSDGSKFAPVGLMEMFNSGGAIVSLRYDDEGTKFVVRMKLRGSGLVGVYSSVRRPRSVTVDSDDVEYRSVLICWLICMGYRPDQYKSNRLVRVRFDIIIQKKNAQVEMGLVNDVEHKSLFRRDTDSPERKAASLMEQGSLSASFRECSTKTPNNSVLQSFKIVILSNKLNLLLPFGPLAILLHYLTDNKVSSCTFWVLFIAVSFLPVISQEMILLVAQGWIFLLSLVGITPLAERLGYATEQLACYTGSTVGGLLNATFGNVTELIISIFALKSGMIRVVQLTLLGSILSNMLLVLGCAFFCGGLVFSQKEQVFDKGNAVVNSGLLLMAVMGLLFPAVLHYTHSEVHAGSSELALSRFSSCIMLVAYAAYLFFQLKSQPSSYTPLTEETNQNEETSDDDEDPEISKWEAIIWLSILTAWVSLLSGYLVDAIEGASVSWKIPISFISVILLPIVGNAAEHAGAIMFAMKDKLDLSLGVAIGSSIQISMFAVPFCVVIGWMMGAQMDLNFQLFETATLFITVIVVAFFLQVNLEANYETNLEYISLFKVVKCLCVWCFYAGRNIELLQRIDAHSLLFDSRR

SEQ ID NO: 86856 - protein, 1100 aa, Arabidopsis thaliana
  peptide (1)..(1100): Ceres Seq. ID no. 12694275
  misc_feature (748)..(895): Pfam Name: Sodium/calcium exchanger protein Pfam Description: Sodium/calcium exchanger protein
  misc_feature (1)..(495): Homolog of NCBI NO: 23452226 NR Description: alkaline alpha-galactosidase seed imbibition
  misc_feature (465)..(588): Homolog of NCBI NO: 23452226 NR Description: alkaline alpha-galactosidase seed imbibition
  misc_feature (1)..(495): Homolog of NCBI NO: 29838629 NR Description: alkaline alpha galactosidase I [Cucumis melo]
  misc_feature (492)..(588): Homolog of NCBI NO: 29838629 NR Description: alkaline alpha galactosidase I [Cucumis melo]
  misc_feature (739)..(1069): Homolog of NCBI NO: 30696001 NR Description: cation exchanger, putative (CAX5) [Arabidopsis >gi|22531156|gb|AAM97082.1| H+/Ca2+ antiporter, putative thaliana] >gi|30387539|gb|AAP31935.1| At1g55730 [Arabidopsis
  misc_feature (625)..(710): Homolog of NCBI NO: 30696001 NR Description: cation exchanger, putative (CAX5) [Arabidopsis >gi|22531156|gb|AAM97082.1| H+/Ca2+ antiporter, putative thaliana] >gi|30387539|gb|AAP31935.1| At1g55730 [Arabidopsis
  misc_feature (169)..(495): Homolog of NCBI NO: 629602 NR Description: probable imbibition protein - wild cabbage
  misc_feature (1)..(158): Homolog of NCBI NO: 629602 NR Description: probable imbibition protein - wild cabbage
  misc_feature (492)..(546): Homolog of NCBI NO: 629602 NR Description: probable imbibition protein - wild cabbage
  misc_feature (1)..(495): Homolog of NCBI NO: 282994 NR Description: Sip1 protein - barley >gi|167100|gb|AAA32975.1|
MCVFRFKLWWMTQRMGTNGKEIPCETQFLIVEANQGSDLGGRDQSSSYVVFLPILEGDFRAVLQGNEANELEICLESGDPTVDQFEGSHLVFVAAGSDPFDVITKAVKYVMFLKSQLKTSLCPNFFRMPDMLNWFGWCTWDAFYTNVTAKDVKQGLESNCDLTKPALILCSLKAGGVTPKFVIIDDGWQSVGMDETSVEFNADNAANFANRLTHIKENHKFQKDGKEGHRVDDPSLSLGHVITDIKSNNSLKYVYVWHAITGYWGGVKPGVSGMEHYESKVAYPVSSPGVMSSENCGCLESITKNGLGLVNPEKVFSFYNDLHSYLASVGVDGVKVDVQNILETLGAGHGGRVKLAKKYHQALEASISRNFPDNGIISCMSHNTDGLYSAKKTAVIRASDDFWPRDPASHTIHIASVAYNTLFLGEFMQPDWDMFHSLHPMAEYHAAARAVGGCAIYVSDKPGQHDFNLLRKLVLRDGSILRAKLPGRPTRELVYLPKDTSLPVTLMPREYEVFTVVPVKEFSDGSKFAPVGLMEMFNSGGAIVSLRYDDEGTKFVVRMKLRGSGLVGVYSSVRRPRSVTVDSDDVEYRSVLICWLICMGYRPDQYKSNRLVRVRFDIIIQKKNAQVEMGLVNDVEHKSLFRRDTDSPERKAASLMEQGSLSASFRECSTKTPNNSVLQSFKIVILSNKLNLLLPFGPLAILLHYLTDNKVSSCTFWVLFIAVSFLPVISQEMILLVAQGWIFLLSLVGITPLAERLGYATEQLACYTGSTVGGLLNATFGNVTELIISIFALKSGMIRVVQLTLLGSILSNMLLVLGCAFFCGGLVFSQKEQVFDKGNAVVNSGLLLMAVMGLLFPAVLHYTHSEVHAGSSELALSRFSSCIMLVAYAAYLFFQLKSQPSSYTPLTEETNQNEETSDDDEDPEISKWEAIIWLSILTAWVSLLSGYLVDAIEGASVSWKIPISFISVILLPIVGNAAEHAGAIMFAMKDKLDLSLGVAIGSSIQISMFAVPFCVVIGWMMGAQMDLNFQLFETATLFITVIVVAFFLQVNLEANYETNLEYISLFKVVKCLCVWCFYAGRNIELLQRIDAHSLLFDSRR

SEQ ID NO: 86857 - protein, 1090 aa, Arabidopsis thaliana
  peptide (1)..(1090): Ceres Seq. ID no. 12694276
  misc_feature (738)..(885): Pfam Name: Sodium/calcium exchanger protein Pfam Description: Sodium/calcium exchanger protein
  misc_feature (1)..(485): Homolog of NCBI NO: 23452226 NR Description: alkaline alpha-galactosidase seed imbibition
  misc_feature (455)..(578): Homolog of NCBI NO: 23452226 NR Description: alkaline alpha-galactosidase seed imbibition
  misc_feature (1)..(485): Homolog of NCBI NO: 29838629 NR Description: alkaline alpha galactosidase I [Cucumis melo]
  misc_feature (482)..(578): Homolog of NCBI NO: 29838629 NR Description: alkaline alpha galactosidase I [Cucumis melo]
  misc_feature (729)..(1059): Homolog of NCBI NO: 30696001 NR Description: cation exchanger, putative (CAX5) [Arabidopsis >gi|22531156|gb|AAM97082.1| H+/Ca2+ antiporter, putative thaliana] >gi|30387539|gb|AAP31935.1| At1g55730 [Arabidopsis
  misc_feature (615)..(700): Homolog of NCBI NO: 30696001 NR Description: cation exchanger, putative (CAX5) [Arabidopsis >gi|22531156|gb|AAM97082.1| H+/Ca2+ antiporter, putative thaliana] >gi|30387539|gb|AAP31935.1| At1g55730 [Arabidopsis
  misc_feature (159)..(485): Homolog of NCBI NO: 629602 NR Description: probable imbibition protein - wild cabbage
  misc_feature (1)..(148): Homolog of NCBI NO: 629602 NR Description: probable imbibition protein - wild cabbage
  misc_feature (482)..(536): Homolog of NCBI NO: 629602 NR Description: probable imbibition protein - wild cabbage
  misc_feature (1)..(485): Homolog of NCBI NO: 282994 NR Description: Sip1 protein - barley >gi|167100|gb|AAA32975.1|
MTQRMGTNGKEIPCETQFLIVEANQGSDLGGRDQSSSYVVFLPILEGDFRAVLQGNEANELEICLESGDPTVDQFEGSHLVFVAAGSDPFDVITKAVKYVMFLKSQLKTSLCPNFFRMPDMLNWFGWCTWDAFYTNVTAKDVKQGLESNCDLTKPALILCSLKAGGVTPKFVIIDDGWQSVGMDETSVEFNADNAANFANRLTHIKENHKFQKDGKEGHRVDDPSLSLGHVITDIKSNNSLKYVYVWHAITGYWGGVKPGVSGMEHYESKVAYPVSSPGVMSSENCGCLESITKNGLGLVNPEKVFSFYNDLHSYLASVGVDGVKVDVQNILETLGAGHGGRVKLAKKYHQALEASISRNFPDNGIISCMSHNTDGLYSAKKTAVIRASDDFWPRDPASHTIHIASVAYNTLFLGEFMQPDWDMFHSLHPMAEYHAAARAVGGCAIYVSDKPGQHDFNLLRKLVLRDGSILRAKLPGRPTRELVYLPKDTSLPVTLMPREYEVFTVVPVKEFSDGSKFAPVGLMEMFNSGGAIVSLRYDDEGTKFVVRMKLRGSGLVGVYSSVRRPRSVTVDSDDVEYRSVLICWLICMGYRPDQYKSNRLVRVRFDIIIQKKNAQVEMGLVNDVEHKSLFRRDTDSPERKAASLMEQGSLSASFRECSTKTPNNSVLQSFKIVILSNKLNLLLPFGPLAILLHYLTDNKVSSCTFWVLFIAVSFLPVISQEMILLVAQGWIFLLSLVGITPLAERLGYATEQLACYTGSTVGGLLNATFGNVTELIISIFALKSGMIRVVQLTLLGSILSNMLLVLGCAFFCGGLVFSQKEQVFDKGNAVVNSGLLLMAVMGLLFPAVLHYTHSEVHAGSSELALSRFSSCIMLVAYAAYLFFQLKSQPSSYTPLTEETNQNEETSDDDEDPEISKWEAIIWLSILTAWVSLLSGYLVDAIEGASVSWKIPISFISVILLPIVGNAAEHAGAIMFAMKDKLDLSLGVAIGSSIQISMFAVPFCVVIGWMMGAQMDLNFQLFETATLFITVIVVAFFLQVNLEANYETNLEYISLFKVVKCLCVWCFYAGRNIELLQRIDAHSLLFDSRR

SEQ ID NO: 86858 - DNA, 1092 bp, Arabidopsis thaliana
  misc_feature (1)..(1092): Ceres Seq. ID no. 12694314
  misc_feature: MA Experiment ID: 20000173 Result: Up-regulated in Transcription
  misc_feature: MA Experiment 20000173 PARAMETER Experiment Name: At_42deg_Heat_P Parameter: Age (day) Value: 14
  misc_feature: MA Experiment 20000173 PARAMETER Experiment Name: At_42deg_Heat_P Parameter: Organism Value: A. thaliana
  misc_feature: MA Experiment 20000173 PARAMETER Experiment Name: At_42deg_Heat_P Parameter: Plant Line Value: WS
  misc_feature: MA Experiment 20000173 PARAMETER Experiment Name: At_42deg_Heat_P Parameter: Temperature (deg C) Value: 42 vs. 22
  misc_feature: MA Experiment 20000173 PARAMETER Experiment Name: At_42deg_Heat_P Parameter: Timepoint (hr) Value: 6
  misc_feature: MA Experiment 20000173 PARAMETER Experiment Name: At_42deg_Heat_P Parameter: Tissue Value: Aerial
atgactagacgaaaatggcgcgtcaagcttctctctgaattctgcccaacaaatccaaggcttttgggggtgaatgtaaatagaggcgtgcaagtgaaattgaggcttaggagggtaaaccatgatttagatttcttatcgtatcatgaaattctcgacaccatgctccacgagctttgccacaacgctcatggtcctcataacgcaagtttctataagctttgggatgaacttcgaaaggaatgcgaggagttgatgtcaaagggtattacagggacgggacagggatttgatatgcctggtaagcgtttgggtggactttctcgtcagccttctctatcatttctcagagcaactgcagctacagcagcagaaaaaagagtgcgtgcgggaactcttttaccttcaggacctcaacgtcttggtggtgatagcagcattatgtcagatcttagtccaattcaggctgctgcaatggctgcagaaaggcgtttacttgatgatatttggtgtggttcccaatccacagatgctttagaagatgaagagaatgatagtgacacatataaggaacctgtttccatcagggaaacttgtacgagcgtgaatggaaagtcagtaaaacgatgtaatagctggtccaatgcccattcttgtcctccatcttccagtcatcaacagggatcagatgtcattgatttgactgaagaatcttttgaaataagatgtactaaaagaaatcgcagcccaggtgatcagggtccttcttgtgccaaagatgtaccgaacgctggtgtcatgaagtcatcgattcctttgccatcgacgagttacaatgcaaaccaaagcagagaagaatccacaatgtgggagtgtgcagaatgcaccttattgaacccgtcattggctccaatatgtgagctatgcactgccgcaaagccaaaggaaagggagatgaagcacaaagtctggtcttgcaaattctgcacgcttgaaaatgaggtgaagttagagaaatgtgaggcttgtggtcagtggaggtactcgtatggagcaccattgtcaactggtgctcctaatgtcggcacttga

SEQ ID NO: 86859 - protein, 363 aa, Arabidopsis thaliana; identical to SEQ ID NO: 80098
  peptide (1)..(363): Ceres Seq. ID no. 12694315
  misc_feature (284)..(315): Pfam Name: Zn-finger in Ran binding protein and others Pfam Description: Zn-finger in Ran binding protein and others
  misc_feature (1)..(363): Homolog of NCBI NO: 18405600 NR Description: hypothetical protein; protein id: At1g55915.1
  misc_feature (1)..(363): Homolog of NCBI NO: 8778309 NR Description: F14J16.17 [Arabidopsis thaliana]
  misc_feature (1)..(224): Homolog of NCBI NO: 14719278 NR Description: hypothetical protein 4 [Zea mays]
  misc_feature (1)..(186): Homolog of NCBI NO: 40746554 NR Description: hypothetical protein AN0304.2 [Aspergillus
  misc_feature (213)..(360): Homolog of NCBI NO: 14719278 NR Description: hypothetical protein 4 [Zea mays]
  misc_feature (1)..(172): Homolog of NCBI NO: 6321926 NR Description: weak suppressor of smt3; Wss1p [Saccharomyces
  misc_feature (6)..(127): Homolog of NCBI NO: 9957265 NR Description: ORF556 [Trypanosoma brucei]
  misc_feature (289)..(345): Homolog of NCBI NO: 9957265 NR Description: ORF556 [Trypanosoma brucei]
  misc_feature (1)..(92): Homolog of NCBI NO: 23507896 NR Description: hypothetical protein [Plasmodium falciparum 3D7]
  misc_feature (1)..(88): Homolog of NCBI NO: 19075821 NR Description: putative Zn-protease [Schizosaccharomyces pombe]

SEQ ID NO: 86860 - protein, 309 aa, Arabidopsis thaliana
  peptide (1)..(309): Ceres Seq. ID no. 12694316
  misc_feature (230)..(261): Pfam Name: Zn-finger in Ran binding protein and others Pfam Description: Zn-finger in Ran binding protein and others
  misc_feature (1)..(309): Homolog of NCBI NO: 18405600 NR Description: hypothetical protein; protein id: At1g55915.1
  misc_feature (1)..(309): Homolog of NCBI NO: 8778309 NR Description: F14J16.17 [Arabidopsis thaliana]
  misc_feature (1)..(170): Homolog of NCBI NO: 14719278 NR Description: hypothetical protein 4 [Zea mays]
  misc_feature (1)..(132): Homolog of NCBI NO: 40746554 NR Description: hypothetical protein AN0304.2 [Aspergillus
  misc_feature (159)..(306): Homolog of NCBI NO: 14719278 NR Description: hypothetical protein 4 [Zea mays]
  misc_feature (1)..(118): Homolog of NCBI NO: 6321926 NR Description: weak suppressor of smt3; Wss1p [Saccharomyces
  misc_feature (1)..(73): Homolog of NCBI NO: 9957265 NR Description: ORF556 [Trypanosoma brucei]
  misc_feature (235)..(291): Homolog of NCBI NO: 9957265 NR Description: ORF556 [Trypanosoma brucei]
  misc_feature (1)..(38): Homolog of NCBI NO: 23507896 NR Description: hypothetical protein [Plasmodium falciparum 3D7]
  misc_feature (1)..(34): Homolog of NCBI NO: 19075821 NR Description: putative Zn-protease [Schizosaccharomyces pombe]
MLHELCHNAHGPHNASFYKLWDELRKECEELMSKGITGTGQGFDMPGKRLGGLSRQPSLSFLRATAATAAEKRVRAGTLLPSGPQRLGGDSSIMSDLSPIQAAAMAAERRLLDDIWCGSQSTDALEDEENDSDTYKEPVSIRETCTSVNGKSVKRCNSWSNAHSCPPSSSHQQGSDVIDLTEESFEIRCTKRNRSPGDQGPSCAKDVPNAGVMKSSIPLPSTSYNANQSREESTMWECAECTLLNPSLAPICELCTAAKPKEREMKHKVWSCKFCTLENEVKLEKCEACGQWRYSYGAPLSTGAPNVGT

SEQ ID NO: 86861 - protein, 278 aa, Arabidopsis thaliana
  peptide (1)..(278): Ceres Seq. ID no. 12694317
  misc_feature (199)..(230): Pfam Name: Zn-finger in Ran binding protein and others Pfam Description: Zn-finger in Ran binding protein and others
  misc_feature (1)..(278): Homolog of NCBI NO: 18405600 NR Description: hypothetical protein; protein id: At1g55915.1
  misc_feature (1)..(278): Homolog of NCBI NO: 8778309 NR Description: F14J16.17 [Arabidopsis thaliana]
  misc_feature (1)..(139): Homolog of NCBI NO: 14719278 NR Description: hypothetical protein 4 [Zea mays]
  misc_feature (1)..(101): Homolog of NCBI NO: 40746554 NR Description: hypothetical protein AN0304.2 [Aspergillus
  misc_feature (128)..(275): Homolog of NCBI NO: 14719278 NR Description: hypothetical protein 4 [Zea mays]
  misc_feature (1)..(87): Homolog of NCBI NO: 6321926 NR Description: weak suppressor of smt3; Wss1p [Saccharomyces
  misc_feature (1)..(42): Homolog of NCBI NO: 9957265 NR Description: ORF556 [Trypanosoma brucei]
  misc_feature (204)..(260): Homolog of NCBI NO: 9957265 NR Description: ORF556 [Trypanosoma brucei]
  misc_feature (1)..(12): Homolog of NCBI NO: 22327362 NR Description: putative protein; protein id: At5g35690.1, by cDNA: gi_17979188, supported by cDNA: gi_20465740 [Arabidopsis >gi|17979189|gb|AAL49833.1| unknown protein [Arabidopsis
  misc_feature (1)..(12): Homolog of NCBI NO: 9758642 NR Description: contains similarity to zinc
MSKGITGTGQGFDMPGKRLGGLSRQPSLSFLRATAATAAEKRVRAGTLLPSGPQRLGGDSSIMSDLSPIQAAAMAAERRLLDDIWCGSQSTDALEDEENDSDTYKEPVSIRETCTSVNGKSVKRCNSWSNAHSCPPSSSHQQGSDVIDLTEESFEIRCTKRNRSPGDQGPSCAKDVPNAGVMKSSIPLPSTSYNANQSREESTMWECAECTLLNPSLAPICELCTAAKPKEREMKHKVWSCKFCTLENEVKLEKCEACGQWRYSYGAPLSTGAPNVGT

SEQ ID NO: 86862 - DNA, 3108 bp, Arabidopsis thaliana
  misc_feature (1)..(3108): Ceres Seq. ID no. 12694370
  misc_feature: MA Experiment ID: 20000315 Result: Down-regulated in Transcription
  misc_feature: MA Experiment 20000315 PARAMETER Experiment Name: At_14day_Shoots-Roots_Sub_P Parameter: Age (day) Value: 14
  misc_feature: MA Experiment 20000315 PARAMETER Experiment Name: At_14day_Shoots-Roots_Sub_P Parameter: Organism Value: A. thaliana
  misc_feature: MA Experiment 20000315 PARAMETER Experiment Name: At_14day_Shoots-Roots_Sub_P Parameter: Plant Line Value: WS
  misc_feature: MA Experiment 20000315 PARAMETER Experiment Name: At_14day_Shoots-Roots_Sub_P Parameter: Tissue Value: Shoots vs. Whole Plant
  misc_feature: MA Experiment ID: 20000327 Result: Down-regulated in Transcription
  misc_feature: MA Experiment 20000327 PARAMETER Experiment Name: At_42deg_Heat_Sub_P Parameter: Age (day) Value: 14
  misc_feature: MA Experiment 20000327 PARAMETER Experiment Name: At_42deg_Heat_Sub_P Parameter: Organism Value: A. thaliana
  misc_feature: MA Experiment 20000327 PARAMETER Experiment Name: At_42deg_Heat_Sub_P Parameter: Plant Line Value: WS
  misc_feature: MA Experiment 20000327 PARAMETER Experiment Name: At_42deg_Heat_Sub_P Parameter: Temperature (deg C) Value: 42 vs. 22
  misc_feature: MA Experiment 20000327 PARAMETER Experiment Name: At_42deg_Heat_Sub_P Parameter: Timepoint (hr) Value: 1
  misc_feature: MA Experiment 20000327 PARAMETER Experiment Name: At_42deg_Heat_Sub_P Parameter: Tissue Value: Aerial
  misc_feature: MA Experiment ID: 20000328 Result: Down-regulated in Transcription
  misc_feature: MA Experiment 20000328 PARAMETER Experiment Name: At_42deg_Heat_Sub_P Parameter: Age (day) Value: 14
  misc_feature: MA Experiment 20000328 PARAMETER Experiment Name: At_42deg_Heat_Sub_P Parameter: Organism Value: A. thaliana
  misc_feature: MA Experiment 20000328 PARAMETER Experiment Name: At_42deg_Heat_Sub_P Parameter: Plant Line Value: WS
  misc_feature: MA Experiment 20000328 PARAMETER Experiment Name: At_42deg_Heat_Sub_P Parameter: Temperature (deg C) Value: 42 vs. 22
  misc_feature: MA Experiment 20000328 PARAMETER Experiment Name: At_42deg_Heat_Sub_P Parameter: Timepoint (hr) Value: 6
  misc_feature: MA Experiment 20000328 PARAMETER Experiment Name: At_42deg_Heat_Sub_P Parameter: Tissue Value: Aerial
  misc_feature: MA Experiment ID: 20000347 Result: Up-regulated in Transcription
  misc_feature: MA Experiment 20000347 PARAMETER Experiment Name: At_2mM_SA_Sub_P Parameter: Age (day) Value: 14
  misc_feature: MA Experiment 20000347 PARAMETER Experiment Name: At_2mM_SA_Sub_P Parameter: Organism Value: A. thaliana
  misc_feature: MA Experiment 20000347 PARAMETER Experiment Name: At_2mM_SA_Sub_P Parameter: Plant Line Value: WS
  misc_feature: MA Experiment 20000347 PARAMETER Experiment Name: At_2mM_SA_Sub_P Parameter: Timepoint (hr) Value: 6
  misc_feature: MA Experiment 20000347 PARAMETER Experiment Name: At_2mM_SA_Sub_P Parameter: Tissue Value: Aerial
  misc_feature: MA Experiment 20000347 PARAMETER Experiment Name: At_2mM_SA_Sub_P Parameter: Treatment Value: 2mM SA vs. No Treatment
  misc_feature: MA Experiment ID: 20000355 Result: Down-regulated in Transcription
  misc_feature: MA Experiment 20000355 PARAMETER Experiment Name: At_Siliques_Sub_P Parameter: Age (day) Value: 21
  misc_feature: MA Experiment 20000355 PARAMETER Experiment Name: At_Siliques_Sub_P Parameter: Organism Value: A. thaliana
  misc_feature: MA Experiment 20000355 PARAMETER Experiment Name: At_Siliques_Sub_P Parameter: Plant Line Value: WS
  misc_feature: MA Experiment 20000355 PARAMETER Experiment Name: At_Siliques_Sub_P Parameter: Tissue Value: Less Than 5mm Siliques vs. Whole Plant
atgctcaggctacgtagatctctgtttctgctcctaaccgtttggttcttgtgttgttccggtttggttcacgtgatggttcgagcccaaaaccgaaccagacccactactcatcccgacgatgcgcgagctttgaactccatcttcgcggcttggaagattcgggcgccgagggaatggaacatcagcggcgaactttgctccggcgtcgccatcgacgccagtgtactcgactcaaaccatgcctacaatcctctcatcaaatgcgactgtagtttccaaaactccacaatctgccgcataaataacataaaggtttatgcgatagatgttgtaggacctatacctccagagctctggaccttaacatacctcaccaatctgtatagttccatacaacccacttacccactttttatattcacaagctcactgtctcctgctattgggaatttgactcggatgcagtggatgacttttggaatcaacgcgttgtctggccctattcctaaggaaatcggtttgcttacggatttaagattacttggtattagttcaaataacttttccggttccttaccagctgagattgggagttgtacaaaactacagcaaatgtacatcgatagttctggactcagcggaggaatacctttatcatttgctaattttgtggagttggaagtcgcttggattatggatgtggaacttacaggtcggataccagactttataggattctggaccaaacttactaccttgaggatcctcggaactggtttgagcggcccaataccgtcgtcattttccaacttaattgctttgacagaactgaggcttggtgatatatccaatggaagctcttctcttgatttcatcaaagacatgaaatctctaagtgtattagtattgaggaacaacaatctcactgggacaataccgtctactattggaggatacacaagtttgcaacaagttgatttgagcttcaacaaattacatggaccaattccggcttcacttttcaacttaagtcgacttactcacttgtttctgggaaacaacacgttgaatggatccttgcccactctaaaggggcagtctctgagcaatttagatgtgtcgtacaatgatttgtctggaagtcttccttcatgggtcagcttaccagatttgaagctcaatctagttgctaacaacttcacactggaaggtcttgacaacagggttttatcaggactacattgcctgcagaagaacttcccctgcaatcgaggcgaaggaatctattataacttttcgatcaactgcggaggcccagagataaggtctgttagtggagcactatttgaaaaggaggacgcggatcttggaccagcttcgtttgttgtgagtgctgcaaagagatgggcagccagtagtgtaggaaattttgctggcagtagcaacaatatatacatagctacttcactagcacaatttatcaacactatggactcagagctttttcagtcagcacgactttctgcatcttccctaaggtattatgggttggggctagaaaatggagggtacaccgtaacacttcagtttgctgaagtacaaattgaaggttctaactcttggaaaggtattggaagacgacgttttaacatttatgtccagggaagacttgttgaaaaggattttgatatacgcagaacagctggtggctcttcggttcgagcagttcagagagaatataaaacaaatgtatcagaaaatcatctcgaagtccatcttttctgggctggaaaaggaacatgttgtattcctatccaaggggcttatgggccattaatagcggccgtcagtgcgacaccagatttcacaccaactgtggctaataggccaccatcaaagggaaagagcaggactggtactattgtgggtgtcattgttggtgttggacttttgagcatctttgcgggtgtggttatcctcgtcattcgaaaaagaagaaaaccgtacacagatgatgaagagatacttagtatggacgtaaagccttacacctttacttactcggaacttaagaatgcaacacaagattttgatctctcaaacaagcttggagagggagggtttggggctgtttataagggaaacctcaatgatggaagagaggtggcggtgaagcagttgtcaattggatcacggcaagggaagggacaatttgttgcagaaattattgcaatttcttcagttctacatcgcaacctagtaaaactttacgggtgctgctttgaaggagatcatcgtttgctcgtatatgagtatctccctaatggaagtctcgatcaggcattatttggggataagagtttgcatcttgattggtcaacccgttatgagatatgtctgggagtagccagaggtctagtttatctccacgaggaagcaagtgttcgcataatacacagagatgtgaaggccagcaacattttactggactctgaactggtcccaaaagtttctgattttgggcttgcaaaactatatgatgacaagaaaacccatattagtaccagagtggcagggacgattgggtatcttgcgccagagtatgccatgcgtggacatctaacagagaaaacagatgtgtatgcctttggtgttgtggctcttgagctagtgagtggaaggaaaaactctgatgagaacctggaagagggaaaaaaatatcttcttgaatgggcatggaatctacacgagaaaaaccgtgacgttgaactaatagatgatgagctaagtgaatacaacatggaagaagtgaaacgcatgattggcattgctctgctttgcactcagtcatcttatgcgttgagaccaccaatgtcacgagtagtagccatgttgtcaggagatgctgaggtcaatgatgccacctctaagccaggctacctaaccgactgtacatttgatgacaccacaagctcctcattcagcaactttcaaacgaaagacactagcttctcgacgagctttatagcgcctggcccggagatgccacttagagacggcgaatcgaagccaatggttggattcaagatcaaggagggaagatga

SEQ ID NO: 86863 - protein, 1035 aa, Arabidopsis thaliana
  peptide (1)..(1035): Ceres Seq. ID no. 12694371
  misc_feature (1)..(514): Homolog of NCBI NO: 12321752 NR Description: hypothetical protein, 3' partial [Arabidopsis
  misc_feature (500)..(624): Homolog of NCBI NO: 12321752 NR Description: hypothetical protein, 3' partial [Arabidopsis
  misc_feature (26)..(429): Homolog of NCBI NO: 15223459 NR Description: wall-associated kinase 2, putative; protein id:
  misc_feature (163)..(972): Homolog of NCBI NO: 15220790 NR Description: receptor-like serine/threonine kinase, putative;
  misc_feature (147)..(972): Homolog of NCBI NO: 15220789 NR Description: receptor-like serine/threonine kinase, putative;
  misc_feature (186)..(972): Homolog of NCBI NO: 25405628 NR Description: hypothetical protein T3F20.25 [imported] -
  misc_feature (176)..(972): Homolog of NCBI NO: 25405630 NR Description: hypothetical protein T3F20.24 [imported] - thaliana >gi|8671882|gb|AAF78445.1|AC018748_24 Contains a weak
  misc_feature (10)..(973): Homolog of NCBI NO: 11994595 NR Description: receptor-like serine/threonine kinase
  misc_feature (87)..(980): Homolog of NCBI NO: 20259415 NR Description: putative receptor serine/threonine kinase thaliana] >gi|23296778|gb|AAN13167.1| putative receptor
  misc_feature (87)..(980): Homolog of NCBI NO: 25403092 NR Description: Receptor-like serine/threonine kinase (RFK1)
MLRLRRSLFLLLTVWFLCCSGLVHVMVRAQNRTRPTTHPDDARALNSIFAAWKIRAPREWNISGELCSGVAIDASVLDSNHAYNPLIKCDCSFQNSTICRINNIKVYAIDVVGPIPPELWTLTYLTNLYSSIQPTYPLFIFTSSLSPAIGNLTRMQWMTFGINALSGPIPKEIGLLTDLRLLGISSNNFSGSLPAEIGSCTKLQQMYIDSSGLSGGIPLSFANFVELEVAWIMDVELTGRIPDFIGFWTKLTTLRILGTGLSGPIPSSFSNLIALTELRLGDISNGSSSLDFIKDMKSLSVLVLRNNNLTGTIPSTIGGYTSLQQVDLSFNKLHGPIPASLFNLSRLTHLFLGNNTLNGSLPTLKGQSLSNLDVSYNDLSGSLPSWVSLPDLKLNLVANNFTLEGLDNRVLSGLHCLQKNFPCNRGEGIYYNFSINCGGPEIRSVSGALFEKEDADLGPASFVVSAAKRWAASSVGNFAGSSNNIYIATSLAQFINTMDSELFQSARLSASSLRYYGLGLENGGYTVTLQFAEVQIEGSNSWKGIGRRRFNIYVQGRLVEKDFDIRRTAGGSSVRAVQREYKTNVSENHLEVHLFWAGKGTCCIPIQGAYGPLIAAVSATPDFTPTVANRPPSKGKSRTGTIVGVIVGVGLLSIFAGVVILVIRKRRKPYTDDEEILSMDVKPYTFTYSELKNATQDFDLSNKLGEGGFGAVYKGNLNDGREVAVKQLSIGSRQGKGQFVAEIIAISSVLHRNLVKLYGCCFEGDHRLLVYEYLPNGSLDQALFGDKSLHLDWSTRYEICLGVARGLVYLHEEASVRIIHRDVKASNILLDSELVPKVSDFGLAKLYDDKKTHISTRVAGTIGYLAPEYAMRGHLTEKTDVYAFGVVALELVSGRKNSDENLEEGKKYLLEWAWNLHEKNRDVELIDDELSEYNMEEVKRMIGIALLCTQSSYALRPPMSRVVAMLSGDAEVNDATSKPGYLTDCTFDDTTSSSFSNFQTKDTSFSTSFIAPGPEMPLRDGESKPMVGFKIKEGR

SEQ ID NO: 86864 - protein, 1010 aa, Arabidopsis thaliana
  peptide (1)..(1010): Ceres Seq. ID no. 12694372
  misc_feature (1)..(489): Homolog of NCBI NO: 12321752 NR Description: hypothetical protein, 3' partial [Arabidopsis
  misc_feature (475)..(599): Homolog of NCBI NO: 12321752 NR Description: hypothetical protein, 3' partial [Arabidopsis
  misc_feature (1)..(404): Homolog of NCBI NO: 15223459 NR Description: wall-associated kinase 2, putative; protein id:
  misc_feature (138)..(947): Homolog of NCBI NO: 15220790 NR Description: receptor-like serine/threonine kinase, putative;
  misc_feature (122)..(947): Homolog of NCBI NO: 15220789 NR Description: receptor-like serine/threonine kinase, putative;
  misc_feature (161)..(947): Homolog of NCBI NO: 25405628 NR Description: hypothetical protein T3F20.25 [imported] -
  misc_feature (151)..(947): Homolog of NCBI NO: 25405630 NR Description: hypothetical protein T3F20.24 [imported] - thaliana >gi|8671882|gb|AAF78445.1|AC018748_24 Contains a weak
  misc_feature (1)..(948): Homolog of NCBI NO: 11994595 NR Description: receptor-like serine/threonine kinase
  misc_feature (62)..(955): Homolog of NCBI NO: 20259415 NR Description: putative receptor serine/threonine kinase thaliana] >gi|23296778|gb|AAN13167.1| putative receptor
  misc_feature (62)..(955): Homolog of NCBI NO: 25403092 NR Description: Receptor-like serine/threonine kinase (RFK1)
MVRAQNRTRPTTHPDDARALNSIFAAWKIRAPREWNISGELCSGVAIDASVLDSNHAYNPLIKCDCSFQNSTICRINNIKVYAIDVVGPIPPELWTLTYLTNLYSSIQPTYPLFIFTSSLSPAIGNLTRMQWMTFGINALSGPIPKEIGLLTDLRLLGISSNNFSGSLPAEIGSCTKLQQMYIDSSGLSGGIPLSFANFVELEVAWIMDVELTGRIPDFIGFWTKLTTLRILGTGLSGPIPSSFSNLIALTELRLGDISNGSSSLDFIKDMKSLSVLVLRNNNLTGTIPSTIGGYTSLQQVDLSFNKLHGPIPASLFNLSRLTHLFLGNNTLNGSLPTLKGQSLSNLDVSYNDLSGSLPSWVSLPDLKLNLVANNFTLEGLDNRVLSGLHCLQKNFPCNRGEGIYYNFSINCGGPEIRSVSGALFEKEDADLGPASFVVSAAKRWAASSVGNFAGSSNNIYIATSLAQFINTMDSELFQSARLSASSLRYYGLGLENGGYTVTLQFAEVQIEGSNSWKGIGRRRFNIYVQGRLVEKDFDIRRTAGGSSVRAVQREYKTNVSENHLEVHLFWAGKGTCCIPIQGAYGPLIAAVSATPDFTPTVANRPPSKGKSRTGTIVGVIVGVGLLSIFAGVVILVIRKRRKPYTDDEEILSMDVKPYTFTYSELKNATQDFDLSNKLGEGGFGAVYKGNLNDGREVAVKQLSIGSRQGKGQFVAEIIAISSVLHRNLVKLYGCCFEGDHRLLVYEYLPNGSLDQALFGDKSLHLDWSTRYEICLGVARGLVYLHEEASVRIIHRDVKASNILLDSELVPKVSDFGLAKLYDDKKTHISTRVAGTIGYLAPEYAMRGHLTEKTDVYAFGVVALELVSGRKNSDENLEEGKKYLLEWAWNLHEKNRDVELIDDELSEYNMEEVKRMIGIALLCTQSSYALRPPMSRVVAMLSGDAEVNDATSKPGYLTDCTFDDTTSSSFSNFQTKDTSFSTSFIAPGPEMPLRDGESKPMVGFKIKEGR

SEQ ID NO: 86865 - protein, 881 aa, Arabidopsis thaliana
  peptide (1)..(881): Ceres Seq. ID no. 12694373
  misc_feature (1)..(360): Homolog of NCBI NO: 12321752 NR Description: hypothetical protein, 3' partial [Arabidopsis
  misc_feature (346)..(470): Homolog of NCBI NO: 12321752 NR Description: hypothetical protein, 3' partial [Arabidopsis
  misc_feature (1)..(275): Homolog of NCBI NO: 15223459 NR Description: wall-associated kinase 2, putative; protein id:
  misc_feature (9)..(818): Homolog of NCBI NO: 15220790 NR Description: receptor-like serine/threonine kinase, putative;
  misc_feature (1)..(818): Homolog of NCBI NO: 15220789 NR Description: receptor-like serine/threonine kinase, putative;
  misc_feature (32)..(818): Homolog of NCBI NO: 25405628 NR Description: hypothetical protein T3F20.25 [imported] -
  misc_feature (22)..(818): Homolog of NCBI NO: 25405630 NR Description: hypothetical protein T3F20.24 [imported] - thaliana >gi|8671882|gb|AAF78445.1|AC018748_24 Contains a weak
  misc_feature (1)..(819): Homolog of NCBI NO: 11994595 NR Description: receptor-like serine/threonine kinase
  misc_feature (1)..(826): Homolog of NCBI NO: 20259415 NR Description: putative receptor serine/threonine kinase thaliana] >gi|23296778|gb|AAN13167.1| putative receptor
  misc_feature (1)..(826): Homolog of NCBI NO: 25403092 NR Description: Receptor-like serine/threonine kinase (RFK1)
MQWMTFGINALSGPIPKEIGLLTDLRLLGISSNNFSGSLPAEIGSCTKLQQMYIDSSGLSGGIPLSFANFVELEVAWIMDVELTGRIPDFIGFWTKLTTLRILGTGLSGPIPSSFSNLIALTELRLGDISNGSSSLDFIKDMKSLSVLVLRNNNLTGTIPSTIGGYTSLQQVDLSFNKLHGPIPASLFNLSRLTHLFLGNNTLNGSLPTLKGQSLSNLDVSYNDLSGSLPSWVSLPDLKLNLVANNFTLEGLDNRVLSGLHCLQKNFPCNRGEGIYYNFSINCGGPEIRSVSGALFEKEDADLGPASFVVSAAKRWAASSVGNFAGSSNNIYIATSLAQFINTMDSELFQSARLSASSLRYYGLGLENGGYTVTLQFAEVQIEGSNSWKGIGRRRFNIYVQGRLVEKDFDIRRTAGGSSVRAVQREYKTNVSENHLEVHLFWAGKGTCCIPIQGAYGPLIAAVSATPDFTPTVANRPPSKGKSRTGTIVGVIVGVGLLSIFAGVVILVIRKRRKPYTDDEEILSMDVKPYTFTYSELKNATQDFDLSNKLGEGGFGAVYKGNLNDGREVAVKQLSIGSRQGKGQFVAEIIAISSVLHRNLVKLYGCCFEGDHRLLVYEYLPNGSLDQALFGDKSLHLDWSTRYEICLGVARGLVYLHEEASVRIIHRDVKASNILLDSELVPKVSDFGLAKLYDDKKTHISTRVAGTIGYLAPEYAMRGHLTEKTDVYAFGVVALELVSGRKNSDENLEEGKKYLLEWAWNLHEKNRDVELIDDELSEYNMEEVKRMIGIALLCTQSSYALRPPMSRVVAMLSGDAEVNDATSKPGYLTDCTFDDTTSSSFSNFQTKDTSFSTSFIAPGPEMPLRDGESKPMVGFKIKEGR

SEQ ID NO: 86866 - DNA, 1275 bp, Arabidopsis thaliana
  misc_feature (1)..(1275): Ceres Seq. ID no. 12694399
  misc_feature: MA Experiment ID: 20000440 Result: Up-regulated in Transcription
  misc_feature: MA Experiment 20000440 PARAMETER Experiment Name: At_Closed-Flower__Sub_P Parameter: Tissue Value: Closed Flower vs. Whole Plant
atgaagaatctggtcatatttgccttcttgttcttaagcatcactactgtaatcaatggtggaataacaagtaaatttgtccgccaagctttaccatcgatcgaaatgtctctcgacactttcccttctcctggtggctacaacactcctgaacaggttcatctgactcaaggagaccatgatggacgtggcatgattgtctcgtgggtcacaccgttgaatctcgctggttctaacgttgttacctactggatcgctactaatggtagtgacgtaaagccagcgaaaaagagagctcatgcctccactaaatcttacagattctatgactatagttcaggatttctccatcacgccacaattaagggactcgagacttatgcttctaatgagacattgtatcattacatgtcaaaccctaaaggccaagctgttctctttgctggagacttgtcatatgcagacgaccacccgaatcatgaccagagaaagtgggatacttggggaagatttatggagccttgtgctgcttaccagcccttcatctttgctgccgggaatcatgaaattgattttgttccaaacattggtgagcctcacgcattcaagccctacactcaccgttaccctaacgcctacaaagcttcacaaagcacttctcctctttggtactcagtgagacgtgcttctgctcacatcatcgtcctctcttcttactcggcctacggaaaatacacgcctcaatacatttggcttgagcaagagctaaagaatgtgaacagagaagagactccatggttgattgtcattgttcactctccgtggtacaacagtaataactatcattacatggaaggtgagagcatgagagttatgtttgagtcgtggctcgttaacagcaaggttgatttggttttgtctggtcatgtccatgcctatgagagatctgaacgtatctccaatattaagtacaacatcaccaatggcttgagctctcctgtgaaagatcctaatgctcctatttacattactatcggagatggaggaaacattgaaggaattgcaaacagtttcgtggatccacaaccgagttactcagcatatagagaggcgagttttggccatgcggttttagagattatgaataggactcacgcgcagtacacatggcataggaaccaagacaacgagcctgtcgccgctgactctattatgttgcataacagacacttctttccggtggaggaaatagtttccagcaacattagggcctaa

SEQ ID NO: 86867 - protein, 424 aa, Arabidopsis thaliana
  peptide (1)..(424): Ceres Seq. ID no. 12694400
  misc_feature (125)..(313): Pfam Name: Calcineurin-like phosphoesterase Pfam Description: Calcineurin-like phosphoesterase
  misc_feature (125)..(424): Homolog of NCBI NO: 15223530 NR Description: purple acid phosphatase, putative; protein id: [Arabidopsis thaliana] >gi|25752265|pir||F96605 acid phosphatase
  misc_feature (1)..(136): Homolog of NCBI NO: 15223530 NR Description: purple acid phosphatase, putative; protein id: [Arabidopsis thaliana] >gi|25752265|pir||F96605 acid phosphatase
  misc_feature (125)..(424): Homolog of NCBI NO: 15234369 NR Description: purple acid phosphatase like protein; protein id: [Arabidopsis thaliana] >gi|7435104|pir||T04599 acid phosphatase
  misc_feature (3)..(148): Homolog of NCBI NO: 15234369 NR Description: purple acid phosphatase like protein; protein id: [Arabidopsis thaliana] >gi|7435104|pir||T04599 acid phosphatase
  misc_feature (100)..(416): Homolog of NCBI NO: 15224112 NR Description: putative purple acid phosphatase precursor; id: At2g18130.1, supported by cDNA: gi_20257484 [Arabidopsis
  misc_feature (4)..(125): Homolog of NCBI NO: 15224112 NR Description: putative purple acid phosphatase precursor; id: At2g18130.1, supported by cDNA: gi_20257484 [Arabidopsis
  misc_feature (125)..(416): Homolog of NCBI NO: 27597229 NR Description: purple acid phosphatase [Nicotiana tabacum]
  misc_feature (4)..(136): Homolog of NCBI NO: 27597229 NR Description: purple acid phosphatase [Nicotiana tabacum]
MKNLVIFAFLFLSITTVINGGITSKFVRQALPSIEMSLDTFPSPGGYNTPEQVHLTQGDHDGRGMIVSWVTPLNLAGSNVVTYWIATNGSDVKPAKKRAHASTKSYRFYDYSSGFLHHATIKGLETYASNETLYHYMSNPKGQAVLFAGDLSYADDHPNHDQRKWDTWGRFMEPCAAYQPFIFAAGNHEIDFVPNIGEPHAFKPYTHRYPNAYKASQSTSPLWYSVRRASAHIIVLSSYSAYGKYTPQYIWLEQELKNVNREETPWLIVIVHSPWYNSNNYHYMEGESMRVMFESWLVNSKVDLVLSGHVHAYERSERISNIKYNITNGLSSPVKDPNAPIYITIGDGGNIEGIANSFVDPQPSYSAYREASFGHAVLEIMNRTHAQYTWHRNQDNEPVAADSIMLHNRHFFPVEEIVSSNIRA

SEQ ID NO: 86868 - protein, 389 aa, Arabidopsis thaliana
  peptide (1)..(389): Ceres Seq. ID no. 12694401
  misc_feature (90)..(278): Pfam Name: Calcineurin-like phosphoesterase Pfam Description: Calcineurin-like phosphoesterase
  misc_feature (90)..(389): Homolog of NCBI NO: 15223530 NR Description: purple acid phosphatase, putative; protein id: [Arabidopsis thaliana] >gi|25752265|pir||F96605 acid phosphatase
  misc_feature (1)..(101): Homolog of NCBI NO: 15223530 NR Description: purple acid phosphatase, putative; protein id: [Arabidopsis thaliana] >gi|25752265|pir||F96605 acid phosphatase
  misc_feature (90)..(389): Homolog of NCBI NO: 15234369 NR Description: purple acid phosphatase like protein; protein id: [Arabidopsis thaliana] >gi|7435104|pir||T04599 acid phosphatase
  misc_feature (1)..(113): Homolog of NCBI NO: 15234369 NR Description: purple acid phosphatase like protein; protein id: [Arabidopsis thaliana] >gi|7435104|pir||T04599 acid phosphatase
  misc_feature (65)..(381): Homolog of NCBI NO: 15224112 NR Description: putative purple acid phosphatase precursor; id: At2g18130.1, supported by cDNA: gi_20257484 [Arabidopsis
  misc_feature (1)..(90): Homolog of NCBI NO: 15224112 NR Description: putative purple acid phosphatase precursor; id: At2g18130.1, supported by cDNA: gi_20257484 [Arabidopsis
  misc_feature (90)..(381): Homolog of NCBI NO: 27597229 NR Description: purple acid phosphatase [Nicotiana tabacum]
  misc_feature (1)..(101): Homolog of NCBI NO: 27597229 NR Description: purple acid phosphatase [Nicotiana tabacum]
MSLDTFPSPGGYNTPEQVHLTQGDHDGRGMIVSWVTPLNLAGSNVVTYWIATNGSDVKPAKKRAHASTKSYRFYDYSSGFLHHATIKGLETYASNETLYHYMSNPKGQAVLFAGDLSYADDHPNHDQRKWDTWGRFMEPCAAYQPFIFAAGNHEIDFVPNIGEPHAFKPYTHRYPNAYKASQSTSPLWYSVRRASAHIIVLSSYSAYGKYTPQYIWLEQELKNVNREETPWLIVIVHSPWYNSNNYHYMEGESMRVMFESWLVNSKVDLVLSGHVHAYERSERISNIKYNITNGLSSPVKDPNAPIYITIGDGGNIEGIANSFVDPQPSYSAYREASFGHAVLEIMNRTHAQYTWHRNQDNEPVAADSIMLHNRHFFPVEEIVSSNIRA

SEQ ID NO: 86869 - protein, 360 aa, Arabidopsis thaliana
  peptide (1)..(360): Ceres Seq. ID no. 12694402
  misc_feature (61)..(249): Pfam Name: Calcineurin-like phosphoesterase Pfam Description: Calcineurin-like phosphoesterase
  misc_feature (61)..(360): Homolog of NCBI NO: 15223530 NR Description: purple acid phosphatase, putative; protein id: [Arabidopsis thaliana] >gi|25752265|pir||F96605 acid phosphatase
  misc_feature (1)..(72): Homolog of NCBI NO: 15223530 NR Description: purple acid phosphatase, putative; protein id: [Arabidopsis thaliana] >gi|25752265|pir||F96605 acid phosphatase
  misc_feature (61)..(360): Homolog of NCBI NO: 15234369 NR Description: purple acid phosphatase like protein; protein id: [Arabidopsis thaliana] >gi|7435104|pir||T04599 acid phosphatase
  misc_feature (1)..(84): Homolog of NCBI NO: 15234369 NR Description: purple acid phosphatase like protein; protein id: [Arabidopsis thaliana] >gi|7435104|pir||T04599 acid phosphatase
  misc_feature (36)..(352): Homolog of NCBI NO: 15224112 NR Description: putative purple acid phosphatase precursor; id: At2g18130.1, supported by cDNA: gi_20257484 [Arabidopsis
  misc_feature (1)..(61): Homolog of NCBI NO: 15224112 NR Description: putative purple acid phosphatase precursor; id: At2g18130.1, supported by cDNA: gi_20257484 [Arabidopsis
  misc_feature (61)..(352): Homolog of NCBI NO: 27597229 NR Description: purple acid phosphatase [Nicotiana tabacum]
  misc_feature (1)..(72): Homolog of NCBI NO: 27597229 NR Description: purple acid phosphatase [Nicotiana tabacum]
MIVSWVTPLNLAGSNVVTYWIATNGSDVKPAKKRAHASTKSYRFYDYSSGFLHHATIKGLETYASNETLYHYMSNPKGQAVLFAGDLSYADDHPNHDQRKWDTWGRFMEPCAAYQPFIFAAGNHEIDFVPNIGEPHAFKPYTHRYPNAYKASQSTSPLWYSVRRASAHIIVLSSYSAYGKYTPQYIWLEQELKNVNREETPWLIVIVHSPWYNSNNYHYMEGESMRVMFESWLVNSKVDLVLSGHVHAYERSERISNIKYNITNGLSSPVKDPNAPIYITIGDGGNIEGIANSFVDPQPSYSAYREASFGHAVLEIMNRTHAQYTWHRNQDNEPVAADSIMLHNRHFFPVEEIVSSNIRA

SEQ ID NO: 86870 - DNA, 1050 bp, Arabidopsis thaliana
  misc_feature (1)..(1050): Ceres Seq. ID no. 12694461
  misc_feature: MA Experiment ID: 108462 Result: Up-regulated in Transcription
  misc_feature: MA Experiment 108462 PARAMETER Experiment Name: At_Germinating_Seeds_cDNA_P Parameter: Age (day) Value: 2 vs. 0
  misc_feature: MA Experiment 108462 PARAMETER Experiment Name: At_Germinating_Seeds_cDNA_P Parameter: Tissue Value: Germinating Seeds
  misc_feature: MA Experiment ID: 108463 Result: Up-regulated in Transcription
  misc_feature: MA Experiment 108463 PARAMETER Experiment Name: At_Germinating_Seeds_cDNA_P Parameter: Age (day) Value: 3 vs. 0
  misc_feature: MA Experiment 108463 PARAMETER Experiment Name: At_Germinating_Seeds_cDNA_P Parameter: Tissue Value: Germinating Seeds
  misc_feature: MA Experiment ID: 108464 Result: Up-regulated in Transcription
  misc_feature: MA Experiment 108464 PARAMETER Experiment Name: At_Germinating_Seeds_cDNA_P Parameter: Age (day) Value: 4 vs. 0
  misc_feature: MA Experiment 108464 PARAMETER Experiment Name: At_Germinating_Seeds_cDNA_P Parameter: Tissue Value: Germinating Seeds
  misc_feature: MA Experiment ID: 108469 Result: Up-regulated in Transcription
  misc_feature: MA Experiment ID: 108594 Result: Down-regulated in Transcription
  misc_feature: MA Experiment 108594 PARAMETER Experiment Name: At_Ler-rhl_Root_cDNA_P Parameter: Plant Line Value: null
  misc_feature: MA Experiment ID: 108595 Result: Up-regulated in Transcription
  misc_feature: MA Experiment 108595 PARAMETER Experiment Name: At_Ler-pi_Ovule_cDNA_P Parameter: Plant Line Value: null
  misc_feature: MA Experiment ID: 108667 Result: Up-regulated in Transcription
  misc_feature: MA Experiment 108667 PARAMETER Experiment Name: At_2mM_SA_cDNA_P Parameter: Plant Line Value: WS
  misc_feature: MA Experiment 108667 PARAMETER Experiment Name: At_2mM_SA_cDNA_P Parameter: Timepoint (hr) Value: 1
  misc_feature: MA Experiment 108667 PARAMETER Experiment Name: At_2mM_SA_cDNA_P Parameter: Treatment Value: 2mM SA vs. No Treatment
  misc_feature: MA Experiment ID: 108668 Result: Up-regulated in Transcription
  misc_feature: MA Experiment 108668 PARAMETER Experiment Name: At_2mM_SA_cDNA_P Parameter: Plant Line Value: WS
  misc_feature: MA Experiment 108668 PARAMETER Experiment Name: At_2mM_SA_cDNA_P Parameter: Timepoint (hr) Value: 6
  misc_feature: MA Experiment 108668 PARAMETER Experiment Name: At_2mM_SA_cDNA_P Parameter: Treatment Value: 2mM SA vs. No Treatment
  misc_feature: MA Experiment ID: 20000182 Result: Up-regulated in Transcription
  misc_feature: MA Experiment 20000182 PARAMETER Experiment Name: At_2mM_SA_P Parameter: Age (day) Value: 14
  misc_feature: MA Experiment 20000182 PARAMETER Experiment Name: At_2mM_SA_P Parameter: Organism Value: A. thaliana
  misc_feature: MA Experiment 20000182 PARAMETER Experiment Name: At_2mM_SA_P Parameter: Plant Line Value: WS
  misc_feature: MA Experiment 20000182 PARAMETER Experiment Name: At_2mM_SA_P Parameter: Timepoint (hr) Value: 6
  misc_feature: MA Experiment 20000182 PARAMETER Experiment Name: At_2mM_SA_P Parameter: Tissue Value: Aerial
  misc_feature: MA Experiment 20000182 PARAMETER Experiment Name: At_2mM_SA_P Parameter: Treatment Value: 2mM SA vs. No Treatment
  misc_feature: MA Experiment ID: 20000185 Result: Up-regulated in Transcription
  misc_feature: MA Experiment 20000185 PARAMETER Experiment Name: At_Roots__P Parameter: Age (day) Value: 7 vs. 21
  misc_feature: MA Experiment 20000185 PARAMETER Experiment Name: At_Roots__P Parameter: Organism Value: A. thaliana
  misc_feature: MA Experiment 20000185 PARAMETER Experiment Name: At_Roots__P Parameter: Tissue Value: Roots vs. Whole Plant
  misc_feature: MA Experiment ID: 20000439 Result: Up-regulated in Transcription
  misc_feature: MA Experiment 20000439 PARAMETER Experiment Name: At_Roots__P Parameter: Age (day) Value: 14 vs. 21
  misc_feature: MA Experiment 20000439 PARAMETER Experiment Name: At_Roots__P Parameter: Organism Value: A. thaliana
  misc_feature: MA Experiment 20000439 PARAMETER Experiment Name: At_Roots__P Parameter: Tissue Value: Roots vs. Whole Plant
atgaagagacattcttgttgttacaaacaaaagctgagaaaaggtctttggtctcctgaagaagatgagaaacttctcaattacattaccaaacatggccatggttgctggagttctgtccctaaactcgcaggtctcgagagatgtggaaagagctgtagactcagatggatcaattacttaagacctgatttaaagagaggagctttctcttcagaggaacagaatctcattgtcgagcttcatgctgttcttggaaacagatggtcgcaaattgctgcgaggcttcccgggagaaccgacaacgagataaagaacttgtggaattcgtgcattaagaagaagctgatgaagaaaggcattgaccctattacacataaacccctctccgaggttggtaaagaaacaaacagaagcgacaataacaattccacaagtttttcctcagaaactaatcaagacttgtttgtcaagaaaacgtctgattttgccgagtattctgcgtttcagaaagaagaatccaactctgtttcactcagaaattcgctctcttccatgatcccaacgcaattcaacatcgacgatggttctgtctcaaatgcgggttttgatacacaagtatgcgtgaaaccctcgattattcttcttcctcctccaaacaacacttcaagcactgtctctggacaggatcatgtaaacgtgtcagagcctaattgggaatcaaacagtggaaccacaagccacctcaacaatcccggtatggaagaaatgaaatggtccgaggagtacctaaacgaatcgttattctctacccaagtttacgtgaaatcagagacggatttcaactccaacattgcctttccttggagccaaagccaagcttgtgacgtattccccaaggatcttcagagaatggccttctcttttggtggtcagaccctttagtttctttttcttatcagatttagacatattgatacgtgtaatgaatggatcaaatgttctatttggccatacgttaaaaaaataaaaaagcacaatcctttcctg

SEQ ID NO: 86871 - protein, 314 aa, Arabidopsis thaliana
  peptide (1)..(314): Ceres Seq. ID no. 12694462
  misc_feature (14)..(61): Pfam Name: Myb-like DNA-binding domain Pfam Description: Myb-like DNA-binding domain
  misc_feature (1)..(314): Homolog of NCBI NO: 15223612 NR Description: myb family transcription factor; protein id: supported by cDNA: 250386. [Arabidopsis thaliana]
  misc_feature (75)..(314): Homolog of NCBI NO: 3941464 NR Description: putative transcription factor [Arabidopsis
  misc_feature (1)..(291): Homolog of NCBI NO: 22329445 NR Description: myb family transcription factor; protein id: supported by cDNA: gi_20465974 [Arabidopsis thaliana] putative transcription factor [Arabidopsis thaliana]
  misc_feature (1)..(291): Homolog of NCBI NO: 25294104 NR Description: hypothetical protein [imported] - Arabidopsis >gi|3482929|gb|AAC33214.1| Putative transcription factor
  misc_feature (1)..(152): Homolog of NCBI NO: 34902542 NR Description: putative transcription factor (myb) [Oryza sativa
  misc_feature (1)..(151): Homolog of NCBI NO: 15234262 NR Description: myb family transcription factor; protein id: supported by cDNA: gi_15375280, supported by cDNA: gi_15450989
  misc_feature (1)..(129): Homolog of NCBI NO: 2280530 NR Description: ATMYB4 [Arabidopsis thaliana]
  misc_feature (1)..(129): Homolog of NCBI NO: 30690317 NR Description: myb transcription factor (ATMYB4) [Arabidopsis >gi|20466622|gb|AAM20628.1| transcription factor ATMYB4 thaliana] >gi|30984580|gb|AAP42753.1| At5g26655 [Arabidopsis
  misc_feature (1)..(131): Homolog of NCBI NO: 28628949 NR Description: MYB2 [Dendrobium sp. XMW-2002-2]
  misc_feature (45)..(129): Homolog of NCBI NO: 7446174 NR Description: transcription factor MYB4 - Arabidopsis thaliana
MKRHSCCYKQKLRKGLWSPEEDEKLLNYITKHGHGCWSSVPKLAGLERCGKSCRLRWINYLRPDLKRGAFSSEEQNLIVELHAVLGNRWSQIAARLPGRTDNEIKNLWNSCIKKKLMKKGIDPITHKPLSEVGKETNRSDNNNSTSFSSETNQDLFVKKTSDFAEYSAFQKEESNSVSLRNSLSSMIPTQFNIDDGSVSNAGFDTQVCVKPSIILLPPPNNTSSTVSGQDHVNVSEPNWESNSGTTSHLNNPGMEEMKWSEEYLNESLFSTQVYVKSETDFNSNIAFPWSQSQACDVFPKDLQRMAFSFGGQTL

SEQ ID NO: 86872 - protein, 198 aa, Arabidopsis thaliana
  peptide (1)..(198): Ceres Seq. ID no. 12694463
  misc_feature (1)..(198): Homolog of NCBI NO: 15223612 NR Description: myb family transcription factor; protein id: supported by cDNA: 250386. [Arabidopsis thaliana]
  misc_feature (1)..(198): Homolog of NCBI NO: 3941464 NR Description: putative transcription factor [Arabidopsis
  misc_feature (1)..(175): Homolog of NCBI NO: 22329445 NR Description: myb family transcription factor; protein id: supported by cDNA: gi_20465974 [Arabidopsis thaliana] putative transcription factor [Arabidopsis thaliana]
  misc_feature (1)..(175): Homolog of NCBI NO: 25294104 NR Description: hypothetical protein [imported] - Arabidopsis >gi|3482929|gb|AAC33214.1| Putative transcription factor
  misc_feature (1)..(36): Homolog of NCBI NO: 34902542 NR Description: putative transcription factor (myb) [Oryza sativa
  misc_feature (1)..(35): Homolog of NCBI NO: 15234262 NR Description: myb family transcription factor; protein id: supported by cDNA: gi_15375280, supported by cDNA: gi_15450989
  misc_feature (1)..(13): Homolog of NCBI NO: 2280530 NR Description: ATMYB4 [Arabidopsis thaliana]
  misc_feature (1)..(13): Homolog of NCBI NO: 30690317 NR Description: myb transcription factor (ATMYB4) [Arabidopsis >gi|20466622|gb|AAM20628.1| transcription factor ATMYB4 thaliana] >gi|30984580|gb|AAP42753.1| At5g26655 [Arabidopsis
  misc_feature (1)..(15): Homolog of NCBI NO: 28628949 NR Description: MYB2 [Dendrobium sp. XMW-2002-2]
  misc_feature (1)..(13): Homolog of NCBI NO: 7446174 NR Description: transcription factor MYB4 - Arabidopsis thaliana
MKKGIDPITHKPLSEVGKETNRSDNNNSTSFSSETNQDLFVKKTSDFAEYSAFQKEESNSVSLRNSLSSMIPTQFNIDDGSVSNAGFDTQVCVKPSIILLPPPNNTSSTVSGQDHVNVSEPNWESNSGTTSHLNNPGMEEMKWSEEYLNESLFSTQVYVKSETDFNSNIAFPWSQSQACDVFPKDLQRMAFSFGGQTL

SEQ ID NO: 86873 - DNA, 2079 bp, Arabidopsis thaliana
  misc_feature (1)..(2079): Ceres Seq. ID no. 12694485
  misc_feature: MA Experiment ID: 20000234 Result: Up-regulated in Transcription
  misc_feature: MA Experiment 20000234 PARAMETER Experiment Name: At_Siliques_P Parameter: Age (day) Value: 21
  misc_feature: MA Experiment 20000234 PARAMETER Experiment Name: At_Siliques_P Parameter: Organism Value: A. thaliana
  misc_feature: MA Experiment 20000234 PARAMETER Experiment Name: At_Siliques_P Parameter: Plant Line Value: WS
  misc_feature: MA Experiment 20000234 PARAMETER Experiment Name: At_Siliques_P Parameter: Tissue Value: Less Than 5mm Siliques vs. Whole Plant
  misc_feature: MA Experiment ID: 20000439 Result: Up-regulated in Transcription
  misc_feature: MA Experiment 20000439 PARAMETER Experiment Name: At_Roots__P Parameter: Age (day) Value: 14 vs. 21
  misc_feature: MA Experiment 20000439 PARAMETER Experiment Name: At_Roots__P Parameter: Organism Value: A. thaliana
  misc_feature: MA Experiment 20000439 PARAMETER Experiment Name: At_Roots__P Parameter: Tissue Value: Roots vs. Whole Plant
atgggttgtatttgctcaaaaggagtacgtactaatgatgattacatagagacgaatcatgtaagtattggtaaagagaatcctaaagcttctaagaaacaatctgattcagaggaaactagtgttaatggaaacgaagctacattgaggttaatacctgatgatgtcaaggacactttctctgatgaggaagtggaggagctggaggagaagaaagagagtagctttgagatgaaatcttgtgaatctgtgttgcaaaaaggaaatgttttggagatagttgataatgtaggaccgttgcagcctaggatgagtaggattggtagtgttagtaatggagatagagcagctaaagttattgctggttggccttcatggttagtttcagttgctggtgaagctattaatggatggattcctcgtagtgctgattcgttcgagaagttggagatgattgggcaggggacgtatagtagtgtgtacagagctcgtgatctcgaaacaaaccagattgttgcacttaagaaggttcggtttgctaatatggatcctgagagtgtgaggtttatggcaagagaaattatcattctacgtaggcttaaccatccaaacgttatgaaactcgaagggctgatcatttcaaaagcttcgggaagtatgtatcttatatttgaatatatggatcatgatctcgcaggccttgcttcgacccctgggattaagttctctcaggcacagattaaatgttatatgaagcaattgttgcttgggttagaacattgccatagttgtggtgtgttgcaccgtgacatcaagtgctcaaatcttctgcttgatcgtaacaataatctcaagattggtgattttggtctttctaatttttaccggggccaacgaaagcagcctctgactagccgtgttgtgacattgtggtaccgcccacctgaacttctgcttgggtcaactgactatggagttacggttgatctatggagcacaggatgcatacttgctgaactctttactggaaagcctcttctacccggaagaaccgaggtagaacaaatgcacaagatctttaaactctgcggatcaccttctgaggagtattggagaagatcacggttgcggcatgcaaccatctttaaacctcaacatccctacaagcgatgtgtagctgatacatttaaggatcttccttcttcagctttggccctccttgaggttcttctagctgtagaaccagatgcacgtggaaccgcatcttcggcccttcaaagcgagttctttacgacaaaaccttttccaagtgagccatcaagtttaccgagatatcagccaaggaaagaatttgatgccaagcttcgagaagaggaagcaagacgacggaaaggttcgagcagtaaacagaatgaacagaagcggttggctagagagtccaaagctgtaccggctcctagtgccaatgccgagttactggcatcaatacagaaacgtctaggggagactaaccggacaagcattagtgagaagtttaatcctgagggagattctggcaatggcttccggatcgaaccactgaagggcaataccgcacaaaatccctacccaatctacacaaacggagacaaccatcctaacggatcaagccaactgagaacacaaaggtcctatgtccaacgcgggtctggccaattgtcaagattctcaaactcaatggcacctactagagatggatcacagtttggaagtatgagagacgctatagtgaaccaacgctggcttgaagatggttcagagaatttcaatttgtcccaaagattgttggagaaacctaatggtattaggaaagatgacccttcatcctctagcaaagagtcaataatgggctatgatggtgagaagagagggaggattcagtactcaggaccattgattccaggagaaggaaacttggatgaaatgttgaaagaacatgaaagacagatcttgttggctgtacgacgagctcaagccgataaggctaagagagacgataaccgacaggctcaaaccttgtttccagctaatggaaggtga

SEQ ID NO: 86874 - protein, 692 aa, Arabidopsis thaliana
  peptide (1)..(692): Ceres Seq. ID no. 12694486
  misc_feature (146)..(430): Pfam Name: Protein kinase domain Pfam Description: Protein kinase domain
  misc_feature (25)..(692): Homolog of NCBI NO: 15217565 NR Description: putative protein kinase; protein id: At1g09600.1
  misc_feature (25)..(692): Homolog of NCBI NO: 25402555 NR Description: hypothetical protein [imported] - Arabidopsis >gi|3482933|gb|AAC33218.1| Similar to cdc2 protein kinases
  misc_feature (1)..(676): Homolog of NCBI NO: 15219169 NR Description: cell division-related protein, putative; protein At1g53050.1 [Arabidopsis thaliana] >gi|25405618|pir||A96571
  misc_feature (1)..(676): Homolog of NCBI NO: 28393523 NR Description: putative cell division-related protein
  misc_feature (99)..(591): Homolog of NCBI NO: 15217521 NR Description: putative protein kinase; protein id: At1g71530.1
  misc_feature (635)..(685): Homolog of NCBI NO: 15217521 NR Description: putative protein kinase; protein id: At1g71530.1
  misc_feature (118)..(687): Homolog of NCBI NO: 34903662 NR Description: putative CRK1 protein [Oryza sativa (japonica group)] >gi|20804521|dbj|BAB92215.1| putative CRK1 protein [Oryza
  misc_feature (1)..(547): Homolog of NCBI NO: 7488162 NR Description: probable protein kinase T5L19.140 (EC 2.7.1.-) - thaliana >gi|4539004|emb|CAB39625.1| putative protein kinase thaliana] >gi|7267697|emb|CAB78124.1| putative protein kinase
  misc_feature (561)..(681): Homolog of NCBI NO: 7488162 NR Description: probable protein kinase T5L19.140 (EC 2.7.1.-) - thaliana >gi|4539004|emb|CAB39625.1| putative protein kinase thaliana] >gi|7267697|emb|CAB78124.1| putative protein kinase
  misc_feature (1)..(530): Homolog of NCBI NO: 15217643 NR Description: protein kinase, putative; protein id: At1g33770.1
MGCICSKGVRTNDDYIETNHVSIGKENPKASKKQSDSEETSVNGNEATLRLIPDDVKDTFSDEEVEELEEKKESSFEMKSCESVLQKGNVLEIVDNVGPLQPRMSRIGSVSNGDRAAKVIAGWPSWLVSVAGEAINGWIPRSADSFEKLEMIGQGTYSSVYRARDLETNQIVALKKVRFANMDPESVRFMAREIIILRRLNHPNVMKLEGLIISKASGSMYLIFEYMDHDLAGLASTPGIKFSQAQIKCYMKQLLLGLEHCHSCGVLHRDIKCSNLLLDRNNNLKIGDFGLSNFYRGQRKQPLTSRVVTLWYRPPELLLGSTDYGVTVDLWSTGCILAELFTGKPLLPGRTEVEQMHKIFKLCGSPSEEYWRRSRLRHATIFKPQHPYKRCVADTFKDLPSSALALLEVLLAVEPDARGTASSALQSEFFTTKPFPSEPSSLPRYQPRKEFDAKLREEEARRRKGSSSKQNEQKRLARESKAVPAPSANAELLASIQKRLGETNRTSISEKFNPEGDSGNGFRIEPLKGNTAQNPYPIYTNGDNHPNGSSQLRTQRSYVQRGSGQLSRFSNSMAPTRDGSQFGSMRDAIVNQRWLEDGSENFNLSQRLLEKPNGIRKDDPSSSSKESIMGYDGEKRGRIQYSGPLIPGEGNLDEMLKEHERQILLAVRRAQADKAKRDDNRQAQTLFPANGR

SEQ ID NO: 86875 - protein, 615 aa, Arabidopsis thaliana
  peptide (1)..(615): Ceres Seq. ID no. 12694487
  misc_feature (69)..(353): Pfam Name: Protein kinase domain Pfam Description: Protein kinase domain
  misc_feature (1)..(615): Homolog of NCBI NO: 15217565 NR Description: putative protein kinase; protein id: At1g09600.1
  misc_feature (1)..(615): Homolog of NCBI NO: 25402555 NR Description: hypothetical protein [imported] - Arabidopsis >gi|3482933|gb|AAC33218.1| Similar to cdc2 protein kinases
  misc_feature (1)..(599): Homolog of NCBI NO: 15219169 NR Description: cell division-related protein, putative; protein At1g53050.1 [Arabidopsis thaliana] >gi|25405618|pir||A96571
  misc_feature (1)..(599): Homolog of NCBI NO: 28393523 NR Description: putative cell division-related protein
  misc_feature (22)..(514): Homolog of NCBI NO: 15217521 NR Description: putative protein kinase; protein id: At1g71530.1
  misc_feature (558)..(608): Homolog of NCBI NO: 15217521 NR Description: putative protein kinase; protein id: At1g71530.1
  misc_feature (41)..(610): Homolog of NCBI NO: 34903662 NR Description: putative CRK1 protein [Oryza sativa (japonica group)] >gi|20804521|dbj|BAB92215.1| putative CRK1 protein [Oryza
  misc_feature (1)..(470): Homolog of NCBI NO: 7488162 NR Description: probable protein kinase T5L19.140 (EC 2.7.1.-) - thaliana >gi|4539004|emb|CAB39625.1| putative protein kinase thaliana] >gi|7267697|emb|CAB78124.1| putative protein kinase
  misc_feature (484)..(604): Homolog of NCBI NO: 7488162 NR Description: probable protein kinase T5L19.140 (EC 2.7.1.-) - thaliana >gi|4539004|emb|CAB39625.1| putative protein kinase thaliana] >gi|7267697|emb|CAB78124.1| putative protein kinase
  misc_feature (1)..(453): Homolog of NCBI NO: 15217643 NR Description: protein kinase, putative; protein id: At1g33770.1
MKSCESVLQKGNVLEIVDNVGPLQPRMSRIGSVSNGDRAAKVIAGWPSWLVSVAGEAINGWIPRSADSFEKLEMIGQGTYSSVYRARDLETNQIVALKKVRFANMDPESVRFMAREIIILRRLNHPNVMKLEGLIISKASGSMYLIFEYMDHDLAGLASTPGIKFSQAQIKCYMKQLLLGLEHCHSCGVLHRDIKCSNLLLDRNNNLKIGDFGLSNFYRGQRKQPLTSRVVTLWYRPPELLLGSTDYGVTVDLWSTGCILAELFTGKPLLPGRTEVEQMHKIFKLCGSPSEEYWRRSRLRHATIFKPQHPYKRCVADTFKDLPSSALALLEVLLAVEPDARGTASSALQSEFFTTKPFPSEPSSLPRYQPRKEFDAKLREEEARRRKGSSSKQNEQKRLARESKAVPAPSANAELLASIQKRLGETNRTSISEKFNPEGDSGNGFRIEPLKGNTAQNPYPIYTNGDNHPNGSSQLRTQRSYVQRGSGQLSRFSNSMAPTRDGSQFGSMRDAIVNQRWLEDGSENFNLSQRLLEKPNGIRKDDPSSSSKESIMGYDGEKRGRIQYSGPLIPGEGNLDEMLKEHERQILLAVRRAQADKAKRDDNRQAQTLFPANGR

SEQ ID NO: 86876 - protein, 589 aa, Arabidopsis thaliana
  peptide (1)..(589): Ceres Seq. ID no. 12694488
  misc_feature (43)..(327): Pfam Name: Protein kinase domain Pfam Description: Protein kinase domain
  misc_feature (1)..(589): Homolog of NCBI NO: 15217565 NR Description: putative protein kinase; protein id: At1g09600.1
  misc_feature (1)..(589): Homolog of NCBI NO: 25402555 NR Description: hypothetical protein [imported] - Arabidopsis >gi|3482933|gb|AAC33218.1| Similar to cdc2 protein kinases
  misc_feature (1)..(573): Homolog of NCBI NO: 15219169 NR Description: cell division-related protein, putative; protein At1g53050.1 [Arabidopsis thaliana] >gi|25405618|pir||A96571
  misc_feature (1)..(573): Homolog of NCBI NO: 28393523 NR Description: putative cell division-related protein
  misc_feature (1)..(488): Homolog of NCBI NO: 15217521 NR Description: putative protein kinase; protein id: At1g71530.1
  misc_feature (532)..(582): Homolog of NCBI NO: 15217521 NR Description: putative protein kinase; protein id: At1g71530.1
  misc_feature (15)..(584): Homolog of NCBI NO: 34903662 NR Description: putative CRK1 protein [Oryza sativa (japonica group)] >gi|20804521|dbj|BAB92215.1| putative CRK1 protein [Oryza
  misc_feature (1)..(444): Homolog of NCBI NO: 7488162 NR Description: probable protein kinase T5L19.140 (EC 2.7.1.-) - thaliana >gi|4539004|emb|CAB39625.1| putative protein kinase thaliana] >gi|7267697|emb|CAB78124.1| putative protein kinase
  misc_feature (458)..(578): Homolog of NCBI NO: 7488162 NR Description: probable protein kinase T5L19.140 (EC 2.7.1.-) - thaliana >gi|4539004|emb|CAB39625.1| putative protein kinase thaliana] >gi|7267697|emb|CAB78124.1| putative protein kinase
  misc_feature (1)..(427): Homolog of NCBI NO: 15217643 NR Description: protein kinase, putative; protein id: At1g33770.1
MSRIGSVSNGDRAAKVIAGWPSWLVSVAGEAINGWIPRSADSFEKLEMIGQGTYSSVYRARDLETNQIVALKKVRFANMDPESVRFMAREIIILRRLNHPNVMKLEGLIISKASGSMYLIFEYMDHDLAGLASTPGIKFSQAQIKCYMKQLLLGLEHCHSCGVLHRDIKCSNLLLDRNNNLKIGDFGLSNFYRGQRKQPLTSRVVTLWYRPPELLLGSTDYGVTVDLWSTGCILAELFTGKPLLPGRTEVEQMHKIFKLCGSPSEEYWRRSRLRHATIFKPQHPYKRCVADTFKDLPSSALALLEVLLAVEPDARGTASSALQSEFFTTKPFPSEPSSLPRYQPRKEFDAKLREEEARRRKGSSSKQNEQKRLARESKAVPAPSANAELLASIQKRLGETNRTSISEKFNPEGDSGNGFRIEPLKGNTAQNPYPIYTNGDNHPNGSSQLRTQRSYVQRGSGQLSRFSNSMAPTRDGSQFGSMRDAIVNQRWLEDGSENFNLSQRLLEKPNGIRKDDPSSSSKESIMGYDGEKRGRIQYSGPLIPGEGNLDEMLKEHERQILLAVRRAQADKAKRDDNRQAQTLFPANGR

SEQ ID NO: 86877 - DNA, 1261 bp, Arabidopsis thaliana
  misc_feature (1)..(1261): Ceres Seq. ID no. 12694555
  misc_feature: MA Experiment ID: 20000171 Result: Up-regulated in Transcription
  misc_feature: MA Experiment 20000171 PARAMETER Experiment Name: At_42deg_Heat_P Parameter: Age (day) Value: 14
  misc_feature: MA Experiment 20000171 PARAMETER Experiment Name: At_42deg_Heat_P Parameter: Organism Value: A. thaliana
  misc_feature: MA Experiment 20000171 PARAMETER Experiment Name: At_42deg_Heat_P Parameter: Plant Line Value: WS
  misc_feature: MA Experiment 20000171 PARAMETER Experiment Name: At_42deg_Heat_P Parameter: Temperature (deg C) Value: 42 vs. 22
  misc_feature: MA Experiment 20000171 PARAMETER Experiment Name: At_42deg_Heat_P Parameter: Timepoint (hr) Value: 1
  misc_feature: MA Experiment 20000171 PARAMETER Experiment Name: At_42deg_Heat_P Parameter: Tissue Value: Aerial
  misc_feature: MA Experiment ID: 20000173 Result: Up-regulated in Transcription
  misc_feature: MA Experiment 20000173 PARAMETER Experiment Name: At_42deg_Heat_P Parameter: Age (day) Value: 14
  misc_feature: MA Experiment 20000173 PARAMETER Experiment Name: At_42deg_Heat_P Parameter: Organism Value: A. thaliana
  misc_feature: MA Experiment 20000173 PARAMETER Experiment Name: At_42deg_Heat_P Parameter: Plant Line Value: WS
  misc_feature: MA Experiment 20000173 PARAMETER Experiment Name: At_42deg_Heat_P Parameter: Temperature (deg C) Value: 42 vs. 22
  misc_feature: MA Experiment 20000173 PARAMETER Experiment Name: At_42deg_Heat_P Parameter: Timepoint (hr) Value: 6
  misc_feature: MA Experiment 20000173 PARAMETER Experiment Name: At_42deg_Heat_P Parameter: Tissue Value: Aerial
  misc_feature: MA Experiment ID: 20000179 Result: Down-regulated in Transcription
  misc_feature: MA Experiment 20000179 PARAMETER Experiment Name: At_Germinating_Seeds_P Parameter: Age (hr) Value: 6 vs. 0
  misc_feature: MA Experiment 20000179 PARAMETER Experiment Name: At_Germinating_Seeds_P Parameter: Tissue Value: Germinating Seeds
  misc_feature: MA Experiment ID: 20000184 Result: Up-regulated in Transcription
  misc_feature: MA Experiment 20000184 PARAMETER Experiment Name: At_Shoots__P Parameter: Age (day) Value: 7
  misc_feature: MA Experiment 20000184 PARAMETER Experiment Name: At_Shoots__P Parameter: Tissue Value: Shoots vs. Whole Plant
  misc_feature: MA Experiment ID: 20000234 Result: Up-regulated in Transcription
  misc_feature: MA Experiment 20000234 PARAMETER Experiment Name: At_Siliques_P Parameter: Age (day) Value: 21
  misc_feature: MA Experiment 20000234 PARAMETER Experiment Name: At_Siliques_P Parameter: Organism Value: A. thaliana
  misc_feature: MA Experiment 20000234 PARAMETER Experiment Name: At_Siliques_P Parameter: Plant Line Value: WS
  misc_feature: MA Experiment 20000234 PARAMETER Experiment Name: At_Siliques_P Parameter: Tissue Value: Less Than 5mm Siliques vs. Whole Plant
  misc_feature: MA Experiment ID: 20000235 Result: Up-regulated in Transcription
  misc_feature: MA Experiment 20000235 PARAMETER Experiment Name: At_Siliques_P Parameter: Age (day) Value: 21
  misc_feature: MA Experiment 20000235 PARAMETER Experiment Name: At_Siliques_P Parameter: Organism Value: A. thaliana
  misc_feature: MA Experiment 20000235 PARAMETER Experiment Name: At_Siliques_P Parameter: Plant Line Value: WS
  misc_feature: MA Experiment 20000235 PARAMETER Experiment Name: At_Siliques_P Parameter: Tissue Value: 5-10mm Siliques vs. Whole Plant
  misc_feature: MA Experiment ID: 20000264 Result: Up-regulated in Transcription
  misc_feature: MA Experiment 20000264 PARAMETER Experiment Name: At_Open_Flower_P Parameter: Age (day) Value: 21
  misc_feature: MA Experiment 20000264 PARAMETER Experiment Name: At_Open_Flower_P Parameter: Plant Line Value: WS
  misc_feature: MA Experiment 20000264 PARAMETER Experiment Name: At_Open_Flower_P Parameter: Tissue Value: Open Flower vs. Whole Plant
  misc_feature: MA Experiment ID: 20000265 Result: Up-regulated in Transcription
  misc_feature: MA Experiment 20000265 PARAMETER Experiment Name: At_Open_Flower_P Parameter: Age (day) Value: 21
  misc_feature: MA Experiment 20000265 PARAMETER Experiment Name: At_Open_Flower_P Parameter: Plant Line Value: WS
  misc_feature: MA Experiment 20000265 PARAMETER Experiment Name: At_Open_Flower_P Parameter: Tissue Value: Closed Flower vs. Whole Plant
  misc_feature: MA Experiment ID: 20000286 Result: Up-regulated in Transcription
  misc_feature: MA Experiment 20000286 PARAMETER Experiment Name: At_Open_Flower_P Parameter: Age (day) Value: 21
  misc_feature: MA Experiment 20000286 PARAMETER Experiment Name: At_Open_Flower_P Parameter: Plant Line Value: WS
  misc_feature: MA Experiment 20000286 PARAMETER Experiment Name: At_Open_Flower_P Parameter: Tissue Value: Half Open vs. Whole Plant
  misc_feature: MA Experiment ID: 20000794 Result: Up-regulated in Transcription
  misc_feature: MA Experiment 20000794 PARAMETER Experiment Name: At_Petals_P Parameter: Age (day) Value: 23-25 days
  misc_feature: MA Experiment 20000794 PARAMETER Experiment Name: At_Petals_P Parameter: Plant Line Value: WS
  misc_feature: MA Experiment 20000794 PARAMETER Experiment Name: At_Petals_P Parameter: Tissue Value: Petals vs. Whole plant
acgctctctcactgatcattcacaatctctctctttttttcaccggcgataattttccgatctcgattataagatggcgaaggaaccagttcgtgttcttgttaccggagctgcaggacaaatcggatatgctcttgttcctatgattgcaagggggataatgcttggtgctgatcagcctgtgatcctccacatgcttgacatcccttttgcagcagaagctttgaacggtgtgaagatggaattggtcgatgctgctttccctcttctaaagggtgtggtggctacaactgatgctgttgaagcgtgtaccggtgttaatgttgctgtcatggttggtggtttcccgaggaaggaaggaatggagaggaaggatgttatgtccaagaacgtttccatttacaagtctcaagcttctgccttggagaagcatgctgcaccaaactgcaaggttctggttgttgcaaaccctgcaaacaccaatgcattgatcctgaaggaatttgcaccatcgatcccagagaagaacattacttgcttgaccaggcttgaccacaacagggcattgggacaagtgtctgagaggttaagcgtaccagtgtctgatgtgaagaacgtgattatctggggaaaccactcatcaacccaatacccagatgtcaaccacgctaccgttaagacttccgttggagagaagccagtgcgtgagctagtcaagaatgacgagtggttgaatggagagttcatctctaccgttcaacaacgtggtgctgccattatcaaggccaggaagctgtctagtgcactttctgcagctagctcagcttgtgaccatatccgtgattgggttgttggaacacctgagggcacatttgtttcaatgggagtatactcagatggatcctacaatgttccagctggacttatctactccttccccgtaacctgccgtaatggagagtggaccattgttcaaggtttaccgattgatgacgcatcgaggaagaagatggatttgacagcagaggagttgaaggaagagaaggacctcgcttactcatgcctctcttaaaccggtcttttctcagctggtttaatcagtgaaagctttgtttcgaataaagaagttttgttataaaatgaacttttaataacctcatgagcttgaggtttagttttcctaatgtgcccatgatgtgtcggtactgatttgctgaccagatataaacaatcattttgataattgacctcttttggtttc

SEQ ID NO: 86878 - protein, 332 aa, Arabidopsis thaliana; identical to SEQ ID NO: 28515
  peptide (1)..(332): Ceres Seq. ID no. 12694556
  misc_feature (157)..(331): Pfam Name: lactate/malate dehydrogenase, alpha/beta Pfam Description: lactate/malate dehydrogenase, alpha/beta
  misc_feature (1)..(332): Homolog of NCBI NO: 15239843 NR Description: cytosolic malate dehydrogenase; protein id: supported by cDNA: 40174., supported by cDNA: gi_18175962, by cDNA: gi_20259604 [Arabidopsis thaliana]
  misc_feature (1)..(332): Homolog of NCBI NO: 21593565 NR Description: cytosolic malate dehydrogenase [Arabidopsis
  misc_feature (1)..(332): Homolog of NCBI NO: 15219721 NR Description: putative malate dehydrogenase; protein id: supported by cDNA: 40467., supported by cDNA: gi_15215691, by cDNA: gi_17473716, supported by cDNA: gi_20148468 [Arabidopsis
  misc_feature (1)..(332): Homolog of NCBI NO: 10798652 NR Description: malate dehydrogenase [Nicotiana tabacum]
  misc_feature (1)..(331): Homolog of NCBI NO: 18202485 NR Description: Malate dehydrogenase, cytoplasmic
  misc_feature (1)..(332): Homolog of NCBI NO: 10334493 NR Description: cytosolic malate dehydrogenase [Cicer arietinum]
  misc_feature (1)..(332): Homolog of NCBI NO: 12229778 NR Description: Malate dehydrogenase, cytoplasmic
  misc_feature (1)..(332): Homolog of NCBI NO: 11133373 NR Description: Malate dehydrogenase, cytoplasmic
  misc_feature (1)..(332): Homolog of NCBI NO: 15982948 NR Description: NAD-dependent malate dehydrogenase [Prunus
  misc_feature (4)..(332): Homolog of NCBI NO: 37589957 NR Description: Malate dehydrogenase, soluble [Mus musculus]

SEQ ID NO: 86879 - protein, 309 aa, Arabidopsis thaliana; identical to SEQ ID NO: 28516
  peptide (1)..(309): Ceres Seq. ID no. 12694557
  misc_feature (134)..(308): Pfam Name: lactate/malate dehydrogenase, alpha/beta Pfam Description: lactate/malate dehydrogenase, alpha/beta
  misc_feature (1)..(309): Homolog of NCBI NO: 15239843 NR Description: cytosolic malate dehydrogenase; protein id: supported by cDNA: 40174., supported by cDNA: gi_18175962, by cDNA: gi_20259604 [Arabidopsis thaliana]
  misc_feature (1)..(309): Homolog of NCBI NO: 21593565 NR Description: cytosolic malate dehydrogenase [Arabidopsis
  misc_feature (1)..(309): Homolog of NCBI NO: 15219721 NR Description: putative malate dehydrogenase; protein id: supported by cDNA: 40467., supported by cDNA: gi_15215691, by cDNA: gi_17473716, supported by cDNA: gi_20148468 [Arabidopsis
  misc_feature (1)..(309): Homolog of NCBI NO: 10798652 NR Description: malate dehydrogenase [Nicotiana tabacum]
  misc_feature (1)..(308): Homolog of NCBI NO: 18202485 NR Description: Malate dehydrogenase, cytoplasmic
  misc_feature (1)..(309): Homolog of NCBI NO: 10334493 NR Description: cytosolic malate dehydrogenase [Cicer arietinum]
  misc_feature (1)..(309): Homolog of NCBI NO: 12229778 NR Description: Malate dehydrogenase, cytoplasmic
  misc_feature (1)..(309): Homolog of NCBI NO: 11133373 NR Description: Malate dehydrogenase, cytoplasmic
  misc_feature (1)..(309): Homolog of NCBI NO: 15982948 NR Description: NAD-dependent malate dehydrogenase [Prunus
  misc_feature (1)..(309): Homolog of NCBI NO: 37589957 NR Description: Malate dehydrogenase, soluble [Mus musculus]

SEQ ID NO: 86880 - protein, 303 aa, Arabidopsis thaliana; identical to SEQ ID NO: 28517
  peptide (1)..(303): Ceres Seq. ID no. 12694558
  misc_feature (128)..(302): Pfam Name: lactate/malate dehydrogenase, alpha/beta Pfam Description: lactate/malate dehydrogenase, alpha/beta
  misc_feature (1)..(303): Homolog of NCBI NO: 15239843 NR Description: cytosolic malate dehydrogenase; protein id: supported by cDNA: 40174., supported by cDNA: gi_18175962, by cDNA: gi_20259604 [Arabidopsis thaliana]
  misc_feature (1)..(303): Homolog of NCBI NO: 21593565 NR Description: cytosolic malate dehydrogenase [Arabidopsis
  misc_feature (1)..(303): Homolog of NCBI NO: 15219721 NR Description: putative malate dehydrogenase; protein id: supported by cDNA: 40467., supported by cDNA: gi_15215691, by cDNA: gi_17473716, supported by cDNA: gi_20148468 [Arabidopsis
  misc_feature (1)..(303): Homolog of NCBI NO: 10798652 NR Description: malate dehydrogenase [Nicotiana tabacum]
  misc_feature (1)..(302): Homolog of NCBI NO: 18202485 NR Description: Malate dehydrogenase, cytoplasmic
  misc_feature (1)..(303): Homolog of NCBI NO: 10334493 NR Description: cytosolic malate dehydrogenase [Cicer arietinum]
  misc_feature (1)..(303): Homolog of NCBI NO: 12229778 NR Description: Malate dehydrogenase, cytoplasmic
  misc_feature (1)..(303): Homolog of NCBI NO: 11133373 NR Description: Malate dehydrogenase, cytoplasmic
  misc_feature (1)..(303): Homolog of NCBI NO: 15982948 NR Description: NAD-dependent malate dehydrogenase [Prunus
  misc_feature (1)..(303): Homolog of NCBI NO: 37589957 NR Description: Malate dehydrogenase, soluble [Mus musculus]

SEQ ID NO: 86881 - DNA, 1575 bp, Arabidopsis thaliana
  misc_feature (1)..(1575): Ceres Seq. ID no. 12694561
  misc_feature: MA Experiment ID: 20000314 Result: Up-regulated in Transcription
  misc_feature: MA Experiment 20000314 PARAMETER Experiment Name: At_14day_Shoots-Roots_Sub_P Parameter: Age (day) Value: 14
  misc_feature: MA Experiment 20000314 PARAMETER Experiment Name: At_14day_Shoots-Roots_Sub_P Parameter: Organism Value: A. thaliana
  misc_feature: MA Experiment 20000314 PARAMETER Experiment Name: At_14day_Shoots-Roots_Sub_P Parameter: Plant Line Value: WS
  misc_feature: MA Experiment 20000314 PARAMETER Experiment Name: At_14day_Shoots-Roots_Sub_P Parameter: Tissue Value: Roots vs. Whole Plant
  misc_feature: MA Experiment ID: 20000352 Result: Down-regulated in Transcription
  misc_feature: MA Experiment 20000352 PARAMETER Experiment Name: At_Drought_Sub_P Parameter: Age (day) Value: 7
  misc_feature: MA Experiment 20000352 PARAMETER Experiment Name: At_Drought_Sub_P Parameter: Organism Value: A. thaliana
  misc_feature: MA Experiment 20000352 PARAMETER Experiment Name: At_Drought_Sub_P Parameter: Plant Line Value: WS
  misc_feature: MA Experiment 20000352 PARAMETER Experiment Name: At_Drought_Sub_P Parameter: Timepoint (hr) Value: 6
  misc_feature: MA Experiment 20000352 PARAMETER Experiment Name: At_Drought_Sub_P Parameter: Tissue Value: Whole Plant
  misc_feature: MA Experiment 20000352 PARAMETER Experiment Name: At_Drought_Sub_P Parameter: Treatment Value: Drought vs. No Drought
atggctgaacaacaactaggagtgctaaaggcactcgatgttgcgaagacgcaactttatcatttcacggcgattgtcatcgccggtatgggtttctttaccgatgcgtacgatcttttttgcgtgtccttggtaacaaagctccttggccgcatctactacttcaatccggagtcagcgaagcctggctcacttccccctcatgttgcggccgctgtcaatggtgtggccctttgtggaaccctttctggtcaactcttcttcggttggctcggtgacaaactcggacggaaaaaagtgtacggtcttactttgatcatgatgatcttatgctctgtcgcttctggcctctcttttggcaacgaagccaagggtgtcatgaccaccctttgcttcttcaggttttggttgggatttggtattggaggtgactacccactttctgccaccatcatgtctgaatacgcaaacaagaagacccgtggggctttcatcgcagctgtcttcgccatgcaaggtgtcggtatcttggctggaggtttcgtggcactcgcagtatcttctatattcgacaaaaagttcccagctccaacatatgcagtaaacagggccctctcaacgcctcctcaagttgattacatttggcgaatcatcgtcatgtttggtgctttacccgcagctttgacttactactggcgtatgaagatgcctgaaactgcccgttacaccgctttggttgccaagaacatcaaacaagccacagccgacatgtccaaggtcttacaaacagatatcgagcttgaggaaagggtggaggatgacgtcaaagaccccagacaaaactatggcttgttctccaaggaattccttagacgccatggacttcatctccttggaactacctccacttggtttttgcttgacattgccttctacagccaaaacttgttccagaaggatattttctcggccatcggatggatcccaaaggcagccaccatgaacgccacccatgaggttttcaggattgctagggctcagactcttatcgccctttgcagtacagtcccaggctactggttcacagttgcgtttattgataccattggaaggtttaagatccaactaaatggatttttcatgatgaccgtgtttatgtttgccattgccttcccttacaaccactggatcaaaccagaaaaccgtatcggatttgtggttatgtactctcttactttcttcttcgccaattttggtccaaatgcaaccacttttattgtccctgctgagatattcccggccaggctaaggtcaacatgtcatggaatatcagccgcggctggtaaggctggagccatcattggagccttcgggttcttatatgcggctcaaaatcaagacaaggctaaggtggatgcaggatacccaccaggtatcggagttaagaactcattgatcgtgcttggtgttcttaacttcatcggtatgctcttcaccttccttgtcccagagcccaagggcaagtccctcgaagaactctctggtgaagctgaagttagccatgacgagaaataa

SEQ ID NO: 86882 - protein, 524 aa, Arabidopsis thaliana
  peptide (1)..(524): Ceres Seq. ID no. 12694562
  misc_feature (23)..(517): Pfam Name: Sugar (and other) transporter Pfam Description: Sugar (and other) transporter
  misc_feature (1)..(524): Homolog of NCBI NO: 15239860 NR Description: inorganic phosphate transporter (dbj|BAA24282.1); id: At5g43370.1 [Arabidopsis thaliana] inorganic phosphate transporter [Arabidopsis thaliana]
  misc_feature (1)..(524): Homolog of NCBI NO: 1523793 NR Description: phosphate transporter [Arabidopsis thaliana]
  misc_feature (1)..(524): Homolog of NCBI NO: 15239848 NR Description: phosphate transporter (gb|AAB17265.1); protein At5g43350.1, supported by cDNA: gi_17979403, supported by cDNA: [Arabidopsis thaliana] >gi|1502428|gb|AAB17265.1| phosphate
  misc_feature (1)..(524): Homolog of NCBI NO: 17979404 NR Description: putative phosphate transporter protein
  misc_feature (1)..(524): Homolog of NCBI NO: 1523798 NR Description: phosphate transporter [Arabidopsis thaliana]
  misc_feature (1)..(519): Homolog of NCBI NO: 15239851 NR Description: inorganic phosphate transporter (dbj|BAA24281.1); id: At5g43360.1 [Arabidopsis thaliana] inorganic phosphate transporter [Arabidopsis thaliana]
  misc_feature (1)..(519): Homolog of NCBI NO: 2149973 NR Description: putative proton/phosphate cotransporter
  misc_feature (5)..(518): Homolog of NCBI NO: 12697484 NR Description: phosphate transporter [Sesbania rostrata]
  misc_feature (4)..(518): Homolog of NCBI NO: 6177892 NR Description: Phospate transpoter [Nicotiana tabacum]
  misc_feature (1)..(518): Homolog of NCBI NO: 8248034 NR Description: inorganic phosphate transporter [Nicotiana
MAEQQLGVLKALDVAKTQLYHFTAIVIAGMGFFTDAYDLFCVSLVTKLLGRIYYFNPESAKPGSLPPHVAAAVNGVALCGTLSGQLFFGWLGDKLGRKKVYGLTLIMMILCSVASGLSFGNEAKGVMTTLCFFRFWLGFGIGGDYPLSATIMSEYANKKTRGAFIAAVFAMQGVGILAGGFVALAVSSIFDKKFPAPTYAVNRALSTPPQVDYIWRIIVMFGALPAALTYYWRMKMPETARYTALVAKNIKQATADMSKVLQTDIELEERVEDDVKDPRQNYGLFSKEFLRRHGLHLLGTTSTWFLLDIAFYSQNLFQKDIFSAIGWIPKAATMNATHEVFRIARAQTLIALCSTVPGYWFTVAFIDTIGRFKIQLNGFFMMTVFMFAIAFPYNHWIKPENRIGFVVMYSLTFFFANFGPNATTFIVPAEIFPARLRSTCHGISAAAGKAGAIIGAFGFLYAAQNQDKAKVDAGYPPGIGVKNSLIVLGVLNFIGMLFTFLVPEPKGKSLEELSGEAEVSHDEK

SEQ ID NO: 86883 - protein, 495 aa, Arabidopsis thaliana
  peptide (1)..(495): Ceres Seq. ID no. 12694563
  misc_feature (1)..(488): Pfam Name: Sugar (and other) transporter Pfam Description: Sugar (and other) transporter
  misc_feature (1)..(495): Homolog of NCBI NO: 15239860 NR Description: inorganic phosphate transporter (dbj|BAA24282.1); id: At5g43370.1 [Arabidopsis thaliana] inorganic phosphate transporter [Arabidopsis thaliana]
  misc_feature (1)..(495): Homolog of NCBI NO: 1523793 NR Description: phosphate transporter [Arabidopsis thaliana]
  misc_feature (1)..(495): Homolog of NCBI NO: 15239848 NR Description: phosphate transporter (gb|AAB17265.1); protein At5g43350.1, supported by cDNA: gi_17979403, supported by cDNA: [Arabidopsis thaliana] >gi|1502428|gb|AAB17265.1| phosphate
  misc_feature (1)..(495): Homolog of NCBI NO: 17979404 NR Description: putative phosphate transporter protein
  misc_feature (1)..(495): Homolog of NCBI NO: 1523798 NR Description: phosphate transporter [Arabidopsis thaliana]
  misc_feature (1)..(490): Homolog of NCBI NO: 15239851 NR Description: inorganic phosphate transporter (dbj|BAA24281.1); id: At5g43360.1 [Arabidopsis thaliana] inorganic phosphate transporter [Arabidopsis thaliana]
  misc_feature (1)..(490): Homolog of NCBI NO: 2149973 NR Description: putative proton/phosphate cotransporter
  misc_feature (1)..(489): Homolog of NCBI NO: 12697484 NR Description: phosphate transporter [Sesbania rostrata]
  misc_feature (1)..(489): Homolog of NCBI NO: 6177892 NR Description: Phospate transpoter [Nicotiana tabacum]
  misc_feature (1)..(489): Homolog of NCBI NO: 8248034 NR Description: inorganic phosphate transporter [Nicotiana
MGFFTDAYDLFCVSLVTKLLGRIYYFNPESAKPGSLPPHVAAAVNGVALCGTLSGQLFFGWLGDKLGRKKVYGLTLIMMILCSVASGLSFGNEAKGVMTTLCFFRFWLGFGIGGDYPLSATIMSEYANKKTRGAFIAAVFAMQGVGILAGGFVALAVSSIFDKKFPAPTYAVNRALSTPPQVDYIWRIIVMFGALPAALTYYWRMKMPETARYTALVAKNIKQATADMSKVLQTDIELEERVEDDVKDPRQNYGLFSKEFLRRHGLHLLGTTSTWFLLDIAFYSQNLFQKDIFSAIGWIPKAATMNATHEVFRIARAQTLIALCSTVPGYWFTVAFIDTIGRFKIQLNGFFMMTVFMFAIAFPYNHWIKPENRIGFVVMYSLTFFFANFGPNATTFIVPAEIFPARLRSTCHGISAAAGKAGAIIGAFGFLYAAQNQDKAKVDAGYPPGIGVKNSLIVLGVLNFIGMLFTFLVPEPKGKSLEELSGEAEVSHDEK

SEQ ID NO: 86884 - protein, 418 aa, Arabidopsis thaliana
  peptide (1)..(418): Ceres Seq. ID no. 12694564
  misc_feature (1)..(411): Pfam Name: Sugar (and other) transporter Pfam Description: Sugar (and other) transporter
  misc_feature (1)..(418): Homolog of NCBI NO: 15239860 NR Description: inorganic phosphate transporter (dbj|BAA24282.1); id: At5g43370.1 [Arabidopsis thaliana] inorganic phosphate transporter [Arabidopsis thaliana]
  misc_feature (1)..(418): Homolog of NCBI NO: 1523793 NR Description: phosphate transporter [Arabidopsis thaliana]
  misc_feature (1)..(418): Homolog of NCBI NO: 15239848 NR Description: phosphate transporter (gb|AAB17265.1); protein At5g43350.1, supported by cDNA: gi_17979403, supported by cDNA: [Arabidopsis thaliana] >gi|1502428|gb|AAB17265.1| phosphate
  misc_feature (1)..(418): Homolog of NCBI NO: 17979404 NR Description: putative phosphate transporter protein
  misc_feature (1)..(418): Homolog of NCBI NO: 1523798 NR Description: phosphate transporter [Arabidopsis thaliana]
  misc_feature (1)..(413): Homolog of NCBI NO: 15239851 NR Description: inorganic phosphate transporter (dbj|BAA24281.1); id: At5g43360.1 [Arabidopsis thaliana] inorganic phosphate transporter [Arabidopsis thaliana]
  misc_feature (1)..(413): Homolog of NCBI NO: 2149973 NR Description: putative proton/phosphate cotransporter
  misc_feature (1)..(412): Homolog of NCBI NO: 12697484 NR Description: phosphate transporter [Sesbania rostrata]
  misc_feature (1)..(412): Homolog of NCBI NO: 6177892 NR Description: Phospate transpoter [Nicotiana tabacum]
  misc_feature (1)..(412): Homolog of NCBI NO: 8248034 NR Description: inorganic phosphate transporter [Nicotiana
MMILCSVASGLSFGNEAKGVMTTLCFFRFWLGFGIGGDYPLSATIMSEYANKKTRGAFIAAVFAMQGVGILAGGFVALAVSSIFDKKFPAPTYAVNRALSTPPQVDYIWRIIVMFGALPAALTYYWRMKMPETARYTALVAKNIKQATADMSKVLQTDIELEERVEDDVKDPRQNYGLFSKEFLRRHGLHLLGTTSTWFLLDIAFYSQNLFQKDIFSAIGWIPKAATMNATHEVFRIARAQTLIALCSTVPGYWFTVAFIDTIGRFKIQLNGFFMMTVFMFAIAFPYNHWIKPENRIGFVVMYSLTFFFANFGPNATTFIVPAEIFPARLRSTCHGISAAAGKAGAIIGAFGFLYAAQNQDKAKVDAGYPPGIGVKNSLIVLGVLNFIGMLFTFLVPEPKGKSLEELSGEAEVSHDEK

SEQ ID NO: 86885 - DNA, 2334 bp, Arabidopsis thaliana
  misc_feature (1)..(2334): Ceres Seq. ID no. 12694610
  misc_feature: MA Experiment ID: 20000173 Result: Up-regulated in Transcription
  misc_feature: MA Experiment 20000173 PARAMETER Experiment Name: At_42deg_Heat_P Parameter: Age (day) Value: 14
  misc_feature: MA Experiment 20000173 PARAMETER Experiment Name: At_42deg_Heat_P Parameter: Organism Value: A. thaliana
  misc_feature: MA Experiment 20000173 PARAMETER Experiment Name: At_42deg_Heat_P Parameter: Plant Line Value: WS
  misc_feature: MA Experiment 20000173 PARAMETER Experiment Name: At_42deg_Heat_P Parameter: Temperature (deg C) Value: 42 vs. 22
  misc_feature: MA Experiment 20000173 PARAMETER Experiment Name: At_42deg_Heat_P Parameter: Timepoint (hr) Value: 6
  misc_feature: MA Experiment 20000173 PARAMETER Experiment Name: At_42deg_Heat_P Parameter: Tissue Value: Aerial
  misc_feature: MA Experiment ID: 20000184 Result: Up-regulated in Transcription
  misc_feature: MA Experiment 20000184 PARAMETER Experiment Name: At_Shoots__P Parameter: Age (day) Value: 7
  misc_feature: MA Experiment 20000184 PARAMETER Experiment Name: At_Shoots__P Parameter: Tissue Value: Shoots vs. Whole Plant
  misc_feature: MA Experiment ID: 20000185 Result: Up-regulated in Transcription
  misc_feature: MA Experiment 20000185 PARAMETER Experiment Name: At_Roots__P Parameter: Age (day) Value: 7 vs. 21
  misc_feature: MA Experiment 20000185 PARAMETER Experiment Name: At_Roots__P Parameter: Organism Value: A. thaliana
  misc_feature: MA Experiment 20000185 PARAMETER Experiment Name: At_Roots__P Parameter: Tissue Value: Roots vs. Whole Plant
  misc_feature: MA Experiment ID: 20000213 Result: Up-regulated in Transcription
  misc_feature: MA Experiment 20000213 PARAMETER Experiment Name: At_4deg_Cold_P Parameter: Timepoint (hr) Value: 2
  misc_feature: MA Experiment ID: 20000234 Result: Up-regulated in Transcription
  misc_feature: MA Experiment 20000234 PARAMETER Experiment Name: At_Siliques_P Parameter: Age (day) Value: 21
  misc_feature: MA Experiment 20000234 PARAMETER Experiment Name: At_Siliques_P Parameter: Organism Value: A. thaliana
  misc_feature: MA Experiment 20000234 PARAMETER Experiment Name: At_Siliques_P Parameter: Plant Line Value: WS
  misc_feature: MA Experiment 20000234 PARAMETER Experiment Name: At_Siliques_P Parameter: Tissue Value: Less Than 5mm Siliques vs. Whole Plant
  misc_feature: MA Experiment ID: 20000264 Result: Up-regulated in Transcription
  misc_feature: MA Experiment 20000264 PARAMETER Experiment Name: At_Open_Flower_P Parameter: Age (day) Value: 21
  misc_feature: MA Experiment 20000264 PARAMETER Experiment Name: At_Open_Flower_P Parameter: Plant Line Value: WS
  misc_feature: MA Experiment 20000264 PARAMETER Experiment Name: At_Open_Flower_P Parameter: Tissue Value: Open Flower vs. Whole Plant
  misc_feature: MA Experiment ID: 20000286 Result: Up-regulated in Transcription
  misc_feature: MA Experiment 20000286 PARAMETER Experiment Name: At_Open_Flower_P Parameter: Age (day) Value: 21
  misc_feature: MA Experiment 20000286 PARAMETER Experiment Name: At_Open_Flower_P Parameter: Plant Line Value: WS
  misc_feature: MA Experiment 20000286 PARAMETER Experiment Name: At_Open_Flower_P Parameter: Tissue Value: Half Open vs. Whole Plant
  misc_feature: MA Experiment ID: 20000438 Result: Up-regulated in Transcription
  misc_feature: MA Experiment 20000438 PARAMETER Experiment Name: At_Shoots__P Parameter: Age (day) Value: 14
  misc_feature: MA Experiment 20000438 PARAMETER Experiment Name: At_Shoots__P Parameter: Tissue Value: Shoots vs. Whole Plant
  misc_feature: MA Experiment ID: 20000439 Result: Up-regulated in Transcription
  misc_feature: MA Experiment 20000439 PARAMETER Experiment Name: At_Roots__P Parameter: Age (day) Value: 14 vs. 21
  misc_feature: MA Experiment 20000439 PARAMETER Experiment Name: At_Roots__P Parameter: Organism Value: A. thaliana
  misc_feature: MA Experiment 20000439 PARAMETER Experiment Name: At_Roots__P Parameter: Tissue Value: Roots vs. Whole Plant
  misc_feature: MA Experiment ID: 20000496 Result: Up-regulated in Transcription
  misc_feature: MA Experiment 20000496 PARAMETER Experiment Name: At_Guard_Cells_P Parameter: Harvest Date Value: 7/19/2002
  misc_feature: MA Experiment 20000496 PARAMETER Experiment Name: At_Guard_Cells_P Parameter: Organism Value: Canola
  misc_feature: MA Experiment 20000496 PARAMETER Experiment Name: At_Guard_Cells_P Parameter: Tissue Value: Guard Cells vs. Leaves
  misc_feature: MA Experiment ID: 20001248 Result: Down-regulated in Transcription
  misc_feature: MA Experiment 20001248 PARAMETER Experiment Name: At_Far-red-induction_P Parameter: Age (day) Value: 7
  misc_feature: MA Experiment 20001248 PARAMETER Experiment Name: At_Far-red-induction_P Parameter: Light Value: Far-red vs. White
  misc_feature: MA Experiment 20001248 PARAMETER Experiment Name: At_Far-red-induction_P Parameter: Organism Value: A. thaliana
  misc_feature: MA Experiment 20001248 PARAMETER Experiment Name: At_Far-red-induction_P Parameter: Plant Line Value: Columbia
  misc_feature: MA Experiment 20001248 PARAMETER Experiment Name: At_Far-red-induction_P Parameter: Timepoint (hr) Value: 4
  misc_feature: MA Experiment 20001248 PARAMETER Experiment Name: At_Far-red-induction_P Parameter: Tissue Value: Whole Plant
  misc_feature: MA Experiment ID: 20001905 Result: Up-regulated in Transcription
  misc_feature: MA Experiment 20001905 PARAMETER Experiment Name: At_Drought_Reproduction_P Parameter: Age (day) Value: 40
  misc_feature: MA Experiment 20001905 PARAMETER Experiment Name: At_Drought_Reproduction_P Parameter: Organism Value: A. thaliana
  misc_feature: MA Experiment 20001905 PARAMETER Experiment Name: At_Drought_Reproduction_P Parameter: Plant Line Value: WS
  misc_feature: MA Experiment 20001905 PARAMETER Experiment Name: At_Drought_Reproduction_P Parameter: Timepoint (day) Value: 10
  misc_feature: MA Experiment 20001905 PARAMETER Experiment Name: At_Drought_Reproduction_P Parameter: Tissue Value: Rosettes
  misc_feature: MA Experiment 20001905 PARAMETER Experiment Name: At_Drought_Reproduction_P Parameter: Treatment Value: Drought vs. No Drought
  misc_feature: MA Experiment ID: 20001906 Result: Up-regulated in Transcription
  misc_feature: MA Experiment 20001906 PARAMETER Experiment Name: At_Drought_Reproduction_P Parameter: Age (day) Value: 35
  misc_feature: MA Experiment 20001906 PARAMETER Experiment Name: At_Drought_Reproduction_P Parameter: Organism Value: A. thaliana
  misc_feature: MA Experiment 20001906 PARAMETER Experiment Name: At_Drought_Reproduction_P Parameter: Plant Line Value: WS
  misc_feature: MA Experiment 20001906 PARAMETER Experiment Name: At_Drought_Reproduction_P Parameter: Timepoint (day) Value: 5
  misc_feature: MA Experiment 20001906 PARAMETER Experiment Name: At_Drought_Reproduction_P Parameter: Tissue Value: Siliques
  misc_feature: MA Experiment 20001906 PARAMETER Experiment Name: At_Drought_Reproduction_P Parameter: Treatment Value: Drought vs. No Drought
  misc_feature: MA Experiment ID: 20001911 Result: Up-regulated in Transcription
  misc_feature: MA Experiment 20001911 PARAMETER Experiment Name: At_Drought_Reproduction_P Parameter: Age (day) Value: 40
  misc_feature: MA Experiment 20001911 PARAMETER Experiment Name: At_Drought_Reproduction_P Parameter: Organism Value: A. thaliana
  misc_feature: MA Experiment 20001911 PARAMETER Experiment Name: At_Drought_Reproduction_P Parameter: Plant Line Value: WS
  misc_feature: MA Experiment 20001911 PARAMETER Experiment Name: At_Drought_Reproduction_P Parameter: Timepoint (day) Value: 10
  misc_feature: MA Experiment 20001911 PARAMETER Experiment Name: At_Drought_Reproduction_P Parameter: Tissue Value: Flowers
  misc_feature: MA Experiment 20001911 PARAMETER Experiment Name: At_Drought_Reproduction_P Parameter: Treatment Value: Drought vs. No Drought
atgggagatggagatgagcaaagtaaagagttaggaggagtttcgtcttcgagtcgtcgttgttcttccggtactgctggtgctgcaaatgcagaagcaagaatgaagtttgctgctgttgatgctataacagaattagtgtggtctcctagcaacggtctaagcttaagatgtgcagatatcagtttcacgggaaaggcaaaattactctctcctaacttctttgatataggactaactaacatggcgattcactcaaatagcacaagtattgaagaccaagaagatcacgtagatgtcgaattgagaaaccgagatcaagtgaaccaagcaatgattggtggttctgttgaggatatgaaacctgaaatggttgaggataaggttgaaaccaatgatgatataaagaatgaagaagcaggatgttccaaaagatcttcagcatgtgaaggtaaaggggactatttgccggagggtgaggctggacctagtggttcctacaggcgtcgtgagaaagcaaaagggaaagagaaagctttatctgatgaaaactttggtggtgatggtgaagatgaggatgaggagagttttggtagtgtagaaagttgcaatagtgcgggtttgctctcaaggggaaagaaaagaccaggctttgaggagcagctgatttttggaagcaaacggctcaaaacgttaaatcaagaatgtttggggtcaacttcaaagctcaagcaagatagttccttcatgaattggatatcaaatatgactaaaggaatctggaaaggtaatgaagaagacaattctccttttgtagctcttaccaccacctcaaatgctaatggtcatggccaagtcaatgccatcgttgaccaacaacaattgagtccatgctgtgtgaaggaaaatagtggatgcagaaacaccggtttccagtcttttttccagtctatatattgtccgaagaaacaaagtcaagatgtcgtcgacatggatttcccgaatgatgttaatgctgctcctttgcaggaacttccctggattcctgaacattgcgacatttccaaaggggatgacttgtcttcatctggtaatgagattggtccagtggctgaacccaacatttcatcaggaaaagttgtatttaatcagacaagcaaaacacagtcttcagagaacaaacgtgaggacaaagagccaaacatctcgttgatgtctcttagtaagtctaagccaaatgaagagccaaaaacatgcggtgaagctgatggaaaggttagtccatgtttaaccaacagaaactctggtcttaaaagtttgtggattagtcggttttcttctaaaggttcgttccctcagaaaaaggcaagtgaaacggctaaagaggccaatgcttcagcctcagacgcagctaaaacccgtgattcacggaaaatgctggcagacaagaatgttataagacccagtatcagctcggtagatgggcccgataaaccggacactgtccttcctatagtttcgtcaatgagaatagagtcttcagaagcaatggcttctttgtttgctagaagattagaagcaatgaaaagcatcatgccctcaggttctttagctgagaatgcagaggaggaacagagggatctaatttgtttctactgcggtaaaaagggtcattgtttacgggattgtttggaagtaactgatactgagctcagagatctagtacagaacataagtgtgcggaatggaagagaagaagcgtcaagtctatgcattagatgttttcagcttagtcactgggctgcaacatgcccgaatgctcccctgtatggttcaggagctgaaggtagagctatgaagaacgctttagcttctacctctggcatgaagctgcccataagtggtttcacagacgtaccaagggcggtctttgatgctgttcaagtgcttcgcctgagccgcacagacgttctcaaatggataaacaccaagaagtctgtatcgggtctcgaagggttcttcttgcggttaaggctcgggaaatgggaagaagggcttggaggaacagggtattatgtagctcgcatagatggggacacagagggacaaagctcaaggagacattcagagaaaagcttaatttcagttaaggttaaaggtgtgacttgccttgttgagtctcagtttatctcaaaccaagactttcttgaggaggagttaaaggcctggtggcagagcgcggggaaaagtgccagaacaagcggctacgacggcatcccgtcggcggaggaacttagtcggaaaattcagcagagaaaaatgttaggcttttag

SEQ ID NO: 86886 - protein, 777 aa, Arabidopsis thaliana
  peptide (1)..(777): Ceres Seq. ID no. 12694611
  misc_feature (645)..(750): Pfam Name: Plus-3 domain Pfam Description: Plus-3 domain
  misc_feature (1)..(249): Homolog of NCBI NO: 15239925 NR Description: unknown protein; protein id: At5g43630.1 thaliana] >gi|10178202|dbj|BAB11626.1| gene_id:K9D7.13~unknown [Arabidopsis thaliana] >gi|28393193|gb|AAO42027.1| unknown
  misc_feature (638)..(777): Homolog of NCBI NO: 34909996 NR Description: P0490D09.22 [Oryza sativa (japonica
MGDGDEQSKELGGVSSSSRRCSSGTAGAANAEARMKFAAVDAITELVWSPSNGLSLRCADISFTGKAKLLSPNFFDIGLTNMAIHSNSTSIEDQEDHVDVELRNRDQVNQAMIGGSVEDMKPEMVEDKVETNDDIKNEEAGCSKRSSACEGKGDYLPEGEAGPSGSYRRREKAKGKEKALSDENFGGDGEDEDEESFGSVESCNSAGLLSRGKKRPGFEEQLIFGSKRLKTLNQECLGSTSKLKQDSSFMNWISNMTKGIWKGNEEDNSPFVALTTTSNANGHGQVNAIVDQQQLSPCCVKENSGCRNTGFQSFFQSIYCPKKQSQDVVDMDFPNDVNAAPLQELPWIPEHCDISKGDDLSSSGNEIGPVAEPNISSGKVVFNQTSKTQSSENKREDKEPNISLMSLSKSKPNEEPKTCGEADGKVSPCLTNRNSGLKSLWISRFSSKGSFPQKKASETAKEANASASDAAKTRDSRKMLADKNVIRPSISSVDGPDKPDTVLPIVSSMRIESSEAMASLFARRLEAMKSIMPSGSLAENAEEEQRDLICFYCGKKGHCLRDCLEVTDTELRDLVQNISVRNGREEASSLCIRCFQLSHWAATCPNAPLYGSGAEGRAMKNALASTSGMKLPISGFTDVPRAVFDAVQVLRLSRTDVLKWINTKKSVSGLEGFFLRLRLGKWEEGLGGTGYYVARIDGDTEGQSSRRHSEKSLISVKVKGVTCLVESQFISNQDFLEEELKAWWQSAGKSARTSGYDGIPSAEELSRKIQQRKMLGF

SEQ ID NO: 86887 - protein, 743 aa, Arabidopsis thaliana
  peptide (1)..(743): Ceres Seq. ID no. 12694612
  misc_feature (611)..(716): Pfam Name: Plus-3 domain Pfam Description: Plus-3 domain
  misc_feature (1)..(215): Homolog of NCBI NO: 15239925 NR Description: unknown protein; protein id: At5g43630.1 thaliana] >gi|10178202|dbj|BAB11626.1| gene_id:K9D7.13~unknown [Arabidopsis thaliana] >gi|28393193|gb|AAO42027.1| unknown
  misc_feature (604)..(743): Homolog of NCBI NO: 34909996 NR Description: P0490D09.22 [Oryza sativa (japonica
MKFAAVDAITELVWSPSNGLSLRCADISFTGKAKLLSPNFFDIGLTNMAIHSNSTSIEDQEDHVDVELRNRDQVNQAMIGGSVEDMKPEMVEDKVETNDDIKNEEAGCSKRSSACEGKGDYLPEGEAGPSGSYRRREKAKGKEKALSDENFGGDGEDEDEESFGSVESCNSAGLLSRGKKRPGFEEQLIFGSKRLKTLNQECLGSTSKLKQDSSFMNWISNMTKGIWKGNEEDNSPFVALTTTSNANGHGQVNAIVDQQQLSPCCVKENSGCRNTGFQSFFQSIYCPKKQSQDVVDMDFPNDVNAAPLQELPWIPEHCDISKGDDLSSSGNEIGPVAEPNISSGKVVFNQTSKTQSSENKREDKEPNISLMSLSKSKPNEEPKTCGEADGKVSPCLTNRNSGLKSLWISRFSSKGSFPQKKASETAKEANASASDAAKTRDSRKMLADKNVIRPSISSVDGPDKPDTVLPIVSSMRIESSEAMASLFARRLEAMKSIMPSGSLAENAEEEQRDLICFYCGKKGHCLRDCLEVTDTELRDLVQNISVRNGREEASSLCIRCFQLSHWAATCPNAPLYGSGAEGRAMKNALASTSGMKLPISGFTDVPRAVFDAVQVLRLSRTDVLKWINTKKSVSGLEGFFLRLRLGKWEEGLGGTGYYVARIDGDTEGQSSRRHSEKSLISVKVKGVTCLVESQFISNQDFLEEELKAWWQSAGKSARTSGYDGIPSAEELSRKIQQRKMLGF

SEQ ID NO: 86888 - protein, 696 aa, Arabidopsis thaliana
  peptide (1)..(696): Ceres Seq. ID no. 12694613
  misc_feature (564)..(669): Pfam Name: Plus-3 domain Pfam Description: Plus-3 domain
  misc_feature (1)..(168): Homolog of NCBI NO: 15239925 NR Description: unknown protein; protein id: At5g43630.1 thaliana] >gi|10178202|dbj|BAB11626.1| gene_id:K9D7.13~unknown [Arabidopsis thaliana] >gi|28393193|gb|AAO42027.1| unknown
  misc_feature (557)..(696): Homolog of NCBI NO: 34909996 NR Description: P0490D09.22 [Oryza sativa (japonica
MAIHSNSTSIEDQEDHVDVELRNRDQVNQAMIGGSVEDMKPEMVEDKVETNDDIKNEEAGCSKRSSACEGKGDYLPEGEAGPSGSYRRREKAKGKEKALSDENFGGDGEDEDEESFGSVESCNSAGLLSRGKKRPGFEEQLIFGSKRLKTLNQECLGSTSKLKQDSSFMNWISNMTKGIWKGNEEDNSPFVALTTTSNANGHGQVNAIVDQQQLSPCCVKENSGCRNTGFQSFFQSIYCPKKQSQDVVDMDFPNDVNAAPLQELPWIPEHCDISKGDDLSSSGNEIGPVAEPNISSGKVVFNQTSKTQSSENKREDKEPNISLMSLSKSKPNEEPKTCGEADGKVSPCLTNRNSGLKSLWISRFSSKGSFPQKKASETAKEANASASDAAKTRDSRKMLADKNVIRPSISSVDGPDKPDTVLPIVSSMRIESSEAMASLFARRLEAMKSIMPSGSLAENAEEEQRDLICFYCGKKGHCLRDCLEVTDTELRDLVQNISVRNGREEASSLCIRCFQLSHWAATCPNAPLYGSGAEGRAMKNALASTSGMKLPISGFTDVPRAVFDAVQVLRLSRTDVLKWINTKKSVSGLEGFFLRLRLGKWEEGLGGTGYYVARIDGDTEGQSSRRHSEKSLISVKVKGVTCLVESQFISNQDFLEEELKAWWQSAGKSARTSGYDGIPSAEELSRKIQQRKMLGF

SEQ ID NO: 86889 - DNA, 1086 bp, Arabidopsis thaliana
  misc_feature (1)..(1086): Ceres Seq. ID no. 12694662
  misc_feature: MA Experiment ID: 108434 Result: Up-regulated in Transcription
  misc_feature: MA Experiment 108434 PARAMETER Experiment Name: At_Root_Tips_cDNA_P Parameter: Tissue Value: Root Tips
  misc_feature: MA Experiment ID: 108461 Result: Up-regulated in Transcription
  misc_feature: MA Experiment 108461 PARAMETER Experiment Name: At_Germinating_Seeds_cDNA_P Parameter: Age (day) Value: 1 vs. 0
  misc_feature: MA Experiment 108461 PARAMETER Experiment Name: At_Germinating_Seeds_cDNA_P Parameter: Tissue Value: Germinating Seeds
  misc_feature: MA Experiment ID: 108462 Result: Up-regulated in Transcription
  misc_feature: MA Experiment 108462 PARAMETER Experiment Name: At_Germinating_Seeds_cDNA_P Parameter: Age (day) Value: 2 vs. 0
  misc_feature: MA Experiment 108462 PARAMETER Experiment Name: At_Germinating_Seeds_cDNA_P Parameter: Tissue Value: Germinating Seeds
  misc_feature: MA Experiment ID: 108464 Result: Up-regulated in Transcription
  misc_feature: MA Experiment 108464 PARAMETER Experiment Name: At_Germinating_Seeds_cDNA_P Parameter: Age (day) Value: 4 vs. 0
  misc_feature: MA Experiment 108464 PARAMETER Experiment Name: At_Germinating_Seeds_cDNA_P Parameter: Tissue Value: Germinating Seeds
  misc_feature: MA Experiment ID: 108501 Result: Down-regulated in Transcription
  misc_feature: MA Experiment 108501 PARAMETER Experiment Name: At_ap2_floral_buds_cDNA_P Parameter: Plant Line Value: ap2 (Ler.)
  misc_feature: MA Experiment 108501 PARAMETER Experiment Name: At_ap2_floral_buds_cDNA_P Parameter: Tissue Value: Closed Flower
  misc_feature: MA Experiment ID: 108572 Result: Up-regulated in Transcription
  misc_feature: MA Experiment 108572 PARAMETER Experiment Name: At_Drought_cDNA_P Parameter: Timepoint (hr) Value: 1
  misc_feature: MA Experiment 108572 PARAMETER Experiment Name: At_Drought_cDNA_P Parameter: Tissue Value: Aerial
  misc_feature: MA Experiment 108572 PARAMETER Experiment Name: At_Drought_cDNA_P Parameter: Treatment Value: Drought vs. No Drought
  misc_feature: MA Experiment ID: 108573 Result: Up-regulated in Transcription
  misc_feature: MA Experiment 108573 PARAMETER Experiment Name: At_Drought_cDNA_P Parameter: Timepoint (hr) Value: 6
  misc_feature: MA Experiment 108573 PARAMETER Experiment Name: At_Drought_cDNA_P Parameter: Tissue Value: Aerial
  misc_feature: MA Experiment 108573 PARAMETER Experiment Name: At_Drought_cDNA_P Parameter: Treatment Value: Drought vs. No Drought
  misc_feature: MA Experiment ID: 108579 Result: Down-regulated in Transcription
  misc_feature: MA Experiment 108579 PARAMETER Experiment Name: At_4deg_Cold_cDNA_P Parameter: Temperature (deg C) Value: 4 vs. 22
  misc_feature: MA Experiment 108579 PARAMETER Experiment Name: At_4deg_Cold_cDNA_P Parameter: Timepoint (hr) Value: 6
  misc_feature: MA Experiment 108579 PARAMETER Experiment Name: At_4deg_Cold_cDNA_P Parameter: Tissue Value: Aerial
  misc_feature: MA Experiment ID: 108595 Result: Down-regulated in Transcription
  misc_feature: MA Experiment 108595 PARAMETER Experiment Name: At_Ler-pi_Ovule_cDNA_P Parameter: Plant Line Value: null
  misc_feature: MA Experiment ID: 108608 Result: Up-regulated in Transcription
  misc_feature: MA Experiment 108608 PARAMETER Experiment Name: At_100uM_ABA_cDNA_P Parameter: Timepoint (hr) Value: 1
  misc_feature: MA Experiment 108608 PARAMETER Experiment Name: At_100uM_ABA_cDNA_P Parameter: Tissue Value: Aerial
  misc_feature: MA Experiment 108608 PARAMETER Experiment Name: At_100uM_ABA_cDNA_P Parameter: Treatment Value: 100uM ABA vs. No Treatment
  misc_feature: MA Experiment ID: 20000166 Result: Up-regulated in Transcription
  misc_feature: MA Experiment 20000166 PARAMETER Experiment Name: At_100uM_ABA_P Parameter: Age (day) Value: 14
  misc_feature: MA Experiment 20000166 PARAMETER Experiment Name: At_100uM_ABA_P Parameter: Organism Value: A. thaliana
  misc_feature: MA Experiment 20000166 PARAMETER Experiment Name: At_100uM_ABA_P Parameter: Plant Line Value: WS
  misc_feature: MA Experiment 20000166 PARAMETER Experiment Name: At_100uM_ABA_P Parameter: Timepoint (hr) Value: 1
  misc_feature: MA Experiment 20000166 PARAMETER Experiment Name: At_100uM_ABA_P Parameter: Tissue Value: Aerial
  misc_feature: MA Experiment 20000166 PARAMETER Experiment Name: At_100uM_ABA_P Parameter: Treatment Value: 100uM ABA vs. No Treatment
  misc_feature: MA Experiment ID: 20000179 Result: Up-regulated in Transcription
  misc_feature: MA Experiment 20000179 PARAMETER Experiment Name: At_Germinating_Seeds_P Parameter: Age (hr) Value: 6 vs. 0
  misc_feature: MA Experiment 20000179 PARAMETER Experiment Name: At_Germinating_Seeds_P Parameter: Tissue Value: Germinating Seeds
  misc_feature: MA Experiment ID: 20000180 Result: Up-regulated in Transcription
  misc_feature: MA Experiment 20000180 PARAMETER Experiment Name: At_Germinating_Seeds_P Parameter: Age (hr) Value: 24 vs. 0
  misc_feature: MA Experiment 20000180 PARAMETER Experiment Name: At_Germinating_Seeds_P Parameter: Tissue Value: Germinating Seeds
  misc_feature: MA Experiment ID: 20000224 Result: Down-regulated in Transcription
  misc_feature: MA Experiment ID: 20000451 Result: Down-regulated in Transcription
  misc_feature: MA Experiment 20000451 PARAMETER Experiment Name: At_CS6879_Shoots-Roots_P Parameter: Age (day) Value: 14
  misc_feature: MA Experiment 20000451 PARAMETER Experiment Name: At_CS6879_Shoots-Roots_P Parameter: Organism Value: A. thaliana
  misc_feature: MA Experiment 20000451 PARAMETER Experiment Name: At_CS6879_Shoots-Roots_P Parameter: Plant Line Value: CS6879 vs. WS
  misc_feature: MA Experiment 20000451 PARAMETER Experiment Name: At_CS6879_Shoots-Roots_P Parameter: Tissue Value: Roots
  misc_feature: MA Experiment ID: 20000452 Result: Down-regulated in Transcription
  misc_feature: MA Experiment 20000452 PARAMETER Experiment Name: At_CS6879_Shoots-Roots_P Parameter: Age (day) Value: 14
  misc_feature: MA Experiment 20000452 PARAMETER Experiment Name: At_CS6879_Shoots-Roots_P Parameter: Organism Value: A. thaliana
  misc_feature: MA Experiment 20000452 PARAMETER Experiment Name: At_CS6879_Shoots-Roots_P Parameter: Plant Line Value: CS6879 vs. WS
  misc_feature: MA Experiment 20000452 PARAMETER Experiment Name: At_CS6879_Shoots-Roots_P Parameter: Tissue Value: Shoots
  misc_feature: MA Experiment ID: 20001557 Result: Down-regulated in Transcription
  misc_feature: MA Experiment 20001557 PARAMETER Experiment Name: At_Drought_Soil_Dry_P Parameter: Age (day) Value: 27
  misc_feature: MA Experiment 20001557 PARAMETER Experiment Name: At_Drought_Soil_Dry_P Parameter: Organism Value: A. thaliana
  misc_feature: MA Experiment 20001557 PARAMETER Experiment Name: At_Drought_Soil_Dry_P Parameter: Plant Line Value: WS
  misc_feature: MA Experiment 20001557 PARAMETER Experiment Name: At_Drought_Soil_Dry_P Parameter: Post Timepoint (hr) Value: 3
  misc_feature: MA Experiment 20001557 PARAMETER Experiment Name: At_Drought_Soil_Dry_P Parameter: Post-Treatment Value: Re-Water vs. No Drought
  misc_feature: MA Experiment 20001557 PARAMETER Experiment Name: At_Drought_Soil_Dry_P Parameter: Timepoint (day) Value: 13
  misc_feature: MA Experiment 20001557 PARAMETER Experiment Name: At_Drought_Soil_Dry_P Parameter: Treatment Value: Drought vs. No Drought
  misc_feature: MA Experiment ID: 20001558 Result: Down-regulated in Transcription
  misc_feature: MA Experiment 20001558 PARAMETER Experiment Name: At_Drought_Soil_Dry_P Parameter: Age (day) Value: 27
  misc_feature: MA Experiment 20001558 PARAMETER Experiment Name: At_Drought_Soil_Dry_P Parameter: Organism Value: A. thaliana
  misc_feature: MA Experiment 20001558 PARAMETER Experiment Name: At_Drought_Soil_Dry_P Parameter: Plant Line Value: WS
  misc_feature: MA Experiment 20001558 PARAMETER Experiment Name: At_Drought_Soil_Dry_P Parameter: Post Timepoint (hr) Value: 6
  misc_feature: MA Experiment 20001558 PARAMETER Experiment Name: At_Drought_Soil_Dry_P Parameter: Post-Treatment Value: Re-Water vs. No Drought
  misc_feature: MA Experiment 20001558 PARAMETER Experiment Name: At_Drought_Soil_Dry_P Parameter: Timepoint (day) Value: 13
  misc_feature: MA Experiment 20001558 PARAMETER Experiment Name: At_Drought_Soil_Dry_P Parameter: Treatment Value: Drought vs. No Drought
ctcatcattttctcgtttgctccatttttttcttctttctgcaaattttattttcccgagaaaatcatcactgagaaaaatgctcgctgtgtttgagaagacggtggcgaatagccctgaagctttacagagtccacactcgtctgagtctgctttcgcgttgaaagatggatctctcgctactcatttcgcttccgtgaatcccaactccgtcacgcttaacttcggatcttctggatttgttgcttactctcttgataatcctgatcctcgtgttcctagattatttgctgtggtggatgatattttctgtctcttccaaggacacattgagaacctaccgtttctgaagcagcagtatggactgaacaaaatcacaaacgaggccatcattgtgattgaggcttacaggacactacgtgatcgaggtccttaccctgtggacaaagttgttagagatttccatggaaagtttgcgtttatactcttcgatagcgtcaagaaaactgtctttgctgctgctgacgccgatgggagtgtgccgttcttctggggaaccgatgctgaagggcaccttgtgttttctgataacaccgagatggtgaagaaaggttgcgccaaatcttatggtcctttccctaaaggttgtttctttacgtcgtcgggtggattgaggagctttgagcacccaaagaacgagttgaagccagtgccgagagtggacagctcaggtgacgtgtgtggtgcaaccttcaaggttgacgctgagactaagagagagggtaccaaaatgcctagagtcgatagctcccaaaattgggccggtcatatctaaaccggaaatcatacacaaatcacaagctcagcatcttctccctcttgtcttgtcccctctctttcgttacatgtttgagttacattgagaaaataatttcaaaccacaatgttctaaacgcgtttatgtacatgtttgaggtgggatttggaaaggatgtcgagttttgtgaaactttggaattacgagactactagacttttgtttctctgtttacgtttcttaaatcaataaataaataagtttttatt

SEQ ID NO: 86890 - protein, 277 aa, Arabidopsis thaliana; identical to SEQ ID NO: 28949
  peptide (1)..(277): Ceres Seq. ID no. 12694663
  misc_feature (27)..(277): Homolog of NCBI NO: 15239993 NR Description: aluminum-induced protein-like; protein id: supported by cDNA: 12484., supported by cDNA: gi_15028024
  misc_feature (27)..(277): Homolog of NCBI NO: 20340249 NR Description: aluminum-induced protein-like protein
  misc_feature (27)..(277): Homolog of NCBI NO: 15228883 NR Description: unknown protein; protein id: At3g22850.1, by cDNA: gi_18252900 [Arabidopsis thaliana] contains similarity to unknown
  misc_feature (26)..(276): Homolog of NCBI NO: 30017570 NR Description: unknown protein [Oryza sativa (japonica
  misc_feature (27)..(274): Homolog of NCBI NO: 18400774 NR Description: expressed protein; protein id: At3g15450.1, by cDNA: gi_14335087 [Arabidopsis thaliana] unknown protein [Arabidopsis thaliana]
  misc_feature (27)..(274): Homolog of NCBI NO: 18416995 NR Description: putative protein; protein id: At4g27450.1, by cDNA: 35207., supported by cDNA: gi_14030722, supported by gi_15028056, supported by cDNA: gi_20259058 [Arabidopsis

SEQ ID NO: 86891 - protein, 251 aa, Arabidopsis thaliana; identical to SEQ ID NO: 28950
  peptide (1)..(251): Ceres Seq. ID no. 12694664
  misc_feature (1)..(251): Homolog of NCBI NO: 15239993 NR Description: aluminum-induced protein-like; protein id: supported by cDNA: 12484., supported by cDNA: gi_15028024
  misc_feature (1)..(251): Homolog of NCBI NO: 20340249 NR Description: aluminum-induced protein-like protein
  misc_feature (1)..(251): Homolog of NCBI NO: 15228883 NR Description: unknown protein; protein id: At3g22850.1, by cDNA: gi_18252900 [Arabidopsis thaliana] contains similarity to unknown
  misc_feature (1)..(250): Homolog of NCBI NO: 30017570 NR Description: unknown protein [Oryza sativa (japonica
  misc_feature (1)..(248): Homolog of NCBI NO: 18400774 NR Description: expressed protein; protein id: At3g15450.1, by cDNA: gi_14335087 [Arabidopsis thaliana] unknown protein [Arabidopsis thaliana]
  misc_feature (1)..(248): Homolog of NCBI NO: 18416995 NR Description: putative protein; protein id: At4g27450.1, by cDNA: 35207., supported by cDNA: gi_14030722, supported by gi_15028056, supported by cDNA: gi_20259058 [Arabidopsis

SEQ ID NO: 86892 - DNA, 758 bp, Arabidopsis thaliana
  misc_feature (1)..(758): Ceres Seq. ID no. 12694665
  misc_feature: MA Experiment ID: 108434 Result: Down-regulated in Transcription
  misc_feature: MA Experiment 108434 PARAMETER Experiment Name: At_Root_Tips_cDNA_P Parameter: Tissue Value: Root Tips
  misc_feature: MA Experiment ID: 108462 Result: Up-regulated in Transcription
  misc_feature: MA Experiment 108462 PARAMETER Experiment Name: At_Germinating_Seeds_cDNA_P Parameter: Age (day) Value: 2 vs. 0
  misc_feature: MA Experiment 108462 PARAMETER Experiment Name: At_Germinating_Seeds_cDNA_P Parameter: Tissue Value: Germinating Seeds
  misc_feature: MA Experiment ID: 108463 Result: Up-regulated in Transcription
  misc_feature: MA Experiment 108463 PARAMETER Experiment Name: At_Germinating_Seeds_cDNA_P Parameter: Age (day) Value: 3 vs. 0
  misc_feature: MA Experiment 108463 PARAMETER Experiment Name: At_Germinating_Seeds_cDNA_P Parameter: Tissue Value: Germinating Seeds
  misc_feature: MA Experiment ID: 108464 Result: Up-regulated in Transcription
  misc_feature: MA Experiment 108464 PARAMETER Experiment Name: At_Germinating_Seeds_cDNA_P Parameter: Age (day) Value: 4 vs. 0
  misc_feature: MA Experiment 108464 PARAMETER Experiment Name: At_Germinating_Seeds_cDNA_P Parameter: Tissue Value: Germinating Seeds
  misc_feature: MA Experiment ID: 108489 Result: Down-regulated in Transcription
  misc_feature: MA Experiment ID: 108573 Result: Up-regulated in Transcription
  misc_feature: MA Experiment 108573 PARAMETER Experiment Name: At_Drought_cDNA_P Parameter: Timepoint (hr) Value: 6
  misc_feature: MA Experiment 108573 PARAMETER Experiment Name: At_Drought_cDNA_P Parameter: Tissue Value: Aerial
  misc_feature: MA Experiment 108573 PARAMETER Experiment Name: At_Drought_cDNA_P Parameter: Treatment Value: Drought vs. No Drought
  misc_feature: MA Experiment ID: 108576 Result: Up-regulated in Transcription
  misc_feature: MA Experiment 108576 PARAMETER Experiment Name: At_42deg_Heat_cDNA_P Parameter: Temperature (deg C) Value: 42 vs. 22
  misc_feature: MA Experiment 108576 PARAMETER Experiment Name: At_42deg_Heat_cDNA_P Parameter: Timepoint (hr) Value: 1
  misc_feature: MA Experiment 108576 PARAMETER Experiment Name: At_42deg_Heat_cDNA_P Parameter: Tissue Value: Aerial
  misc_feature: MA Experiment ID: 108577 Result: Up-regulated in Transcription
  misc_feature: MA Experiment 108577 PARAMETER Experiment Name: At_42deg_Heat_cDNA_P Parameter: Temperature (deg C) Value: 42 vs. 22
  misc_feature: MA Experiment 108577 PARAMETER Experiment Name: At_42deg_Heat_cDNA_P Parameter: Timepoint (hr) Value: 6
  misc_feature: MA Experiment 108577 PARAMETER Experiment Name: At_42deg_Heat_cDNA_P Parameter: Tissue Value: Aerial
  misc_feature: MA Experiment ID: 108595 Result: Down-regulated in Transcription
  misc_feature: MA Experiment 108595 PARAMETER Experiment Name: At_Ler-pi_Ovule_cDNA_P Parameter: Plant Line Value: null
  misc_feature: MA Experiment ID: 108605 Result: Up-regulated in Transcription
  misc_feature: MA Experiment 108605 PARAMETER Experiment Name: At_100uM_ABA_cDNA_P Parameter: Timepoint (hr) Value: 6
  misc_feature: MA Experiment 108605 PARAMETER Experiment Name: At_100uM_ABA_cDNA_P Parameter: Tissue Value: Aerial
  misc_feature: MA Experiment 108605 PARAMETER Experiment Name: At_100uM_ABA_cDNA_P Parameter: Treatment Value: 100uM ABA vs. No Treatment
  misc_feature: MA Experiment ID: 108607 Result: Up-regulated in Transcription
  misc_feature: MA Experiment 108607 PARAMETER Experiment Name: At_100uM_ABA_cDNA_P Parameter: Timepoint (hr) Value: 4
  misc_feature: MA Experiment 108607 PARAMETER Experiment Name: At_100uM_ABA_cDNA_P Parameter: Tissue Value: Aerial
  misc_feature: MA Experiment 108607 PARAMETER Experiment Name: At_100uM_ABA_cDNA_P Parameter: Treatment Value: 100uM ABA vs. No Treatment
  misc_feature: MA Experiment ID: 20000089 Result: Down-regulated in Transcription
  misc_feature: MA Experiment ID: 20000166 Result: Up-regulated in Transcription
  misc_feature: MA Experiment 20000166 PARAMETER Experiment Name: At_100uM_ABA_P Parameter: Age (day) Value: 14
  misc_feature: MA Experiment 20000166 PARAMETER Experiment Name: At_100uM_ABA_P Parameter: Organism Value: A. thaliana
  misc_feature: MA Experiment 20000166 PARAMETER Experiment Name: At_100uM_ABA_P Parameter: Plant Line Value: WS
  misc_feature: MA Experiment 20000166 PARAMETER Experiment Name: At_100uM_ABA_P Parameter: Timepoint (hr) Value: 1
  misc_feature: MA Experiment 20000166 PARAMETER Experiment Name: At_100uM_ABA_P Parameter: Tissue Value: Aerial
  misc_feature: MA Experiment 20000166 PARAMETER Experiment Name: At_100uM_ABA_P Parameter: Treatment Value: 100uM ABA vs. No Treatment
  misc_feature: MA Experiment ID: 20000169 Result: Up-regulated in Transcription
  misc_feature: MA Experiment 20000169 PARAMETER Experiment Name: At_100uM_ABA_P Parameter: Age (day) Value: 14
  misc_feature: MA Experiment 20000169 PARAMETER Experiment Name: At_100uM_ABA_P Parameter: Organism Value: A. thaliana
  misc_feature: MA Experiment 20000169 PARAMETER Experiment Name: At_100uM_ABA_P Parameter: Plant Line Value: WS
  misc_feature: MA Experiment 20000169 PARAMETER Experiment Name: At_100uM_ABA_P Parameter: Timepoint (hr) Value: 6
  misc_feature: MA Experiment 20000169 PARAMETER Experiment Name: At_100uM_ABA_P Parameter: Tissue Value: Aerial
  misc_feature: MA Experiment 20000169 PARAMETER Experiment Name: At_100uM_ABA_P Parameter: Treatment Value: 100uM ABA vs. No Treatment
  misc_feature: MA Experiment ID: 20000171 Result: Up-regulated in Transcription
  misc_feature: MA Experiment 20000171 PARAMETER Experiment Name: At_42deg_Heat_P Parameter: Age (day) Value: 14
  misc_feature: MA Experiment 20000171 PARAMETER Experiment Name: At_42deg_Heat_P Parameter: Organism Value: A. thaliana
  misc_feature: MA Experiment 20000171 PARAMETER Experiment Name: At_42deg_Heat_P Parameter: Plant Line Value: WS
  misc_feature: MA Experiment 20000171 PARAMETER Experiment Name: At_42deg_Heat_P Parameter: Temperature (deg C) Value: 42 vs. 22
  misc_feature: MA Experiment 20000171 PARAMETER Experiment Name: At_42deg_Heat_P Parameter: Timepoint (hr) Value: 1
  misc_feature: MA Experiment 20000171 PARAMETER Experiment Name: At_42deg_Heat_P Parameter: Tissue Value: Aerial
  misc_feature: MA Experiment ID: 20000173 Result: Up-regulated in Transcription
  misc_feature: MA Experiment 20000173 PARAMETER Experiment Name: At_42deg_Heat_P Parameter: Age (day) Value: 14
  misc_feature: MA Experiment 20000173 PARAMETER Experiment Name: At_42deg_Heat_P Parameter: Organism Value: A. thaliana
  misc_feature: MA Experiment 20000173 PARAMETER Experiment Name: At_42deg_Heat_P Parameter: Plant Line Value: WS
  misc_feature: MA Experiment 20000173 PARAMETER Experiment Name: At_42deg_Heat_P Parameter: Temperature (deg C) Value: 42 vs. 22
  misc_feature: MA Experiment 20000173 PARAMETER Experiment Name: At_42deg_Heat_P Parameter: Timepoint (hr) Value: 6
  misc_feature: MA Experiment 20000173 PARAMETER Experiment Name: At_42deg_Heat_P Parameter: Tissue Value: Aerial
  misc_feature: MA Experiment ID: 20000267 Result: Up-regulated in Transcription
  misc_feature: MA Experiment 20000267 PARAMETER Experiment Name: At_Drought_P Parameter: Age (day) Value: 7
  misc_feature: MA Experiment 20000267 PARAMETER Experiment Name: At_Drought_P Parameter: Organism Value: A. thaliana
  misc_feature: MA Experiment 20000267 PARAMETER Experiment Name: At_Drought_P Parameter: Plant Line Value: WS
  misc_feature: MA Experiment 20000267 PARAMETER Experiment Name: At_Drought_P Parameter: Timepoint (hr) Value: 6
  misc_feature: MA Experiment 20000267 PARAMETER Experiment Name: At_Drought_P Parameter: Tissue Value: Whole Plant
  misc_feature: MA Experiment 20000267 PARAMETER Experiment Name: At_Drought_P Parameter: Treatment Value: Drought vs. No Drought
  misc_feature: MA Experiment ID: 20000437 Result: Up-regulated in Transcription
  misc_feature: MA Experiment 20000437 PARAMETER Experiment Name: At_Drought_P Parameter: Age (day) Value: 8
  misc_feature: MA Experiment 20000437 PARAMETER Experiment Name: At_Drought_P Parameter: Organism Value: A. thaliana
  misc_feature: MA Experiment 20000437 PARAMETER Experiment Name: At_Drought_P Parameter: Plant Line Value: WS
  misc_feature: MA Experiment 20000437 PARAMETER Experiment Name: At_Drought_P Parameter: Timepoint (hr) Value: 24
  misc_feature: MA Experiment 20000437 PARAMETER Experiment Name: At_Drought_P Parameter: Tissue Value: Whole Plant
  misc_feature: MA Experiment 20000437 PARAMETER Experiment Name: At_Drought_P Parameter: Treatment Value: Drought vs. No Drought
  misc_feature: MA Experiment ID: 20000438 Result: Up-regulated in Transcription
  misc_feature: MA Experiment 20000438 PARAMETER Experiment Name: At_Shoots__P Parameter: Age (day) Value: 14
  misc_feature: MA Experiment 20000438 PARAMETER Experiment Name: At_Shoots__P Parameter: Tissue Value: Shoots vs. Whole Plant
  misc_feature: MA Experiment ID: 20000453 Result: Up-regulated in Transcription
  misc_feature: MA Experiment 20000453 PARAMETER Experiment Name: At_100uM_ABA_P Parameter: Age (day) Value: 15
  misc_feature: MA Experiment 20000453 PARAMETER Experiment Name: At_100uM_ABA_P Parameter: Organism Value: A. thaliana
  misc_feature: MA Experiment 20000453 PARAMETER Experiment Name: At_100uM_ABA_P Parameter: Plant Line Value: WS
  misc_feature: MA Experiment 20000453 PARAMETER Experiment Name: At_100uM_ABA_P Parameter: Timepoint (hr) Value: 24
  misc_feature: MA Experiment 20000453 PARAMETER Experiment Name: At_100uM_ABA_P Parameter: Tissue Value: Aerial
  misc_feature: MA Experiment 20000453 PARAMETER Experiment Name: At_100uM_ABA_P Parameter: Treatment Value: 100uM ABA vs. No Treatment
  misc_feature: MA Experiment ID: 20000573 Result: Down-regulated in Transcription
  misc_feature: MA Experiment 20000573 PARAMETER Experiment Name: At_100uM_ABA_Mutants__P Parameter: Organism Value: A. thaliana
  misc_feature: MA Experiment 20000573 PARAMETER Experiment Name: At_100uM_ABA_Mutants__P Parameter: Plant Line Value: CS22 vs. Ler wt
  misc_feature: MA Experiment 20000573 PARAMETER Experiment Name: At_100uM_ABA_Mutants__P Parameter: Timepoint (hr) Value: N/A
  misc_feature: MA Experiment 20000573 PARAMETER Experiment Name: At_100uM_ABA_Mutants__P Parameter: Tissue Value: Whole Plant
  misc_feature: MA Experiment 20000573 PARAMETER Experiment Name: At_100uM_ABA_Mutants__P Parameter: Treatment Value: None
  misc_feature: MA Experiment ID: 20000574 Result: Down-regulated in Transcription
  misc_feature: MA Experiment 20000574 PARAMETER Experiment Name: At_100uM_ABA_Mutants__P Parameter: Organism Value: A. thaliana
  misc_feature: MA Experiment 20000574 PARAMETER Experiment Name: At_100uM_ABA_Mutants__P Parameter: Plant Line Value: CS23 vs. Ler wt
  misc_feature: MA Experiment 20000574 PARAMETER Experiment Name: At_100uM_ABA_Mutants__P Parameter: Timepoint (hr) Value: N/A
  misc_feature: MA Experiment 20000574 PARAMETER Experiment Name: At_100uM_ABA_Mutants__P Parameter: Tissue Value: Whole Plant
  misc_feature: MA Experiment 20000574 PARAMETER Experiment Name: At_100uM_ABA_Mutants__P Parameter: Treatment Value: None
  misc_feature: MA Experiment ID: 20001248 Result: Down-regulated in Transcription
  misc_feature: MA Experiment 20001248 PARAMETER Experiment Name: At_Far-red-induction_P Parameter: Age (day) Value: 7
  misc_feature: MA Experiment 20001248 PARAMETER Experiment Name: At_Far-red-induction_P Parameter: Light Value: Far-red vs. White
  misc_feature: MA Experiment 20001248 PARAMETER Experiment Name: At_Far-red-induction_P Parameter: Organism Value: A. thaliana
  misc_feature: MA Experiment 20001248 PARAMETER Experiment Name: At_Far-red-induction_P Parameter: Plant Line Value: Columbia
  misc_feature: MA Experiment 20001248 PARAMETER Experiment Name: At_Far-red-induction_P Parameter: Timepoint (hr) Value: 4
  misc_feature: MA Experiment 20001248 PARAMETER Experiment Name: At_Far-red-induction_P Parameter: Tissue Value: Whole Plant
  misc_feature: MA Experiment ID: 20001458 Result: Down-regulated in Transcription
  misc_feature: MA Experiment 20001458 PARAMETER Experiment Name: At_50mM_NH4NO3_L-to-H_P Parameter: Age (day) Value: Undefined
  misc_feature: MA Experiment 20001458 PARAMETER Experiment Name: At_50mM_NH4NO3_L-to-H_P Parameter: Organism Value: Undefined
  misc_feature: MA Experiment 20001458 PARAMETER Experiment Name: At_50mM_NH4NO3_L-to-H_P Parameter: Plant Line Value: Undefined
  misc_feature: MA Experiment 20001458 PARAMETER Experiment Name: At_50mM_NH4NO3_L-to-H_P Parameter: Timepoint (hr) Value: 2
  misc_feature: MA Experiment 20001458 PARAMETER Experiment Name: At_50mM_NH4NO3_L-to-H_P Parameter: Tissue Value: Siliques
  misc_feature: MA Experiment 20001458 PARAMETER Experiment Name: At_50mM_NH4NO3_L-to-H_P Parameter: Treatment Value: 50mM NH4NO3 vs. 100mM Manitol
  misc_feature: MA Experiment ID: 20001554 Result: Up-regulated in Transcription
  misc_feature: MA Experiment 20001554 PARAMETER Experiment Name: At_Drought_Soil_Dry_P Parameter: Age (day) Value: 21
  misc_feature: MA Experiment 20001554 PARAMETER Experiment Name: At_Drought_Soil_Dry_P Parameter: Organism Value: A. thaliana
  misc_feature: MA Experiment 20001554 PARAMETER Experiment Name: At_Drought_Soil_Dry_P Parameter: Plant Line Value: WS
  misc_feature: MA Experiment 20001554 PARAMETER Experiment Name: At_Drought_Soil_Dry_P Parameter: Post Timepoint (hr) Value: None
  misc_feature: MA Experiment 20001554 PARAMETER Experiment Name: At_Drought_Soil_Dry_P Parameter: Post-Treatment Value: None
  misc_feature: MA Experiment 20001554 PARAMETER Experiment Name: At_Drought_Soil_Dry_P Parameter: Timepoint (day) Value: 7
  misc_feature: MA Experiment 20001554 PARAMETER Experiment Name: At_Drought_Soil_Dry_P Parameter: Treatment Value: Drought vs. No Drought
  misc_feature: MA Experiment ID: 20001555 Result: Up-regulated in Transcription
  misc_feature: MA Experiment 20001555 PARAMETER Experiment Name: At_Drought_Soil_Dry_P Parameter: Age (day) Value: 24
  misc_feature: MA Experiment 20001555 PARAMETER Experiment Name: At_Drought_Soil_Dry_P Parameter: Organism Value: A. thaliana
  misc_feature: MA Experiment 20001555 PARAMETER Experiment Name: At_Drought_Soil_Dry_P Parameter: Plant Line Value: WS
  misc_feature: MA Experiment 20001555 PARAMETER Experiment Name: At_Drought_Soil_Dry_P Parameter: Post Timepoint (hr) Value: None
  misc_feature: MA Experiment 20001555 PARAMETER Experiment Name: At_Drought_Soil_Dry_P Parameter: Post-Treatment Value: None
  misc_feature: MA Experiment 20001555 PARAMETER Experiment Name: At_Drought_Soil_Dry_P Parameter: Timepoint (day) Value: 10
  misc_feature: MA Experiment 20001555 PARAMETER Experiment Name: At_Drought_Soil_Dry_P Parameter: Treatment Value: Drought vs. No Drought
  misc_feature: MA Experiment ID: 20001557 Result: Down-regulated in Transcription
  misc_feature: MA Experiment 20001557 PARAMETER Experiment Name: At_Drought_Soil_Dry_P Parameter: Age (day) Value: 27
  misc_feature: MA Experiment 20001557 PARAMETER Experiment Name: At_Drought_Soil_Dry_P Parameter: Organism Value: A. thaliana
  misc_feature: MA Experiment 20001557 PARAMETER Experiment Name: At_Drought_Soil_Dry_P Parameter: Plant Line Value: WS
  misc_feature: MA Experiment 20001557 PARAMETER Experiment Name: At_Drought_Soil_Dry_P Parameter: Post Timepoint (hr) Value: 3
  misc_feature: MA Experiment 20001557 PARAMETER Experiment Name: At_Drought_Soil_Dry_P Parameter: Post-Treatment Value: Re-Water vs. No Drought
  misc_feature: MA Experiment 20001557 PARAMETER Experiment Name: At_Drought_Soil_Dry_P Parameter: Timepoint (day) Value: 13
  misc_feature: MA Experiment 20001557 PARAMETER Experiment Name: At_Drought_Soil_Dry_P Parameter: Treatment Value: Drought vs. No Drought
  misc_feature: MA Experiment ID: 20001558 Result: Down-regulated in Transcription
  misc_feature: MA Experiment 20001558 PARAMETER Experiment Name: At_Drought_Soil_Dry_P Parameter: Age (day) Value: 27
  misc_feature: MA Experiment 20001558 PARAMETER Experiment Name: At_Drought_Soil_Dry_P Parameter: Organism Value: A. thaliana
  misc_feature: MA Experiment 20001558 PARAMETER Experiment Name: At_Drought_Soil_Dry_P Parameter: Plant Line Value: WS
  misc_feature: MA Experiment 20001558 PARAMETER Experiment Name: At_Drought_Soil_Dry_P Parameter: Post Timepoint (hr) Value: 6
  misc_feature: MA Experiment 20001558 PARAMETER Experiment Name: At_Drought_Soil_Dry_P Parameter: Post-Treatment Value: Re-Water vs. No Drought
  misc_feature: MA Experiment 20001558 PARAMETER Experiment Name: At_Drought_Soil_Dry_P Parameter: Timepoint (day) Value: 13
  misc_feature: MA Experiment 20001558 PARAMETER Experiment Name: At_Drought_Soil_Dry_P Parameter: Treatment Value: Drought vs. No Drought
  misc_feature: MA Experiment ID: 20001560 Result: Down-regulated in Transcription
  misc_feature: MA Experiment 20001560 PARAMETER Experiment Name: At_Drought_Soil_Dry_P Parameter: Age (day) Value: 28
  misc_feature: MA Experiment 20001560 PARAMETER Experiment Name: At_Drought_Soil_Dry_P Parameter: Organism Value: A. thaliana
  misc_feature: MA Experiment 20001560 PARAMETER Experiment Name: At_Drought_Soil_Dry_P Parameter: Plant Line Value: WS
  misc_feature: MA Experiment 20001560 PARAMETER Experiment Name: At_Drought_Soil_Dry_P Parameter: Post Timepoint (hr) Value: None
  misc_feature: MA Experiment 20001560 PARAMETER Experiment Name: At_Drought_Soil_Dry_P Parameter: Post-Treatment Value: None
  misc_feature: MA Experiment 20001560 PARAMETER Experiment Name: At_Drought_Soil_Dry_P Parameter: Timepoint (day) Value: 14
  misc_feature: MA Experiment 20001560 PARAMETER Experiment Name: At_Drought_Soil_Dry_P Parameter: Treatment Value: Drought vs. No Drought
  misc_feature: MA Experiment ID: 20001906 Result: Up-regulated in Transcription
  misc_feature: MA Experiment 20001906 PARAMETER Experiment Name: At_Drought_Reproduction_P Parameter: Age (day) Value: 35
  misc_feature: MA Experiment 20001906 PARAMETER Experiment Name: At_Drought_Reproduction_P Parameter: Organism Value: A. thaliana
  misc_feature: MA Experiment 20001906 PARAMETER Experiment Name: At_Drought_Reproduction_P Parameter: Plant Line Value: WS
  misc_feature: MA Experiment 20001906 PARAMETER Experiment Name: At_Drought_Reproduction_P Parameter: Timepoint (day) Value: 5
  misc_feature: MA Experiment 20001906 PARAMETER Experiment Name: At_Drought_Reproduction_P Parameter: Tissue Value: Siliques
  misc_feature: MA Experiment 20001906 PARAMETER Experiment Name: At_Drought_Reproduction_P Parameter: Treatment Value: Drought vs. No Drought
  misc_feature: MA Experiment ID: 20001911 Result: Up-regulated in Transcription
  misc_feature: MA Experiment 20001911 PARAMETER Experiment Name: At_Drought_Reproduction_P Parameter: Age (day) Value: 40
  misc_feature: MA Experiment 20001911 PARAMETER Experiment Name: At_Drought_Reproduction_P Parameter: Organism Value: A. thaliana
  misc_feature: MA Experiment 20001911 PARAMETER Experiment Name: At_Drought_Reproduction_P Parameter: Plant Line Value: WS
  misc_feature: MA Experiment 20001911 PARAMETER Experiment Name: At_Drought_Reproduction_P Parameter: Timepoint (day) Value: 10
  misc_feature: MA Experiment 20001911 PARAMETER Experiment Name: At_Drought_Reproduction_P Parameter: Tissue Value: Flowers
  misc_feature: MA Experiment 20001911 PARAMETER Experiment Name: At_Drought_Reproduction_P Parameter: Treatment Value: Drought vs. No Drought
gaaatcaaaaaagcatttacacaacgaagatcattaatggctctcgaggcatggtttatggatgatagcaatgaggaccagagacttcctcatcatcgtaacccgaaagaactcgtctcgttggattacttggcagagttgggagtgttgtactggaagttgaaccctgagaactacgagaatgattctgaacttagcaagattagagaagacaggggttacgattacatggatttgctggatctgtgtcccgagaaagtcagcaactacgaagaaaagctgaagaactttttcacagaacacattcacaaggacgaagagattcggtactgcctagcaggaagtggctactttgatgttagggacaaggatgatcgttggatccgtatctggatgcaacctggcgatctcattgtccttcctgccggaatctaccaccggttcacactcgacgccagcaactacatcaagctaatgaggctgttcgtgggggaaccggtttggacaccatataaccggccacaggaagaacatcctgttaggaaaaagtatatccacggcttaacctacaagtttggagaaaccgttaaagcacattaacaatattaatatatgcttgttgtgtaatttgtatgtattgtttactctttagtcttaagcagtaaaataaaaacagcggctccttctggatagttgttcttgtaacatacttttgcgatgtatgcttttatacataaaaaaaatagtgtgtatttatc

SEQ ID NO: 86893 - protein, 199 aa, Arabidopsis thaliana
  peptide (1)..(199): Ceres Seq. ID no. 12694666
  misc_feature (16)..(170): Pfam Name: ARD/ARD' family Pfam Description: ARD/ARD' family
  misc_feature (13)..(199): Homolog of NCBI NO: 18422379 NR Description: putative protein; protein id: At5g43850.1, by cDNA: 26596. [Arabidopsis thaliana]
  misc_feature (15)..(199): Homolog of NCBI NO: 10177955 NR Description: gene_id:MQD19.21~pir||T02918~similar to unknown
  misc_feature (13)..(199): Homolog of NCBI NO: 21554849 NR Description: submergence induced protein 2A [Arabidopsis
  misc_feature (15)..(185): Homolog of NCBI NO: 18414289 NR Description: Expressed protein; protein id: At4g14710.1, by cDNA: 2738., supported by cDNA: gi_18087552 [Arabidopsis >gi|18087553|gb|AAL58908.1|AF462818_1 AT4g14710/dl3395c
  misc_feature (15)..(198): Homolog of NCBI NO: 7489559 NR Description: probable submergence induced, nickel-binding
  misc_feature (15)..(185): Homolog of NCBI NO: 18414293 NR Description: Expressed protein; protein id: At4g14716.1, by cDNA: 16319. [Arabidopsis thaliana] unknown protein [Arabidopsis thaliana]
  misc_feature (15)..(198): Homolog of NCBI NO: 14522834 NR Description: iron-deficiency induced gene [Hordeum vulgare]
  misc_feature (15)..(194): Homolog of NCBI NO: 7489558 NR Description: probable submergence induced protein 2 - rice
  misc_feature (15)..(194): Homolog of NCBI NO: 37534408 NR Description: putative zinc finger protein ID1 [Oryza sativa
  misc_feature (15)..(198): Homolog of NCBI NO: 34902616 NR Description: Putative probable submergence induced,
EIKKAFTQRRSLMALEAWFMDDSNEDQRLPHHRNPKELVSLDYLAELGVLYWKLNPENYENDSELSKIREDRGYDYMDLLDLCPEKVSNYEEKLKNFFTEHIHKDEEIRYCLAGSGYFDVRDKDDRWIRIWMQPGDLIVLPAGIYHRFTLDASNYIKLMRLFVGEPVWTPYNRPQEEHPVRKKYIHGLTYKFGETVKAH

SEQ ID NO: 86894 - protein, 187 aa, Arabidopsis thaliana; identical to SEQ ID NO: 36180
  peptide (1)..(187): Ceres Seq. ID no. 12694667
  misc_feature (4)..(158): Pfam Name: ARD/ARD' family Pfam Description: ARD/ARD' family
  misc_feature (1)..(187): Homolog of NCBI NO: 18422379 NR Description: putative protein; protein id: At5g43850.1, by cDNA: 26596. [Arabidopsis thaliana]
  misc_feature (3)..(187): Homolog of NCBI NO: 10177955 NR Description: gene_id:MQD19.21~pir||T02918~similar to unknown
  misc_feature (1)..(187): Homolog of NCBI NO: 21554849 NR Description: submergence induced protein 2A [Arabidopsis
  misc_feature (3)..(173): Homolog of NCBI NO: 18414289 NR Description: Expressed protein; protein id: At4g14710.1, by cDNA: 2738., supported by cDNA: gi_18087552 [Arabidopsis >gi|18087553|gb|AAL58908.1|AF462818_1 AT4g14710/dl3395c
  misc_feature (3)..(186): Homolog of NCBI NO: 7489559 NR Description: probable submergence induced, nickel-binding
  misc_feature (3)..(173): Homolog of NCBI NO: 18414293 NR Description: Expressed protein; protein id: At4g14716.1, by cDNA: 16319. [Arabidopsis thaliana] unknown protein [Arabidopsis thaliana]
  misc_feature (3)..(186): Homolog of NCBI NO: 14522834 NR Description: iron-deficiency induced gene [Hordeum vulgare]
  misc_feature (3)..(182): Homolog of NCBI NO: 7489558 NR Description: probable submergence induced protein 2 - rice
  misc_feature (3)..(182): Homolog of NCBI NO: 37534408 NR Description: putative zinc finger protein ID1 [Oryza sativa
  misc_feature (3)..(186): Homolog of NCBI NO: 34902616 NR Description: Putative probable submergence induced,

SEQ ID NO: 86895 - protein, 180 aa, Arabidopsis thaliana; identical to SEQ ID NO: 36181
  peptide (1)..(180): Ceres Seq. ID no. 12694668
  misc_feature (1)..(151): Pfam Name: ARD/ARD' family Pfam Description: ARD/ARD' family
  misc_feature (1)..(180): Homolog of NCBI NO: 18422379 NR Description: putative protein; protein id: At5g43850.1, by cDNA: 26596. [Arabidopsis thaliana]
  misc_feature (1)..(180): Homolog of NCBI NO: 10177955 NR Description: gene_id:MQD19.21~pir||T02918~similar to unknown
  misc_feature (1)..(180): Homolog of NCBI NO: 21554849 NR Description: submergence induced protein 2A [Arabidopsis
  misc_feature (1)..(166): Homolog of NCBI NO: 18414289 NR Description: Expressed protein; protein id: At4g14710.1, by cDNA: 2738., supported by cDNA: gi_18087552 [Arabidopsis >gi|18087553|gb|AAL58908.1|AF462818_1 AT4g14710/dl3395c
  misc_feature (1)..(179): Homolog of NCBI NO: 7489559 NR Description: probable submergence induced, nickel-binding
  misc_feature (1)..(166): Homolog of NCBI NO: 18414293 NR Description: Expressed protein; protein id: At4g14716.1, by cDNA: 16319. [Arabidopsis thaliana] unknown protein [Arabidopsis thaliana]
  misc_feature (1)..(179): Homolog of NCBI NO: 14522834 NR Description: iron-deficiency induced gene [Hordeum vulgare]
  misc_feature (1)..(175): Homolog of NCBI NO: 7489558 NR Description: probable submergence induced protein 2 - rice
  misc_feature (1)..(175): Homolog of NCBI NO: 37534408 NR Description: putative zinc finger protein ID1 [Oryza sativa
  misc_feature (1)..(179): Homolog of NCBI NO: 34902616 NR Description: Putative probable submergence induced,

SEQ ID NO: 86896 - DNA, 1524 bp, Arabidopsis thaliana
  misc_feature (1)..(1524): Ceres Seq. ID no. 12694792
  misc_feature: MA Experiment ID: 20000227 Result: Up-regulated in Transcription
  misc_feature: MA Experiment 20000227 PARAMETER Experiment Name: At_Root-Tips-vs-Tops_P Parameter: Tissue Value: Root Tips vs. Root Tops
  misc_feature: MA Experiment ID: 20000235 Result: Up-regulated in Transcription
  misc_feature: MA Experiment 20000235 PARAMETER Experiment Name: At_Siliques_P Parameter: Age (day) Value: 21
  misc_feature: MA Experiment 20000235 PARAMETER Experiment Name: At_Siliques_P Parameter: Organism Value: A. thaliana
  misc_feature: MA Experiment 20000235 PARAMETER Experiment Name: At_Siliques_P Parameter: Plant Line Value: WS
  misc_feature: MA Experiment 20000235 PARAMETER Experiment Name: At_Siliques_P Parameter: Tissue Value: 5-10mm Siliques vs. Whole Plant
  misc_feature: MA Experiment ID: 20001755 Result: Down-regulated in Transcription
  misc_feature: MA Experiment 20001755 PARAMETER Experiment Name: At_50mM_NH4NO3_L-to-H_P Parameter: Timepoint (hr) Value: 2
  misc_feature: MA Experiment 20001755 PARAMETER Experiment Name: At_50mM_NH4NO3_L-to-H_P Parameter: Tissue Value: Leaf
  misc_feature: MA Experiment 20001755 PARAMETER Experiment Name: At_50mM_NH4NO3_L-to-H_P Parameter: Treatment Value: 50mM NH4NO3 vs 100mM Mannitol
  misc_feature: MA Experiment ID: 20001911 Result: Down-regulated in Transcription
  misc_feature: MA Experiment 20001911 PARAMETER Experiment Name: At_Drought_Reproduction_P Parameter: Age (day) Value: 40
  misc_feature: MA Experiment 20001911 PARAMETER Experiment Name: At_Drought_Reproduction_P Parameter: Organism Value: A. thaliana
  misc_feature: MA Experiment 20001911 PARAMETER Experiment Name: At_Drought_Reproduction_P Parameter: Plant Line Value: WS
  misc_feature: MA Experiment 20001911 PARAMETER Experiment Name: At_Drought_Reproduction_P Parameter: Timepoint (day) Value: 10
  misc_feature: MA Experiment 20001911 PARAMETER Experiment Name: At_Drought_Reproduction_P Parameter: Tissue Value: Flowers
  misc_feature: MA Experiment 20001911 PARAMETER Experiment Name: At_Drought_Reproduction_P Parameter: Treatment Value: Drought vs. No Drought
atgagaactaaatatttttctttgctagtgtttattattgtcttggcttctaatgaagttatagccaagaaacactcttcaacacctaaattaagaagaagtgattttccaaaagattttatttttggagctgcaacgtcagcttaccaagtcgaaggagctgctcatgaagatggtagaggtccaagtatttgggatacattctctgaaaaatatccggagaagataaaagatggtaccaatggatctattgcaagtgattcttaccatctttacaaggaagatgtgggtttactacatcaaattggtttcggtgcctatagattctctatctcgtggtcgaggatcttgccacgtgggaatctaaaaggaggtatcaaccaagctggtattgactattacaacaacttgatcaatgagcttttgtctaaaggaattaagccattcgccaccatttttcattgggacacaccgcaaagccttgaagatgcttacggaggattctttggcgcggagattgtgaatgacttccgcgattatgcggatatttgcttcaagaattttggagatcgagtgaagcattggatgacattgaacgaaccattaacagttgtgcaacaaggatatgttgctggtgtaatggctcctggaaggtgttcaaaattcacaaaccctaattgcaccgcgggaaatggagctaccgagccttatattgttggtcacaacctcattcttgctcatggagaagcagtcaaagtatatagagaaaaatataaggcatctcaaaaaggtcaagttggtatcgctttgaacgcgggttggaacttgccttataccgaatcagctgaagatagattagctgcggcacgagccatggccttcacattcgactatttcatggagccgcttgtaaccggtaaatatccggttgacatggtcaacaacgtaaaagacggtcgcttacctacatttactgcaaaacaatctaagatgttgaaaggatcatatgatttcattggcatcaattattactcatcttcttacgctaaggatgttccttgctcaagcgaaaacgttacattattctctgatccttgtgctagcgtcacaggtgaaagagaaggagtgcctatcggtccaaaggcagcatcagattggcttttgatatatccaaaaggaattcgtgatctccttctctatgcaaaatacaagttcaaggatcctgtcatgtatataacagagaatggtagagatgaagctagtaccggtaaaatcgaccttaaagatagtgagaggatcgattactacgctcaacatttgaagatggttcaagacgctatatcaattggagccaatgttaaaggattctttgcgtggtctttgctagataattttgaatgggcaacgggctactcagtccgatttggactagtttacgtggatttcaacgatggacgtaagagatatccaaagaaatcggcaaaatggttcagaaagttattgagcgaaaagaaaaggaattga

SEQ ID NO: 86897 - protein, 507 aa, Arabidopsis thaliana
  peptide (1)..(507): Ceres Seq. ID no. 12694793
  misc_feature (32)..(506): Pfam Name: Glycosyl hydrolase family 1 Pfam Description: Glycosyl hydrolase family 1
  misc_feature (1)..(507): Homolog of NCBI NO: 15241543 NR Description: glycosyl hydrolase family 1; protein id:
  misc_feature (1)..(507): Homolog of NCBI NO: 15238331 NR Description: glycosyl hydrolase family 1; protein id:
  misc_feature (1)..(507): Homolog of NCBI NO: 15224879 NR Description: glycosyl hydrolase family 1; protein id:
  misc_feature (1)..(375): Homolog of NCBI NO: 30682835 NR Description: glycosyl hydrolase family 1 [Arabidopsis thaliana]
  misc_feature (393)..(507): Homolog of NCBI NO: 30682835 NR Description: glycosyl hydrolase family 1 [Arabidopsis thaliana]
  misc_feature (1)..(501): Homolog of NCBI NO: 15232261 NR Description: glycosyl hydrolase family 1; protein id: supported by cDNA: gi_15028300, supported by cDNA: gi_21281078
  misc_feature (1)..(385): Homolog of NCBI NO: 25289508 NR Description: probable beta-glucosidase [imported] -
  misc_feature (1)..(507): Homolog of NCBI NO: 16757966 NR Description: amygdalin hydrolase isoform AH I precursor
  misc_feature (3)..(507): Homolog of NCBI NO: 7435445 NR Description: beta-glucosidase (EC 3.2.1.21) precursor isoform
  misc_feature (31)..(507): Homolog of NCBI NO: 15778634 NR Description: amygdalin hydrolase isoform AH I precursor
MRTKYFSLLVFIIVLASNEVIAKKHSSTPKLRRSDFPKDFIFGAATSAYQVEGAAHEDGRGPSIWDTFSEKYPEKIKDGTNGSIASDSYHLYKEDVGLLHQIGFGAYRFSISWSRILPRGNLKGGINQAGIDYYNNLINELLSKGIKPFATIFHWDTPQSLEDAYGGFFGAEIVNDFRDYADICFKNFGDRVKHWMTLNEPLTVVQQGYVAGVMAPGRCSKFTNPNCTAGNGATEPYIVGHNLILAHGEAVKVYREKYKASQKGQVGIALNAGWNLPYTESAEDRLAAARAMAFTFDYFMEPLVTGKYPVDMVNNVKDGRLPTFTAKQSKMLKGSYDFIGINYYSSSYAKDVPCSSENVTLFSDPCASVTGEREGVPIGPKAASDWLLIYPKGIRDLLLYAKYKFKDPVMYITENGRDEASTGKIDLKDSERIDYYAQHLKMVQDAISIGANVKGFFAWSLLDNFEWATGYSVRFGLVYVDFNDGRKRYPKKSAKWFRKLLSEKKRN

SEQ ID NO: 86898 - protein, 312 aa, Arabidopsis thaliana
  peptide (1)..(312): Ceres Seq. ID no. 12694794
  misc_feature (1)..(311): Pfam Name: Glycosyl hydrolase family 1 Pfam Description: Glycosyl hydrolase family 1
  misc_feature (1)..(312): Homolog of NCBI NO: 15241543 NR Description: glycosyl hydrolase family 1; protein id:
  misc_feature (1)..(312): Homolog of NCBI NO: 15238331 NR Description: glycosyl hydrolase family 1; protein id:
  misc_feature (1)..(312): Homolog of NCBI NO: 15224879 NR Description: glycosyl hydrolase family 1; protein id:
  misc_feature (1)..(180): Homolog of NCBI NO: 30682835 NR Description: glycosyl hydrolase family 1 [Arabidopsis thaliana]
  misc_feature (198)..(312): Homolog of NCBI NO: 30682835 NR Description: glycosyl hydrolase family 1 [Arabidopsis thaliana]
  misc_feature (1)..(306): Homolog of NCBI NO: 15232261 NR Description: glycosyl hydrolase family 1; protein id: supported by cDNA: gi_15028300, supported by cDNA: gi_21281078
  misc_feature (1)..(190): Homolog of NCBI NO: 25289508 NR Description: probable beta-glucosidase [imported] -
  misc_feature (1)..(312): Homolog of NCBI NO: 16757966 NR Description: amygdalin hydrolase isoform AH I precursor
  misc_feature (1)..(312): Homolog of NCBI NO: 7435445 NR Description: beta-glucosidase (EC 3.2.1.21) precursor isoform
  misc_feature (1)..(312): Homolog of NCBI NO: 15778634 NR Description: amygdalin hydrolase isoform AH I precursor
MTLNEPLTVVQQGYVAGVMAPGRCSKFTNPNCTAGNGATEPYIVGHNLILAHGEAVKVYREKYKASQKGQVGIALNAGWNLPYTESAEDRLAAARAMAFTFDYFMEPLVTGKYPVDMVNNVKDGRLPTFTAKQSKMLKGSYDFIGINYYSSSYAKDVPCSSENVTLFSDPCASVTGEREGVPIGPKAASDWLLIYPKGIRDLLLYAKYKFKDPVMYITENGRDEASTGKIDLKDSERIDYYAQHLKMVQDAISIGANVKGFFAWSLLDNFEWATGYSVRFGLVYVDFNDGRKRYPKKSAKWFRKLLSEKKRN

SEQ ID NO: 86899 - protein, 294 aa, Arabidopsis thaliana
  peptide (1)..(294): Ceres Seq. ID no. 12694795
  misc_feature (1)..(293): Pfam Name: Glycosyl hydrolase family 1 Pfam Description: Glycosyl hydrolase family 1
  misc_feature (1)..(294): Homolog of NCBI NO: 15241543 NR Description: glycosyl hydrolase family 1; protein id:
  misc_feature (1)..(294): Homolog of NCBI NO: 15238331 NR Description: glycosyl hydrolase family 1; protein id:
  misc_feature (1)..(294): Homolog of NCBI NO: 15224879 NR Description: glycosyl hydrolase family 1; protein id:
  misc_feature (1)..(162): Homolog of NCBI NO: 30682835 NR Description: glycosyl hydrolase family 1 [Arabidopsis thaliana]
  misc_feature (180)..(294): Homolog of NCBI NO: 30682835 NR Description: glycosyl hydrolase family 1 [Arabidopsis thaliana]
  misc_feature (1)..(288): Homolog of NCBI NO: 15232261 NR Description: glycosyl hydrolase family 1; protein id: supported by cDNA: gi_15028300, supported by cDNA: gi_21281078
  misc_feature (1)..(172): Homolog of NCBI NO: 25289508 NR Description: probable beta-glucosidase [imported] -
  misc_feature (1)..(294): Homolog of NCBI NO: 16757966 NR Description: amygdalin hydrolase isoform AH I precursor
  misc_feature (1)..(294): Homolog of NCBI NO: 7435445 NR Description: beta-glucosidase (EC 3.2.1.21) precursor isoform
  misc_feature (1)..(294): Homolog of NCBI NO: 15778634 NR Description: amygdalin hydrolase isoform AH I precursor
MAPGRCSKFTNPNCTAGNGATEPYIVGHNLILAHGEAVKVYREKYKASQKGQVGIALNAGWNLPYTESAEDRLAAARAMAFTFDYFMEPLVTGKYPVDMVNNVKDGRLPTFTAKQSKMLKGSYDFIGINYYSSSYAKDVPCSSENVTLFSDPCASVTGEREGVPIGPKAASDWLLIYPKGIRDLLLYAKYKFKDPVMYITENGRDEASTGKIDLKDSERIDYYAQHLKMVQDAISIGANVKGFFAWSLLDNFEWATGYSVRFGLVYVDFNDGRKRYPKKSAKWFRKLLSEKKRN

SEQ ID NO: 86900 - DNA, 953 bp, Arabidopsis thaliana
  misc_feature (1)..(953): Ceres Seq. ID no. 12694812
  misc_feature: MA Experiment ID: 108462 Result: Down-regulated in Transcription
  misc_feature: MA Experiment 108462 PARAMETER Experiment Name: At_Germinating_Seeds_cDNA_P Parameter: Age (day) Value: 2 vs. 0
  misc_feature: MA Experiment 108462 PARAMETER Experiment Name: At_Germinating_Seeds_cDNA_P Parameter: Tissue Value: Germinating Seeds
  misc_feature: MA Experiment ID: 108463 Result: Down-regulated in Transcription
  misc_feature: MA Experiment 108463 PARAMETER Experiment Name: At_Germinating_Seeds_cDNA_P Parameter: Age (day) Value: 3 vs. 0
  misc_feature: MA Experiment 108463 PARAMETER Experiment Name: At_Germinating_Seeds_cDNA_P Parameter: Tissue Value: Germinating Seeds
  misc_feature: MA Experiment ID: 108464 Result: Down-regulated in Transcription
  misc_feature: MA Experiment 108464 PARAMETER Experiment Name: At_Germinating_Seeds_cDNA_P Parameter: Age (day) Value: 4 vs. 0
  misc_feature: MA Experiment 108464 PARAMETER Experiment Name: At_Germinating_Seeds_cDNA_P Parameter: Tissue Value: Germinating Seeds
  misc_feature: MA Experiment ID: 20000071 Result: Up-regulated in Transcription
  misc_feature: MA Experiment 20000071 PARAMETER Experiment Name: At_100uM_ABA_Mutants_cDNA_P Parameter: Plant Line Value: CS8104
  misc_feature: MA Experiment 20000071 PARAMETER Experiment Name: At_100uM_ABA_Mutants_cDNA_P Parameter: Timepoint (hr) Value: 6
  misc_feature: MA Experiment 20000071 PARAMETER Experiment Name: At_100uM_ABA_Mutants_cDNA_P Parameter: Tissue Value: Aerial
  misc_feature: MA Experiment 20000071 PARAMETER Experiment Name: At_100uM_ABA_Mutants_cDNA_P Parameter: Treatment Value: 100uM ABA vs. No Treatment
  misc_feature: MA Experiment ID: 20000090 Result: Up-regulated in Transcription
  misc_feature: MA Experiment ID: 20000234 Result: Up-regulated in Transcription
  misc_feature: MA Experiment 20000234 PARAMETER Experiment Name: At_Siliques_P Parameter: Age (day) Value: 21
  misc_feature: MA Experiment 20000234 PARAMETER Experiment Name: At_Siliques_P Parameter: Organism Value: A. thaliana
  misc_feature: MA Experiment 20000234 PARAMETER Experiment Name: At_Siliques_P Parameter: Plant Line Value: WS
  misc_feature: MA Experiment 20000234 PARAMETER Experiment Name: At_Siliques_P Parameter: Tissue Value: Less Than 5mm Siliques vs. Whole Plant
  misc_feature: MA Experiment ID: 20000265 Result: Up-regulated in Transcription
  misc_feature: MA Experiment 20000265 PARAMETER Experiment Name: At_Open_Flower_P Parameter: Age (day) Value: 21
  misc_feature: MA Experiment 20000265 PARAMETER Experiment Name: At_Open_Flower_P Parameter: Plant Line Value: WS
  misc_feature: MA Experiment 20000265 PARAMETER Experiment Name: At_Open_Flower_P Parameter: Tissue Value: Closed Flower vs. Whole Plant
  misc_feature: MA Experiment ID: 20000794 Result: Up-regulated in Transcription
  misc_feature: MA Experiment 20000794 PARAMETER Experiment Name: At_Petals_P Parameter: Age (day) Value: 23-25 days
  misc_feature: MA Experiment 20000794 PARAMETER Experiment Name: At_Petals_P Parameter: Plant Line Value: WS
  misc_feature: MA Experiment 20000794 PARAMETER Experiment Name: At_Petals_P Parameter: Tissue Value: Petals vs. Whole plant
  misc_feature: MA Experiment ID: 20001247 Result: Down-regulated in Transcription
  misc_feature: MA Experiment 20001247 PARAMETER Experiment Name: At_Far-red-induction_P Parameter: Age (day) Value: 7
  misc_feature: MA Experiment 20001247 PARAMETER Experiment Name: At_Far-red-induction_P Parameter: Light Value: Far-red vs. White
  misc_feature: MA Experiment 20001247 PARAMETER Experiment Name: At_Far-red-induction_P Parameter: Organism Value: A. thaliana
  misc_feature: MA Experiment 20001247 PARAMETER Experiment Name: At_Far-red-induction_P Parameter: Plant Line Value: Columbia
  misc_feature: MA Experiment 20001247 PARAMETER Experiment Name: At_Far-red-induction_P Parameter: Timepoint (hr) Value: 1
  misc_feature: MA Experiment 20001247 PARAMETER Experiment Name: At_Far-red-induction_P Parameter: Tissue Value: Whole Plant
  misc_feature: MA Experiment ID: 20001560 Result: Up-regulated in Transcription
  misc_feature: MA Experiment 20001560 PARAMETER Experiment Name: At_Drought_Soil_Dry_P Parameter: Age (day) Value: 28
  misc_feature: MA Experiment 20001560 PARAMETER Experiment Name: At_Drought_Soil_Dry_P Parameter: Organism Value: A. thaliana
  misc_feature: MA Experiment 20001560 PARAMETER Experiment Name: At_Drought_Soil_Dry_P Parameter: Plant Line Value: WS
  misc_feature: MA Experiment 20001560 PARAMETER Experiment Name: At_Drought_Soil_Dry_P Parameter: Post Timepoint (hr) Value: None
  misc_feature: MA Experiment 20001560 PARAMETER Experiment Name: At_Drought_Soil_Dry_P Parameter: Post-Treatment Value: None
  misc_feature: MA Experiment 20001560 PARAMETER Experiment Name: At_Drought_Soil_Dry_P Parameter: Timepoint (day) Value: 14
  misc_feature: MA Experiment 20001560 PARAMETER Experiment Name: At_Drought_Soil_Dry_P Parameter: Treatment Value: Drought vs. No Drought
  misc_feature: MA Experiment ID: 20001906 Result: Up-regulated in Transcription
  misc_feature: MA Experiment 20001906 PARAMETER Experiment Name: At_Drought_Reproduction_P Parameter: Age (day) Value: 35
  misc_feature: MA Experiment 20001906 PARAMETER Experiment Name: At_Drought_Reproduction_P Parameter: Organism Value: A. thaliana
  misc_feature: MA Experiment 20001906 PARAMETER Experiment Name: At_Drought_Reproduction_P Parameter: Plant Line Value: WS
  misc_feature: MA Experiment 20001906 PARAMETER Experiment Name: At_Drought_Reproduction_P Parameter: Timepoint (day) Value: 5
  misc_feature: MA Experiment 20001906 PARAMETER Experiment Name: At_Drought_Reproduction_P Parameter: Tissue Value: Siliques
  misc_feature: MA Experiment 20001906 PARAMETER Experiment Name: At_Drought_Reproduction_P Parameter: Treatment Value: Drought vs. No Drought
aagcaaacacaagataagaagaaacaaacaatggcgatttctttcatttagatattttcctcgattcttagcttctggattttggtgaaaggatttgaaatggcggtgtcgcttttatcgaaactacggtgtataacagtagatgttactggtacacttatagcttacaaaggagagcttggtgattactattgtatggctgctaaagccattggtttgccttgtcctgattataaacgagttcatgaaggttttaaactagcttatacagatatggcacaaaagtatccttgtttcggtttccatgccaaaatgccaaacattgtttggtggaaaacttgtgtgagagattcatttgtcaaggcaggatatgagtatgatgaggagacatttgagaagatatttaggagaatctattcgacgtttggttctgctgcaccttactctgtgtttcaagattctcaaccgtttttaagatgggcacgcaggaaaggtcttatagtcggacttgttagcaatgcggaataccgatatcaagaagttattttaccttccttcggtttgagcaaggcagagtgggattttggtgtattctctggaattgaagggatagagaaaccagatccgaggatttttacgctcgcgctagagagagccgggaataatattgcgcctgaagaggttttgcatattggagacagcatgcgcaaagattatgttccagcaaagagtattgggatgcatgctttgttggttgataggtttaagacggaagctgctaaagactggatagaagctggagccattgtgcttccagatttggttgctgttcaacaacttttggagtctgataagttgaaatgttaaaatgcagacctctctttaagtatgaaatctaatgtattgtagtattgcacatttgagtaaaataagtttcaacggcttctttggtt

SEQ ID NO: 86901 - protein, 255 aa, Arabidopsis thaliana; identical to SEQ ID NO: 24852
  peptide (1)..(255): Ceres Seq. ID no. 12694813
  misc_feature (9)..(222): Pfam Name: haloacid dehalogenase-like hydrolase Pfam Description: haloacid dehalogenase-like hydrolase
  misc_feature (1)..(255): Homolog of NCBI NO: 15241564 NR Description: Dreg-2 like protein; protein id: At5g44730.1
  misc_feature (9)..(221): Homolog of NCBI NO: 33468704 NR Description: SI:zC10E8.6 (novel protein) [Danio rerio]
  misc_feature (8)..(219): Homolog of NCBI NO: 27714603 NR Description: similar to RIKEN cDNA 2810435D12 [Mus musculus]
  misc_feature (6)..(223): Homolog of NCBI NO: 17231587 NR Description: hypothetical protein [Nostoc sp. PCC 7120]
  misc_feature (10)..(221): Homolog of NCBI NO: 23130292 NR Description: hypothetical protein [Nostoc punctiforme]
  misc_feature (9)..(238): Homolog of NCBI NO: 37520921 NR Description: hypothetical protein gll1352 [Gloeobacter
  misc_feature (6)..(219): Homolog of NCBI NO: 19923000 NR Description: Rhythmically expressed gene 2 CG3200-PA
  misc_feature (6)..(219): Homolog of NCBI NO: 21483246 NR Description: GH02773p [Drosophila melanogaster]
  misc_feature (3)..(219): Homolog of NCBI NO: 24639695 NR Description: CG15912-PA [Drosophila melanogaster]
  misc_feature (9)..(220): Homolog of NCBI NO: 17553988 NR Description: Predicted CDS, haloacid dehalogenase-like [Caenorhabditis elegans] >gi|13548390|emb|CAC35822.1|

SEQ ID NO: 86902 - protein, 223 aa, Arabidopsis thaliana; identical to SEQ ID NO: 24853
  peptide (1)..(223): Ceres Seq. ID no. 12694814
  misc_feature (1)..(190): Pfam Name: haloacid dehalogenase-like hydrolase Pfam Description: haloacid dehalogenase-like hydrolase
  misc_feature (1)..(223): Homolog of NCBI NO: 15241564 NR Description: Dreg-2 like protein; protein id: At5g44730.1
  misc_feature (1)..(189): Homolog of NCBI NO: 33468704 NR Description: SI:zC10E8.6 (novel protein) [Danio rerio]
  misc_feature (1)..(187): Homolog of NCBI NO: 27714603 NR Description: similar to RIKEN cDNA 2810435D12 [Mus musculus]
  misc_feature (1)..(191): Homolog of NCBI NO: 17231587 NR Description: hypothetical protein [Nostoc sp. PCC 7120]
  misc_feature (1)..(189): Homolog of NCBI NO: 23130292 NR Description: hypothetical protein [Nostoc punctiforme]
  misc_feature (1)..(206): Homolog of NCBI NO: 37520921 NR Description: hypothetical protein gll1352 [Gloeobacter
  misc_feature (1)..(187): Homolog of NCBI NO: 19923000 NR Description: Rhythmically expressed gene 2 CG3200-PA
  misc_feature (1)..(187): Homolog of NCBI NO: 21483246 NR Description: GH02773p [Drosophila melanogaster]
  misc_feature (1)..(187): Homolog of NCBI NO: 24639695 NR Description: CG15912-PA [Drosophila melanogaster]
  misc_feature (1)..(188): Homolog of NCBI NO: 17553988 NR Description: Predicted CDS, haloacid dehalogenase-like [Caenorhabditis elegans] >gi|13548390|emb|CAC35822.1|

SEQ ID NO: 86903 - protein, 197 aa, Arabidopsis thaliana; identical to SEQ ID NO: 24854
  peptide (1)..(197): Ceres Seq. ID no. 12694815
  misc_feature (1)..(164): Pfam Name: haloacid dehalogenase-like hydrolase Pfam Description: haloacid dehalogenase-like hydrolase
  misc_feature (1)..(197): Homolog of NCBI NO: 15241564 NR Description: Dreg-2 like protein; protein id: At5g44730.1
  misc_feature (1)..(163): Homolog of NCBI NO: 33468704 NR Description: SI:zC10E8.6 (novel protein) [Danio rerio]
  misc_feature (1)..(161): Homolog of NCBI NO: 27714603 NR Description: similar to RIKEN cDNA 2810435D12 [Mus musculus]
  misc_feature (1)..(165): Homolog of NCBI NO: 17231587 NR Description: hypothetical protein [Nostoc sp. PCC 7120]
  misc_feature (1)..(163): Homolog of NCBI NO: 23130292 NR Description: hypothetical protein [Nostoc punctiforme]
  misc_feature (1)..(180): Homolog of NCBI NO: 37520921 NR Description: hypothetical protein gll1352 [Gloeobacter
  misc_feature (1)..(161): Homolog of NCBI NO: 19923000 NR Description: Rhythmically expressed gene 2 CG3200-PA
  misc_feature (1)..(161): Homolog of NCBI NO: 21483246 NR Description: GH02773p [Drosophila melanogaster]
  misc_feature (1)..(161): Homolog of NCBI NO: 24639695 NR Description: CG15912-PA [Drosophila melanogaster]
  misc_feature (1)..(162): Homolog of NCBI NO: 17553988 NR Description: Predicted CDS, haloacid dehalogenase-like [Caenorhabditis elegans] >gi|13548390|emb|CAC35822.1|

SEQ ID NO: 86904 - DNA, 657 bp, Arabidopsis thaliana
  misc_feature (1)..(657): Ceres Seq. ID no. 12694991
  misc_feature: MA Experiment ID: 20000315 Result: Down-regulated in Transcription
  misc_feature: MA Experiment 20000315 PARAMETER Experiment Name: At_14day_Shoots-Roots_Sub_P Parameter: Age (day) Value: 14
  misc_feature: MA Experiment 20000315 PARAMETER Experiment Name: At_14day_Shoots-Roots_Sub_P Parameter: Organism Value: A. thaliana
  misc_feature: MA Experiment 20000315 PARAMETER Experiment Name: At_14day_Shoots-Roots_Sub_P Parameter: Plant Line Value: WS
  misc_feature: MA Experiment 20000315 PARAMETER Experiment Name: At_14day_Shoots-Roots_Sub_P Parameter: Tissue Value: Shoots vs. Whole Plant
atggtggcgcaaaacagtcggcgggagcttctagcagcttccctgatcctaactttagctctaattcgtctaacggaagcaaactccgaaggggacgctcttcacgcgcttcgccggagcttatcagatccagacaatgttgttcagagttgggatccaactcttgttaatccttgtacttggtttcatgtcacttgtaatcaacaccatcaagtcactcgtctggatttggggaattcaaacttatctggacatctagtacctgaacttgggaagcttgaacatttacaatatcttgaactctacaaaaacgagattcaaggaactataccttctgagcttggaaatctgaagagtctaatcagtttggatctgtacaacaacaatctcaccgggaaaatcccatcttctttgggaaaattgaagtcacttgtttttttgcggcttaacgaaaaccgattgaccggtcctattcctagagaactcacagttatttcaagccttaaagttgttgatgtctcagggaatgatttgtgtggaacaattccagtagaaggaccttttgaacacattcctatgcaaaactttgagaacaacctgagattggagggaccagaactactaggtcttgcgagctatgacaccaattgcacttaa

SEQ ID NO: 86905 - protein, 218 aa, Arabidopsis thaliana
  peptide (1)..(218): Ceres Seq. ID no. 12694992
  misc_feature (167)..(199): Pfam Name: Leucine Rich Repeat Pfam Description: Leucine Rich Repeat
  misc_feature (1)..(218): Homolog of NCBI NO: 34146800 NR Description: At3g43740 [Arabidopsis thaliana]
  misc_feature (1)..(218): Homolog of NCBI NO: 15242153 NR Description: leucine-rich repeat protein; protein id: supported by cDNA: gi_13358181, supported by cDNA: gi_13899096, by cDNA: gi_20148426 [Arabidopsis thaliana]
  misc_feature (12)..(218): Homolog of NCBI NO: 30385250 NR Description: leucine-rich repeat protein [x Citrofortunella
  misc_feature (15)..(218): Homolog of NCBI NO: 7489030 NR Description: leucine-rich repeat protein LRP - tomato
  misc_feature (14)..(217): Homolog of NCBI NO: 29468120 NR Description: leucine-rich repeat protein [Oryza sativa]
  misc_feature (14)..(217): Homolog of NCBI NO: 27497122 NR Description: floral organ regulator 1 [Oryza sativa (japonica
  misc_feature (13)..(217): Homolog of NCBI NO: 34903344 NR Description: unnamed protein product [Oryza sativa (japonica group)] >gi|6498429|dbj|BAA87832.1| unnamed protein product
  misc_feature (7)..(217): Homolog of NCBI NO: 34896972 NR Description: putative leucine-rich repeat protein [Oryza
  misc_feature (14)..(205): Homolog of NCBI NO: 15218543 NR Description: somatic embryogenesis receptor-like kinase, protein id: At1g34210.1, supported by cDNA: gi_14573456
  misc_feature (14)..(205): Homolog of NCBI NO: 14573457 NR Description: somatic embryogenesis receptor-like kinase 2
MVAQNSRRELLAASLILTLALIRLTEANSEGDALHALRRSLSDPDNVVQSWDPTLVNPCTWFHVTCNQHHQVTRLDLGNSNLSGHLVPELGKLEHLQYLELYKNEIQGTIPSELGNLKSLISLDLYNNNLTGKIPSSLGKLKSLVFLRLNENRLTGPIPRELTVISSLKVVDVSGNDLCGTIPVEGPFEHIPMQNFENNLRLEGPELLGLASYDTNCT

SEQ ID NO: 86906 - DNA, 1638 bp, Arabidopsis thaliana
  misc_feature (1)..(1638): Ceres Seq. ID no. 12695078
  misc_feature: MA Experiment ID: 108573 Result: Up-regulated in Transcription
  misc_feature: MA Experiment 108573 PARAMETER Experiment Name: At_Drought_cDNA_P Parameter: Timepoint (hr) Value: 6
  misc_feature: MA Experiment 108573 PARAMETER Experiment Name: At_Drought_cDNA_P Parameter: Tissue Value: Aerial
  misc_feature: MA Experiment 108573 PARAMETER Experiment Name: At_Drought_cDNA_P Parameter: Treatment Value: Drought vs. No Drought
  misc_feature: MA Experiment ID: 108577 Result: Down-regulated in Transcription
  misc_feature: MA Experiment 108577 PARAMETER Experiment Name: At_42deg_Heat_cDNA_P Parameter: Temperature (deg C) Value: 42 vs. 22
  misc_feature: MA Experiment 108577 PARAMETER Experiment Name: At_42deg_Heat_cDNA_P Parameter: Timepoint (hr) Value: 6
  misc_feature: MA Experiment 108577 PARAMETER Experiment Name: At_42deg_Heat_cDNA_P Parameter: Tissue Value: Aerial
  misc_feature: MA Experiment ID: 108595 Result: Down-regulated in Transcription
  misc_feature: MA Experiment 108595 PARAMETER Experiment Name: At_Ler-pi_Ovule_cDNA_P Parameter: Plant Line Value: null
  misc_feature: MA Experiment ID: 20000069 Result: Up-regulated in Transcription
  misc_feature: MA Experiment 20000069 PARAMETER Experiment Name: At_100uM_ABA_Mutants_cDNA_P Parameter: Plant Line Value: CS23
  misc_feature: MA Experiment 20000069 PARAMETER Experiment Name: At_100uM_ABA_Mutants_cDNA_P Parameter: Timepoint (hr) Value: 6
  misc_feature: MA Experiment 20000069 PARAMETER Experiment Name: At_100uM_ABA_Mutants_cDNA_P Parameter: Tissue Value: Aerial
  misc_feature: MA Experiment 20000069 PARAMETER Experiment Name: At_100uM_ABA_Mutants_cDNA_P Parameter: Treatment Value: 100uM ABA vs. No Treatment
  misc_feature: MA Experiment ID: 20000072 Result: Up-regulated in Transcription
  misc_feature: MA Experiment 20000072 PARAMETER Experiment Name: At_100uM_ABA_Mutants_cDNA_P Parameter: Plant Line Value: CS8105
  misc_feature: MA Experiment 20000072 PARAMETER Experiment Name: At_100uM_ABA_Mutants_cDNA_P Parameter: Timepoint (hr) Value: 6
  misc_feature: MA Experiment 20000072 PARAMETER Experiment Name: At_100uM_ABA_Mutants_cDNA_P Parameter: Tissue Value: Aerial
  misc_feature: MA Experiment 20000072 PARAMETER Experiment Name: At_100uM_ABA_Mutants_cDNA_P Parameter: Treatment Value: 100uM ABA vs. No Treatment
  misc_feature: MA Experiment ID: 20000111 Result: Down-regulated in Transcription
  misc_feature: MA Experiment 20000111 PARAMETER Experiment Name: At_42deg_Heat_cDNA_P Parameter: Temperature (deg C) Value: 42 vs. 22
  misc_feature: MA Experiment 20000111 PARAMETER Experiment Name: At_42deg_Heat_cDNA_P Parameter: Timepoint (hr) Value: 6
  misc_feature: MA Experiment 20000111 PARAMETER Experiment Name: At_42deg_Heat_cDNA_P Parameter: Tissue Value: Aerial
atggagatcgaatccgtcgcagctggttcttgttccaaggagaatcaaatgatctacaaggaatggttcgaattctccgattcagacggcgatggccgtattactggtaacgatgcgatcaagttcttcactatgtcgaatttgcctcgtccggaattgaagcagatctgggctattgcagattcaaagagacaagggtatcttggtttcaaagagtttattgttgccatgcagcttgtttcgttggctcaaactggacatgaaatatcgcatgaagttcttattagcgatgttgatttcaaaaatatcaatcctcctaccatggaaggtctgggtgtattaatggcgaaaaagaagcattcatcaaagtcgagtgatcctaatatgaatggtagccctgccgcagacacctcacttacagctcactggttctcttcaaaatcttcaaaaaagatttctctgtcctccgtaacatctatagtggatggcctgaagaggttgtacattcagaagctgaagccacttgaagtagcatatcggtttaacgattttgtatcccctttgttgactaacagtgatttcgatgcaaaacctatggtaatgcttctgggtcaatactccacaggaaaaacaacattcattaagcatttgcttaaatctacttatccaggagctcatattggaccagagccgactactgacagatttgttgttgtcatgtctggacctgatgaaagaagcattccggggaacacagtagcagttcaagcagatatgccattcagtggtcttacaacttttgggactgcctttttgtcaaagtttgaatgctctcagatgcctcaccctctgctggagcatgtaacatttgtcgacacccctggagttttatcaggggaaaaacaaagaacacagcgagcatatgatttcactggtgttacatcatggtttgcctctaagtgtgatcttatcctcctcctatttgacccacacaagctggatgtaagtgatgagttcaagcgtgtaatttcatctttacgcggtcatgatgacaagatccgcgttgttctgaataaggctgaccaagtggacactcagcagctaatgagggtatatggagctctcatgtggtcacttgggaaagttctcaatactcctgaggtctctcgtgtctacattggttccttcagtgataaacccataaacgaagctgcaactggtccaattgggagagagttgtttgaaaaggagcaagatgaccttcttgctgatttgaaagacattcctaagaaagcttgtgatcgtcgaataaatgagtttgtgaaacgggcaagagcagcaaagatacatgcgtacatcatcagccatttgaagaaggagatgccagcgataatggggaaagccaaagctcaacagaaactgatagataacttggaagacgagtttggaaaggtacaaagagagcatcacttacctaaaggagatttcccaaatgtggatcatttcagggaggtgctaagtggttacaacatcgacaagtttgagaagctaaagccgaaaatgttgcagactgttgatgatatgttggggtatgacatcccagagctcttgaaaaatttcaaaaacccttatgattaa

SEQ ID NO: 86907 - protein, 545 aa, Arabidopsis thaliana; identical to SEQ ID NO: 36226
  peptide (1)..(545): Ceres Seq. ID no. 12695079
  misc_feature (18)..(46): Pfam Name: EF hand Pfam Description: EF hand
  misc_feature (1)..(545): Homolog of NCBI NO: 18402561 NR Description: expressed protein; protein id: At3g20290.1, by cDNA: gi_14334439 [Arabidopsis thaliana] unknown protein [Arabidopsis thaliana]
  misc_feature (127)..(545): Homolog of NCBI NO: 9294546 NR Description: contains similarity to EH domain containing
  misc_feature (1)..(110): Homolog of NCBI NO: 9294546 NR Description: contains similarity to EH domain containing
  misc_feature (13)..(545): Homolog of NCBI NO: 38345297 NR Description: OSJNBa0043A12.19 [Oryza sativa (japonica
  misc_feature (5)..(491): Homolog of NCBI NO: 18412957 NR Description: score=11.7, E=0.66,N=1; protein id: At4g05520.1
  misc_feature (143)..(537): Homolog of NCBI NO: 39594267 NR Description: Hypothetical protein CBG18887 [Caenorhabditis
  misc_feature (122)..(537): Homolog of NCBI NO: 7206819 NR Description: Receptor mediated endocytosis protein 1, isoform
  misc_feature (122)..(537): Homolog of NCBI NO: 17565132 NR Description: Receptor Mediated Endocytosis 1 RME-1 isoform 2,
  misc_feature (126)..(537): Homolog of NCBI NO: 17565130 NR Description: Receptor Mediated Endocytosis 1 isoform 1,
  misc_feature (143)..(537): Homolog of NCBI NO: 18250262 NR Description: Receptor mediated endocytosis protein 1, isoform

SEQ ID NO: 86908 - protein, 529 aa, Arabidopsis thaliana; identical to SEQ ID NO: 36227
  peptide (1)..(529): Ceres Seq. ID no. 12695080
  misc_feature (2)..(30): Pfam Name: EF hand Pfam Description: EF hand
  misc_feature (1)..(529): Homolog of NCBI NO: 18402561 NR Description: expressed protein; protein id: At3g20290.1, by cDNA: gi_14334439 [Arabidopsis thaliana] unknown protein [Arabidopsis thaliana]
  misc_feature (111)..(529): Homolog of NCBI NO: 9294546 NR Description: contains similarity to EH domain containing
  misc_feature (1)..(94): Homolog of NCBI NO: 9294546 NR Description: contains similarity to EH domain containing
  misc_feature (1)..(529): Homolog of NCBI NO: 38345297 NR Description: OSJNBa0043A12.19 [Oryza sativa (japonica
  misc_feature (1)..(475): Homolog of NCBI NO: 18412957 NR Description: score=11.7, E=0.66,N=1; protein id: At4g05520.1
  misc_feature (127)..(521): Homolog of NCBI NO: 39594267 NR Description: Hypothetical protein CBG18887 [Caenorhabditis
  misc_feature (106)..(521): Homolog of NCBI NO: 7206819 NR Description: Receptor mediated endocytosis protein 1, isoform
  misc_feature (106)..(521): Homolog of NCBI NO: 17565132 NR Description: Receptor Mediated Endocytosis 1 RME-1 isoform 2,
  misc_feature (110)..(521): Homolog of NCBI NO: 17565130 NR Description: Receptor Mediated Endocytosis 1 isoform 1,
  misc_feature (127)..(521): Homolog of NCBI NO: 18250262 NR Description: Receptor mediated endocytosis protein 1, isoform

SEQ ID NO: 86909 - protein, 501 aa, Arabidopsis thaliana; identical to SEQ ID NO: 36228
  peptide (1)..(501): Ceres Seq. ID no. 12695081
  misc_feature (1)..(501): Homolog of NCBI NO: 18402561 NR Description: expressed protein; protein id: At3g20290.1, by cDNA: gi_14334439 [Arabidopsis thaliana] unknown protein [Arabidopsis thaliana]
  misc_feature (83)..(501): Homolog of NCBI NO: 9294546 NR Description: contains similarity to EH domain containing
  misc_feature (1)..(66): Homolog of NCBI NO: 9294546 NR Description: contains similarity to EH domain containing
  misc_feature (1)..(501): Homolog of NCBI NO: 38345297 NR Description: OSJNBa0043A12.19 [Oryza sativa (japonica
  misc_feature (1)..(447): Homolog of NCBI NO: 18412957 NR Description: score=11.7, E=0.66,N=1; protein id: At4g05520.1
  misc_feature (99)..(493): Homolog of NCBI NO: 39594267 NR Description: Hypothetical protein CBG18887 [Caenorhabditis
  misc_feature (78)..(493): Homolog of NCBI NO: 7206819 NR Description: Receptor mediated endocytosis protein 1, isoform
  misc_feature (78)..(493): Homolog of NCBI NO: 17565132 NR Description: Receptor Mediated Endocytosis 1 RME-1 isoform 2,
  misc_feature (82)..(493): Homolog of NCBI NO: 17565130 NR Description: Receptor Mediated Endocytosis 1 isoform 1,
  misc_feature (99)..(493): Homolog of NCBI NO: 18250262 NR Description: Receptor mediated endocytosis protein 1, isoform

SEQ ID NO: 86910 - DNA, 2022 bp, Arabidopsis thaliana
  misc_feature (1)..(2022): Ceres Seq. ID no. 12695096
  misc_feature: MA Experiment ID: 20000166 Result: Down-regulated in Transcription
  misc_feature: MA Experiment 20000166 PARAMETER Experiment Name: At_100uM_ABA_P Parameter: Age (day) Value: 14
  misc_feature: MA Experiment 20000166 PARAMETER Experiment Name: At_100uM_ABA_P Parameter: Organism Value: A. thaliana
  misc_feature: MA Experiment 20000166 PARAMETER Experiment Name: At_100uM_ABA_P Parameter: Plant Line Value: WS
  misc_feature: MA Experiment 20000166 PARAMETER Experiment Name: At_100uM_ABA_P Parameter: Timepoint (hr) Value: 1
  misc_feature: MA Experiment 20000166 PARAMETER Experiment Name: At_100uM_ABA_P Parameter: Tissue Value: Aerial
  misc_feature: MA Experiment 20000166 PARAMETER Experiment Name: At_100uM_ABA_P Parameter: Treatment Value: 100uM ABA vs. No Treatment
  misc_feature: MA Experiment ID: 20000171 Result: Down-regulated in Transcription
  misc_feature: MA Experiment 20000171 PARAMETER Experiment Name: At_42deg_Heat_P Parameter: Age (day) Value: 14
  misc_feature: MA Experiment 20000171 PARAMETER Experiment Name: At_42deg_Heat_P Parameter: Organism Value: A. thaliana
  misc_feature: MA Experiment 20000171 PARAMETER Experiment Name: At_42deg_Heat_P Parameter: Plant Line Value: WS
  misc_feature: MA Experiment 20000171 PARAMETER Experiment Name: At_42deg_Heat_P Parameter: Temperature (deg C) Value: 42 vs. 22
  misc_feature: MA Experiment 20000171 PARAMETER Experiment Name: At_42deg_Heat_P Parameter: Timepoint (hr) Value: 1
  misc_feature: MA Experiment 20000171 PARAMETER Experiment Name: At_42deg_Heat_P Parameter: Tissue Value: Aerial
  misc_feature: MA Experiment ID: 20000179 Result: Up-regulated in Transcription
  misc_feature: MA Experiment 20000179 PARAMETER Experiment Name: At_Germinating_Seeds_P Parameter: Age (hr) Value: 6 vs. 0
  misc_feature: MA Experiment 20000179 PARAMETER Experiment Name: At_Germinating_Seeds_P Parameter: Tissue Value: Germinating Seeds
  misc_feature: MA Experiment ID: 20000180 Result: Up-regulated in Transcription
  misc_feature: MA Experiment 20000180 PARAMETER Experiment Name: At_Germinating_Seeds_P Parameter: Age (hr) Value: 24 vs. 0
  misc_feature: MA Experiment 20000180 PARAMETER Experiment Name: At_Germinating_Seeds_P Parameter: Tissue Value: Germinating Seeds
  misc_feature: MA Experiment ID: 20001451 Result: Down-regulated in Transcription
  misc_feature: MA Experiment 20001451 PARAMETER Experiment Name: At_Far-red-induction_P Parameter: Age (day) Value: 7
  misc_feature: MA Experiment 20001451 PARAMETER Experiment Name: At_Far-red-induction_P Parameter: Light Value: Far-red vs. White
  misc_feature: MA Experiment 20001451 PARAMETER Experiment Name: At_Far-red-induction_P Parameter: Organism Value: A. thaliana
  misc_feature: MA Experiment 20001451 PARAMETER Experiment Name: At_Far-red-induction_P Parameter: Plant Line Value: Columbia
  misc_feature: MA Experiment 20001451 PARAMETER Experiment Name: At_Far-red-induction_P Parameter: Timepoint (hr) Value: 24
  misc_feature: MA Experiment 20001451 PARAMETER Experiment Name: At_Far-red-induction_P Parameter: Tissue Value: Whole Plant
atgaagttcaccggaaaatcaaatttgacggctacattacccgcaactgtcccaaatatcagggatattcatagaaggagagcgcgaaaaccgagcttcactcgtcaacgaagatctggcgtgtctgtcaggaggctaagcaggccggagactcctcaattgaaatcgaaggtggaggatcaaaacattgagcgatgcggcggggttgaagatggtgataacgaggatgatgattgtaataagatgcgttgtcaggaacggagtaggagtgtacggcctgatactgttaggaaacttgctgccggagtgtggcgattgcgagtcccggatgcggtttctagcggcggagataagaggagcaaggatcggttacggtttcaggaaactgctggtcctgctggaaacttgggtcctctgttttattatcaccaccatgatgacaaacattctggctttcaaagcaacaattcaagaaacaagcatagtagattcttgtgtaagcatgagccttcagttccatttccccactgcgcgatggagggagcaacaaaatgggatcccatctgcttggatacaagggatgatgtacaccaaatctataccaacgtgaagtggaataatcaacaagtgaatgatgtttcattagcttcttctattgaattgaaacttcaggaagctcgtgcttgcattaaggatcttgagagtgagaagcgatctcagaaaaagaagcttgagcagttcctgaagaaagttagcgaggagagggcagcttggcggagcagagagcatgagaaggtccgagcaattattgatgacatgaaagctgacatgaaccaggaaaagaagactcgtcagagattagaaatcgtcaattcaaaattagtcaatgagcttgcagattcaaagttagcagtaaagcgttacatgcatgattaccaacaggaaaggaaggcaagagaattgatcgaagaagtttgtgatgaactggcaaaggaaatagaagaagataaagctgagattgaagcattgaagagcgaatccatgaatctcagagaggaagtagacgatgaaagaagaatgctgcagatggctgaggtttggcgtgaggaacgtgtccagatgaagcttattgatgccaaagtaacactcgaggaaaagtattcacaaatgaacaaactcgtaggagatatggaagccttcctcagttcaagaaatactacaggtgtgaaagaggtgagagttgcggaattgttaagagaaactgctgcatcagttgataatatccaagaaatcaaggaatttacgtatgaacccgcaaagccggacgatatcctcatgttgtttgaacaaatgaacatgggtgaaaaccaggatagagaaagcgagcaatatgttgcctacagtccggtcagccacgcttcaaaagctcacacggtaagtccagatgtcaatttgattaacaaagggagacactcgaatgctttcactgatcagaatggtgaatttgaagaagatgacagtggctgggaaactgtgagccattctgaagaacacggatccagttactctccagatgagagcatccctaatattagcaacactcatcaccgtaacagcaatgtatcgatgaatggaacagagtatgaaaagactctattgagagaaataaaagaagtgtgctcggttccaagacgacaatccaaaaagttaccgtcaatggcaaagctctggagttcattagaaggtatgaatggaagggtttcaaacgcgagaaaatcaaccgtggagatggtttcaccagaaacaggctcaaacaaaggcggattcaacacattggacctggttggtcaatggagctcatcaccagactcggctaatgctaatttaaatcgaggagggaggaaagggtgcatagagtggccaagaggggcacataagaacagcttgaagacaaagctcatagaagcacaaatcgagagccaaaaggttcagctgaagcatgtccttgagcataagatctag

SEQ ID NO: 86911 - protein, 673 aa, Arabidopsis thaliana
  peptide (1)..(673): Ceres Seq. ID no. 12695097
  misc_feature (193)..(392): Pfam Name: Myosin tail Pfam Description: Myosin tail
  misc_feature (179)..(673): Homolog of NCBI NO: 9294553 NR Description: gb|AAF00675.1~gene_id:MQC12.10~similar to unknown
  misc_feature (3)..(633): Homolog of NCBI NO: 15223613 NR Description: unknown protein; protein id: At1g50660.1
  misc_feature (11)..(613): Homolog of NCBI NO: 38344183 NR Description: OSJNBa0053K19.22 [Oryza sativa (japonica
  misc_feature (1)..(167): Homolog of NCBI NO: 9294552 NR Description: gene_id:MQC12.9~unknown protein [Arabidopsis
  misc_feature (10)..(672): Homolog of NCBI NO: 40253811 NR Description: hypothetical protein [Oryza sativa (japonica group)] >gi|40253851|dbj|BAD05787.1| hypothetical protein [Oryza
  misc_feature (249)..(403): Homolog of NCBI NO: 29367527 NR Description: unknown [Oryza sativa (japonica cultivar-group)]
  misc_feature (190)..(404): Homolog of NCBI NO: 15724288 NR Description: AT3g11590/F24K9_26 [Arabidopsis thaliana]
  misc_feature (190)..(404): Homolog of NCBI NO: 18399293 NR Description: expressed protein; protein id: At3g11590.1, by cDNA: gi_15724287 [Arabidopsis thaliana]
  misc_feature (231)..(461): Homolog of NCBI NO: 34394172 NR Description: hypothetical protein [Oryza sativa (japonica
  misc_feature (205)..(475): Homolog of NCBI NO: 38346645 NR Description: OSJNBa0072D21.15 [Oryza sativa (japonica
MKFTGKSNLTATLPATVPNIRDIHRRRARKPSFTRQRRSGVSVRRLSRPETPQLKSKVEDQNIERCGGVEDGDNEDDDCNKMRCQERSRSVRPDTVRKLAAGVWRLRVPDAVSSGGDKRSKDRLRFQETAGPAGNLGPLFYYHHHDDKHSGFQSNNSRNKHSRFLCKHEPSVPFPHCAMEGATKWDPICLDTRDDVHQIYTNVKWNNQQVNDVSLASSIELKLQEARACIKDLESEKRSQKKKLEQFLKKVSEERAAWRSREHEKVRAIIDDMKADMNQEKKTRQRLEIVNSKLVNELADSKLAVKRYMHDYQQERKARELIEEVCDELAKEIEEDKAEIEALKSESMNLREEVDDERRMLQMAEVWREERVQMKLIDAKVTLEEKYSQMNKLVGDMEAFLSSRNTTGVKEVRVAELLRETAASVDNIQEIKEFTYEPAKPDDILMLFEQMNMGENQDRESEQYVAYSPVSHASKAHTVSPDVNLINKGRHSNAFTDQNGEFEEDDSGWETVSHSEEHGSSYSPDESIPNISNTHHRNSNVSMNGTEYEKTLLREIKEVCSVPRRQSKKLPSMAKLWSSLEGMNGRVSNARKSTVEMVSPETGSNKGGFNTLDLVGQWSSSPDSANANLNRGGRKGCIEWPRGAHKNSLKTKLIEAQIESQKVQLKHVLEHKI

SEQ ID NO: 86912 - protein, 592 aa, Arabidopsis thaliana
  peptide (1)..(592): Ceres Seq. ID no. 12695098
  misc_feature (112)..(311): Pfam Name: Myosin tail Pfam Description: Myosin tail
  misc_feature (98)..(592): Homolog of NCBI NO: 9294553 NR Description: gb|AAF00675.1~gene_id:MQC12.10~similar to unknown
  misc_feature (1)..(552): Homolog of NCBI NO: 15223613 NR Description: unknown protein; protein id: At1g50660.1
  misc_feature (1)..(532): Homolog of NCBI NO: 38344183 NR Description: OSJNBa0053K19.22 [Oryza sativa (japonica
  misc_feature (1)..(86): Homolog of NCBI NO: 9294552 NR Description: gene_id:MQC12.9~unknown protein [Arabidopsis
  misc_feature (1)..(591): Homolog of NCBI NO: 40253811 NR Description: hypothetical protein [Oryza sativa (japonica group)] >gi|40253851|dbj|BAD05787.1| hypothetical protein [Oryza
  misc_feature (168)..(322): Homolog of NCBI NO: 29367527 NR Description: unknown [Oryza sativa (japonica cultivar-group)]
  misc_feature (109)..(323): Homolog of NCBI NO: 15724288 NR Description: AT3g11590/F24K9_26 [Arabidopsis thaliana]
  misc_feature (109)..(323): Homolog of NCBI NO: 18399293 NR Description: expressed protein; protein id: At3g11590.1, by cDNA: gi_15724287 [Arabidopsis thaliana]
  misc_feature (150)..(380): Homolog of NCBI NO: 34394172 NR Description: hypothetical protein [Oryza sativa (japonica
  misc_feature (124)..(394): Homolog of NCBI NO: 38346645 NR Description: OSJNBa0072D21.15 [Oryza sativa (japonica
MRCQERSRSVRPDTVRKLAAGVWRLRVPDAVSSGGDKRSKDRLRFQETAGPAGNLGPLFYYHHHDDKHSGFQSNNSRNKHSRFLCKHEPSVPFPHCAMEGATKWDPICLDTRDDVHQIYTNVKWNNQQVNDVSLASSIELKLQEARACIKDLESEKRSQKKKLEQFLKKVSEERAAWRSREHEKVRAIIDDMKADMNQEKKTRQRLEIVNSKLVNELADSKLAVKRYMHDYQQERKARELIEEVCDELAKEIEEDKAEIEALKSESMNLREEVDDERRMLQMAEVWREERVQMKLIDAKVTLEEKYSQMNKLVGDMEAFLSSRNTTGVKEVRVAELLRETAASVDNIQEIKEFTYEPAKPDDILMLFEQMNMGENQDRESEQYVAYSPVSHASKAHTVSPDVNLINKGRHSNAFTDQNGEFEEDDSGWETVSHSEEHGSSYSPDESIPNISNTHHRNSNVSMNGTEYEKTLLREIKEVCSVPRRQSKKLPSMAKLWSSLEGMNGRVSNARKSTVEMVSPETGSNKGGFNTLDLVGQWSSSPDSANANLNRGGRKGCIEWPRGAHKNSLKTKLIEAQIESQKVQLKHVLEHKI

SEQ ID NO: 86913 - protein, 495 aa, Arabidopsis thaliana
  peptide (1)..(495): Ceres Seq. ID no. 12695099
  misc_feature (15)..(214): Pfam Name: Myosin tail Pfam Description: Myosin tail
  misc_feature (1)..(495): Homolog of NCBI NO: 9294553 NR Description: gb|AAF00675.1~gene_id:MQC12.10~similar to unknown
  misc_feature (1)..(455): Homolog of NCBI NO: 15223613 NR Description: unknown protein; protein id: At1g50660.1
  misc_feature (1)..(435): Homolog of NCBI NO: 38344183 NR Description: OSJNBa0053K19.22 [Oryza sativa (japonica
  misc_feature (1)..(494): Homolog of NCBI NO: 40253811 NR Description: hypothetical protein [Oryza sativa (japonica group)] >gi|40253851|dbj|BAD05787.1| hypothetical protein [Oryza
  misc_feature (71)..(225): Homolog of NCBI NO: 29367527 NR Description: unknown [Oryza sativa (japonica cultivar-group)]
  misc_feature (12)..(226): Homolog of NCBI NO: 15724288 NR Description: AT3g11590/F24K9_26 [Arabidopsis thaliana]
  misc_feature (12)..(226): Homolog of NCBI NO: 18399293 NR Description: expressed protein; protein id: At3g11590.1, by cDNA: gi_15724287 [Arabidopsis thaliana]
  misc_feature (53)..(283): Homolog of NCBI NO: 34394172 NR Description: hypothetical protein [Oryza sativa (japonica
  misc_feature (27)..(297): Homolog of NCBI NO: 38346645 NR Description: OSJNBa0072D21.15 [Oryza sativa (japonica
  misc_feature (46)..(495): Homolog of NCBI NO: 15223613 NR Description: unknown protein; protein id: At1g50660.1
MEGATKWDPICLDTRDDVHQIYTNVKWNNQQVNDVSLASSIELKLQEARACIKDLESEKRSQKKKLEQFLKKVSEERAAWRSREHEKVRAIIDDMKADMNQEKKTRQRLEIVNSKLVNELADSKLAVKRYMHDYQQERKARELIEEVCDELAKEIEEDKAEIEALKSESMNLREEVDDERRMLQMAEVWREERVQMKLIDAKVTLEEKYSQMNKLVGDMEAFLSSRNTTGVKEVRVAELLRETAASVDNIQEIKEFTYEPAKPDDILMLFEQMNMGENQDRESEQYVAYSPVSHASKAHTVSPDVNLINKGRHSNAFTDQNGEFEEDDSGWETVSHSEEHGSSYSPDESIPNISNTHHRNSNVSMNGTEYEKTLLREIKEVCSVPRRQSKKLPSMAKLWSSLEGMNGRVSNARKSTVEMVSPETGSNKGGFNTLDLVGQWSSSPDSANANLNRGGRKGCIEWPRGAHKNSLKTKLIEAQIESQKVQLKHVLEHKI

SEQ ID NO: 86914 - DNA, 1469 bp, Arabidopsis thaliana
  misc_feature (1)..(1469): Ceres Seq. ID no. 12695185
  misc_feature: MA Experiment ID: 108463 Result: Up-regulated in Transcription
  misc_feature: MA Experiment 108463 PARAMETER Experiment Name: At_Germinating_Seeds_cDNA_P Parameter: Age (day) Value: 3 vs. 0
  misc_feature: MA Experiment 108463 PARAMETER Experiment Name: At_Germinating_Seeds_cDNA_P Parameter: Tissue Value: Germinating Seeds
  misc_feature: MA Experiment ID: 108464 Result: Up-regulated in Transcription
  misc_feature: MA Experiment 108464 PARAMETER Experiment Name: At_Germinating_Seeds_cDNA_P Parameter: Age (day) Value: 4 vs. 0
  misc_feature: MA Experiment 108464 PARAMETER Experiment Name: At_Germinating_Seeds_cDNA_P Parameter: Tissue Value: Germinating Seeds
  misc_feature: MA Experiment ID: 108573 Result: Up-regulated in Transcription
  misc_feature: MA Experiment 108573 PARAMETER Experiment Name: At_Drought_cDNA_P Parameter: Timepoint (hr) Value: 6
  misc_feature: MA Experiment 108573 PARAMETER Experiment Name: At_Drought_cDNA_P Parameter: Tissue Value: Aerial
  misc_feature: MA Experiment 108573 PARAMETER Experiment Name: At_Drought_cDNA_P Parameter: Treatment Value: Drought vs. No Drought
  misc_feature: MA Experiment ID: 108574 Result: Down-regulated in Transcription
  misc_feature: MA Experiment 108574 PARAMETER Experiment Name: At_Wounding__cDNA_P Parameter: Timepoint (hr) Value: 1
  misc_feature: MA Experiment 108574 PARAMETER Experiment Name: At_Wounding__cDNA_P Parameter: Tissue Value: Aerial
  misc_feature: MA Experiment 108574 PARAMETER Experiment Name: At_Wounding__cDNA_P Parameter: Treatment Value: Wounding vs. No Wounding
  misc_feature: MA Experiment ID: 108579 Result: Down-regulated in Transcription
  misc_feature: MA Experiment 108579 PARAMETER Experiment Name: At_4deg_Cold_cDNA_P Parameter: Temperature (deg C) Value: 4 vs. 22
  misc_feature: MA Experiment 108579 PARAMETER Experiment Name: At_4deg_Cold_cDNA_P Parameter: Timepoint (hr) Value: 6
  misc_feature: MA Experiment 108579 PARAMETER Experiment Name: At_4deg_Cold_cDNA_P Parameter: Tissue Value: Aerial
  misc_feature: MA Experiment ID: 20000087 Result: Down-regulated in Transcription
  misc_feature: MA Experiment 20000087 PARAMETER Experiment Name: At_100uM_ABA_Mutants_cDNA_P Parameter: Plant Line Value: WS
  misc_feature: MA Experiment 20000087 PARAMETER Experiment Name: At_100uM_ABA_Mutants_cDNA_P Parameter: Timepoint (hr) Value: 6
  misc_feature: MA Experiment 20000087 PARAMETER Experiment Name: At_100uM_ABA_Mutants_cDNA_P Parameter: Tissue Value: Aerial
  misc_feature: MA Experiment 20000087 PARAMETER Experiment Name: At_100uM_ABA_Mutants_cDNA_P Parameter: Treatment Value: 100uM ABA vs. No Treatment
  misc_feature: MA Experiment ID: 20000111 Result: Down-regulated in Transcription
  misc_feature: MA Experiment 20000111 PARAMETER Experiment Name: At_42deg_Heat_cDNA_P Parameter: Temperature (deg C) Value: 42 vs. 22
  misc_feature: MA Experiment 20000111 PARAMETER Experiment Name: At_42deg_Heat_cDNA_P Parameter: Timepoint (hr) Value: 6
  misc_feature: MA Experiment 20000111 PARAMETER Experiment Name: At_42deg_Heat_cDNA_P Parameter: Tissue Value: Aerial
  misc_feature: MA Experiment ID: 20000173 Result: Down-regulated in Transcription
  misc_feature: MA Experiment 20000173 PARAMETER Experiment Name: At_42deg_Heat_P Parameter: Age (day) Value: 14
  misc_feature: MA Experiment 20000173 PARAMETER Experiment Name: At_42deg_Heat_P Parameter: Organism Value: A. thaliana
  misc_feature: MA Experiment 20000173 PARAMETER Experiment Name: At_42deg_Heat_P Parameter: Plant Line Value: WS
  misc_feature: MA Experiment 20000173 PARAMETER Experiment Name: At_42deg_Heat_P Parameter: Temperature (deg C) Value: 42 vs. 22
  misc_feature: MA Experiment 20000173 PARAMETER Experiment Name: At_42deg_Heat_P Parameter: Timepoint (hr) Value: 6
  misc_feature: MA Experiment 20000173 PARAMETER Experiment Name: At_42deg_Heat_P Parameter: Tissue Value: Aerial
  misc_feature: MA Experiment ID: 20000179 Result: Up-regulated in Transcription
  misc_feature: MA Experiment 20000179 PARAMETER Experiment Name: At_Germinating_Seeds_P Parameter: Age (hr) Value: 6 vs. 0
  misc_feature: MA Experiment 20000179 PARAMETER Experiment Name: At_Germinating_Seeds_P Parameter: Tissue Value: Germinating Seeds
  misc_feature: MA Experiment ID: 20000180 Result: Up-regulated in Transcription
  misc_feature: MA Experiment 20000180 PARAMETER Experiment Name: At_Germinating_Seeds_P Parameter: Age (hr) Value: 24 vs. 0
  misc_feature: MA Experiment 20000180 PARAMETER Experiment Name: At_Germinating_Seeds_P Parameter: Tissue Value: Germinating Seeds
  misc_feature: MA Experiment ID: 20000184 Result: Down-regulated in Transcription
  misc_feature: MA Experiment 20000184 PARAMETER Experiment Name: At_Shoots__P Parameter: Age (day) Value: 7
  misc_feature: MA Experiment 20000184 PARAMETER Experiment Name: At_Shoots__P Parameter: Tissue Value: Shoots vs. Whole Plant
  misc_feature: MA Experiment ID: 20000234 Result: Down-regulated in Transcription
  misc_feature: MA Experiment 20000234 PARAMETER Experiment Name: At_Siliques_P Parameter: Age (day) Value: 21
  misc_feature: MA Experiment 20000234 PARAMETER Experiment Name: At_Siliques_P Parameter: Organism Value: A. thaliana
  misc_feature: MA Experiment 20000234 PARAMETER Experiment Name: At_Siliques_P Parameter: Plant Line Value: WS
  misc_feature: MA Experiment 20000234 PARAMETER Experiment Name: At_Siliques_P Parameter: Tissue Value: Less Than 5mm Siliques vs. Whole Plant
  misc_feature: MA Experiment ID: 20000235 Result: Down-regulated in Transcription
  misc_feature: MA Experiment 20000235 PARAMETER Experiment Name: At_Siliques_P Parameter: Age (day) Value: 21
  misc_feature: MA Experiment 20000235 PARAMETER Experiment Name: At_Siliques_P Parameter: Organism Value: A. thaliana
  misc_feature: MA Experiment 20000235 PARAMETER Experiment Name: At_Siliques_P Parameter: Plant Line Value: WS
  misc_feature: MA Experiment 20000235 PARAMETER Experiment Name: At_Siliques_P Parameter: Tissue Value: 5-10mm Siliques vs. Whole Plant
  misc_feature: MA Experiment ID: 20000264 Result: Down-regulated in Transcription
  misc_feature: MA Experiment 20000264 PARAMETER Experiment Name: At_Open_Flower_P Parameter: Age (day) Value: 21
  misc_feature: MA Experiment 20000264 PARAMETER Experiment Name: At_Open_Flower_P Parameter: Plant Line Value: WS
  misc_feature: MA Experiment 20000264 PARAMETER Experiment Name: At_Open_Flower_P Parameter: Tissue Value: Open Flower vs. Whole Plant
  misc_feature: MA Experiment ID: 20000265 Result: Down-regulated in Transcription
  misc_feature: MA Experiment 20000265 PARAMETER Experiment Name: At_Open_Flower_P Parameter: Age (day) Value: 21
  misc_feature: MA Experiment 20000265 PARAMETER Experiment Name: At_Open_Flower_P Parameter: Plant Line Value: WS
  misc_feature: MA Experiment 20000265 PARAMETER Experiment Name: At_Open_Flower_P Parameter: Tissue Value: Closed Flower vs. Whole Plant
  misc_feature: MA Experiment ID: 20000286 Result: Down-regulated in Transcription
  misc_feature: MA Experiment 20000286 PARAMETER Experiment Name: At_Open_Flower_P Parameter: Age (day) Value: 21
  misc_feature: MA Experiment 20000286 PARAMETER Experiment Name: At_Open_Flower_P Parameter: Plant Line Value: WS
  misc_feature: MA Experiment 20000286 PARAMETER Experiment Name: At_Open_Flower_P Parameter: Tissue Value: Half Open vs. Whole Plant
  misc_feature: MA Experiment ID: 20001248 Result: Up-regulated in Transcription
  misc_feature: MA Experiment 20001248 PARAMETER Experiment Name: At_Far-red-induction_P Parameter: Age (day) Value: 7
  misc_feature: MA Experiment 20001248 PARAMETER Experiment Name: At_Far-red-induction_P Parameter: Light Value: Far-red vs. White
  misc_feature: MA Experiment 20001248 PARAMETER Experiment Name: At_Far-red-induction_P Parameter: Organism Value: A. thaliana
  misc_feature: MA Experiment 20001248 PARAMETER Experiment Name: At_Far-red-induction_P Parameter: Plant Line Value: Columbia
  misc_feature: MA Experiment 20001248 PARAMETER Experiment Name: At_Far-red-induction_P Parameter: Timepoint (hr) Value: 4
  misc_feature: MA Experiment 20001248 PARAMETER Experiment Name: At_Far-red-induction_P Parameter: Tissue Value: Whole Plant
  misc_feature: MA Experiment ID: 20001450 Result: Up-regulated in Transcription
  misc_feature: MA Experiment 20001450 PARAMETER Experiment Name: At_Far-red-induction_P Parameter: Age (day) Value: 7
  misc_feature: MA Experiment 20001450 PARAMETER Experiment Name: At_Far-red-induction_P Parameter: Light Value: Far-red vs. White
  misc_feature: MA Experiment 20001450 PARAMETER Experiment Name: At_Far-red-induction_P Parameter: Organism Value: A. thaliana
  misc_feature: MA Experiment 20001450 PARAMETER Experiment Name: At_Far-red-induction_P Parameter: Plant Line Value: Columbia
  misc_feature: MA Experiment 20001450 PARAMETER Experiment Name: At_Far-red-induction_P Parameter: Timepoint (hr) Value: 8
  misc_feature: MA Experiment 20001450 PARAMETER Experiment Name: At_Far-red-induction_P Parameter: Tissue Value: Whole Plant
  misc_feature: MA Experiment ID: 20001451 Result: Up-regulated in Transcription
  misc_feature: MA Experiment 20001451 PARAMETER Experiment Name: At_Far-red-induction_P Parameter: Age (day) Value: 7
  misc_feature: MA Experiment 20001451 PARAMETER Experiment Name: At_Far-red-induction_P Parameter: Light Value: Far-red vs. White
  misc_feature: MA Experiment 20001451 PARAMETER Experiment Name: At_Far-red-induction_P Parameter: Organism Value: A. thaliana
  misc_feature: MA Experiment 20001451 PARAMETER Experiment Name: At_Far-red-induction_P Parameter: Plant Line Value: Columbia
  misc_feature: MA Experiment 20001451 PARAMETER Experiment Name: At_Far-red-induction_P Parameter: Timepoint (hr) Value: 24
  misc_feature: MA Experiment 20001451 PARAMETER Experiment Name: At_Far-red-induction_P Parameter: Tissue Value: Whole Plant
accatttcaaagtgccactttttcttcctaaatcctctctctctctctccgttcccgagacaagcaaaagcttcaatctcaaatctttcagcagctacaaaaatgttcttcatctaaaagagactgtgaagcagagagagagagagagagagagagagagagagatgggaggtgtgacgtcatcagttgcggcgaagttcgctttcttcccgccgagtccgtcgtcttacaagctggtttacgatgaactgaccggacttcttctgatgaacccatttcctcaccgtgaaaacgttgaaatccttaagcttccgacacgtagaggaacagagatcgtggctatgtacgtcagacatccgatggctacctctactctgctttattcccatggaaacgccgccgatctgggccagatgtatgagctcttcatcgaattgagcatccatcttaaggttaatctcatggggtacgattactccgggtatggacaatctactggaaagccaagtgagcaccatacatatgctgatatcgaagctgcttataaatgtcttgaggaaacctatggagcaaaacaggaagacataatcctttatggccaatccgttggaagtggacctacattagatcttgctgctcggttgcctcaattaagagctgctgttctccatagcccgattctttctggtctaagagtaatgtatccagtgaagaagacatactggttcgacatcttcaagaatatcgacaaaatacctcttgtgaattgcccggttctcgtcattcacggaacttgtgatgaagttgttgactgttctcatggaaaacaactatgggaactctctaaagagaaatatgaaccgctttggctcgaaggcggtaaccactgtgatctagaacactatcctgaatacattaaacaccttaagaagttcatcacaaccgtagagagagatctctcctcgagggcgagcacggcccaattagagaaacagagcagcgatttggaaatgccgaggcagagcgtagatagaagagagaagccgaggcaaagcgttgataaaagggagaaagagaaacctccaaagggtccttcaaagaagagtaagctgagaatcacgttcgagcagcacttagatcggactaggagaagcgttgacttccacgaaaaggcaaggaagagcgttgaccatcatcagcatcatcagaatcatcatcagattgagagaggaaggaagagtgttgatagattggatagagtacggtctgagtaaaccggagaaaatctaccacacgtacataagttgttacagaacaagaacatttgatcttgatcttgattggccattctaatgtttatggttttttgttttgatttgtgagttattctctagttttatttgggtgtgtcatttcttgaatggtgaagcttaaatcttaagcaaacaaatgagagaaattaggtcttt

SEQ ID NO: 86915 - protein, 423 aa, Arabidopsis thaliana
  peptide (1)..(423): Ceres Seq. ID no. 12695186
  misc_feature (154)..(222): Pfam Name: alpha/beta hydrolase fold Pfam Description: alpha/beta hydrolase fold
  misc_feature (55)..(423): Homolog of NCBI NO: 15241394 NR Description: putative protein; protein id: At5g14390.1, by cDNA: gi_17529313 [Arabidopsis thaliana]
  misc_feature (55)..(423): Homolog of NCBI NO: 15232168 NR Description: unknown protein; protein id: At3g01690.1 thaliana] >gi|6016726|gb|AAF01552.1|AC009325_22 unknown protein thaliana] >gi|6091713|gb|AAF03425.1|AC010797_1 unknown protein
  misc_feature (55)..(422): Homolog of NCBI NO: 15233975 NR Description: putative protein; protein id: At4g24760.1, by cDNA: 121159., supported by cDNA: gi_18175920 [Arabidopsis
  misc_feature (55)..(416): Homolog of NCBI NO: 15230760 NR Description: unknown protein; protein id: At3g30380.1 thaliana] >gi|9294341|dbj|BAB02238.1| contains similarity to
  misc_feature (55)..(372): Homolog of NCBI NO: 10177798 NR Description: emb|CAB87778.1~gene_id:MXA21.9~strong similarity unknown protein [Arabidopsis thaliana] unknown protein [Arabidopsis thaliana]
  misc_feature (55)..(284): Homolog of NCBI NO: 18175921 NR Description: unknown protein [Arabidopsis thaliana]
  misc_feature (91)..(396): Homolog of NCBI NO: 34911338 NR Description: P0519D04.38 [Oryza sativa (japonica
  misc_feature (55)..(87): Homolog of NCBI NO: 34911338 NR Description: P0519D04.38 [Oryza sativa (japonica
  misc_feature (55)..(325): Homolog of NCBI NO: 22330474 NR Description: hypothetical protein; protein id: At1g66900.1, by cDNA: gi_17979070 [Arabidopsis thaliana] unknown protein [Arabidopsis thaliana]
  misc_feature (55)..(372): Homolog of NCBI NO: 15240861 NR Description: putative protein; protein id: At5g38220.1
HFKVPLFLPKSSLSLSVPETSKSFNLKSFSSYKNVLHLKETVKQREREREREREMGGVTSSVAAKFAFFPPSPSSYKLVYDELTGLLLMNPFPHRENVEILKLPTRRGTEIVAMYVRHPMATSTLLYSHGNAADLGQMYELFIELSIHLKVNLMGYDYSGYGQSTGKPSEHHTYADIEAAYKCLEETYGAKQEDIILYGQSVGSGPTLDLAARLPQLRAAVLHSPILSGLRVMYPVKKTYWFDIFKNIDKIPLVNCPVLVIHGTCDEVVDCSHGKQLWELSKEKYEPLWLEGGNHCDLEHYPEYIKHLKKFITTVERDLSSRASTAQLEKQSSDLEMPRQSVDRREKPRQSVDKREKEKPPKGPSKKSKLRITFEQHLDRTRRSVDFHEKARKSVDHHQHHQNHHQIERGRKSVDRLDRVRSE

SEQ ID NO: 86916 - protein, 369 aa, Arabidopsis thaliana; identical to SEQ ID NO: 41674
  peptide (1)..(369): Ceres Seq. ID no. 12695187
  misc_feature (100)..(168): Pfam Name: alpha/beta hydrolase fold Pfam Description: alpha/beta hydrolase fold
  misc_feature (1)..(369): Homolog of NCBI NO: 15241394 NR Description: putative protein; protein id: At5g14390.1, by cDNA: gi_17529313 [Arabidopsis thaliana]
  misc_feature (1)..(369): Homolog of NCBI NO: 15232168 NR Description: unknown protein; protein id: At3g01690.1 thaliana] >gi|6016726|gb|AAF01552.1|AC009325_22 unknown protein thaliana] >gi|6091713|gb|AAF03425.1|AC010797_1 unknown protein
  misc_feature (1)..(368): Homolog of NCBI NO: 15233975 NR Description: putative protein; protein id: At4g24760.1, by cDNA: 121159., supported by cDNA: gi_18175920 [Arabidopsis
  misc_feature (1)..(362): Homolog of NCBI NO: 15230760 NR Description: unknown protein; protein id: At3g30380.1 thaliana] >gi|9294341|dbj|BAB02238.1| contains similarity to
  misc_feature (1)..(318): Homolog of NCBI NO: 10177798 NR Description: emb|CAB87778.1~gene_id:MXA21.9~strong similarity unknown protein [Arabidopsis thaliana] unknown protein [Arabidopsis thaliana]
  misc_feature (1)..(230): Homolog of NCBI NO: 18175921 NR Description: unknown protein [Arabidopsis thaliana]
  misc_feature (37)..(342): Homolog of NCBI NO: 34911338 NR Description: P0519D04.38 [Oryza sativa (japonica
  misc_feature (1)..(33): Homolog of NCBI NO: 34911338 NR Description: P0519D04.38 [Oryza sativa (japonica
  misc_feature (1)..(271): Homolog of NCBI NO: 22330474 NR Description: hypothetical protein; protein id: At1g66900.1, by cDNA: gi_17979070 [Arabidopsis thaliana] unknown protein [Arabidopsis thaliana]
  misc_feature (1)..(318): Homolog of NCBI NO: 15240861 NR Description: putative protein; protein id: At5g38220.1

SEQ ID NO: 86917 - protein, 335 aa, Arabidopsis thaliana; identical to SEQ ID NO: 41675
  peptide (1)..(335): Ceres Seq. ID no. 12695188
  misc_feature (66)..(134): Pfam Name: alpha/beta hydrolase fold Pfam Description: alpha/beta hydrolase fold
  misc_feature (1)..(335): Homolog of NCBI NO: 15241394 NR Description: putative protein; protein id: At5g14390.1, by cDNA: gi_17529313 [Arabidopsis thaliana]
  misc_feature (1)..(335): Homolog of NCBI NO: 15232168 NR Description: unknown protein; protein id: At3g01690.1 thaliana] >gi|6016726|gb|AAF01552.1|AC009325_22 unknown protein thaliana] >gi|6091713|gb|AAF03425.1|AC010797_1 unknown protein
  misc_feature (1)..(334): Homolog of NCBI NO: 15233975 NR Description: putative protein; protein id: At4g24760.1, by cDNA: 121159., supported by cDNA: gi_18175920 [Arabidopsis
  misc_feature (1)..(328): Homolog of NCBI NO: 15230760 NR Description: unknown protein; protein id: At3g30380.1 thaliana] >gi|9294341|dbj|BAB02238.1| contains similarity to
  misc_feature (1)..(284): Homolog of NCBI NO: 10177798 NR Description: emb|CAB87778.1~gene_id:MXA21.9~strong similarity unknown protein [Arabidopsis thaliana] unknown protein [Arabidopsis thaliana]
  misc_feature (1)..(196): Homolog of NCBI NO: 18175921 NR Description: unknown protein [Arabidopsis thaliana]
  misc_feature (3)..(308): Homolog of NCBI NO: 34911338 NR Description: P0519D04.38 [Oryza sativa (japonica
  misc_feature (1)..(237): Homolog of NCBI NO: 22330474 NR Description: hypothetical protein; protein id: At1g66900.1, by cDNA: gi_17979070 [Arabidopsis thaliana] unknown protein [Arabidopsis thaliana]
  misc_feature (1)..(284): Homolog of NCBI NO: 15240861 NR Description: putative protein; protein id: At5g38220.1
  misc_feature (1)..(248): Homolog of NCBI NO: 28393521 NR Description: unknown protein [Arabidopsis thaliana]

SEQ ID NO: 86918 - DNA, 2771 bp, Arabidopsis thaliana
  misc_feature (1)..(2771): Ceres Seq. ID no. 12695189
  misc_feature: MA Experiment ID: 20000173 Result: Down-regulated in Transcription
  misc_feature: MA Experiment 20000173 PARAMETER Experiment Name: At_42deg_Heat_P Parameter: Age (day) Value: 14
  misc_feature: MA Experiment 20000173 PARAMETER Experiment Name: At_42deg_Heat_P Parameter: Organism Value: A. thaliana
  misc_feature: MA Experiment 20000173 PARAMETER Experiment Name: At_42deg_Heat_P Parameter: Plant Line Value: WS
  misc_feature: MA Experiment 20000173 PARAMETER Experiment Name: At_42deg_Heat_P Parameter: Temperature (deg C) Value: 42 vs. 22
  misc_feature: MA Experiment 20000173 PARAMETER Experiment Name: At_42deg_Heat_P Parameter: Timepoint (hr) Value: 6
  misc_feature: MA Experiment 20000173 PARAMETER Experiment Name: At_42deg_Heat_P Parameter: Tissue Value: Aerial
  misc_feature: MA Experiment ID: 20000184 Result: Down-regulated in Transcription
  misc_feature: MA Experiment 20000184 PARAMETER Experiment Name: At_Shoots__P Parameter: Age (day) Value: 7
  misc_feature: MA Experiment 20000184 PARAMETER Experiment Name: At_Shoots__P Parameter: Tissue Value: Shoots vs. Whole Plant
agacgacagaaaagctaaccacaagaggaggagagaaactcgataacaaacaagagaaagagaaagcgagattctaaaatctaatctcgtgcttccaattcaaataattttgtctccttagcggatcgatcgtagattataaagctccgccgtcgcctccgccgcaatcgacggcggtgtctacgtcgctttcgtttcgtgcgtaacaggaggagcagcagcaaaataagtcagcttaagtaacgccgtctttgatttgacttgagataagtattttggtgatatggcattgatgatgtttccgcatttgctcgacgttgacgaaaagtaaaatgctggcgaattggaagaaaccacatacagattgatgctctcttcagtcgacctcttttgtaaatttgttgaaacttacggggtcgaaggtgtgtagcatatatgctataagaagattataaagtaaaaattatggaatcgggttcagagaaaaagttccctctcaatgcaaaagactacaagttatatgaagaaattggagatggtgtcagtgcgactgtgcatagagctttgtgtataccgcttaatgtggtagttgctatcaaggttcttgatctggaaaagtgcaacaacgatctggatgggatccggagagaggtgcaaacaatgagtctgatcaaccatccaaatgtgttgcaagctcattgctcatttaccaccggacaccagctttgggttgtgatgccttacatggctggaggatcttgtctccatataattaagtcttcctatccagatggatttgaggaacctgttatcgctactttacttcgtgagactctgaaagctcttgtatatcttcatgctcatgggcatatccacagggatgtgaaggctggaaacattttattggattccaatggtgccgttaagttagcagactttggagtatcagcttgcatgtttgatacgggagatagacaacgttccagaaatacatttgttgggactccatgctggatggctcctgaagtcatgcagcaactacatggatatgatttcaaagcagatgtatggtcatttggaataacagcacttgaattggcacatggtcatgccccattttccaaatatccgccaatgaaggttttgctgatgaccttacaaaatgcacctcctggacttgactacgagagagacaaaagattctcgaaagccttcaaggaaatggtgggtacatgcctggtgaaggacccaaagaagcgtccaacttcagaaaagcttttgaaacaccctttcttcaaacatgcacgtccagctgattacctggttaaaacaattctaaatggtcttcctccattaggtgatcgctatagacaaataaagtcgaaggaagctgatctcctaatgcaaaacaaatctgaatatgaagcgcacttatcacagcaagagtatataaggggaataagcgcttggaatttcaatctcgaggacctaaaaactcaagctgcccttatttcagatgatgatacttcacatgctgaagagcccgatttcaaccaaaagcaatgtgaaagacaggatgaatctgctctttcccctgaaagggctagcagctcagcaacagctcctagtcaagatgacgaactgaatgatattcatgatttagagagttctttcgcctcatttccaatcaaacctcttcaagcactaaaaggctgctttgatatcagtgaggacgaggataatgcaactactcctgattggaaagatgctaatgtaaattctggacaacagcttttaacaaaggcttccattggatctttggccgaaaccacgaaagaagaggacactgcagcacaaaacacttctttaccacgtcatgtcatttctgaacagaaaaaatatttgagcggttcaattataccagagagtactttctctccaaaaagaatcacatctgatgctgatagggagtttcaacagcgtagatatcaaacagagcggagctacagcggatcattataccgcaccaagagagattccgtggacgagacgtcagaagtcccgcatgtggagcacaagggacggtttaaggtcacatcagcagatctgagtcccaagggatctacaaactctacattcacaccatttagtggtggtacaagcagccctagttgcctcaatgctacaaccgcctcaatcctcccatcaattcagtcgattttgcagcaaaatgctatgcaacgggaagagattttgagactaatcaaatacttggagcaaacctctgccaagcaacctggatcgcctgagacgaacgtcgatgacctattgcagacgcctcctgcaacctcacgagagagagaacttcagtctcaagtcatgctactacaacaaagcttttccagcctaacagaagaactaaagaaacagaagcagaaaaatgggcagttggagaatcagttgaacgcattaacacacagaaatgattgagtctcaaaagccatcgagacaaggctgagagatacaactggggatcttgagttaaaaaaacacaaaattccctttcaaggcaaaaagaagaaatagagaagatttgtgtgctttatatttctattgggtgtaatttgtttgacaggtttatattatgtgacaactactacagtgattttcttatttttggggaagttttccccacttttcttttttacttatttgtgttttatgatatgctatgtaaacaaaatactattgtttaattatgtttctgtgtg

SEQ ID NO: 86919 - protein, 674 aa, Arabidopsis thaliana
  peptide (1)..(674): Ceres Seq. ID no. 12695190
  misc_feature (16)..(277): Pfam Name: Protein kinase domain Pfam Description: Protein kinase domain
  misc_feature (1)..(551): Homolog of NCBI NO: 11358725 NR Description: protein kinase-like protein - Arabidopsis thaliana
  misc_feature (1)..(364): Homolog of NCBI NO: 15223145 NR Description: Ste-20 related kinase SPAK, putative; protein id:
  misc_feature (472)..(674): Homolog of NCBI NO: 15223145 NR Description: Ste-20 related kinase SPAK, putative; protein id:
  misc_feature (325)..(672): Homolog of NCBI NO: 30681538 NR Description: protein kinase family [Arabidopsis thaliana]
  misc_feature (6)..(365): Homolog of NCBI NO: 30681538 NR Description: protein kinase family [Arabidopsis thaliana]
  misc_feature (3)..(361): Homolog of NCBI NO: 22328895 NR Description: putative protein; protein id: At4g24100.1, by cDNA: gi_20268685 [Arabidopsis thaliana] unknown protein [Arabidopsis thaliana]
  misc_feature (574)..(672): Homolog of NCBI NO: 22328895 NR Description: putative protein; protein id: At4g24100.1, by cDNA: gi_20268685 [Arabidopsis thaliana] unknown protein [Arabidopsis thaliana]
  misc_feature (6)..(365): Homolog of NCBI NO: 25407517 NR Description: hypothetical protein AT4g10730 [imported] - thaliana >gi|7267771|emb|CAB81174.1| putative protein kinase
  misc_feature (325)..(613): Homolog of NCBI NO: 25407517 NR Description: hypothetical protein AT4g10730 [imported] - thaliana >gi|7267771|emb|CAB81174.1| putative protein kinase
  misc_feature (1)..(349): Homolog of NCBI NO: 7485682 NR Description: hypothetical protein F17O7.3 - Arabidopsis
MESGSEKKFPLNAKDYKLYEEIGDGVSATVHRALCIPLNVVVAIKVLDLEKCNNDLDGIRREVQTMSLINHPNVLQAHCSFTTGHQLWVVMPYMAGGSCLHIIKSSYPDGFEEPVIATLLRETLKALVYLHAHGHIHRDVKAGNILLDSNGAVKLADFGVSACMFDTGDRQRSRNTFVGTPCWMAPEVMQQLHGYDFKADVWSFGITALELAHGHAPFSKYPPMKVLLMTLQNAPPGLDYERDKRFSKAFKEMVGTCLVKDPKKRPTSEKLLKHPFFKHARPADYLVKTILNGLPPLGDRYRQIKSKEADLLMQNKSEYEAHLSQQEYIRGISAWNFNLEDLKTQAALISDDDTSHAEEPDFNQKQCERQDESALSPERASSSATAPSQDDELNDIHDLESSFASFPIKPLQALKGCFDISEDEDNATTPDWKDANVNSGQQLLTKASIGSLAETTKEEDTAAQNTSLPRHVISEQKKYLSGSIIPESTFSPKRITSDADREFQQRRYQTERSYSGSLYRTKRDSVDETSEVPHVEHKGRFKVTSADLSPKGSTNSTFTPFSGGTSSPSCLNATTASILPSIQSILQQNAMQREEILRLIKYLEQTSAKQPGSPETNVDDLLQTPPATSRERELQSQVMLLQQSFSSLTEELKKQKQKNGQLENQLNALTHRND

SEQ ID NO: 86920 - protein, 609 aa, Arabidopsis thaliana
  peptide (1)..(609): Ceres Seq. ID no. 12695191
  misc_feature (1)..(212): Pfam Name: Protein kinase domain Pfam Description: Protein kinase domain
  misc_feature (1)..(486): Homolog of NCBI NO: 11358725 NR Description: protein kinase-like protein - Arabidopsis thaliana
  misc_feature (1)..(299): Homolog of NCBI NO: 15223145 NR Description: Ste-20 related kinase SPAK, putative; protein id:
  misc_feature (407)..(609): Homolog of NCBI NO: 15223145 NR Description: Ste-20 related kinase SPAK, putative; protein id:
  misc_feature (260)..(607): Homolog of NCBI NO: 30681538 NR Description: protein kinase family [Arabidopsis thaliana]
  misc_feature (1)..(300): Homolog of NCBI NO: 30681538 NR Description: protein kinase family [Arabidopsis thaliana]
  misc_feature (1)..(296): Homolog of NCBI NO: 22328895 NR Description: putative protein; protein id: At4g24100.1, by cDNA: gi_20268685 [Arabidopsis thaliana] unknown protein [Arabidopsis thaliana]
  misc_feature (509)..(607): Homolog of NCBI NO: 22328895 NR Description: putative protein; protein id: At4g24100.1, by cDNA: gi_20268685 [Arabidopsis thaliana] unknown protein [Arabidopsis thaliana]
  misc_feature (1)..(300): Homolog of NCBI NO: 25407517 NR Description: hypothetical protein AT4g10730 [imported] - thaliana >gi|7267771|emb|CAB81174.1| putative protein kinase
  misc_feature (260)..(548): Homolog of NCBI NO: 25407517 NR Description: hypothetical protein AT4g10730 [imported] - thaliana >gi|7267771|emb|CAB81174.1| putative protein kinase
  misc_feature (1)..(284): Homolog of NCBI NO: 7485682 NR Description: hypothetical protein F17O7.3 - Arabidopsis
MSLINHPNVLQAHCSFTTGHQLWVVMPYMAGGSCLHIIKSSYPDGFEEPVIATLLRETLKALVYLHAHGHIHRDVKAGNILLDSNGAVKLADFGVSACMFDTGDRQRSRNTFVGTPCWMAPEVMQQLHGYDFKADVWSFGITALELAHGHAPFSKYPPMKVLLMTLQNAPPGLDYERDKRFSKAFKEMVGTCLVKDPKKRPTSEKLLKHPFFKHARPADYLVKTILNGLPPLGDRYRQIKSKEADLLMQNKSEYEAHLSQQEYIRGISAWNFNLEDLKTQAALISDDDTSHAEEPDFNQKQCERQDESALSPERASSSATAPSQDDELNDIHDLESSFASFPIKPLQALKGCFDISEDEDNATTPDWKDANVNSGQQLLTKASIGSLAETTKEEDTAAQNTSLPRHVISEQKKYLSGSIIPESTFSPKRITSDADREFQQRRYQTERSYSGSLYRTKRDSVDETSEVPHVEHKGRFKVTSADLSPKGSTNSTFTPFSGGTSSPSCLNATTASILPSIQSILQQNAMQREEILRLIKYLEQTSAKQPGSPETNVDDLLQTPPATSRERELQSQVMLLQQSFSSLTEELKKQKQKNGQLENQLNALTHRND

SEQ ID NO: 86921 - protein, 584 aa, Arabidopsis thaliana
  peptide (1)..(584): Ceres Seq. ID no. 12695192
  misc_feature (1)..(187): Pfam Name: Protein kinase domain Pfam Description: Protein kinase domain
  misc_feature (1)..(461): Homolog of NCBI NO: 11358725 NR Description: protein kinase-like protein - Arabidopsis thaliana
  misc_feature (1)..(274): Homolog of NCBI NO: 15223145 NR Description: Ste-20 related kinase SPAK, putative; protein id:
  misc_feature (382)..(584): Homolog of NCBI NO: 15223145 NR Description: Ste-20 related kinase SPAK, putative; protein id:
  misc_feature (235)..(582): Homolog of NCBI NO: 30681538 NR Description: protein kinase family [Arabidopsis thaliana]
  misc_feature (1)..(275): Homolog of NCBI NO: 30681538 NR Description: protein kinase family [Arabidopsis thaliana]
  misc_feature (1)..(271): Homolog of NCBI NO: 22328895 NR Description: putative protein; protein id: At4g24100.1, by cDNA: gi_20268685 [Arabidopsis thaliana] unknown protein [Arabidopsis thaliana]
  misc_feature (484)..(582): Homolog of NCBI NO: 22328895 NR Description: putative protein; protein id: At4g24100.1, by cDNA: gi_20268685 [Arabidopsis thaliana] unknown protein [Arabidopsis thaliana]
  misc_feature (1)..(275): Homolog of NCBI NO: 25407517 NR Description: hypothetical protein AT4g10730 [imported] - thaliana >gi|7267771|emb|CAB81174.1| putative protein kinase
  misc_feature (235)..(523): Homolog of NCBI NO: 25407517 NR Description: hypothetical protein AT4g10730 [imported] - thaliana >gi|7267771|emb|CAB81174.1| putative protein kinase
  misc_feature (1)..(259): Homolog of NCBI NO: 7485682 NR Description: hypothetical protein F17O7.3 - Arabidopsis
MPYMAGGSCLHIIKSSYPDGFEEPVIATLLRETLKALVYLHAHGHIHRDVKAGNILLDSNGAVKLADFGVSACMFDTGDRQRSRNTFVGTPCWMAPEVMQQLHGYDFKADVWSFGITALELAHGHAPFSKYPPMKVLLMTLQNAPPGLDYERDKRFSKAFKEMVGTCLVKDPKKRPTSEKLLKHPFFKHARPADYLVKTILNGLPPLGDRYRQIKSKEADLLMQNKSEYEAHLSQQEYIRGISAWNFNLEDLKTQAALISDDDTSHAEEPDFNQKQCERQDESALSPERASSSATAPSQDDELNDIHDLESSFASFPIKPLQALKGCFDISEDEDNATTPDWKDANVNSGQQLLTKASIGSLAETTKEEDTAAQNTSLPRHVISEQKKYLSGSIIPESTFSPKRITSDADREFQQRRYQTERSYSGSLYRTKRDSVDETSEVPHVEHKGRFKVTSADLSPKGSTNSTFTPFSGGTSSPSCLNATTASILPSIQSILQQNAMQREEILRLIKYLEQTSAKQPGSPETNVDDLLQTPPATSRERELQSQVMLLQQSFSSLTEELKKQKQKNGQLENQLNALTHRND

SEQ ID NO: 86922 - DNA, 1565 bp, Arabidopsis thaliana
  misc_feature (1)..(1565): Ceres Seq. ID no. 12695205
  misc_feature: MA Experiment ID: 20000117 Result: Down-regulated in Transcription
  misc_feature: MA Experiment 20000117 PARAMETER Experiment Name: At_100uM_ABA_Mutants_cDNA_P Parameter: Plant Line Value: Columbia
  misc_feature: MA Experiment 20000117 PARAMETER Experiment Name: At_100uM_ABA_Mutants_cDNA_P Parameter: Timepoint (hr) Value: 6
  misc_feature: MA Experiment 20000117 PARAMETER Experiment Name: At_100uM_ABA_Mutants_cDNA_P Parameter: Tissue Value: Aerial
  misc_feature: MA Experiment 20000117 PARAMETER Experiment Name: At_100uM_ABA_Mutants_cDNA_P Parameter: Treatment Value: 100uM ABA vs. No Treatment
  misc_feature: MA Experiment ID: 20001451 Result: Down-regulated in Transcription
  misc_feature: MA Experiment 20001451 PARAMETER Experiment Name: At_Far-red-induction_P Parameter: Age (day) Value: 7
  misc_feature: MA Experiment 20001451 PARAMETER Experiment Name: At_Far-red-induction_P Parameter: Light Value: Far-red vs. White
  misc_feature: MA Experiment 20001451 PARAMETER Experiment Name: At_Far-red-induction_P Parameter: Organism Value: A. thaliana
  misc_feature: MA Experiment 20001451 PARAMETER Experiment Name: At_Far-red-induction_P Parameter: Plant Line Value: Columbia
  misc_feature: MA Experiment 20001451 PARAMETER Experiment Name: At_Far-red-induction_P Parameter: Timepoint (hr) Value: 24
  misc_feature: MA Experiment 20001451 PARAMETER Experiment Name: At_Far-red-induction_P Parameter: Tissue Value: Whole Plant
  misc_feature: MA Experiment ID: 20001911 Result: Down-regulated in Transcription
  misc_feature: MA Experiment 20001911 PARAMETER Experiment Name: At_Drought_Reproduction_P Parameter: Age (day) Value: 40
  misc_feature: MA Experiment 20001911 PARAMETER Experiment Name: At_Drought_Reproduction_P Parameter: Organism Value: A. thaliana
  misc_feature: MA Experiment 20001911 PARAMETER Experiment Name: At_Drought_Reproduction_P Parameter: Plant Line Value: WS
  misc_feature: MA Experiment 20001911 PARAMETER Experiment Name: At_Drought_Reproduction_P Parameter: Timepoint (day) Value: 10
  misc_feature: MA Experiment 20001911 PARAMETER Experiment Name: At_Drought_Reproduction_P Parameter: Tissue Value: Flowers
  misc_feature: MA Experiment 20001911 PARAMETER Experiment Name: At_Drought_Reproduction_P Parameter: Treatment Value: Drought vs. No Drought
gcatcgcctgtttttataatttctcgtcttgtacaaaataaaagactctctctctcttaaaatttctctttcgattctctcgcatttcaaaatttcatttccttatatagactcttaaggccggcgatttctgtgagtccatagattttcgctactccgccgtcagtttttctcaactccggaggctgtgtttttgccaccgctttgattcgccggtaagttcacgtatggccagtaatactttgaaagagatgaatagtcttcatgtaactgagaagataagtgactgtaaagctagcttgaccaagccatgtgttggtaaaatgaatggaaaatctgaagatagaccattaccaaactctgcctccttggattccagtgattctaaagttgtagaagcagagaaacccgagccagagatagctattgtggaagttgaatatattgaatctgaaaacttggataatgtagacgatgctgatgcagttctgaagtctgttttagctggactagagtccaaggactggatttcactctgtgatgctcttaataacgttcgccgactttcgatattccacaaggaagaaatgatgcatatgcttgaaaaagtgataccacttgtcgtgaaatcactgaaaaatccaagaagtgcggtgtgtaaaacggcatgcatgacatctgcagatatcttcagtgcatataataatcatataacagatctgttggagcctctgcttactcaactactcctcaagtcttcccaagacaaacggtttgtttgcgaggcagcagagaaagctttaacagcaatgaccaaatatgtttccccaaccttgctgttaccaaagctgcaaccttgtctcaaaaacaggaatcctcggatccgtgccaaagcatcattatgcttttctcgaagtgttcctcgactgggcgttgaagggattaaagaatatggaatcgacaaattagttcaagcagccgcatctcagcttagcgatcagctccctgaatcccgtgaggctgcacggactgtcctactagaacttcagagcgtatatgaaaaagctcatcctctcatcaaccctgagacatcatcaccagaagaacagcaaatcccggaggtagagccaattacttgggaaactttctgcaagtcaaaactgtcggctcttagcgcacaagccgtgcttcgtgtcaccaatgttgtcactgttactgctcgggagggtttggttactacaggttcatcatcttcatcccagttataaacattttctactacaaattttttaaaaaccgtttgctacgagtcatacggtttacatggtattctccggcatggcggcatgatctaccaaattggcaaattatggaccgataaaaagagtgaacgttcgtgtatgaaaaatcttggcttctttctgggttattttctttttgtggattctcatctgtcttcactaccagtacttgtttctttttcttatgtgtatatattctataccaagatttggtaagatagtcatgagtcttttggttatatgcaaaattggtcggattctttg

SEQ ID NO: 86923 - protein, 346 aa, Arabidopsis thaliana; identical to SEQ ID NO: 38495
  peptide (1)..(346): Ceres Seq. ID no. 12695206
  misc_feature (1)..(346): Homolog of NCBI NO: 15241493 NR Description: putative protein; protein id: At5g14790.1, by cDNA: 98046., supported by cDNA: gi_20260677 [Arabidopsis
  misc_feature (1)..(340): Homolog of NCBI NO: 18395821 NR Description: expressed protein; protein id: At3g01450.1, by cDNA: 125711. [Arabidopsis thaliana]
  misc_feature (1)..(340): Homolog of NCBI NO: 21537265 NR Description: unknown [Arabidopsis thaliana]
  misc_feature (1)..(245): Homolog of NCBI NO: 9294314 NR Description: gb|AAF24615.1~gene_id:K24M9.2~similar to unknown
  misc_feature (1)..(234): Homolog of NCBI NO: 15229670 NR Description: unknown protein; protein id: At3g18530.1
  misc_feature (248)..(340): Homolog of NCBI NO: 15229670 NR Description: unknown protein; protein id: At3g18530.1
  misc_feature (37)..(323): Homolog of NCBI NO: 18414533 NR Description: expressed protein; protein id: At4g15830.1,
  misc_feature (37)..(323): Homolog of NCBI NO: 21593517 NR Description: unknown [Arabidopsis thaliana]
  misc_feature (127)..(323): Homolog of NCBI NO: 7485173 NR Description: hypothetical protein - Arabidopsis thaliana hypothetical protein [Arabidopsis thaliana]
  misc_feature (1)..(91): Homolog of NCBI NO: 26449430 NR Description: unknown protein [Arabidopsis thaliana]

SEQ ID NO: 86924 - protein, 338 aa, Arabidopsis thaliana; identical to SEQ ID NO: 38496
  peptide (1)..(338): Ceres Seq. ID no. 12695207
  misc_feature (1)..(338): Homolog of NCBI NO: 15241493 NR Description: putative protein; protein id: At5g14790.1, by cDNA: 98046., supported by cDNA: gi_20260677 [Arabidopsis
  misc_feature (1)..(332): Homolog of NCBI NO: 18395821 NR Description: expressed protein; protein id: At3g01450.1, by cDNA: 125711. [Arabidopsis thaliana]
  misc_feature (1)..(332): Homolog of NCBI NO: 21537265 NR Description: unknown [Arabidopsis thaliana]
  misc_feature (1)..(237): Homolog of NCBI NO: 9294314 NR Description: gb|AAF24615.1~gene_id:K24M9.2~similar to unknown
  misc_feature (1)..(226): Homolog of NCBI NO: 15229670 NR Description: unknown protein; protein id: At3g18530.1
  misc_feature (240)..(332): Homolog of NCBI NO: 15229670 NR Description: unknown protein; protein id: At3g18530.1
  misc_feature (29)..(315): Homolog of NCBI NO: 18414533 NR Description: expressed protein; protein id: At4g15830.1,
  misc_feature (29)..(315): Homolog of NCBI NO: 21593517 NR Description: unknown [Arabidopsis thaliana]
  misc_feature (119)..(315): Homolog of NCBI NO: 7485173 NR Description: hypothetical protein - Arabidopsis thaliana hypothetical protein [Arabidopsis thaliana]
  misc_feature (1)..(83): Homolog of NCBI NO: 26449430 NR Description: unknown protein [Arabidopsis thaliana]

SEQ ID NO: 86925 - protein, 314 aa, Arabidopsis thaliana; identical to SEQ ID NO: 38497
  peptide (1)..(314): Ceres Seq. ID no. 12695208
  misc_feature (1)..(314): Homolog of NCBI NO: 15241493 NR Description: putative protein; protein id: At5g14790.1, by cDNA: 98046., supported by cDNA: gi_20260677 [Arabidopsis
  misc_feature (1)..(308): Homolog of NCBI NO: 18395821 NR Description: expressed protein; protein id: At3g01450.1, by cDNA: 125711. [Arabidopsis thaliana]
  misc_feature (1)..(308): Homolog of NCBI NO: 21537265 NR Description: unknown [Arabidopsis thaliana]
  misc_feature (1)..(213): Homolog of NCBI NO: 9294314 NR Description: gb|AAF24615.1~gene_id:K24M9.2~similar to unknown
  misc_feature (1)..(202): Homolog of NCBI NO: 15229670 NR Description: unknown protein; protein id: At3g18530.1
  misc_feature (216)..(308): Homolog of NCBI NO: 15229670 NR Description: unknown protein; protein id: At3g18530.1
  misc_feature (5)..(291): Homolog of NCBI NO: 18414533 NR Description: expressed protein; protein id: At4g15830.1,
  misc_feature (5)..(291): Homolog of NCBI NO: 21593517 NR Description: unknown [Arabidopsis thaliana]
  misc_feature (95)..(291): Homolog of NCBI NO: 7485173 NR Description: hypothetical protein - Arabidopsis thaliana hypothetical protein [Arabidopsis thaliana]
  misc_feature (1)..(59): Homolog of NCBI NO: 26449430 NR Description: unknown protein [Arabidopsis thaliana]

SEQ ID NO: 86926 - DNA, 1464 bp, Arabidopsis thaliana
  misc_feature (1)..(1464): Ceres Seq. ID no. 12695209
  misc_feature: MA Experiment ID: 108434 Result: Down-regulated in Transcription
  misc_feature: MA Experiment 108434 PARAMETER Experiment Name: At_Root_Tips_cDNA_P Parameter: Tissue Value: Root Tips
  misc_feature: MA Experiment ID: 108461 Result: Down-regulated in Transcription
  misc_feature: MA Experiment 108461 PARAMETER Experiment Name: At_Germinating_Seeds_cDNA_P Parameter: Age (day) Value: 1 vs. 0
  misc_feature: MA Experiment 108461 PARAMETER Experiment Name: At_Germinating_Seeds_cDNA_P Parameter: Tissue Value: Germinating Seeds
  misc_feature: MA Experiment ID: 108488 Result: Down-regulated in Transcription
  misc_feature: MA Experiment ID: 108501 Result: Down-regulated in Transcription
  misc_feature: MA Experiment 108501 PARAMETER Experiment Name: At_ap2_floral_buds_cDNA_P Parameter: Plant Line Value: ap2 (Ler.)
  misc_feature: MA Experiment 108501 PARAMETER Experiment Name: At_ap2_floral_buds_cDNA_P Parameter: Tissue Value: Closed Flower
  misc_feature: MA Experiment ID: 108572 Result: Up-regulated in Transcription
  misc_feature: MA Experiment 108572 PARAMETER Experiment Name: At_Drought_cDNA_P Parameter: Timepoint (hr) Value: 1
  misc_feature: MA Experiment 108572 PARAMETER Experiment Name: At_Drought_cDNA_P Parameter: Tissue Value: Aerial
  misc_feature: MA Experiment 108572 PARAMETER Experiment Name: At_Drought_cDNA_P Parameter: Treatment Value: Drought vs. No Drought
  misc_feature: MA Experiment ID: 108573 Result: Up-regulated in Transcription
  misc_feature: MA Experiment 108573 PARAMETER Experiment Name: At_Drought_cDNA_P Parameter: Timepoint (hr) Value: 6
  misc_feature: MA Experiment 108573 PARAMETER Experiment Name: At_Drought_cDNA_P Parameter: Tissue Value: Aerial
  misc_feature: MA Experiment 108573 PARAMETER Experiment Name: At_Drought_cDNA_P Parameter: Treatment Value: Drought vs. No Drought
  misc_feature: MA Experiment ID: 108579 Result: Down-regulated in Transcription
  misc_feature: MA Experiment 108579 PARAMETER Experiment Name: At_4deg_Cold_cDNA_P Parameter: Temperature (deg C) Value: 4 vs. 22
  misc_feature: MA Experiment 108579 PARAMETER Experiment Name: At_4deg_Cold_cDNA_P Parameter: Timepoint (hr) Value: 6
  misc_feature: MA Experiment 108579 PARAMETER Experiment Name: At_4deg_Cold_cDNA_P Parameter: Tissue Value: Aerial
  misc_feature: MA Experiment ID: 108585 Result: Up-regulated in Transcription
  misc_feature: MA Experiment 108585 PARAMETER Experiment Name: At_5mM_NaNP_cDNA_P Parameter: Timepoint (hr) Value: 6
  misc_feature: MA Experiment 108585 PARAMETER Experiment Name: At_5mM_NaNP_cDNA_P Parameter: Tissue Value: Aerial
  misc_feature: MA Experiment 108585 PARAMETER Experiment Name: At_5mM_NaNP_cDNA_P Parameter: Treatment Value: null
  misc_feature: MA Experiment ID: 108605 Result: Up-regulated in Transcription
  misc_feature: MA Experiment 108605 PARAMETER Experiment Name: At_100uM_ABA_cDNA_P Parameter: Timepoint (hr) Value: 6
  misc_feature: MA Experiment 108605 PARAMETER Experiment Name: At_100uM_ABA_cDNA_P Parameter: Tissue Value: Aerial
  misc_feature: MA Experiment 108605 PARAMETER Experiment Name: At_100uM_ABA_cDNA_P Parameter: Treatment Value: 100uM ABA vs. No Treatment
  misc_feature: MA Experiment ID: 108607 Result: Up-regulated in Transcription
  misc_feature: MA Experiment 108607 PARAMETER Experiment Name: At_100uM_ABA_cDNA_P Parameter: Timepoint (hr) Value: 4
  misc_feature: MA Experiment 108607 PARAMETER Experiment Name: At_100uM_ABA_cDNA_P Parameter: Tissue Value: Aerial
  misc_feature: MA Experiment 108607 PARAMETER Experiment Name: At_100uM_ABA_cDNA_P Parameter: Treatment Value: 100uM ABA vs. No Treatment
  misc_feature: MA Experiment ID: 108608 Result: Up-regulated in Transcription
  misc_feature: MA Experiment 108608 PARAMETER Experiment Name: At_100uM_ABA_cDNA_P Parameter: Timepoint (hr) Value: 1
  misc_feature: MA Experiment 108608 PARAMETER Experiment Name: At_100uM_ABA_cDNA_P Parameter: Tissue Value: Aerial
  misc_feature: MA Experiment 108608 PARAMETER Experiment Name: At_100uM_ABA_cDNA_P Parameter: Treatment Value: 100uM ABA vs. No Treatment
  misc_feature: MA Experiment ID: 108609 Result: Up-regulated in Transcription
  misc_feature: MA Experiment 108609 PARAMETER Experiment Name: At_100uM_ABA_cDNA_P Parameter: Timepoint (hr) Value: 24
  misc_feature: MA Experiment 108609 PARAMETER Experiment Name: At_100uM_ABA_cDNA_P Parameter: Tissue Value: Aerial
  misc_feature: MA Experiment 108609 PARAMETER Experiment Name: At_100uM_ABA_cDNA_P Parameter: Treatment Value: 100uM ABA vs. No Treatment
  misc_feature: MA Experiment ID: 20000069 Result: Up-regulated in Transcription
  misc_feature: MA Experiment 20000069 PARAMETER Experiment Name: At_100uM_ABA_Mutants_cDNA_P Parameter: Plant Line Value: CS23
  misc_feature: MA Experiment 20000069 PARAMETER Experiment Name: At_100uM_ABA_Mutants_cDNA_P Parameter: Timepoint (hr) Value: 6
  misc_feature: MA Experiment 20000069 PARAMETER Experiment Name: At_100uM_ABA_Mutants_cDNA_P Parameter: Tissue Value: Aerial
  misc_feature: MA Experiment 20000069 PARAMETER Experiment Name: At_100uM_ABA_Mutants_cDNA_P Parameter: Treatment Value: 100uM ABA vs. No Treatment
  misc_feature: MA Experiment ID: 20000070 Result: Up-regulated in Transcription
  misc_feature: MA Experiment 20000070 PARAMETER Experiment Name: At_100uM_ABA_Mutants_cDNA_P Parameter: Plant Line Value: CS24
  misc_feature: MA Experiment 20000070 PARAMETER Experiment Name: At_100uM_ABA_Mutants_cDNA_P Parameter: Timepoint (hr) Value: 6
  misc_feature: MA Experiment 20000070 PARAMETER Experiment Name: At_100uM_ABA_Mutants_cDNA_P Parameter: Tissue Value: Aerial
  misc_feature: MA Experiment 20000070 PARAMETER Experiment Name: At_100uM_ABA_Mutants_cDNA_P Parameter: Treatment Value: 100uM ABA vs. No Treatment
  misc_feature: MA Experiment ID: 20000071 Result: Up-regulated in Transcription
  misc_feature: MA Experiment 20000071 PARAMETER Experiment Name: At_100uM_ABA_Mutants_cDNA_P Parameter: Plant Line Value: CS8104
  misc_feature: MA Experiment 20000071 PARAMETER Experiment Name: At_100uM_ABA_Mutants_cDNA_P Parameter: Timepoint (hr) Value: 6
  misc_feature: MA Experiment 20000071 PARAMETER Experiment Name: At_100uM_ABA_Mutants_cDNA_P Parameter: Tissue Value: Aerial
  misc_feature: MA Experiment 20000071 PARAMETER Experiment Name: At_100uM_ABA_Mutants_cDNA_P Parameter: Treatment Value: 100uM ABA vs. No Treatment
  misc_feature: MA Experiment ID: 20000072 Result: Up-regulated in Transcription
  misc_feature: MA Experiment 20000072 PARAMETER Experiment Name: At_100uM_ABA_Mutants_cDNA_P Parameter: Plant Line Value: CS8105
  misc_feature: MA Experiment 20000072 PARAMETER Experiment Name: At_100uM_ABA_Mutants_cDNA_P Parameter: Timepoint (hr) Value: 6
  misc_feature: MA Experiment 20000072 PARAMETER Experiment Name: At_100uM_ABA_Mutants_cDNA_P Parameter: Tissue Value: Aerial
  misc_feature: MA Experiment 20000072 PARAMETER Experiment Name: At_100uM_ABA_Mutants_cDNA_P Parameter: Treatment Value: 100uM ABA vs. No Treatment
  misc_feature: MA Experiment ID: 20000086 Result: Up-regulated in Transcription
  misc_feature: MA Experiment 20000086 PARAMETER Experiment Name: At_100uM_ABA_Mutants_cDNA_P Parameter: Plant Line Value: CS22
  misc_feature: MA Experiment 20000086 PARAMETER Experiment Name: At_100uM_ABA_Mutants_cDNA_P Parameter: Timepoint (hr) Value: 6
  misc_feature: MA Experiment 20000086 PARAMETER Experiment Name: At_100uM_ABA_Mutants_cDNA_P Parameter: Tissue Value: Aerial
  misc_feature: MA Experiment 20000086 PARAMETER Experiment Name: At_100uM_ABA_Mutants_cDNA_P Parameter: Treatment Value: 100uM ABA vs. No Treatment
  misc_feature: MA Experiment ID: 20000087 Result: Up-regulated in Transcription
  misc_feature: MA Experiment 20000087 PARAMETER Experiment Name: At_100uM_ABA_Mutants_cDNA_P Parameter: Plant Line Value: WS
  misc_feature: MA Experiment 20000087 PARAMETER Experiment Name: At_100uM_ABA_Mutants_cDNA_P Parameter: Timepoint (hr) Value: 6
  misc_feature: MA Experiment 20000087 PARAMETER Experiment Name: At_100uM_ABA_Mutants_cDNA_P Parameter: Tissue Value: Aerial
  misc_feature: MA Experiment 20000087 PARAMETER Experiment Name: At_100uM_ABA_Mutants_cDNA_P Parameter: Treatment Value: 100uM ABA vs. No Treatment
  misc_feature: MA Experiment ID: 20000088 Result: Up-regulated in Transcription
  misc_feature: MA Experiment 20000088 PARAMETER Experiment Name: At_100uM_ABA_Mutants_cDNA_P Parameter: Plant Line Value: Landsberg
  misc_feature: MA Experiment 20000088 PARAMETER Experiment Name: At_100uM_ABA_Mutants_cDNA_P Parameter: Timepoint (hr) Value: 6
  misc_feature: MA Experiment 20000088 PARAMETER Experiment Name: At_100uM_ABA_Mutants_cDNA_P Parameter: Tissue Value: Aerial
  misc_feature: MA Experiment 20000088 PARAMETER Experiment Name: At_100uM_ABA_Mutants_cDNA_P Parameter: Treatment Value: 100uM ABA vs. No Treatment
  misc_feature: MA Experiment ID: 20000089 Result: Up-regulated in Transcription
  misc_feature: MA Experiment ID: 20000111 Result: Down-regulated in Transcription
  misc_feature: MA Experiment 20000111 PARAMETER Experiment Name: At_42deg_Heat_cDNA_P Parameter: Temperature (deg C) Value: 42 vs. 22
  misc_feature: MA Experiment 20000111 PARAMETER Experiment Name: At_42deg_Heat_cDNA_P Parameter: Timepoint (hr) Value: 6
  misc_feature: MA Experiment 20000111 PARAMETER Experiment Name: At_42deg_Heat_cDNA_P Parameter: Tissue Value: Aerial
  misc_feature: MA Experiment ID: 20000113 Result: Down-regulated in Transcription
  misc_feature: MA Experiment 20000113 PARAMETER Experiment Name: At_42deg_Heat_cDNA_P Parameter: Temperature (deg C) Value: 42 vs. 22
  misc_feature: MA Experiment 20000113 PARAMETER Experiment Name: At_42deg_Heat_cDNA_P Parameter: Timepoint (hr) Value: 8
  misc_feature: MA Experiment 20000113 PARAMETER Experiment Name: At_42deg_Heat_cDNA_P Parameter: Tissue Value: Aerial
  misc_feature: MA Experiment ID: 20000117 Result: Up-regulated in Transcription
  misc_feature: MA Experiment 20000117 PARAMETER Experiment Name: At_100uM_ABA_Mutants_cDNA_P Parameter: Plant Line Value: Columbia
  misc_feature: MA Experiment 20000117 PARAMETER Experiment Name: At_100uM_ABA_Mutants_cDNA_P Parameter: Timepoint (hr) Value: 6
  misc_feature: MA Experiment 20000117 PARAMETER Experiment Name: At_100uM_ABA_Mutants_cDNA_P Parameter: Tissue Value: Aerial
  misc_feature: MA Experiment 20000117 PARAMETER Experiment Name: At_100uM_ABA_Mutants_cDNA_P Parameter: Treatment Value: 100uM ABA vs. No Treatment
  misc_feature: MA Experiment ID: 20000166 Result: Up-regulated in Transcription
  misc_feature: MA Experiment 20000166 PARAMETER Experiment Name: At_100uM_ABA_P Parameter: Age (day) Value: 14
  misc_feature: MA Experiment 20000166 PARAMETER Experiment Name: At_100uM_ABA_P Parameter: Organism Value: A. thaliana
  misc_feature: MA Experiment 20000166 PARAMETER Experiment Name: At_100uM_ABA_P Parameter: Plant Line Value: WS
  misc_feature: MA Experiment 20000166 PARAMETER Experiment Name: At_100uM_ABA_P Parameter: Timepoint (hr) Value: 1
  misc_feature: MA Experiment 20000166 PARAMETER Experiment Name: At_100uM_ABA_P Parameter: Tissue Value: Aerial
  misc_feature: MA Experiment 20000166 PARAMETER Experiment Name: At_100uM_ABA_P Parameter: Treatment Value: 100uM ABA vs. No Treatment
  misc_feature: MA Experiment ID: 20000169 Result: Up-regulated in Transcription
  misc_feature: MA Experiment 20000169 PARAMETER Experiment Name: At_100uM_ABA_P Parameter: Age (day) Value: 14
  misc_feature: MA Experiment 20000169 PARAMETER Experiment Name: At_100uM_ABA_P Parameter: Organism Value: A. thaliana
  misc_feature: MA Experiment 20000169 PARAMETER Experiment Name: At_100uM_ABA_P Parameter: Plant Line Value: WS
  misc_feature: MA Experiment 20000169 PARAMETER Experiment Name: At_100uM_ABA_P Parameter: Timepoint (hr) Value: 6
  misc_feature: MA Experiment 20000169 PARAMETER Experiment Name: At_100uM_ABA_P Parameter: Tissue Value: Aerial
  misc_feature: MA Experiment 20000169 PARAMETER Experiment Name: At_100uM_ABA_P Parameter: Treatment Value: 100uM ABA vs. No Treatment
  misc_feature: MA Experiment ID: 20000171 Result: Down-regulated in Transcription
  misc_feature: MA Experiment 20000171 PARAMETER Experiment Name: At_42deg_Heat_P Parameter: Age (day) Value: 14
  misc_feature: MA Experiment 20000171 PARAMETER Experiment Name: At_42deg_Heat_P Parameter: Organism Value: A. thaliana
  misc_feature: MA Experiment 20000171 PARAMETER Experiment Name: At_42deg_Heat_P Parameter: Plant Line Value: WS
  misc_feature: MA Experiment 20000171 PARAMETER Experiment Name: At_42deg_Heat_P Parameter: Temperature (deg C) Value: 42 vs. 22
  misc_feature: MA Experiment 20000171 PARAMETER Experiment Name: At_42deg_Heat_P Parameter: Timepoint (hr) Value: 1
  misc_feature: MA Experiment 20000171 PARAMETER Experiment Name: At_42deg_Heat_P Parameter: Tissue Value: Aerial
  misc_feature: MA Experiment ID: 20000173 Result: Down-regulated in Transcription
  misc_feature: MA Experiment 20000173 PARAMETER Experiment Name: At_42deg_Heat_P Parameter: Age (day) Value: 14
  misc_feature: MA Experiment 20000173 PARAMETER Experiment Name: At_42deg_Heat_P Parameter: Organism Value: A. thaliana
  misc_feature: MA Experiment 20000173 PARAMETER Experiment Name: At_42deg_Heat_P Parameter: Plant Line Value: WS
  misc_feature: MA Experiment 20000173 PARAMETER Experiment Name: At_42deg_Heat_P Parameter: Temperature (deg C) Value: 42 vs. 22
  misc_feature: MA Experiment 20000173 PARAMETER Experiment Name: At_42deg_Heat_P Parameter: Timepoint (hr) Value: 6
  misc_feature: MA Experiment 20000173 PARAMETER Experiment Name: At_42deg_Heat_P Parameter: Tissue Value: Aerial
  misc_feature: MA Experiment ID: 20000179 Result: Down-regulated in Transcription
  misc_feature: MA Experiment 20000179 PARAMETER Experiment Name: At_Germinating_Seeds_P Parameter: Age (hr) Value: 6 vs. 0
  misc_feature: MA Experiment 20000179 PARAMETER Experiment Name: At_Germinating_Seeds_P Parameter: Tissue Value: Germinating Seeds
  misc_feature: MA Experiment ID: 20000180 Result: Down-regulated in Transcription
  misc_feature: MA Experiment 20000180 PARAMETER Experiment Name: At_Germinating_Seeds_P Parameter: Age (hr) Value: 24 vs. 0
  misc_feature: MA Experiment 20000180 PARAMETER Experiment Name: At_Germinating_Seeds_P Parameter: Tissue Value: Germinating Seeds
  misc_feature: MA Experiment ID: 20000182 Result: Up-regulated in Transcription
  misc_feature: MA Experiment 20000182 PARAMETER Experiment Name: At_2mM_SA_P Parameter: Age (day) Value: 14
  misc_feature: MA Experiment 20000182 PARAMETER Experiment Name: At_2mM_SA_P Parameter: Organism Value: A. thaliana
  misc_feature: MA Experiment 20000182 PARAMETER Experiment Name: At_2mM_SA_P Parameter: Plant Line Value: WS
  misc_feature: MA Experiment 20000182 PARAMETER Experiment Name: At_2mM_SA_P Parameter: Timepoint (hr) Value: 6
  misc_feature: MA Experiment 20000182 PARAMETER Experiment Name: At_2mM_SA_P Parameter: Tissue Value: Aerial
  misc_feature: MA Experiment 20000182 PARAMETER Experiment Name: At_2mM_SA_P Parameter: Treatment Value: 2mM SA vs. No Treatment
  misc_feature: MA Experiment ID: 20000185 Result: Down-regulated in Transcription
  misc_feature: MA Experiment 20000185 PARAMETER Experiment Name: At_Roots__P Parameter: Age (day) Value: 7 vs. 21
  misc_feature: MA Experiment 20000185 PARAMETER Experiment Name: At_Roots__P Parameter: Organism Value: A. thaliana
  misc_feature: MA Experiment 20000185 PARAMETER Experiment Name: At_Roots__P Parameter: Tissue Value: Roots vs. Whole Plant
  misc_feature: MA Experiment ID: 20000234 Result: Down-regulated in Transcription
  misc_feature: MA Experiment 20000234 PARAMETER Experiment Name: At_Siliques_P Parameter: Age (day) Value: 21
  misc_feature: MA Experiment 20000234 PARAMETER Experiment Name: At_Siliques_P Parameter: Organism Value: A. thaliana
  misc_feature: MA Experiment 20000234 PARAMETER Experiment Name: At_Siliques_P Parameter: Plant Line Value: WS
  misc_feature: MA Experiment 20000234 PARAMETER Experiment Name: At_Siliques_P Parameter: Tissue Value: Less Than 5mm Siliques vs. Whole Plant
  misc_feature: MA Experiment ID: 20000235 Result: Down-regulated in Transcription
  misc_feature: MA Experiment 20000235 PARAMETER Experiment Name: At_Siliques_P Parameter: Age (day) Value: 21
  misc_feature: MA Experiment 20000235 PARAMETER Experiment Name: At_Siliques_P Parameter: Organism Value: A. thaliana
  misc_feature: MA Experiment 20000235 PARAMETER Experiment Name: At_Siliques_P Parameter: Plant Line Value: WS
  misc_feature: MA Experiment 20000235 PARAMETER Experiment Name: At_Siliques_P Parameter: Tissue Value: 5-10mm Siliques vs. Whole Plant
  misc_feature: MA Experiment ID: 20000265 Result: Down-regulated in Transcription
  misc_feature: MA Experiment 20000265 PARAMETER Experiment Name: At_Open_Flower_P Parameter: Age (day) Value: 21
  misc_feature: MA Experiment 20000265 PARAMETER Experiment Name: At_Open_Flower_P Parameter: Plant Line Value: WS
  misc_feature: MA Experiment 20000265 PARAMETER Experiment Name: At_Open_Flower_P Parameter: Tissue Value: Closed Flower vs. Whole Plant
  misc_feature: MA Experiment ID: 20000439 Result: Down-regulated in Transcription
  misc_feature: MA Experiment 20000439 PARAMETER Experiment Name: At_Roots__P Parameter: Age (day) Value: 14 vs. 21
  misc_feature: MA Experiment 20000439 PARAMETER Experiment Name: At_Roots__P Parameter: Organism Value: A. thaliana
  misc_feature: MA Experiment 20000439 PARAMETER Experiment Name: At_Roots__P Parameter: Tissue Value: Roots vs. Whole Plant
  misc_feature: MA Experiment ID: 20000445 Result: Up-regulated in Transcription
  misc_feature: MA Experiment 20000445 PARAMETER Experiment Name: At_100uM_NAA__P Parameter: Age (day) Value: 14
  misc_feature: MA Experiment 20000445 PARAMETER Experiment Name: At_100uM_NAA__P Parameter: Organism Value: A. thaliana
  misc_feature: MA Experiment 20000445 PARAMETER Experiment Name: At_100uM_NAA__P Parameter: Plant Line Value: WS
  misc_feature: MA Experiment 20000445 PARAMETER Experiment Name: At_100uM_NAA__P Parameter: Timepoint (hr) Value: 6
  misc_feature: MA Experiment 20000445 PARAMETER Experiment Name: At_100uM_NAA__P Parameter: Tissue Value: Aerial
  misc_feature: MA Experiment 20000445 PARAMETER Experiment Name: At_100uM_NAA__P Parameter: Treatment Value: 100uM NAA vs. No Treatment
  misc_feature: MA Experiment ID: 20000453 Result: Up-regulated in Transcription
  misc_feature: MA Experiment 20000453 PARAMETER Experiment Name: At_100uM_ABA_P Parameter: Age (day) Value: 15
  misc_feature: MA Experiment 20000453 PARAMETER Experiment Name: At_100uM_ABA_P Parameter: Organism Value: A. thaliana
  misc_feature: MA Experiment 20000453 PARAMETER Experiment Name: At_100uM_ABA_P Parameter: Plant Line Value: WS
  misc_feature: MA Experiment 20000453 PARAMETER Experiment Name: At_100uM_ABA_P Parameter: Timepoint (hr) Value: 24
  misc_feature: MA Experiment 20000453 PARAMETER Experiment Name: At_100uM_ABA_P Parameter: Tissue Value: Aerial
  misc_feature: MA Experiment 20000453 PARAMETER Experiment Name: At_100uM_ABA_P Parameter: Treatment Value: 100uM ABA vs. No Treatment
  misc_feature: MA Experiment ID: 20000455 Result: Up-regulated in Transcription
  misc_feature: MA Experiment 20000455 PARAMETER Experiment Name: At_100uM_ABA_P Parameter: Age (day) Value: 16
  misc_feature: MA Experiment 20000455 PARAMETER Experiment Name: At_100uM_ABA_P Parameter: Organism Value: A. thaliana
  misc_feature: MA Experiment 20000455 PARAMETER Experiment Name: At_100uM_ABA_P Parameter: Plant Line Value: WS
  misc_feature: MA Experiment 20000455 PARAMETER Experiment Name: At_100uM_ABA_P Parameter: Timepoint (hr) Value: 48
  misc_feature: MA Experiment 20000455 PARAMETER Experiment Name: At_100uM_ABA_P Parameter: Tissue Value: Aerial
  misc_feature: MA Experiment 20000455 PARAMETER Experiment Name: At_100uM_ABA_P Parameter: Treatment Value: 100uM ABA vs. No Treatment
  misc_feature: MA Experiment ID: 20000456 Result: Down-regulated in Transcription
  misc_feature: MA Experiment 20000456 PARAMETER Experiment Name: At_100uM_BA_P Parameter: Age (day) Value: 14
  misc_feature: MA Experiment 20000456 PARAMETER Experiment Name: At_100uM_BA_P Parameter: Organism Value: A. thaliana
  misc_feature: MA Experiment 20000456 PARAMETER Experiment Name: At_100uM_BA_P Parameter: Plant Line Value: WS
  misc_feature: MA Experiment 20000456 PARAMETER Experiment Name: At_100uM_BA_P Parameter: Timepoint (hr) Value: 6
  misc_feature: MA Experiment 20000456 PARAMETER Experiment Name: At_100uM_BA_P Parameter: Tissue Value: Aerial
  misc_feature: MA Experiment 20000456 PARAMETER Experiment Name: At_100uM_BA_P Parameter: Treatment Value: 100uM BA vs. No Treatment
  misc_feature: MA Experiment ID: 20000573 Result: Up-regulated in Transcription
  misc_feature: MA Experiment 20000573 PARAMETER Experiment Name: At_100uM_ABA_Mutants__P Parameter: Organism Value: A. thaliana
  misc_feature: MA Experiment 20000573 PARAMETER Experiment Name: At_100uM_ABA_Mutants__P Parameter: Plant Line Value: CS22 vs. Ler wt
  misc_feature: MA Experiment 20000573 PARAMETER Experiment Name: At_100uM_ABA_Mutants__P Parameter: Timepoint (hr) Value: N/A
  misc_feature: MA Experiment 20000573 PARAMETER Experiment Name: At_100uM_ABA_Mutants__P Parameter: Tissue Value: Whole Plant
  misc_feature: MA Experiment 20000573 PARAMETER Experiment Name: At_100uM_ABA_Mutants__P Parameter: Treatment Value: None
  misc_feature: MA Experiment ID: 20000574 Result: Up-regulated in Transcription
  misc_feature: MA Experiment 20000574 PARAMETER Experiment Name: At_100uM_ABA_Mutants__P Parameter: Organism Value: A. thaliana
  misc_feature: MA Experiment 20000574 PARAMETER Experiment Name: At_100uM_ABA_Mutants__P Parameter: Plant Line Value: CS23 vs. Ler wt
  misc_feature: MA Experiment 20000574 PARAMETER Experiment Name: At_100uM_ABA_Mutants__P Parameter: Timepoint (hr) Value: N/A
  misc_feature: MA Experiment 20000574 PARAMETER Experiment Name: At_100uM_ABA_Mutants__P Parameter: Tissue Value: Whole Plant
  misc_feature: MA Experiment 20000574 PARAMETER Experiment Name: At_100uM_ABA_Mutants__P Parameter: Treatment Value: None
  misc_feature: MA Experiment ID: 20000794 Result: Up-regulated in Transcription
  misc_feature: MA Experiment 20000794 PARAMETER Experiment Name: At_Petals_P Parameter: Age (day) Value: 23-25 days
  misc_feature: MA Experiment 20000794 PARAMETER Experiment Name: At_Petals_P Parameter: Plant Line Value: WS
  misc_feature: MA Experiment 20000794 PARAMETER Experiment Name: At_Petals_P Parameter: Tissue Value: Petals vs. Whole plant
  misc_feature: MA Experiment ID: 20001248 Result: Up-regulated in Transcription
  misc_feature: MA Experiment 20001248 PARAMETER Experiment Name: At_Far-red-induction_P Parameter: Age (day) Value: 7
  misc_feature: MA Experiment 20001248 PARAMETER Experiment Name: At_Far-red-induction_P Parameter: Light Value: Far-red vs. White
  misc_feature: MA Experiment 20001248 PARAMETER Experiment Name: At_Far-red-induction_P Parameter: Organism Value: A. thaliana
  misc_feature: MA Experiment 20001248 PARAMETER Experiment Name: At_Far-red-induction_P Parameter: Plant Line Value: Columbia
  misc_feature: MA Experiment 20001248 PARAMETER Experiment Name: At_Far-red-induction_P Parameter: Timepoint (hr) Value: 4
  misc_feature: MA Experiment 20001248 PARAMETER Experiment Name: At_Far-red-induction_P Parameter: Tissue Value: Whole Plant
  misc_feature: MA Experiment ID: 20001450 Result: Up-regulated in Transcription
  misc_feature: MA Experiment 20001450 PARAMETER Experiment Name: At_Far-red-induction_P Parameter: Age (day) Value: 7
  misc_feature: MA Experiment 20001450 PARAMETER Experiment Name: At_Far-red-induction_P Parameter: Light Value: Far-red vs. White
  misc_feature: MA Experiment 20001450 PARAMETER Experiment Name: At_Far-red-induction_P Parameter: Organism Value: A. thaliana
  misc_feature: MA Experiment 20001450 PARAMETER Experiment Name: At_Far-red-induction_P Parameter: Plant Line Value: Columbia
  misc_feature: MA Experiment 20001450 PARAMETER Experiment Name: At_Far-red-induction_P Parameter: Timepoint (hr) Value: 8
  misc_feature: MA Experiment 20001450 PARAMETER Experiment Name: At_Far-red-induction_P Parameter: Tissue Value: Whole Plant
  misc_feature: MA Experiment ID: 20001906 Result: Up-regulated in Transcription
  misc_feature: MA Experiment 20001906 PARAMETER Experiment Name: At_Drought_Reproduction_P Parameter: Age (day) Value: 35
  misc_feature: MA Experiment 20001906 PARAMETER Experiment Name: At_Drought_Reproduction_P Parameter: Organism Value: A. thaliana
  misc_feature: MA Experiment 20001906 PARAMETER Experiment Name: At_Drought_Reproduction_P Parameter: Plant Line Value: WS
  misc_feature: MA Experiment 20001906 PARAMETER Experiment Name: At_Drought_Reproduction_P Parameter: Timepoint (day) Value: 5
  misc_feature: MA Experiment 20001906 PARAMETER Experiment Name: At_Drought_Reproduction_P Parameter: Tissue Value: Siliques
  misc_feature: MA Experiment 20001906 PARAMETER Experiment Name: At_Drought_Reproduction_P Parameter: Treatment Value: Drought vs. No Drought
  misc_feature: MA Experiment ID: 20001908 Result: Up-regulated in Transcription
  misc_feature: MA Experiment 20001908 PARAMETER Experiment Name: At_Drought_Reproduction_P Parameter: Age (day) Value: 40
  misc_feature: MA Experiment 20001908 PARAMETER Experiment Name: At_Drought_Reproduction_P Parameter: Organism Value: A. thaliana
  misc_feature: MA Experiment 20001908 PARAMETER Experiment Name: At_Drought_Reproduction_P Parameter: Plant Line Value: WS
  misc_feature: MA Experiment 20001908 PARAMETER Experiment Name: At_Drought_Reproduction_P Parameter: Timepoint (day) Value: 10
  misc_feature: MA Experiment 20001908 PARAMETER Experiment Name: At_Drought_Reproduction_P Parameter: Tissue Value: Siliques
  misc_feature: MA Experiment 20001908 PARAMETER Experiment Name: At_Drought_Reproduction_P Parameter: Treatment Value: Drought vs. No Drought
  misc_feature: MA Experiment ID: 20001911 Result: Up-regulated in Transcription
  misc_feature: MA Experiment 20001911 PARAMETER Experiment Name: At_Drought_Reproduction_P Parameter: Age (day) Value: 40
  misc_feature: MA Experiment 20001911 PARAMETER Experiment Name: At_Drought_Reproduction_P Parameter: Organism Value: A. thaliana
  misc_feature: MA Experiment 20001911 PARAMETER Experiment Name: At_Drought_Reproduction_P Parameter: Plant Line Value: WS
  misc_feature: MA Experiment 20001911 PARAMETER Experiment Name: At_Drought_Reproduction_P Parameter: Timepoint (day) Value: 10
  misc_feature: MA Experiment 20001911 PARAMETER Experiment Name: At_Drought_Reproduction_P Parameter: Tissue Value: Flowers
  misc_feature: MA Experiment 20001911 PARAMETER Experiment Name: At_Drought_Reproduction_P Parameter: Treatment Value: Drought vs. No Drought
aaaaatcgaccaaagagtaaccaaattgatatttatctcttctcaaccatggcgatgagacaagccgctaaggcaacgatcagggcctgttcttcctcttcttcttcgggttacttcgctcgacgtcagtttaatgcatcttctggtgatagcaaaaagattgtaggagttttctacaaggccaacgaatacgctaccaagaaccctaacttccttggctgcgtcgagaatgccttaggaatccgtgactggcttgaatcccaaggacatcagtacatcgtcactgatgacaaggaaggccctgattgcgaacttgagaaacatatcccggatcttcacgtcctaatctccactcccttccacccggcgtatgtaactgctgaaagaatcaagaaagccaaaaacttgaagcttctcctcacagctggtattggctcggatcatattgatctccaggcagctgcagctgctggcctgacggttgctgaagtcacgggaagcaacgtggtctcagtggcagaagatgagctcatgagaatcttaatcctcatgcgcaacttcgtaccagggtacaaccaggtcgtcaaaggcgagtggaacgtcgcgggcattgcgtacagagcttatgatcttgaagggaagacgataggaaccgtgggagctggaagaatcggaaagcttttgctgcagcggttgaaaccattcgggtgtaacttgttgtaccatgacaggcttcagatggcaccagagctggagaaagagactggagctaagttcgttgaggatctgaatgaaatgctccctaaatgtgacgttatagtcatcaacatgcctctcacggagaagacaagaggaatgttcaacaaagagttgatagggaaattgaagaaaggcgttttgatagtgaacaacgcaagaggagccatcatggagaggcaagcagtggtggatgcggtggagagtggacacattggagggtacagcggagacgtttgggacccacagccagctcctaaggaccatccatggcgttacatgcctaaccaggctatgacccctcatacctccggcaccaccattgacgctcagctacggtatgcggcggggacgaaagacatgttggagagatacttcaagggagaagacttccctactgagaattacatcgtcaaggacggtgaacttgctcctcagtaccggtaagcttttgaggaggtgacattgggaagatgatgagaaacgaccccaacgttcaagaaaacaaataaagaagtatttggactttgctaagtcgaatgacttgagtcatcttttggtttagtttttgttattatataagcacaataataataggagggcacttcccctgttctgagagtttgtgaacatattactcagtggtttaaatcacacatatgtatttgtttccccaatcgtaggaactcaatggtttcaaatctcatt

SEQ ID NO: 86927 - protein, 400 aa, Arabidopsis thaliana
  peptide (1)..(400): Ceres Seq. ID no. 12695210
  misc_feature (69)..(166): Pfam Name: D-isomer specific 2-hydroxyacid dehydrogenase, Pfam Description: D-isomer specific 2-hydroxyacid dehydrogenase,
  misc_feature (17)..(400): Homolog of NCBI NO: 15241492 NR Description: formate dehydrogenase (FDH); protein id: supported by cDNA: 7530., supported by cDNA: gi_14517547, by cDNA: gi_15810033, supported by cDNA: gi_19548046, supported
  misc_feature (17)..(400): Homolog of NCBI NO: 26454627 NR Description: Formate dehydrogenase, mitochondrial precursor dependent formate dehydrogenase) (FDH)
  misc_feature (19)..(400): Homolog of NCBI NO: 542089 NR Description: formate dehydrogenase (EC 1.2.1.2) precursor,
  misc_feature (42)..(400): Homolog of NCBI NO: 38636526 NR Description: formate dehydrogenase [Quercus robur]
  misc_feature (42)..(400): Homolog of NCBI NO: 21263612 NR Description: Formate dehydrogenase, mitochondrial precursor dependent formate dehydrogenase) (FDH)
  misc_feature (42)..(400): Homolog of NCBI NO: 21263611 NR Description: Formate dehydrogenase, mitochondrial precursor
  misc_feature (15)..(396): Homolog of NCBI NO: 4572458 NR Description: NAD-dependent formate dehydrogenase
  misc_feature (57)..(298): Homolog of NCBI NO: 40738675 NR Description: FDH_EMENI Probable formate dehydrogenase
  misc_feature (297)..(396): Homolog of NCBI NO: 40738675 NR Description: FDH_EMENI Probable formate dehydrogenase
  misc_feature (53)..(396): Homolog of NCBI NO: 32405002 NR Description: FORMATE DEHYDROGENASE (NAD-DEPENDENT FORMATE (FDH) [Neurospora crassa] >gi|729469|sp|Q07103|FDH_NEUCR Formate
KNRPKSNQIDIYLFSTMAMRQAAKATIRACSSSSSSGYFARRQFNASSGDSKKIVGVFYKANEYATKNPNFLGCVENALGIRDWLESQGHQYIVTDDKEGPDCELEKHIPDLHVLISTPFHPAYVTAERIKKAKNLKLLLTAGIGSDHIDLQAAAAAGLTVAEVTGSNVVSVAEDELMRILILMRNFVPGYNQVVKGEWNVAGIAYRAYDLEGKTIGTVGAGRIGKLLLQRLKPFGCNLLYHDRLQMAPELEKETGAKFVEDLNEMLPKCDVIVINMPLTEKTRGMFNKELIGKLKKGVLIVNNARGAIMERQAVVDAVESGHIGGYSGDVWDPQPAPKDHPWRYMPNQAMTPHTSGTTIDAQLRYAAGTKDMLERYFKGEDFPTENYIVKDGELAPQYR

SEQ ID NO: 86928 - protein, 384 aa, Arabidopsis thaliana; identical to SEQ ID NO: 76128
  peptide (1)..(384): Ceres Seq. ID no. 12695211
  misc_feature (53)..(150): Pfam Name: D-isomer specific 2-hydroxyacid dehydrogenase, Pfam Description: D-isomer specific 2-hydroxyacid dehydrogenase,
  misc_feature (1)..(384): Homolog of NCBI NO: 15241492 NR Description: formate dehydrogenase (FDH); protein id: supported by cDNA: 7530., supported by cDNA: gi_14517547, by cDNA: gi_15810033, supported by cDNA: gi_19548046, supported
  misc_feature (1)..(384): Homolog of NCBI NO: 26454627 NR Description: Formate dehydrogenase, mitochondrial precursor dependent formate dehydrogenase) (FDH)
  misc_feature (3)..(384): Homolog of NCBI NO: 542089 NR Description: formate dehydrogenase (EC 1.2.1.2) precursor,
  misc_feature (26)..(384): Homolog of NCBI NO: 38636526 NR Description: formate dehydrogenase [Quercus robur]
  misc_feature (26)..(384): Homolog of NCBI NO: 21263612 NR Description: Formate dehydrogenase, mitochondrial precursor dependent formate dehydrogenase) (FDH)
  misc_feature (26)..(384): Homolog of NCBI NO: 21263611 NR Description: Formate dehydrogenase, mitochondrial precursor
  misc_feature (1)..(380): Homolog of NCBI NO: 4572458 NR Description: NAD-dependent formate dehydrogenase
  misc_feature (41)..(282): Homolog of NCBI NO: 40738675 NR Description: FDH_EMENI Probable formate dehydrogenase
  misc_feature (281)..(380): Homolog of NCBI NO: 40738675 NR Description: FDH_EMENI Probable formate dehydrogenase
  misc_feature (37)..(380): Homolog of NCBI NO: 32405002 NR Description: FORMATE DEHYDROGENASE (NAD-DEPENDENT FORMATE (FDH) [Neurospora crassa] >gi|729469|sp|Q07103|FDH_NEUCR Formate

SEQ ID NO: 86929 - protein, 382 aa, Arabidopsis thaliana; identical to SEQ ID NO: 76129
  peptide (1)..(382): Ceres Seq. ID no. 12695212
  misc_feature (51)..(148): Pfam Name: D-isomer specific 2-hydroxyacid dehydrogenase, Pfam Description: D-isomer specific 2-hydroxyacid dehydrogenase,
  misc_feature (1)..(382): Homolog of NCBI NO: 15241492 NR Description: formate dehydrogenase (FDH); protein id: supported by cDNA: 7530., supported by cDNA: gi_14517547, by cDNA: gi_15810033, supported by cDNA: gi_19548046, supported
  misc_feature (1)..(382): Homolog of NCBI NO: 26454627 NR Description: Formate dehydrogenase, mitochondrial precursor dependent formate dehydrogenase) (FDH)
  misc_feature (1)..(382): Homolog of NCBI NO: 542089 NR Description: formate dehydrogenase (EC 1.2.1.2) precursor,
  misc_feature (24)..(382): Homolog of NCBI NO: 38636526 NR Description: formate dehydrogenase [Quercus robur]
  misc_feature (24)..(382): Homolog of NCBI NO: 21263612 NR Description: Formate dehydrogenase, mitochondrial precursor dependent formate dehydrogenase) (FDH)
  misc_feature (24)..(382): Homolog of NCBI NO: 21263611 NR Description: Formate dehydrogenase, mitochondrial precursor
  misc_feature (1)..(378): Homolog of NCBI NO: 4572458 NR Description: NAD-dependent formate dehydrogenase
  misc_feature (39)..(280): Homolog of NCBI NO: 40738675 NR Description: FDH_EMENI Probable formate dehydrogenase
  misc_feature (279)..(378): Homolog of NCBI NO: 40738675 NR Description: FDH_EMENI Probable formate dehydrogenase
  misc_feature (35)..(378): Homolog of NCBI NO: 32405002 NR Description: FORMATE DEHYDROGENASE (NAD-DEPENDENT FORMATE (FDH) [Neurospora crassa] >gi|729469|sp|Q07103|FDH_NEUCR Formate

SEQ ID NO: 86930 - DNA, 1251 bp, Arabidopsis thaliana
  misc_feature (1)..(1251): Ceres Seq. ID no. 12695226
  misc_feature: MA Experiment ID: 108434 Result: Up-regulated in Transcription
  misc_feature: MA Experiment 108434 PARAMETER Experiment Name: At_Root_Tips_cDNA_P Parameter: Tissue Value: Root Tips
  misc_feature: MA Experiment ID: 20000111 Result: Up-regulated in Transcription
  misc_feature: MA Experiment 20000111 PARAMETER Experiment Name: At_42deg_Heat_cDNA_P Parameter: Temperature (deg C) Value: 42 vs. 22
  misc_feature: MA Experiment 20000111 PARAMETER Experiment Name: At_42deg_Heat_cDNA_P Parameter: Timepoint (hr) Value: 6
  misc_feature: MA Experiment 20000111 PARAMETER Experiment Name: At_42deg_Heat_cDNA_P Parameter: Tissue Value: Aerial
  misc_feature: MA Experiment ID: 20000113 Result: Up-regulated in Transcription
  misc_feature: MA Experiment 20000113 PARAMETER Experiment Name: At_42deg_Heat_cDNA_P Parameter: Temperature (deg C) Value: 42 vs. 22
  misc_feature: MA Experiment 20000113 PARAMETER Experiment Name: At_42deg_Heat_cDNA_P Parameter: Timepoint (hr) Value: 8
  misc_feature: MA Experiment 20000113 PARAMETER Experiment Name: At_42deg_Heat_cDNA_P Parameter: Tissue Value: Aerial
  misc_feature: MA Experiment ID: 20000144 Result: Up-regulated in Transcription
  misc_feature: MA Experiment 20000144 PARAMETER Experiment Name: At_42deg_Heat_cDNA_P Parameter: Temperature (deg C) Value: 42 vs. 22
  misc_feature: MA Experiment 20000144 PARAMETER Experiment Name: At_42deg_Heat_cDNA_P Parameter: Timepoint (hr) Value: 1
  misc_feature: MA Experiment 20000144 PARAMETER Experiment Name: At_42deg_Heat_cDNA_P Parameter: Tissue Value: Aerial
  misc_feature: MA Experiment ID: 20000171 Result: Up-regulated in Transcription
  misc_feature: MA Experiment 20000171 PARAMETER Experiment Name: At_42deg_Heat_P Parameter: Age (day) Value: 14
  misc_feature: MA Experiment 20000171 PARAMETER Experiment Name: At_42deg_Heat_P Parameter: Organism Value: A. thaliana
  misc_feature: MA Experiment 20000171 PARAMETER Experiment Name: At_42deg_Heat_P Parameter: Plant Line Value: WS
  misc_feature: MA Experiment 20000171 PARAMETER Experiment Name: At_42deg_Heat_P Parameter: Temperature (deg C) Value: 42 vs. 22
  misc_feature: MA Experiment 20000171 PARAMETER Experiment Name: At_42deg_Heat_P Parameter: Timepoint (hr) Value: 1
  misc_feature: MA Experiment 20000171 PARAMETER Experiment Name: At_42deg_Heat_P Parameter: Tissue Value: Aerial
  misc_feature: MA Experiment ID: 20000173 Result: Up-regulated in Transcription
  misc_feature: MA Experiment 20000173 PARAMETER Experiment Name: At_42deg_Heat_P Parameter: Age (day) Value: 14
  misc_feature: MA Experiment 20000173 PARAMETER Experiment Name: At_42deg_Heat_P Parameter: Organism Value: A. thaliana
  misc_feature: MA Experiment 20000173 PARAMETER Experiment Name: At_42deg_Heat_P Parameter: Plant Line Value: WS
  misc_feature: MA Experiment 20000173 PARAMETER Experiment Name: At_42deg_Heat_P Parameter: Temperature (deg C) Value: 42 vs. 22
  misc_feature: MA Experiment 20000173 PARAMETER Experiment Name: At_42deg_Heat_P Parameter: Timepoint (hr) Value: 6
  misc_feature: MA Experiment 20000173 PARAMETER Experiment Name: At_42deg_Heat_P Parameter: Tissue Value: Aerial
  misc_feature: MA Experiment ID: 20001247 Result: Up-regulated in Transcription
  misc_feature: MA Experiment 20001247 PARAMETER Experiment Name: At_Far-red-induction_P Parameter: Age (day) Value: 7
  misc_feature: MA Experiment 20001247 PARAMETER Experiment Name: At_Far-red-induction_P Parameter: Light Value: Far-red vs. White
  misc_feature: MA Experiment 20001247 PARAMETER Experiment Name: At_Far-red-induction_P Parameter: Organism Value: A. thaliana
  misc_feature: MA Experiment 20001247 PARAMETER Experiment Name: At_Far-red-induction_P Parameter: Plant Line Value: Columbia
  misc_feature: MA Experiment 20001247 PARAMETER Experiment Name: At_Far-red-induction_P Parameter: Timepoint (hr) Value: 1
  misc_feature: MA Experiment 20001247 PARAMETER Experiment Name: At_Far-red-induction_P Parameter: Tissue Value: Whole Plant
  misc_feature: MA Experiment ID: 20001248 Result: Up-regulated in Transcription
  misc_feature: MA Experiment 20001248 PARAMETER Experiment Name: At_Far-red-induction_P Parameter: Age (day) Value: 7
  misc_feature: MA Experiment 20001248 PARAMETER Experiment Name: At_Far-red-induction_P Parameter: Light Value: Far-red vs. White
  misc_feature: MA Experiment 20001248 PARAMETER Experiment Name: At_Far-red-induction_P Parameter: Organism Value: A. thaliana
  misc_feature: MA Experiment 20001248 PARAMETER Experiment Name: At_Far-red-induction_P Parameter: Plant Line Value: Columbia
  misc_feature: MA Experiment 20001248 PARAMETER Experiment Name: At_Far-red-induction_P Parameter: Timepoint (hr) Value: 4
  misc_feature: MA Experiment 20001248 PARAMETER Experiment Name: At_Far-red-induction_P Parameter: Tissue Value: Whole Plant
  misc_feature: MA Experiment ID: 20001450 Result: Up-regulated in Transcription
  misc_feature: MA Experiment 20001450 PARAMETER Experiment Name: At_Far-red-induction_P Parameter: Age (day) Value: 7
  misc_feature: MA Experiment 20001450 PARAMETER Experiment Name: At_Far-red-induction_P Parameter: Light Value: Far-red vs. White
  misc_feature: MA Experiment 20001450 PARAMETER Experiment Name: At_Far-red-induction_P Parameter: Organism Value: A. thaliana
  misc_feature: MA Experiment 20001450 PARAMETER Experiment Name: At_Far-red-induction_P Parameter: Plant Line Value: Columbia
  misc_feature: MA Experiment 20001450 PARAMETER Experiment Name: At_Far-red-induction_P Parameter: Timepoint (hr) Value: 8
  misc_feature: MA Experiment 20001450 PARAMETER Experiment Name: At_Far-red-induction_P Parameter: Tissue Value: Whole Plant
gctctcgcgcttttctctctctctctcgcgttcgttcttatccacgagctctgcaccgtcgcaatctccgtcttctccatttagatccaacacagagccttttctacatgaaattcggcaaagagtttcgtactcacctcgaagaaactttaccagagtggagagacaagttcctttgctataaacctttaaaaaagcttctcaaatattatccttattactccgccgattttggacccgccaattccgatcacaacgattcgcgtccagtatttgctgatactactaacatctcttccgccgccgacgacggcggtgtggttcccggcgtcaggccatcggaagatctccagggttcgtttgtgaggatacttaacgatgaacttgagaagtttaacgatttttacgttgataaggaagaagatttcgttatcagattacaggagctcaaggaaagaatcgagcaagttaaagaaaagaatggggaatttgcatcagaaagtgagttcagcgaagaaatgatggatattcggagagaccttgttaccattcatggcgagatggtgctcctgaaaaactacagctcccttaattttgcaggacttgtcaagattttgaagaagtacgataaaagaacaggtggacttttacgtttgcctttcacacagcttgttctccatcaacccttctttactacagagccacttactaggttagtccgtgaatgtgaggccaatcttgagcttctttttccttcagaagcggaagttgtagagtcttctagcgcagtgcaagcacactcaagctcacatcagcacaactccccaagaatctcagctgagacttcctcaactctcggcaatgaaaatcttgatatatataagagtacactcgctgcaatgagagctataagagggttacaaaaggctagctcgacgtacaaccctttatcattctcatcgcttcttcagaacgaggatgatgagacggtaacagctgaaaactctccaaactctgggaacaaagatgattcagagaaggaagatactggaccttcccactgatcagaagagaatgatgctctttttgatcaagattttgagaatttgcttcttgatttcaccctaacttttcataaaattaacacattttactttacttcttcaccttttgcaggacacaacttctgtatgcatttgaattgtagtacagtcgtttatagattttcaatgaaattttcctccattgtct

SEQ ID NO: 86931 - protein, 353 aa, Arabidopsis thaliana
  peptide (1)..(353): Ceres Seq. ID no. 12695227
  misc_feature (36)..(225): Pfam Name: SPX domain Pfam Description: SPX domain
  misc_feature (1)..(353): Homolog of NCBI NO: 11358467 NR Description: ids-4 protein-like - Arabidopsis thaliana
  misc_feature (36)..(353): Homolog of NCBI NO: 18417630 NR Description: ids-4 protein - like; protein id: At5g15330.1, by cDNA: gi_15215821 [Arabidopsis thaliana]
  misc_feature (86)..(348): Homolog of NCBI NO: 34897330 NR Description: putative signal transduction protein [Oryza >gi|18855067|gb|AAL79759.1| putative signal transduction protein
  misc_feature (98)..(317): Homolog of NCBI NO: 37533962 NR Description: hypothetical protein [Oryza sativa (japonica group)] >gi|15451632|gb|AAK98756.1| Hypothetical protein [Oryza >gi|31431851|gb|AAP53570.1| hypothetical protein [Oryza sativa
  misc_feature (36)..(78): Homolog of NCBI NO: 37533962 NR Description: hypothetical protein [Oryza sativa (japonica group)] >gi|15451632|gb|AAK98756.1| Hypothetical protein [Oryza >gi|31431851|gb|AAP53570.1| hypothetical protein [Oryza sativa
  misc_feature (119)..(271): Homolog of NCBI NO: 15241275 NR Description: ids4-like protein; protein id: At5g20150.1, by cDNA: 32843., supported by cDNA: gi_19715594 [Arabidopsis >gi|19715595|gb|AAL91621.1| AT5g20150/F5O24_40 [Arabidopsis
  misc_feature (36)..(76): Homolog of NCBI NO: 15241275 NR Description: ids4-like protein; protein id: At5g20150.1, by cDNA: 32843., supported by cDNA: gi_19715594 [Arabidopsis >gi|19715595|gb|AAL91621.1| AT5g20150/F5O24_40 [Arabidopsis
  misc_feature (120)..(271): Homolog of NCBI NO: 21592813 NR Description: ids4-like protein [Arabidopsis thaliana]
  misc_feature (36)..(76): Homolog of NCBI NO: 21592813 NR Description: ids4-like protein [Arabidopsis thaliana]
  misc_feature (187)..(353): Homolog of NCBI NO: 7489382 NR Description: ids-4 protein - barley >gi|285636|dbj|BAA03206.1|
SRAFLSLSRVRSYPRALHRRNLRLLHLDPTQSLFYMKFGKEFRTHLEETLPEWRDKFLCYKPLKKLLKYYPYYSADFGPANSDHNDSRPVFADTTNISSAADDGGVVPGVRPSEDLQGSFVRILNDELEKFNDFYVDKEEDFVIRLQELKERIEQVKEKNGEFASESEFSEEMMDIRRDLVTIHGEMVLLKNYSSLNFAGLVKILKKYDKRTGGLLRLPFTQLVLHQPFFTTEPLTRLVRECEANLELLFPSEAEVVESSSAVQAHSSSHQHNSPRISAETSSTLGNENLDIYKSTLAAMRAIRGLQKASSTYNPLSFSSLLQNEDDETVTAENSPNSGNKDDSEKEDTGPSH

SEQ ID NO: 86932 - protein, 318 aa, Arabidopsis thaliana; identical to SEQ ID NO: 41480
  peptide (1)..(318): Ceres Seq. ID no. 12695228
  misc_feature (1)..(190): Pfam Name: SPX domain Pfam Description: SPX domain
  misc_feature (1)..(318): Homolog of NCBI NO: 11358467 NR Description: ids-4 protein-like - Arabidopsis thaliana
  misc_feature (1)..(318): Homolog of NCBI NO: 18417630 NR Description: ids-4 protein - like; protein id: At5g15330.1, by cDNA: gi_15215821 [Arabidopsis thaliana]
  misc_feature (51)..(313): Homolog of NCBI NO: 34897330 NR Description: putative signal transduction protein [Oryza >gi|18855067|gb|AAL79759.1| putative signal transduction protein
  misc_feature (63)..(282): Homolog of NCBI NO: 37533962 NR Description: hypothetical protein [Oryza sativa (japonica group)] >gi|15451632|gb|AAK98756.1| Hypothetical protein [Oryza >gi|31431851|gb|AAP53570.1| hypothetical protein [Oryza sativa
  misc_feature (1)..(43): Homolog of NCBI NO: 37533962 NR Description: hypothetical protein [Oryza sativa (japonica group)] >gi|15451632|gb|AAK98756.1| Hypothetical protein [Oryza >gi|31431851|gb|AAP53570.1| hypothetical protein [Oryza sativa
  misc_feature (84)..(236): Homolog of NCBI NO: 15241275 NR Description: ids4-like protein; protein id: At5g20150.1, by cDNA: 32843., supported by cDNA: gi_19715594 [Arabidopsis >gi|19715595|gb|AAL91621.1| AT5g20150/F5O24_40 [Arabidopsis
  misc_feature (1)..(41): Homolog of NCBI NO: 15241275 NR Description: ids4-like protein; protein id: At5g20150.1, by cDNA: 32843., supported by cDNA: gi_19715594 [Arabidopsis >gi|19715595|gb|AAL91621.1| AT5g20150/F5O24_40 [Arabidopsis
  misc_feature (85)..(236): Homolog of NCBI NO: 21592813 NR Description: ids4-like protein [Arabidopsis thaliana]
  misc_feature (1)..(41): Homolog of NCBI NO: 21592813 NR Description: ids4-like protein [Arabidopsis thaliana]
  misc_feature (152)..(318): Homolog of NCBI NO: 7489382 NR Description: ids-4 protein - barley >gi|285636|dbj|BAA03206.1|

SEQ ID NO: 86933 - protein, 181 aa, Arabidopsis thaliana; identical to SEQ ID NO: 42980
  peptide (1)..(181): Ceres Seq. ID no. 12695229
  misc_feature (1)..(53): Pfam Name: SPX domain Pfam Description: SPX domain
  misc_feature (1)..(181): Homolog of NCBI NO: 11358467 NR Description: ids-4 protein-like - Arabidopsis thaliana
  misc_feature (1)..(181): Homolog of NCBI NO: 18417630 NR Description: ids-4 protein - like; protein id: At5g15330.1, by cDNA: gi_15215821 [Arabidopsis thaliana]
  misc_feature (1)..(176): Homolog of NCBI NO: 34897330 NR Description: putative signal transduction protein [Oryza >gi|18855067|gb|AAL79759.1| putative signal transduction protein
  misc_feature (1)..(145): Homolog of NCBI NO: 37533962 NR Description: hypothetical protein [Oryza sativa (japonica group)] >gi|15451632|gb|AAK98756.1| Hypothetical protein [Oryza >gi|31431851|gb|AAP53570.1| hypothetical protein [Oryza sativa
  misc_feature (1)..(99): Homolog of NCBI NO: 15241275 NR Description: ids4-like protein; protein id: At5g20150.1, by cDNA: 32843., supported by cDNA: gi_19715594 [Arabidopsis >gi|19715595|gb|AAL91621.1| AT5g20150/F5O24_40 [Arabidopsis
  misc_feature (1)..(99): Homolog of NCBI NO: 21592813 NR Description: ids4-like protein [Arabidopsis thaliana]
  misc_feature (15)..(181): Homolog of NCBI NO: 7489382 NR Description: ids-4 protein - barley >gi|285636|dbj|BAA03206.1|
  misc_feature (1)..(155): Homolog of NCBI NO: 15225770 NR Description: unknown protein; protein id: At2g26660.1
  misc_feature (1)..(152): Homolog of NCBI NO: 16506648 NR Description: IDS-4-like protein [Castanea sativa]
  misc_feature (1)..(91): Homolog of NCBI NO: 15225414 NR Description: hypothetical protein; protein id: At2g45130.1

SEQ ID NO: 86934 - DNA, 1290 bp, Arabidopsis thaliana
  misc_feature (1)..(1290): Ceres Seq. ID no. 12695472
  misc_feature: MA Experiment ID: 108461 Result: Down-regulated in Transcription
  misc_feature: MA Experiment 108461 PARAMETER Experiment Name: At_Germinating_Seeds_cDNA_P Parameter: Age (day) Value: 1 vs. 0
  misc_feature: MA Experiment 108461 PARAMETER Experiment Name: At_Germinating_Seeds_cDNA_P Parameter: Tissue Value: Germinating Seeds
  misc_feature: MA Experiment ID: 108573 Result: Up-regulated in Transcription
  misc_feature: MA Experiment 108573 PARAMETER Experiment Name: At_Drought_cDNA_P Parameter: Timepoint (hr) Value: 6
  misc_feature: MA Experiment 108573 PARAMETER Experiment Name: At_Drought_cDNA_P Parameter: Tissue Value: Aerial
  misc_feature: MA Experiment 108573 PARAMETER Experiment Name: At_Drought_cDNA_P Parameter: Treatment Value: Drought vs. No Drought
  misc_feature: MA Experiment ID: 108579 Result: Down-regulated in Transcription
  misc_feature: MA Experiment 108579 PARAMETER Experiment Name: At_4deg_Cold_cDNA_P Parameter: Temperature (deg C) Value: 4 vs. 22
  misc_feature: MA Experiment 108579 PARAMETER Experiment Name: At_4deg_Cold_cDNA_P Parameter: Timepoint (hr) Value: 6
  misc_feature: MA Experiment 108579 PARAMETER Experiment Name: At_4deg_Cold_cDNA_P Parameter: Tissue Value: Aerial
  misc_feature: MA Experiment ID: 20000113 Result: Up-regulated in Transcription
  misc_feature: MA Experiment 20000113 PARAMETER Experiment Name: At_42deg_Heat_cDNA_P Parameter: Temperature (deg C) Value: 42 vs. 22
  misc_feature: MA Experiment 20000113 PARAMETER Experiment Name: At_42deg_Heat_cDNA_P Parameter: Timepoint (hr) Value: 8
  misc_feature: MA Experiment 20000113 PARAMETER Experiment Name: At_42deg_Heat_cDNA_P Parameter: Tissue Value: Aerial
  misc_feature: MA Experiment ID: 20000180 Result: Down-regulated in Transcription
  misc_feature: MA Experiment 20000180 PARAMETER Experiment Name: At_Germinating_Seeds_P Parameter: Age (hr) Value: 24 vs. 0
  misc_feature: MA Experiment 20000180 PARAMETER Experiment Name: At_Germinating_Seeds_P Parameter: Tissue Value: Germinating Seeds
  misc_feature: MA Experiment ID: 20000214 Result: Down-regulated in Transcription
  misc_feature: MA Experiment 20000214 PARAMETER Experiment Name: At_4deg_Cold_P Parameter: Timepoint (hr) Value: 6
  misc_feature: MA Experiment ID: 20000234 Result: Down-regulated in Transcription
  misc_feature: MA Experiment 20000234 PARAMETER Experiment Name: At_Siliques_P Parameter: Age (day) Value: 21
  misc_feature: MA Experiment 20000234 PARAMETER Experiment Name: At_Siliques_P Parameter: Organism Value: A. thaliana
  misc_feature: MA Experiment 20000234 PARAMETER Experiment Name: At_Siliques_P Parameter: Plant Line Value: WS
  misc_feature: MA Experiment 20000234 PARAMETER Experiment Name: At_Siliques_P Parameter: Tissue Value: Less Than 5mm Siliques vs. Whole Plant
  misc_feature: MA Experiment ID: 20000264 Result: Down-regulated in Transcription
  misc_feature: MA Experiment 20000264 PARAMETER Experiment Name: At_Open_Flower_P Parameter: Age (day) Value: 21
  misc_feature: MA Experiment 20000264 PARAMETER Experiment Name: At_Open_Flower_P Parameter: Plant Line Value: WS
  misc_feature: MA Experiment 20000264 PARAMETER Experiment Name: At_Open_Flower_P Parameter: Tissue Value: Open Flower vs. Whole Plant
  misc_feature: MA Experiment ID: 20001248 Result: Up-regulated in Transcription
  misc_feature: MA Experiment 20001248 PARAMETER Experiment Name: At_Far-red-induction_P Parameter: Age (day) Value: 7
  misc_feature: MA Experiment 20001248 PARAMETER Experiment Name: At_Far-red-induction_P Parameter: Light Value: Far-red vs. White
  misc_feature: MA Experiment 20001248 PARAMETER Experiment Name: At_Far-red-induction_P Parameter: Organism Value: A. thaliana
  misc_feature: MA Experiment 20001248 PARAMETER Experiment Name: At_Far-red-induction_P Parameter: Plant Line Value: Columbia
  misc_feature: MA Experiment 20001248 PARAMETER Experiment Name: At_Far-red-induction_P Parameter: Timepoint (hr) Value: 4
  misc_feature: MA Experiment 20001248 PARAMETER Experiment Name: At_Far-red-induction_P Parameter: Tissue Value: Whole Plant
  misc_feature: MA Experiment ID: 20001450 Result: Up-regulated in Transcription
  misc_feature: MA Experiment 20001450 PARAMETER Experiment Name: At_Far-red-induction_P Parameter: Age (day) Value: 7
  misc_feature: MA Experiment 20001450 PARAMETER Experiment Name: At_Far-red-induction_P Parameter: Light Value: Far-red vs. White
  misc_feature: MA Experiment 20001450 PARAMETER Experiment Name: At_Far-red-induction_P Parameter: Organism Value: A. thaliana
  misc_feature: MA Experiment 20001450 PARAMETER Experiment Name: At_Far-red-induction_P Parameter: Plant Line Value: Columbia
  misc_feature: MA Experiment 20001450 PARAMETER Experiment Name: At_Far-red-induction_P Parameter: Timepoint (hr) Value: 8
  misc_feature: MA Experiment 20001450 PARAMETER Experiment Name: At_Far-red-induction_P Parameter: Tissue Value: Whole Plant
  misc_feature: MA Experiment ID: 20001560 Result: Down-regulated in Transcription
  misc_feature: MA Experiment 20001560 PARAMETER Experiment Name: At_Drought_Soil_Dry_P Parameter: Age (day) Value: 28
  misc_feature: MA Experiment 20001560 PARAMETER Experiment Name: At_Drought_Soil_Dry_P Parameter: Organism Value: A. thaliana
  misc_feature: MA Experiment 20001560 PARAMETER Experiment Name: At_Drought_Soil_Dry_P Parameter: Plant Line Value: WS
  misc_feature: MA Experiment 20001560 PARAMETER Experiment Name: At_Drought_Soil_Dry_P Parameter: Post Timepoint (hr) Value: None
  misc_feature: MA Experiment 20001560 PARAMETER Experiment Name: At_Drought_Soil_Dry_P Parameter: Post-Treatment Value: None
  misc_feature: MA Experiment 20001560 PARAMETER Experiment Name: At_Drought_Soil_Dry_P Parameter: Timepoint (day) Value: 14
  misc_feature: MA Experiment 20001560 PARAMETER Experiment Name: At_Drought_Soil_Dry_P Parameter: Treatment Value: Drought vs. No Drought
  misc_feature: MA Experiment ID: 20001911 Result: Up-regulated in Transcription
  misc_feature: MA Experiment 20001911 PARAMETER Experiment Name: At_Drought_Reproduction_P Parameter: Age (day) Value: 40
  misc_feature: MA Experiment 20001911 PARAMETER Experiment Name: At_Drought_Reproduction_P Parameter: Organism Value: A. thaliana
  misc_feature: MA Experiment 20001911 PARAMETER Experiment Name: At_Drought_Reproduction_P Parameter: Plant Line Value: WS
  misc_feature: MA Experiment 20001911 PARAMETER Experiment Name: At_Drought_Reproduction_P Parameter: Timepoint (day) Value: 10
  misc_feature: MA Experiment 20001911 PARAMETER Experiment Name: At_Drought_Reproduction_P Parameter: Tissue Value: Flowers
  misc_feature: MA Experiment 20001911 PARAMETER Experiment Name: At_Drought_Reproduction_P Parameter: Treatment Value: Drought vs. No Drought
gtactttcacatttctctgtaataaactcggtaggtttgcgaaaacctcgccgccgggaaaaaaaaaaatcaatggaaggaggaggaagaggaccaaatcaaacgattctcagtgaaatagaacatatgcctgaagctccacgtcaacgtatctctcatcaccgtcgagctcgctctgaaaccttcttctccggcgaatcaatcgacgatctcctcttattcgatccttccgatatcgatttctcttctctagacttcctcaacgctccaccaccaccacaacaatcacaacaacaaccgcaagcttctcccatgtccgttgattcggaagaaacctcatcgaacggtgttgttcctcctaattctcttcctccaaaacccgaagctagattcggtcgccatgttcgtagcttctcggttgattccgatttcttcgatgatttgggtgttactgaggagaagtttatagctacaagttcaggagagaagaagaaagggaatcatcatcatagcaggagtaattctatggatggagagatgagttcggcgtcgtttaatatcgaatcgattttagcttctgtgagtggtaaagatagtgggaagaagaatatgggtatgggtggtgatagacttgctgagcttgctttgcttgatcctaaaagagctaaaaggattttagcgaatagacaatctgcggcgaggtcgaaagagaggaagattaggtatactggtgagttagagaggaaggttcagacacttcagaatgaagctactacattgtctgctcaagtcactatgttacagagaggaacatcagagctgaacactgaaaataaacacctcaaaatgcggcttcaagctttagagcaacaagctgaacttagggatgctttgaatgaagcgctgcgggatgaactgaaccgacttaaggtggtagctggagaaattcctcaggggaatggaaattcttacaaccgtgctcaattctcatctcagcaatcggcaatgaatcagtttgggaacaaaacgaaccaacagatgagtacaaacgggcagccatcgctcccaagctacatggatttcaccaagagaggctgagttcgtgtcacctatatatgtttgctgagttataaatacgttatattcatttcgggctgcaatatttgatgtatgtaaaaagtatgtatgtatccatgtataatggcttttgtgttgttagcgtctatgcagatatgttcatggcgacatcggtctatctttacaagtagtatccattgtaatatactaccc

SEQ ID NO: 86935 - protein, 365 aa, Arabidopsis thaliana; identical to SEQ ID NO: 30754
  peptide (1)..(365): Ceres Seq. ID no. 12695473
  misc_feature (218)..(280): Pfam Name: bZIP transcription factor Pfam Description: bZIP transcription factor
  misc_feature (25)..(365): Homolog of NCBI NO: 18400998 NR Description: VirE2-interacting protein VIP1; protein id: supported by cDNA: 19086., supported by cDNA: gi_17529333
  misc_feature (25)..(365): Homolog of NCBI NO: 21553989 NR Description: VirE2-interacting protein VIP1 [Arabidopsis
  misc_feature (105)..(365): Homolog of NCBI NO: 7258340 NR Description: VirE2-interacting protein VIP1 [Arabidopsis
  misc_feature (38)..(365): Homolog of NCBI NO: 8777512 NR Description: bZIP transcriptional activator RSG [Nicotiana
  misc_feature (170)..(352): Homolog of NCBI NO: 2921823 NR Description: shoot-forming PKSF1 [Paulownia kawakamii]
  misc_feature (176)..(347): Homolog of NCBI NO: 29367343 NR Description: bZIP-like protein [Oryza sativa (japonica
  misc_feature (159)..(352): Homolog of NCBI NO: 15224665 NR Description: bZIP transcription factor (POSF21); protein id: supported by cDNA: gi_15982853 [Arabidopsis thaliana] Possible transcription factor PosF21 >gi|99685|pir||S21883 bZIP
  misc_feature (149)..(352): Homolog of NCBI NO: 7489564 NR Description: probable transcription activator RF2a - rice
  misc_feature (159)..(349): Homolog of NCBI NO: 15221391 NR Description: bZIP protein; protein id: At1g06070.1, supported cDNA: 17213. [Arabidopsis thaliana] >gi|25406894|pir||H86195
  misc_feature (159)..(349): Homolog of NCBI NO: 21553831 NR Description: transcriptional activator RF2a, putative

SEQ ID NO: 86936 - protein, 341 aa, Arabidopsis thaliana; identical to SEQ ID NO: 30755
  peptide (1)..(341): Ceres Seq. ID no. 12695474
  misc_feature (194)..(256): Pfam Name: bZIP transcription factor Pfam Description: bZIP transcription factor
  misc_feature (1)..(341): Homolog of NCBI NO: 18400998 NR Description: VirE2-interacting protein VIP1; protein id: supported by cDNA: 19086., supported by cDNA: gi_17529333
  misc_feature (1)..(341): Homolog of NCBI NO: 21553989 NR Description: VirE2-interacting protein VIP1 [Arabidopsis
  misc_feature (81)..(341): Homolog of NCBI NO: 7258340 NR Description: VirE2-interacting protein VIP1 [Arabidopsis
  misc_feature (14)..(341): Homolog of NCBI NO: 8777512 NR Description: bZIP transcriptional activator RSG [Nicotiana
  misc_feature (146)..(328): Homolog of NCBI NO: 2921823 NR Description: shoot-forming PKSF1 [Paulownia kawakamii]
  misc_feature (152)..(323): Homolog of NCBI NO: 29367343 NR Description: bZIP-like protein [Oryza sativa (japonica
  misc_feature (135)..(328): Homolog of NCBI NO: 15224665 NR Description: bZIP transcription factor (POSF21); protein id: supported by cDNA: gi_15982853 [Arabidopsis thaliana] Possible transcription factor PosF21 >gi|99685|pir||S21883 bZIP
  misc_feature (125)..(328): Homolog of NCBI NO: 7489564 NR Description: probable transcription activator RF2a - rice
  misc_feature (135)..(325): Homolog of NCBI NO: 15221391 NR Description: bZIP protein; protein id: At1g06070.1, supported cDNA: 17213. [Arabidopsis thaliana] >gi|25406894|pir||H86195
  misc_feature (135)..(325): Homolog of NCBI NO: 21553831 NR Description: transcriptional activator RF2a, putative

SEQ ID NO: 86937 - protein, 323 aa, Arabidopsis thaliana; identical to SEQ ID NO: 30756
  peptide (1)..(323): Ceres Seq. ID no. 12695475
  misc_feature (176)..(238): Pfam Name: bZIP transcription factor Pfam Description: bZIP transcription factor
  misc_feature (1)..(323): Homolog of NCBI NO: 18400998 NR Description: VirE2-interacting protein VIP1; protein id: supported by cDNA: 19086., supported by cDNA: gi_17529333
  misc_feature (1)..(323): Homolog of NCBI NO: 21553989 NR Description: VirE2-interacting protein VIP1 [Arabidopsis
  misc_feature (63)..(323): Homolog of NCBI NO: 7258340 NR Description: VirE2-interacting protein VIP1 [Arabidopsis
  misc_feature (1)..(323): Homolog of NCBI NO: 8777512 NR Description: bZIP transcriptional activator RSG [Nicotiana
  misc_feature (128)..(310): Homolog of NCBI NO: 2921823 NR Description: shoot-forming PKSF1 [Paulownia kawakamii]
  misc_feature (134)..(305): Homolog of NCBI NO: 29367343 NR Description: bZIP-like protein [Oryza sativa (japonica
  misc_feature (117)..(310): Homolog of NCBI NO: 15224665 NR Description: bZIP transcription factor (POSF21); protein id: supported by cDNA: gi_15982853 [Arabidopsis thaliana] Possible transcription factor PosF21 >gi|99685|pir||S21883 bZIP
  misc_feature (107)..(310): Homolog of NCBI NO: 7489564 NR Description: probable transcription activator RF2a - rice
  misc_feature (117)..(307): Homolog of NCBI NO: 15221391 NR Description: bZIP protein; protein id: At1g06070.1, supported cDNA: 17213. [Arabidopsis thaliana] >gi|25406894|pir||H86195
  misc_feature (117)..(307): Homolog of NCBI NO: 21553831 NR Description: transcriptional activator RF2a, putative

SEQ ID NO: 86938 - DNA, 1230 bp, Arabidopsis thaliana
  misc_feature (1)..(1230): Ceres Seq. ID no. 12695537
  misc_feature: MA Experiment ID: 20000227 Result: Down-regulated in Transcription
  misc_feature: MA Experiment 20000227 PARAMETER Experiment Name: At_Root-Tips-vs-Tops_P Parameter: Tissue Value: Root Tips vs. Root Tops
  misc_feature: MA Experiment ID: 20001451 Result: Down-regulated in Transcription
  misc_feature: MA Experiment 20001451 PARAMETER Experiment Name: At_Far-red-induction_P Parameter: Age (day) Value: 7
  misc_feature: MA Experiment 20001451 PARAMETER Experiment Name: At_Far-red-induction_P Parameter: Light Value: Far-red vs. White
  misc_feature: MA Experiment 20001451 PARAMETER Experiment Name: At_Far-red-induction_P Parameter: Organism Value: A. thaliana
  misc_feature: MA Experiment 20001451 PARAMETER Experiment Name: At_Far-red-induction_P Parameter: Plant Line Value: Columbia
  misc_feature: MA Experiment 20001451 PARAMETER Experiment Name: At_Far-red-induction_P Parameter: Timepoint (hr) Value: 24
  misc_feature: MA Experiment 20001451 PARAMETER Experiment Name: At_Far-red-induction_P Parameter: Tissue Value: Whole Plant
atggctagctccaagggatcacagagtgttagaaacttgatgtacccgggaaagcatgctttgctcccaccaaaaataccgtttcctagtgtatcagcatcgtattccgagtatattcctactggtttgattggttcaagacatggtcagaagcttagtaatgagaaaacacatcaccagcgaacttcctccgagagccatttggtagaagagcttcccttttggcttgatgatcttctcaatgagcagccggaaagccctgctcgaaaatgtggtcatcggcgttcatcaagtgactcttacgcttatctagatgtggctaatgctacaaacataagtttgactctccaaaatgatttcagttataggaatactgttttatccactcaaagaggagtccaagagcttgaccggaataaaaatgctcaggatgctgccttctactctggtgctagttttctgaaacagaagagtcgtcagcgggattctttggtggcaactggggcttgtccttcttggttacctttcgctcgtgagaacggtggcggaaaaaacttgggagctttatatatgtctcaagatgcaacagtaatatcgtcagaaagaaagaactatgctgaacctttttctcatgacccaaagatgttatcttctgaggaaaacaactccaatccttcgcctgtgacttatgaagctgacaacacaaaacgagccaaacagcaatttgcacaaagatcacgggtccgtaagctccagtacatatctgagctagaaagaaatgtacagacattgcaggcagaaggctccaaagtttcagctgaacttgattttctcaaccagaggaatcttattctgagtatggaaaataaagctctcaagaagcgtctcgaaagtatagctcaggagaagcttatcaaacaatctagttatcaagattcaacagttcttaagattgtatacctcatgagttctgtctattatccagtggaacaagaagtgttggaaaaggagattgggagactacgagcgttgtatcagcaacaacaacaaactcaaaaaccatcagccagtcgcggacgtgctactagcaaagatctcgactctcagttctccagtctttcactgaacaccaaagattccaactgtaggcgtgactctgtatctgtgatggggcctggcgactcaacaagatcagacccttatctaccgcctcaccacagacgtttttaa

SEQ ID NO: 86939 - protein, 409 aa, Arabidopsis thaliana
  peptide (1)..(409): Ceres Seq. ID no. 12695538
  misc_feature (243)..(291): Pfam Name: bZIP transcription factor Pfam Description: bZIP transcription factor
  misc_feature (1)..(409): Homolog of NCBI NO: 25404190 NR Description: hypothetical protein T18I24.3 [imported] - thaliana >gi|12321251|gb|AAG50695.1|AC079604_2 bZIP activator RSG, putative [Arabidopsis thaliana]
  misc_feature (1)..(391): Homolog of NCBI NO: 30696210 NR Description: bZIP family transcription factor [Arabidopsis
  misc_feature (1)..(375): Homolog of NCBI NO: 28393180 NR Description: putative bZIP family transcription factor
  misc_feature (1)..(265): Homolog of NCBI NO: 27311723 NR Description: Unknown protein [Arabidopsis thaliana]
  misc_feature (1)..(265): Homolog of NCBI NO: 30680232 NR Description: bZIP transcriptional activator protein -related
  misc_feature (210)..(391): Homolog of NCBI NO: 28393180 NR Description: putative bZIP family transcription factor
  misc_feature (50)..(326): Homolog of NCBI NO: 18491297 NR Description: At2g42380/MHK10.10 [Arabidopsis thaliana]
  misc_feature (50)..(326): Homolog of NCBI NO: 30689007 NR Description: bZIP protein [Arabidopsis thaliana]
  misc_feature (211)..(356): Homolog of NCBI NO: 25403436 NR Description: protein F15O4.49 [imported] - Arabidopsis >gi|8778353|gb|AAF79361.1|AC007887_20 F15O4.49 [Arabidopsis
  misc_feature (211)..(356): Homolog of NCBI NO: 21592919 NR Description: unknown [Arabidopsis thaliana]
MASSKGSQSVRNLMYPGKHALLPPKIPFPSVSASYSEYIPTGLIGSRHGQKLSNEKTHHQRTSSESHLVEELPFWLDDLLNEQPESPARKCGHRRSSSDSYAYLDVANATNISLTLQNDFSYRNTVLSTQRGVQELDRNKNAQDAAFYSGASFLKQKSRQRDSLVATGACPSWLPFARENGGGKNLGALYMSQDATVISSERKNYAEPFSHDPKMLSSEENNSNPSPVTYEADNTKRAKQQFAQRSRVRKLQYISELERNVQTLQAEGSKVSAELDFLNQRNLILSMENKALKKRLESIAQEKLIKQSSYQDSTVLKIVYLMSSVYYPVEQEVLEKEIGRLRALYQQQQQTQKPSASRGRATSKDLDSQFSSLSLNTKDSNCRRDSVSVMGPGDSTRSDPYLPPHHRRF

SEQ ID NO: 86940 - protein, 396 aa, Arabidopsis thaliana
  peptide (1)..(396): Ceres Seq. ID no. 12695539
  misc_feature (230)..(278): Pfam Name: bZIP transcription factor Pfam Description: bZIP transcription factor
  misc_feature (1)..(396): Homolog of NCBI NO: 25404190 NR Description: hypothetical protein T18I24.3 [imported] - thaliana >gi|12321251|gb|AAG50695.1|AC079604_2 bZIP activator RSG, putative [Arabidopsis thaliana]
  misc_feature (1)..(378): Homolog of NCBI NO: 30696210 NR Description: bZIP family transcription factor [Arabidopsis
  misc_feature (1)..(362): Homolog of NCBI NO: 28393180 NR Description: putative bZIP family transcription factor
  misc_feature (1)..(252): Homolog of NCBI NO: 27311723 NR Description: Unknown protein [Arabidopsis thaliana]
  misc_feature (1)..(252): Homolog of NCBI NO: 30680232 NR Description: bZIP transcriptional activator protein -related
  misc_feature (197)..(378): Homolog of NCBI NO: 28393180 NR Description: putative bZIP family transcription factor
  misc_feature (37)..(313): Homolog of NCBI NO: 18491297 NR Description: At2g42380/MHK10.10 [Arabidopsis thaliana]
  misc_feature (37)..(313): Homolog of NCBI NO: 30689007 NR Description: bZIP protein [Arabidopsis thaliana]
  misc_feature (198)..(343): Homolog of NCBI NO: 25403436 NR Description: protein F15O4.49 [imported] - Arabidopsis >gi|8778353|gb|AAF79361.1|AC007887_20 F15O4.49 [Arabidopsis
  misc_feature (198)..(343): Homolog of NCBI NO: 21592919 NR Description: unknown [Arabidopsis thaliana]
MYPGKHALLPPKIPFPSVSASYSEYIPTGLIGSRHGQKLSNEKTHHQRTSSESHLVEELPFWLDDLLNEQPESPARKCGHRRSSSDSYAYLDVANATNISLTLQNDFSYRNTVLSTQRGVQELDRNKNAQDAAFYSGASFLKQKSRQRDSLVATGACPSWLPFARENGGGKNLGALYMSQDATVISSERKNYAEPFSHDPKMLSSEENNSNPSPVTYEADNTKRAKQQFAQRSRVRKLQYISELERNVQTLQAEGSKVSAELDFLNQRNLILSMENKALKKRLESIAQEKLIKQSSYQDSTVLKIVYLMSSVYYPVEQEVLEKEIGRLRALYQQQQQTQKPSASRGRATSKDLDSQFSSLSLNTKDSNCRRDSVSVMGPGDSTRSDPYLPPHHRRF

SEQ ID NO: 86941 - protein, 219 aa, Arabidopsis thaliana
  peptide (1)..(219): Ceres Seq. ID no. 12695540
  misc_feature (53)..(101): Pfam Name: bZIP transcription factor Pfam Description: bZIP transcription factor
  misc_feature (1)..(219): Homolog of NCBI NO: 25404190 NR Description: hypothetical protein T18I24.3 [imported] - thaliana >gi|12321251|gb|AAG50695.1|AC079604_2 bZIP activator RSG, putative [Arabidopsis thaliana]
  misc_feature (1)..(201): Homolog of NCBI NO: 30696210 NR Description: bZIP family transcription factor [Arabidopsis
  misc_feature (1)..(185): Homolog of NCBI NO: 28393180 NR Description: putative bZIP family transcription factor
  misc_feature (1)..(75): Homolog of NCBI NO: 27311723 NR Description: Unknown protein [Arabidopsis thaliana]
  misc_feature (1)..(75): Homolog of NCBI NO: 30680232 NR Description: bZIP transcriptional activator protein -related
  misc_feature (20)..(201): Homolog of NCBI NO: 28393180 NR Description: putative bZIP family transcription factor
  misc_feature (1)..(136): Homolog of NCBI NO: 18491297 NR Description: At2g42380/MHK10.10 [Arabidopsis thaliana]
  misc_feature (1)..(136): Homolog of NCBI NO: 30689007 NR Description: bZIP protein [Arabidopsis thaliana]
  misc_feature (21)..(166): Homolog of NCBI NO: 25403436 NR Description: protein F15O4.49 [imported] - Arabidopsis >gi|8778353|gb|AAF79361.1|AC007887_20 F15O4.49 [Arabidopsis
  misc_feature (21)..(166): Homolog of NCBI NO: 21592919 NR Description: unknown [Arabidopsis thaliana]
MSQDATVISSERKNYAEPFSHDPKMLSSEENNSNPSPVTYEADNTKRAKQQFAQRSRVRKLQYISELERNVQTLQAEGSKVSAELDFLNQRNLILSMENKALKKRLESIAQEKLIKQSSYQDSTVLKIVYLMSSVYYPVEQEVLEKEIGRLRALYQQQQQTQKPSASRGRATSKDLDSQFSSLSLNTKDSNCRRDSVSVMGPGDSTRSDPYLPPHHRRF

SEQ ID NO: 86942 - DNA, 1518 bp, Arabidopsis thaliana
  misc_feature (1)..(1518): Ceres Seq. ID no. 12695649
  misc_feature: MA Experiment ID: 20000169 Result: Down-regulated in Transcription
  misc_feature: MA Experiment 20000169 PARAMETER Experiment Name: At_100uM_ABA_P Parameter: Age (day) Value: 14
  misc_feature: MA Experiment 20000169 PARAMETER Experiment Name: At_100uM_ABA_P Parameter: Organism Value: A. thaliana
  misc_feature: MA Experiment 20000169 PARAMETER Experiment Name: At_100uM_ABA_P Parameter: Plant Line Value: WS
  misc_feature: MA Experiment 20000169 PARAMETER Experiment Name: At_100uM_ABA_P Parameter: Timepoint (hr) Value: 6
  misc_feature: MA Experiment 20000169 PARAMETER Experiment Name: At_100uM_ABA_P Parameter: Tissue Value: Aerial
  misc_feature: MA Experiment 20000169 PARAMETER Experiment Name: At_100uM_ABA_P Parameter: Treatment Value: 100uM ABA vs. No Treatment
  misc_feature: MA Experiment ID: 20000180 Result: Down-regulated in Transcription
  misc_feature: MA Experiment 20000180 PARAMETER Experiment Name: At_Germinating_Seeds_P Parameter: Age (hr) Value: 24 vs. 0
  misc_feature: MA Experiment 20000180 PARAMETER Experiment Name: At_Germinating_Seeds_P Parameter: Tissue Value: Germinating Seeds
  misc_feature: MA Experiment ID: 20000437 Result: Down-regulated in Transcription
  misc_feature: MA Experiment 20000437 PARAMETER Experiment Name: At_Drought_P Parameter: Age (day) Value: 8
  misc_feature: MA Experiment 20000437 PARAMETER Experiment Name: At_Drought_P Parameter: Organism Value: A. thaliana
  misc_feature: MA Experiment 20000437 PARAMETER Experiment Name: At_Drought_P Parameter: Plant Line Value: WS
  misc_feature: MA Experiment 20000437 PARAMETER Experiment Name: At_Drought_P Parameter: Timepoint (hr) Value: 24
  misc_feature: MA Experiment 20000437 PARAMETER Experiment Name: At_Drought_P Parameter: Tissue Value: Whole Plant
  misc_feature: MA Experiment 20000437 PARAMETER Experiment Name: At_Drought_P Parameter: Treatment Value: Drought vs. No Drought
  misc_feature: MA Experiment ID: 20000794 Result: Down-regulated in Transcription
  misc_feature: MA Experiment 20000794 PARAMETER Experiment Name: At_Petals_P Parameter: Age (day) Value: 23-25 days
  misc_feature: MA Experiment 20000794 PARAMETER Experiment Name: At_Petals_P Parameter: Plant Line Value: WS
  misc_feature: MA Experiment 20000794 PARAMETER Experiment Name: At_Petals_P Parameter: Tissue Value: Petals vs. Whole plant
  misc_feature: MA Experiment ID: 20001248 Result: Up-regulated in Transcription
  misc_feature: MA Experiment 20001248 PARAMETER Experiment Name: At_Far-red-induction_P Parameter: Age (day) Value: 7
  misc_feature: MA Experiment 20001248 PARAMETER Experiment Name: At_Far-red-induction_P Parameter: Light Value: Far-red vs. White
  misc_feature: MA Experiment 20001248 PARAMETER Experiment Name: At_Far-red-induction_P Parameter: Organism Value: A. thaliana
  misc_feature: MA Experiment 20001248 PARAMETER Experiment Name: At_Far-red-induction_P Parameter: Plant Line Value: Columbia
  misc_feature: MA Experiment 20001248 PARAMETER Experiment Name: At_Far-red-induction_P Parameter: Timepoint (hr) Value: 4
  misc_feature: MA Experiment 20001248 PARAMETER Experiment Name: At_Far-red-induction_P Parameter: Tissue Value: Whole Plant
  misc_feature: MA Experiment ID: 20001557 Result: Up-regulated in Transcription
  misc_feature: MA Experiment 20001557 PARAMETER Experiment Name: At_Drought_Soil_Dry_P Parameter: Age (day) Value: 27
  misc_feature: MA Experiment 20001557 PARAMETER Experiment Name: At_Drought_Soil_Dry_P Parameter: Organism Value: A. thaliana
  misc_feature: MA Experiment 20001557 PARAMETER Experiment Name: At_Drought_Soil_Dry_P Parameter: Plant Line Value: WS
  misc_feature: MA Experiment 20001557 PARAMETER Experiment Name: At_Drought_Soil_Dry_P Parameter: Post Timepoint (hr) Value: 3
  misc_feature: MA Experiment 20001557 PARAMETER Experiment Name: At_Drought_Soil_Dry_P Parameter: Post-Treatment Value: Re-Water vs. No Drought
  misc_feature: MA Experiment 20001557 PARAMETER Experiment Name: At_Drought_Soil_Dry_P Parameter: Timepoint (day) Value: 13
  misc_feature: MA Experiment 20001557 PARAMETER Experiment Name: At_Drought_Soil_Dry_P Parameter: Treatment Value: Drought vs. No Drought
  misc_feature: MA Experiment ID: 20001558 Result: Up-regulated in Transcription
  misc_feature: MA Experiment 20001558 PARAMETER Experiment Name: At_Drought_Soil_Dry_P Parameter: Age (day) Value: 27
  misc_feature: MA Experiment 20001558 PARAMETER Experiment Name: At_Drought_Soil_Dry_P Parameter: Organism Value: A. thaliana
  misc_feature: MA Experiment 20001558 PARAMETER Experiment Name: At_Drought_Soil_Dry_P Parameter: Plant Line Value: WS
  misc_feature: MA Experiment 20001558 PARAMETER Experiment Name: At_Drought_Soil_Dry_P Parameter: Post Timepoint (hr) Value: 6
  misc_feature: MA Experiment 20001558 PARAMETER Experiment Name: At_Drought_Soil_Dry_P Parameter: Post-Treatment Value: Re-Water vs. No Drought
  misc_feature: MA Experiment 20001558 PARAMETER Experiment Name: At_Drought_Soil_Dry_P Parameter: Timepoint (day) Value: 13
  misc_feature: MA Experiment 20001558 PARAMETER Experiment Name: At_Drought_Soil_Dry_P Parameter: Treatment Value: Drought vs. No Drought
  misc_feature: MA Experiment ID: 20001560 Result: Up-regulated in Transcription
  misc_feature: MA Experiment 20001560 PARAMETER Experiment Name: At_Drought_Soil_Dry_P Parameter: Age (day) Value: 28
  misc_feature: MA Experiment 20001560 PARAMETER Experiment Name: At_Drought_Soil_Dry_P Parameter: Organism Value: A. thaliana
  misc_feature: MA Experiment 20001560 PARAMETER Experiment Name: At_Drought_Soil_Dry_P Parameter: Plant Line Value: WS
  misc_feature: MA Experiment 20001560 PARAMETER Experiment Name: At_Drought_Soil_Dry_P Parameter: Post Timepoint (hr) Value: None
  misc_feature: MA Experiment 20001560 PARAMETER Experiment Name: At_Drought_Soil_Dry_P Parameter: Post-Treatment Value: None
  misc_feature: MA Experiment 20001560 PARAMETER Experiment Name: At_Drought_Soil_Dry_P Parameter: Timepoint (day) Value: 14
  misc_feature: MA Experiment 20001560 PARAMETER Experiment Name: At_Drought_Soil_Dry_P Parameter: Treatment Value: Drought vs. No Drought
  misc_feature: MA Experiment ID: 20001757 Result: Up-regulated in Transcription
  misc_feature: MA Experiment 20001757 PARAMETER Experiment Name: At_50mM_NH4NO3_L-to-H_P Parameter: Timepoint (hr) Value: 6
  misc_feature: MA Experiment 20001757 PARAMETER Experiment Name: At_50mM_NH4NO3_L-to-H_P Parameter: Tissue Value: Leaf
  misc_feature: MA Experiment 20001757 PARAMETER Experiment Name: At_50mM_NH4NO3_L-to-H_P Parameter: Treatment Value: 50mM NH4NO3 vs 100mM Mannitol
atgcagacaccaaacaacaacggttcaacagattcagtgttaccaccaacatcagccggaacaacaccaccaccaccgttgcagcaatcaacaccaccaccgcagcagcaacaacaacaacagtggcaacaacaacaacaatggatggctgcgatgcagcaataccctgcagctgctatggctatgatgcaacaacaacagatgatgatgtatcctcaccctcaatacgctccttacaatcaagctgcttatcaacagcatcctcagtttcaatacgctgcttatcaacagcagcagcagcaacatcaccagagtcagcagcagccacgcggtggatctggtggtgatgatgtcaagactctttgggttggtgatcttcttcattggatggatgagacttatctccatacctgtttctctcacaccaatgaggtttcttctgtgaaagttatacgcaacaagcaaacttgtcaatctgaaggatatgggtttgttgagtttctttcacgttcagcagctgaggaagctcttcagagctttagcggtgttacaatgccgaacgcggaacagcctttccgtttaaactgggcatctttcagtactggtgagaaaagagcatcagagaatggtcctgacctatccatatttgttggagatttggctccagatgtgagtgatgctgtcttgcttgagacttttgctggtagatatccatctgtcaaaggtgctaaagttgtgattgattccaacactgggcgttccaaaggttacgggtttgttaggtttggtgatgagaatgagcgatcaagagctatgacagaaatgaatggtgctttctgttcaagcaggcaaatgcgtgttggtatcgcaaccccgaaaagggctgctgcttacggccaacaaaatggttcacaaggtttaataacttgtcttgatgcgttaaacatagcatctgaagtgaattgtaatgttttcattggattagctcttacacttgctggtggacatggagggaatggttcaatgtctgatggagaatcaaataactcaacaatatttgttggcggtcttgatgctgatgttactgaagaagacctcatgcaacctttttccgattttggggaggttgtttcagtgaagatcccagtagggaaaggatgtggctttgtccaatttgctaacaggcaaagtgctgaggaagccatcgggaacttgaacgggacagtcattgggaagaacactgtccgcctttcatggggaagaagccccaacaaacagtggagaagtgactctggcaaccaatggaatggaggatattcaagaggtcaaggatacaacaatggatatgccaatcaggactcaaacatcggctgcagtcccgggagcttcttgaaagtgttggtatgtctctatcatcagaaaccctgtgagtcctggacttacgggtattgggataaaaacaaaccgttgggtgatcaaagtgatccatccgatgatagttgttggttcagaggttag

SEQ ID NO: 86943 - protein, 505 aa, Arabidopsis thaliana
  peptide (1)..(505): Ceres Seq. ID no. 12695650
  misc_feature (121)..(192): Pfam Name: RNA recognition motif. (a.k.a. RRM, RBD, or RNP domain) Pfam Description: RNA recognition motif. (a.k.a. RRM, RBD, or RNP
  misc_feature (1)..(456): Homolog of NCBI NO: 25386576 NR Description: probable RNA binding protein [imported] - thaliana >gi|10120421|gb|AAG13046.1|AC011807_5 Putative RNA
  misc_feature (1)..(307): Homolog of NCBI NO: 15222783 NR Description: RNA binding protein 47 (RBP47), putative; protein
  misc_feature (329)..(456): Homolog of NCBI NO: 15222783 NR Description: RNA binding protein 47 (RBP47), putative; protein
  misc_feature (1)..(308): Homolog of NCBI NO: 9294614 NR Description: DNA/RNA binding protein-like [Arabidopsis
  misc_feature (329)..(426): Homolog of NCBI NO: 9294614 NR Description: DNA/RNA binding protein-like [Arabidopsis
  misc_feature (35)..(308): Homolog of NCBI NO: 7489196 NR Description: RNA binding protein homolog - common tobacco >gi|2708532|gb|AAB92518.1| putative RNA binding protein
  misc_feature (329)..(456): Homolog of NCBI NO: 7489196 NR Description: RNA binding protein homolog - common tobacco >gi|2708532|gb|AAB92518.1| putative RNA binding protein
  misc_feature (28)..(308): Homolog of NCBI NO: 9663769 NR Description: RNA Binding Protein 47 [Nicotiana plumbaginifolia]
  misc_feature (329)..(456): Homolog of NCBI NO: 9663769 NR Description: RNA Binding Protein 47 [Nicotiana plumbaginifolia]
  misc_feature (1)..(455): Homolog of NCBI NO: 15230291 NR Description: RNA binding protein 47 (RBP47), putative; protein
MQTPNNNGSTDSVLPPTSAGTTPPPPLQQSTPPPQQQQQQQWQQQQQWMAAMQQYPAAAMAMMQQQQMMMYPHPQYAPYNQAAYQQHPQFQYAAYQQQQQQHHQSQQQPRGGSGGDDVKTLWVGDLLHWMDETYLHTCFSHTNEVSSVKVIRNKQTCQSEGYGFVEFLSRSAAEEALQSFSGVTMPNAEQPFRLNWASFSTGEKRASENGPDLSIFVGDLAPDVSDAVLLETFAGRYPSVKGAKVVIDSNTGRSKGYGFVRFGDENERSRAMTEMNGAFCSSRQMRVGIATPKRAAAYGQQNGSQGLITCLDALNIASEVNCNVFIGLALTLAGGHGGNGSMSDGESNNSTIFVGGLDADVTEEDLMQPFSDFGEVVSVKIPVGKGCGFVQFANRQSAEEAIGNLNGTVIGKNTVRLSWGRSPNKQWRSDSGNQWNGGYSRGQGYNNGYANQDSNIGCSPGSFLKVLVCLYHQKPCESWTYGYWDKNKPLGDQSDPSDDSCWFRG

SEQ ID NO: 86944 - protein, 457 aa, Arabidopsis thaliana
  peptide (1)..(457): Ceres Seq. ID no. 12695651
  misc_feature (73)..(144): Pfam Name: RNA recognition motif. (a.k.a. RRM, RBD, or RNP domain) Pfam Description: RNA recognition motif. (a.k.a. RRM, RBD, or RNP
  misc_feature (1)..(408): Homolog of NCBI NO: 25386576 NR Description: probable RNA binding protein [imported] - thaliana >gi|10120421|gb|AAG13046.1|AC011807_5 Putative RNA
  misc_feature (1)..(259): Homolog of NCBI NO: 15222783 NR Description: RNA binding protein 47 (RBP47), putative; protein
  misc_feature (281)..(408): Homolog of NCBI NO: 15222783 NR Description: RNA binding protein 47 (RBP47), putative; protein
  misc_feature (1)..(260): Homolog of NCBI NO: 9294614 NR Description: DNA/RNA binding protein-like [Arabidopsis
  misc_feature (281)..(378): Homolog of NCBI NO: 9294614 NR Description: DNA/RNA binding protein-like [Arabidopsis
  misc_feature (1)..(260): Homolog of NCBI NO: 7489196 NR Description: RNA binding protein homolog - common tobacco >gi|2708532|gb|AAB92518.1| putative RNA binding protein
  misc_feature (281)..(408): Homolog of NCBI NO: 7489196 NR Description: RNA binding protein homolog - common tobacco >gi|2708532|gb|AAB92518.1| putative RNA binding protein
  misc_feature (1)..(260): Homolog of NCBI NO: 9663769 NR Description: RNA Binding Protein 47 [Nicotiana plumbaginifolia]
  misc_feature (281)..(408): Homolog of NCBI NO: 9663769 NR Description: RNA Binding Protein 47 [Nicotiana plumbaginifolia]
  misc_feature (1)..(407): Homolog of NCBI NO: 15230291 NR Description: RNA binding protein 47 (RBP47), putative; protein
MAAMQQYPAAAMAMMQQQQMMMYPHPQYAPYNQAAYQQHPQFQYAAYQQQQQQHHQSQQQPRGGSGGDDVKTLWVGDLLHWMDETYLHTCFSHTNEVSSVKVIRNKQTCQSEGYGFVEFLSRSAAEEALQSFSGVTMPNAEQPFRLNWASFSTGEKRASENGPDLSIFVGDLAPDVSDAVLLETFAGRYPSVKGAKVVIDSNTGRSKGYGFVRFGDENERSRAMTEMNGAFCSSRQMRVGIATPKRAAAYGQQNGSQGLITCLDALNIASEVNCNVFIGLALTLAGGHGGNGSMSDGESNNSTIFVGGLDADVTEEDLMQPFSDFGEVVSVKIPVGKGCGFVQFANRQSAEEAIGNLNGTVIGKNTVRLSWGRSPNKQWRSDSGNQWNGGYSRGQGYNNGYANQDSNIGCSPGSFLKVLVCLYHQKPCESWTYGYWDKNKPLGDQSDPSDDSCWFRG

SEQ ID NO: 86945 - protein, 454 aa, Arabidopsis thaliana
  peptide (1)..(454): Ceres Seq. ID no. 12695652
  misc_feature (70)..(141): Pfam Name: RNA recognition motif. (a.k.a. RRM, RBD, or RNP domain) Pfam Description: RNA recognition motif. (a.k.a. RRM, RBD, or RNP
  misc_feature (1)..(405): Homolog of NCBI NO: 25386576 NR Description: probable RNA binding protein [imported] - thaliana >gi|10120421|gb|AAG13046.1|AC011807_5 Putative RNA
  misc_feature (1)..(256): Homolog of NCBI NO: 15222783 NR Description: RNA binding protein 47 (RBP47), putative; protein
  misc_feature (278)..(405): Homolog of NCBI NO: 15222783 NR Description: RNA binding protein 47 (RBP47), putative; protein
  misc_feature (1)..(257): Homolog of NCBI NO: 9294614 NR Description: DNA/RNA binding protein-like [Arabidopsis
  misc_feature (278)..(375): Homolog of NCBI NO: 9294614 NR Description: DNA/RNA binding protein-like [Arabidopsis
  misc_feature (1)..(257): Homolog of NCBI NO: 7489196 NR Description: RNA binding protein homolog - common tobacco >gi|2708532|gb|AAB92518.1| putative RNA binding protein
  misc_feature (278)..(405): Homolog of NCBI NO: 7489196 NR Description: RNA binding protein homolog - common tobacco >gi|2708532|gb|AAB92518.1| putative RNA binding protein
  misc_feature (1)..(257): Homolog of NCBI NO: 9663769 NR Description: RNA Binding Protein 47 [Nicotiana plumbaginifolia]
  misc_feature (278)..(405): Homolog of NCBI NO: 9663769 NR Description: RNA Binding Protein 47 [Nicotiana plumbaginifolia]
  misc_feature (1)..(404): Homolog of NCBI NO: 15230291 NR Description: RNA binding protein 47 (RBP47), putative; protein
MQQYPAAAMAMMQQQQMMMYPHPQYAPYNQAAYQQHPQFQYAAYQQQQQQHHQSQQQPRGGSGGDDVKTLWVGDLLHWMDETYLHTCFSHTNEVSSVKVIRNKQTCQSEGYGFVEFLSRSAAEEALQSFSGVTMPNAEQPFRLNWASFSTGEKRASENGPDLSIFVGDLAPDVSDAVLLETFAGRYPSVKGAKVVIDSNTGRSKGYGFVRFGDENERSRAMTEMNGAFCSSRQMRVGIATPKRAAAYGQQNGSQGLITCLDALNIASEVNCNVFIGLALTLAGGHGGNGSMSDGESNNSTIFVGGLDADVTEEDLMQPFSDFGEVVSVKIPVGKGCGFVQFANRQSAEEAIGNLNGTVIGKNTVRLSWGRSPNKQWRSDSGNQWNGGYSRGQGYNNGYANQDSNIGCSPGSFLKVLVCLYHQKPCESWTYGYWDKNKPLGDQSDPSDDSCWFRG

SEQ ID NO: 86946 - DNA, 1959 bp, Arabidopsis thaliana
  misc_feature (1)..(1959): Ceres Seq. ID no. 12695661
  misc_feature: MA Experiment ID: 20000173 Result: Down-regulated in Transcription
  misc_feature: MA Experiment 20000173 PARAMETER Experiment Name: At_42deg_Heat_P Parameter: Age (day) Value: 14
  misc_feature: MA Experiment 20000173 PARAMETER Experiment Name: At_42deg_Heat_P Parameter: Organism Value: A. thaliana
  misc_feature: MA Experiment 20000173 PARAMETER Experiment Name: At_42deg_Heat_P Parameter: Plant Line Value: WS
  misc_feature: MA Experiment 20000173 PARAMETER Experiment Name: At_42deg_Heat_P Parameter: Temperature (deg C) Value: 42 vs. 22
  misc_feature: MA Experiment 20000173 PARAMETER Experiment Name: At_42deg_Heat_P Parameter: Timepoint (hr) Value: 6
  misc_feature: MA Experiment 20000173 PARAMETER Experiment Name: At_42deg_Heat_P Parameter: Tissue Value: Aerial
  misc_feature: MA Experiment ID: 20000437 Result: Down-regulated in Transcription
  misc_feature: MA Experiment 20000437 PARAMETER Experiment Name: At_Drought_P Parameter: Age (day) Value: 8
  misc_feature: MA Experiment 20000437 PARAMETER Experiment Name: At_Drought_P Parameter: Organism Value: A. thaliana
  misc_feature: MA Experiment 20000437 PARAMETER Experiment Name: At_Drought_P Parameter: Plant Line Value: WS
  misc_feature: MA Experiment 20000437 PARAMETER Experiment Name: At_Drought_P Parameter: Timepoint (hr) Value: 24
  misc_feature: MA Experiment 20000437 PARAMETER Experiment Name: At_Drought_P Parameter: Tissue Value: Whole Plant
  misc_feature: MA Experiment 20000437 PARAMETER Experiment Name: At_Drought_P Parameter: Treatment Value: Drought vs. No Drought
  misc_feature: MA Experiment ID: 20000438 Result: Up-regulated in Transcription
  misc_feature: MA Experiment 20000438 PARAMETER Experiment Name: At_Shoots__P Parameter: Age (day) Value: 14
  misc_feature: MA Experiment 20000438 PARAMETER Experiment Name: At_Shoots__P Parameter: Tissue Value: Shoots vs. Whole Plant
  misc_feature: MA Experiment ID: 20000794 Result: Down-regulated in Transcription
  misc_feature: MA Experiment 20000794 PARAMETER Experiment Name: At_Petals_P Parameter: Age (day) Value: 23-25 days
  misc_feature: MA Experiment 20000794 PARAMETER Experiment Name: At_Petals_P Parameter: Plant Line Value: WS
  misc_feature: MA Experiment 20000794 PARAMETER Experiment Name: At_Petals_P Parameter: Tissue Value: Petals vs. Whole plant
  misc_feature: MA Experiment ID: 20001247 Result: Up-regulated in Transcription
  misc_feature: MA Experiment 20001247 PARAMETER Experiment Name: At_Far-red-induction_P Parameter: Age (day) Value: 7
  misc_feature: MA Experiment 20001247 PARAMETER Experiment Name: At_Far-red-induction_P Parameter: Light Value: Far-red vs. White
  misc_feature: MA Experiment 20001247 PARAMETER Experiment Name: At_Far-red-induction_P Parameter: Organism Value: A. thaliana
  misc_feature: MA Experiment 20001247 PARAMETER Experiment Name: At_Far-red-induction_P Parameter: Plant Line Value: Columbia
  misc_feature: MA Experiment 20001247 PARAMETER Experiment Name: At_Far-red-induction_P Parameter: Timepoint (hr) Value: 1
  misc_feature: MA Experiment 20001247 PARAMETER Experiment Name: At_Far-red-induction_P Parameter: Tissue Value: Whole Plant
  misc_feature: MA Experiment ID: 20001554 Result: Down-regulated in Transcription
  misc_feature: MA Experiment 20001554 PARAMETER Experiment Name: At_Drought_Soil_Dry_P Parameter: Age (day) Value: 21
  misc_feature: MA Experiment 20001554 PARAMETER Experiment Name: At_Drought_Soil_Dry_P Parameter: Organism Value: A. thaliana
  misc_feature: MA Experiment 20001554 PARAMETER Experiment Name: At_Drought_Soil_Dry_P Parameter: Plant Line Value: WS
  misc_feature: MA Experiment 20001554 PARAMETER Experiment Name: At_Drought_Soil_Dry_P Parameter: Post Timepoint (hr) Value: None
  misc_feature: MA Experiment 20001554 PARAMETER Experiment Name: At_Drought_Soil_Dry_P Parameter: Post-Treatment Value: None
  misc_feature: MA Experiment 20001554 PARAMETER Experiment Name: At_Drought_Soil_Dry_P Parameter: Timepoint (day) Value: 7
  misc_feature: MA Experiment 20001554 PARAMETER Experiment Name: At_Drought_Soil_Dry_P Parameter: Treatment Value: Drought vs. No Drought
  misc_feature: MA Experiment ID: 20001555 Result: Down-regulated in Transcription
  misc_feature: MA Experiment 20001555 PARAMETER Experiment Name: At_Drought_Soil_Dry_P Parameter: Age (day) Value: 24
  misc_feature: MA Experiment 20001555 PARAMETER Experiment Name: At_Drought_Soil_Dry_P Parameter: Organism Value: A. thaliana
  misc_feature: MA Experiment 20001555 PARAMETER Experiment Name: At_Drought_Soil_Dry_P Parameter: Plant Line Value: WS
  misc_feature: MA Experiment 20001555 PARAMETER Experiment Name: At_Drought_Soil_Dry_P Parameter: Post Timepoint (hr) Value: None
  misc_feature: MA Experiment 20001555 PARAMETER Experiment Name: At_Drought_Soil_Dry_P Parameter: Post-Treatment Value: None
  misc_feature: MA Experiment 20001555 PARAMETER Experiment Name: At_Drought_Soil_Dry_P Parameter: Timepoint (day) Value: 10
  misc_feature: MA Experiment 20001555 PARAMETER Experiment Name: At_Drought_Soil_Dry_P Parameter: Treatment Value: Drought vs. No Drought
  misc_feature: MA Experiment ID: 20001558 Result: Up-regulated in Transcription
  misc_feature: MA Experiment 20001558 PARAMETER Experiment Name: At_Drought_Soil_Dry_P Parameter: Age (day) Value: 27
  misc_feature: MA Experiment 20001558 PARAMETER Experiment Name: At_Drought_Soil_Dry_P Parameter: Organism Value: A. thaliana
  misc_feature: MA Experiment 20001558 PARAMETER Experiment Name: At_Drought_Soil_Dry_P Parameter: Plant Line Value: WS
  misc_feature: MA Experiment 20001558 PARAMETER Experiment Name: At_Drought_Soil_Dry_P Parameter: Post Timepoint (hr) Value: 6
  misc_feature: MA Experiment 20001558 PARAMETER Experiment Name: At_Drought_Soil_Dry_P Parameter: Post-Treatment Value: Re-Water vs. No Drought
  misc_feature: MA Experiment 20001558 PARAMETER Experiment Name: At_Drought_Soil_Dry_P Parameter: Timepoint (day) Value: 13
  misc_feature: MA Experiment 20001558 PARAMETER Experiment Name: At_Drought_Soil_Dry_P Parameter: Treatment Value: Drought vs. No Drought
  misc_feature: MA Experiment ID: 20001560 Result: Up-regulated in Transcription
  misc_feature: MA Experiment 20001560 PARAMETER Experiment Name: At_Drought_Soil_Dry_P Parameter: Age (day) Value: 28
  misc_feature: MA Experiment 20001560 PARAMETER Experiment Name: At_Drought_Soil_Dry_P Parameter: Organism Value: A. thaliana
  misc_feature: MA Experiment 20001560 PARAMETER Experiment Name: At_Drought_Soil_Dry_P Parameter: Plant Line Value: WS
  misc_feature: MA Experiment 20001560 PARAMETER Experiment Name: At_Drought_Soil_Dry_P Parameter: Post Timepoint (hr) Value: None
  misc_feature: MA Experiment 20001560 PARAMETER Experiment Name: At_Drought_Soil_Dry_P Parameter: Post-Treatment Value: None
  misc_feature: MA Experiment 20001560 PARAMETER Experiment Name: At_Drought_Soil_Dry_P Parameter: Timepoint (day) Value: 14
  misc_feature: MA Experiment 20001560 PARAMETER Experiment Name: At_Drought_Soil_Dry_P Parameter: Treatment Value: Drought vs. No Drought
atggctgcagattgtccattagatttcagtggatcaaatttcactctagtagctactgtgtgctccaacataaccaacagaggcaaatgttgccgctacatgaacgcttttgttgcggtgtccgtggctcgttacgcgaacttgtcaactaatcttggagtcacatcagatttatctgaaacctgcattgcttccatctctagagccatggagggctacggagtctcgagaaacgccactagtttctgcggtttgggaaccaagatccttgttaagtatgactgtgacggtcgaaccactgttacacaaatgcatcagtctccgggatttggacatgtttcaagaaactgcagactcccattttcgccgggacaccaatgcagaaagtgtttgaactctggcatcacttaccttcgtaatctcataggtgcagagactaataacattactctgtgtacttgtcgtgatgcgacttatgctacattagcaagccgaatagacgatacatcagctcttgaactccttagttgtttctttcaagtgacagagcttaacattccttcagagtcattttcaccagtggcaagtccagaaccttctccaagcacggttggtggtattagcccaagcaacagtgattctcaaatgactacaagtagaagcaccaatccatatcacttaacaatggttccaaccattgggattgttgttacagctgttgctcttacgatgcttgtagtcttggtaattcttatccgtagaaagaaccgggaactggatgaatctgagagcttggatagaaagtcaacaaaatcagttccttcttcccttcctgtattcaagattcatgaagatgattcttcctcagctttcagaaagttcagctacaaggaaatgacaaatgcaacaaatgatttcaacacggttatcggtcagggaggttttggtactgtttacaaagccgagttcaacgatggtctgattgcagcggtaaaaaagatgaacaaagtctctgaacaagctgaacaagatttttgtagagagatagggcttttagctaagctgcatcaccgtaacctcgttgctttgaaaggcttttgcatcaacaagaaagaaaggttcttggtctacgactatatgaaaaatggcagcttaaaagatcacttacatgccattggaaagcctccacctagttggggaacaagaatgaaaattgcaattgatgtggcaaatgctttggtaaatattccaaagtctttcatctacattttctctgaatatcttcatttctactgtgatcctcctctctgtcatagagatattaaatcaagcaatatattactcgatgagaacttcgtcgctaagctttcagattttggccttgcacattcgtctagagatggctctgtttgctttgagcctgtgaataccgatatccgtggaactccaggttatgtagatccggaatatgtagtaacgcaagagttgacagagaagagtgatgtgtacagctacggagttgtgttgctggagctcataaccgggagaagagcagttgatgaaggtaggaaccttgtggaaatgtctcagcggtttttgttggcgaaatcaaaacacctcgagttggtagacccgagaatcaaagactctattaatgatgctggaggaaaacaacttgatgcagttgtgacggttgtgagattgtgtaccgagaaagaaggccggtctaggccatcaattaagcaagtcttgaggctgttgtgtgaaagctgtgatccggtgcatagcgcatttgctaaagcggttgaagaagagataggctgggatagtaggaagagaagcaatttgagaattcaaagaggtgattcccggatctttggtccatcgtctagtactacttccaggtcacattacagccggagtttacctcactctccaattaacggattttctttctga

SEQ ID NO: 86947 - protein, 652 aa, Arabidopsis thaliana
  peptide (1)..(652): Ceres Seq. ID no. 12695662
  misc_feature (3)..(652): Homolog of NCBI NO: 18402188 NR Description: unknown protein; protein id: At3g19300.1 thaliana] >gi|11994452|dbj|BAB02454.1| contains similarity to
  misc_feature (1)..(425): Homolog of NCBI NO: 18402761 NR Description: expressed protein; protein id: At1g49730.1,
  misc_feature (4)..(642): Homolog of NCBI NO: 38345516 NR Description: OSJNBa0039K24.19 [Oryza sativa (japonica
  misc_feature (4)..(186): Homolog of NCBI NO: 5777621 NR Description: CAA30379.1 protein [Oryza sativa]
  misc_feature (249)..(373): Homolog of NCBI NO: 5777621 NR Description: CAA30379.1 protein [Oryza sativa]
  misc_feature (548)..(642): Homolog of NCBI NO: 5777621 NR Description: CAA30379.1 protein [Oryza sativa]
  misc_feature (439)..(514): Homolog of NCBI NO: 5777621 NR Description: CAA30379.1 protein [Oryza sativa]
  misc_feature (232)..(587): Homolog of NCBI NO: 11346408 NR Description: hypothetical protein T20L15.220 - Arabidopsis >gi|7329668|emb|CAB82765.1| putative protein [Arabidopsis
  misc_feature (232)..(587): Homolog of NCBI NO: 30679474 NR Description: leucine-rich repeat transmembrane protein kinase,
  misc_feature (275)..(587): Homolog of NCBI NO: 13877617 NR Description: protein kinase-like protein [Arabidopsis thaliana]
MAADCPLDFSGSNFTLVATVCSNITNRGKCCRYMNAFVAVSVARYANLSTNLGVTSDLSETCIASISRAMEGYGVSRNATSFCGLGTKILVKYDCDGRTTVTQMHQSPGFGHVSRNCRLPFSPGHQCRKCLNSGITYLRNLIGAETNNITLCTCRDATYATLASRIDDTSALELLSCFFQVTELNIPSESFSPVASPEPSPSTVGGISPSNSDSQMTTSRSTNPYHLTMVPTIGIVVTAVALTMLVVLVILIRRKNRELDESESLDRKSTKSVPSSLPVFKIHEDDSSSAFRKFSYKEMTNATNDFNTVIGQGGFGTVYKAEFNDGLIAAVKKMNKVSEQAEQDFCREIGLLAKLHHRNLVALKGFCINKKERFLVYDYMKNGSLKDHLHAIGKPPPSWGTRMKIAIDVANALVNIPKSFIYIFSEYLHFYCDPPLCHRDIKSSNILLDENFVAKLSDFGLAHSSRDGSVCFEPVNTDIRGTPGYVDPEYVVTQELTEKSDVYSYGVVLLELITGRRAVDEGRNLVEMSQRFLLAKSKHLELVDPRIKDSINDAGGKQLDAVVTVVRLCTEKEGRSRPSIKQVLRLLCESCDPVHSAFAKAVEEEIGWDSRKRSNLRIQRGDSRIFGPSSSTTSRSHYSRSLPHSPINGFSF

SEQ ID NO: 86948 - protein, 619 aa, Arabidopsis thaliana
  peptide (1)..(619): Ceres Seq. ID no. 12695663
  misc_feature (1)..(619): Homolog of NCBI NO: 18402188 NR Description: unknown protein; protein id: At3g19300.1 thaliana] >gi|11994452|dbj|BAB02454.1| contains similarity to
  misc_feature (1)..(392): Homolog of NCBI NO: 18402761 NR Description: expressed protein; protein id: At1g49730.1,
  misc_feature (1)..(609): Homolog of NCBI NO: 38345516 NR Description: OSJNBa0039K24.19 [Oryza sativa (japonica
  misc_feature (1)..(153): Homolog of NCBI NO: 5777621 NR Description: CAA30379.1 protein [Oryza sativa]
  misc_feature (216)..(340): Homolog of NCBI NO: 5777621 NR Description: CAA30379.1 protein [Oryza sativa]
  misc_feature (515)..(609): Homolog of NCBI NO: 5777621 NR Description: CAA30379.1 protein [Oryza sativa]
  misc_feature (406)..(481): Homolog of NCBI NO: 5777621 NR Description: CAA30379.1 protein [Oryza sativa]
  misc_feature (199)..(554): Homolog of NCBI NO: 11346408 NR Description: hypothetical protein T20L15.220 - Arabidopsis >gi|7329668|emb|CAB82765.1| putative protein [Arabidopsis
  misc_feature (199)..(554): Homolog of NCBI NO: 30679474 NR Description: leucine-rich repeat transmembrane protein kinase,
  misc_feature (242)..(554): Homolog of NCBI NO: 13877617 NR Description: protein kinase-like protein [Arabidopsis thaliana]
MNAFVAVSVARYANLSTNLGVTSDLSETCIASISRAMEGYGVSRNATSFCGLGTKILVKYDCDGRTTVTQMHQSPGFGHVSRNCRLPFSPGHQCRKCLNSGITYLRNLIGAETNNITLCTCRDATYATLASRIDDTSALELLSCFFQVTELNIPSESFSPVASPEPSPSTVGGISPSNSDSQMTTSRSTNPYHLTMVPTIGIVVTAVALTMLVVLVILIRRKNRELDESESLDRKSTKSVPSSLPVFKIHEDDSSSAFRKFSYKEMTNATNDFNTVIGQGGFGTVYKAEFNDGLIAAVKKMNKVSEQAEQDFCREIGLLAKLHHRNLVALKGFCINKKERFLVYDYMKNGSLKDHLHAIGKPPPSWGTRMKIAIDVANALVNIPKSFIYIFSEYLHFYCDPPLCHRDIKSSNILLDENFVAKLSDFGLAHSSRDGSVCFEPVNTDIRGTPGYVDPEYVVTQELTEKSDVYSYGVVLLELITGRRAVDEGRNLVEMSQRFLLAKSKHLELVDPRIKDSINDAGGKQLDAVVTVVRLCTEKEGRSRPSIKQVLRLLCESCDPVHSAFAKAVEEEIGWDSRKRSNLRIQRGDSRIFGPSSSTTSRSHYSRSLPHSPINGFSF

SEQ ID NO: 86949 - protein, 583 aa, Arabidopsis thaliana
  peptide (1)..(583): Ceres Seq. ID no. 12695664
  misc_feature (1)..(583): Homolog of NCBI NO: 18402188 NR Description: unknown protein; protein id: At3g19300.1 thaliana] >gi|11994452|dbj|BAB02454.1| contains similarity to
  misc_feature (1)..(356): Homolog of NCBI NO: 18402761 NR Description: expressed protein; protein id: At1g49730.1,
  misc_feature (1)..(573): Homolog of NCBI NO: 38345516 NR Description: OSJNBa0039K24.19 [Oryza sativa (japonica
  misc_feature (1)..(117): Homolog of NCBI NO: 5777621 NR Description: CAA30379.1 protein [Oryza sativa]
  misc_feature (180)..(304): Homolog of NCBI NO: 5777621 NR Description: CAA30379.1 protein [Oryza sativa]
  misc_feature (479)..(573): Homolog of NCBI NO: 5777621 NR Description: CAA30379.1 protein [Oryza sativa]
  misc_feature (370)..(445): Homolog of NCBI NO: 5777621 NR Description: CAA30379.1 protein [Oryza sativa]
  misc_feature (163)..(518): Homolog of NCBI NO: 11346408 NR Description: hypothetical protein T20L15.220 - Arabidopsis >gi|7329668|emb|CAB82765.1| putative protein [Arabidopsis
  misc_feature (163)..(518): Homolog of NCBI NO: 30679474 NR Description: leucine-rich repeat transmembrane protein kinase,
  misc_feature (206)..(518): Homolog of NCBI NO: 13877617 NR Description: protein kinase-like protein [Arabidopsis thaliana]
MEGYGVSRNATSFCGLGTKILVKYDCDGRTTVTQMHQSPGFGHVSRNCRLPFSPGHQCRKCLNSGITYLRNLIGAETNNITLCTCRDATYATLASRIDDTSALELLSCFFQVTELNIPSESFSPVASPEPSPSTVGGISPSNSDSQMTTSRSTNPYHLTMVPTIGIVVTAVALTMLVVLVILIRRKNRELDESESLDRKSTKSVPSSLPVFKIHEDDSSSAFRKFSYKEMTNATNDFNTVIGQGGFGTVYKAEFNDGLIAAVKKMNKVSEQAEQDFCREIGLLAKLHHRNLVALKGFCINKKERFLVYDYMKNGSLKDHLHAIGKPPPSWGTRMKIAIDVANALVNIPKSFIYIFSEYLHFYCDPPLCHRDIKSSNILLDENFVAKLSDFGLAHSSRDGSVCFEPVNTDIRGTPGYVDPEYVVTQELTEKSDVYSYGVVLLELITGRRAVDEGRNLVEMSQRFLLAKSKHLELVDPRIKDSINDAGGKQLDAVVTVVRLCTEKEGRSRPSIKQVLRLLCESCDPVHSAFAKAVEEEIGWDSRKRSNLRIQRGDSRIFGPSSSTTSRSHYSRSLPHSPINGFSF

SEQ ID NO: 86950 - DNA, 1305 bp, Arabidopsis thaliana
  misc_feature (1)..(1305): Ceres Seq. ID no. 12695669
  misc_feature: MA Experiment ID: 20000182 Result: Up-regulated in Transcription
  misc_feature: MA Experiment 20000182 PARAMETER Experiment Name: At_2mM_SA_P Parameter: Age (day) Value: 14
  misc_feature: MA Experiment 20000182 PARAMETER Experiment Name: At_2mM_SA_P Parameter: Organism Value: A. thaliana
  misc_feature: MA Experiment 20000182 PARAMETER Experiment Name: At_2mM_SA_P Parameter: Plant Line Value: WS
  misc_feature: MA Experiment 20000182 PARAMETER Experiment Name: At_2mM_SA_P Parameter: Timepoint (hr) Value: 6
  misc_feature: MA Experiment 20000182 PARAMETER Experiment Name: At_2mM_SA_P Parameter: Tissue Value: Aerial
  misc_feature: MA Experiment 20000182 PARAMETER Experiment Name: At_2mM_SA_P Parameter: Treatment Value: 2mM SA vs. No Treatment
  misc_feature: MA Experiment ID: 20000185 Result: Down-regulated in Transcription
  misc_feature: MA Experiment 20000185 PARAMETER Experiment Name: At_Roots__P Parameter: Age (day) Value: 7 vs. 21
  misc_feature: MA Experiment 20000185 PARAMETER Experiment Name: At_Roots__P Parameter: Organism Value: A. thaliana
  misc_feature: MA Experiment 20000185 PARAMETER Experiment Name: At_Roots__P Parameter: Tissue Value: Roots vs. Whole Plant
  misc_feature: MA Experiment ID: 20000436 Result: Down-regulated in Transcription
  misc_feature: MA Experiment 20000436 PARAMETER Experiment Name: At_Drought_P Parameter: Age (day) Value: 7
  misc_feature: MA Experiment 20000436 PARAMETER Experiment Name: At_Drought_P Parameter: Organism Value: A. thaliana
  misc_feature: MA Experiment 20000436 PARAMETER Experiment Name: At_Drought_P Parameter: Plant Line Value: WS
  misc_feature: MA Experiment 20000436 PARAMETER Experiment Name: At_Drought_P Parameter: Timepoint (hr) Value: 12
  misc_feature: MA Experiment 20000436 PARAMETER Experiment Name: At_Drought_P Parameter: Tissue Value: Whole Plant
  misc_feature: MA Experiment 20000436 PARAMETER Experiment Name: At_Drought_P Parameter: Treatment Value: Drought vs. No Drought
  misc_feature: MA Experiment ID: 20000437 Result: Down-regulated in Transcription
  misc_feature: MA Experiment 20000437 PARAMETER Experiment Name: At_Drought_P Parameter: Age (day) Value: 8
  misc_feature: MA Experiment 20000437 PARAMETER Experiment Name: At_Drought_P Parameter: Organism Value: A. thaliana
  misc_feature: MA Experiment 20000437 PARAMETER Experiment Name: At_Drought_P Parameter: Plant Line Value: WS
  misc_feature: MA Experiment 20000437 PARAMETER Experiment Name: At_Drought_P Parameter: Timepoint (hr) Value: 24
  misc_feature: MA Experiment 20000437 PARAMETER Experiment Name: At_Drought_P Parameter: Tissue Value: Whole Plant
  misc_feature: MA Experiment 20000437 PARAMETER Experiment Name: At_Drought_P Parameter: Treatment Value: Drought vs. No Drought
  misc_feature: MA Experiment ID: 20000439 Result: Down-regulated in Transcription
  misc_feature: MA Experiment 20000439 PARAMETER Experiment Name: At_Roots__P Parameter: Age (day) Value: 14 vs. 21
  misc_feature: MA Experiment 20000439 PARAMETER Experiment Name: At_Roots__P Parameter: Organism Value: A. thaliana
  misc_feature: MA Experiment 20000439 PARAMETER Experiment Name: At_Roots__P Parameter: Tissue Value: Roots vs. Whole Plant
  misc_feature: MA Experiment ID: 20000460 Result: Down-regulated in Transcription
  misc_feature: MA Experiment 20000460 PARAMETER Experiment Name: At_10percent_PEG_P Parameter: Age (day) Value: 12
  misc_feature: MA Experiment 20000460 PARAMETER Experiment Name: At_10percent_PEG_P Parameter: Organism Value: A. thaliana
  misc_feature: MA Experiment 20000460 PARAMETER Experiment Name: At_10percent_PEG_P Parameter: Plant Line Value: WS
  misc_feature: MA Experiment 20000460 PARAMETER Experiment Name: At_10percent_PEG_P Parameter: Timepoint (day) Value: 12
  misc_feature: MA Experiment 20000460 PARAMETER Experiment Name: At_10percent_PEG_P Parameter: Tissue Value: Whole Plant
  misc_feature: MA Experiment 20000460 PARAMETER Experiment Name: At_10percent_PEG_P Parameter: Treatment Value: 10percent PEG vs. No Treatment
  misc_feature: MA Experiment ID: 20000527 Result: Down-regulated in Transcription
  misc_feature: MA Experiment 20000527 PARAMETER Experiment Name: At_10percent_PEG_P Parameter: Age (day) Value: 20
  misc_feature: MA Experiment 20000527 PARAMETER Experiment Name: At_10percent_PEG_P Parameter: Organism Value: A. thaliana
  misc_feature: MA Experiment 20000527 PARAMETER Experiment Name: At_10percent_PEG_P Parameter: Plant Line Value: WS
  misc_feature: MA Experiment 20000527 PARAMETER Experiment Name: At_10percent_PEG_P Parameter: Timepoint (day) Value: 20
  misc_feature: MA Experiment 20000527 PARAMETER Experiment Name: At_10percent_PEG_P Parameter: Tissue Value: Whole Plant
  misc_feature: MA Experiment 20000527 PARAMETER Experiment Name: At_10percent_PEG_P Parameter: Treatment Value: 10percent PEG vs. No Treatment
  misc_feature: MA Experiment ID: 20000794 Result: Down-regulated in Transcription
  misc_feature: MA Experiment 20000794 PARAMETER Experiment Name: At_Petals_P Parameter: Age (day) Value: 23-25 days
  misc_feature: MA Experiment 20000794 PARAMETER Experiment Name: At_Petals_P Parameter: Plant Line Value: WS
  misc_feature: MA Experiment 20000794 PARAMETER Experiment Name: At_Petals_P Parameter: Tissue Value: Petals vs. Whole plant
  misc_feature: MA Experiment ID: 20001450 Result: Down-regulated in Transcription
  misc_feature: MA Experiment 20001450 PARAMETER Experiment Name: At_Far-red-induction_P Parameter: Age (day) Value: 7
  misc_feature: MA Experiment 20001450 PARAMETER Experiment Name: At_Far-red-induction_P Parameter: Light Value: Far-red vs. White
  misc_feature: MA Experiment 20001450 PARAMETER Experiment Name: At_Far-red-induction_P Parameter: Organism Value: A. thaliana
  misc_feature: MA Experiment 20001450 PARAMETER Experiment Name: At_Far-red-induction_P Parameter: Plant Line Value: Columbia
  misc_feature: MA Experiment 20001450 PARAMETER Experiment Name: At_Far-red-induction_P Parameter: Timepoint (hr) Value: 8
  misc_feature: MA Experiment 20001450 PARAMETER Experiment Name: At_Far-red-induction_P Parameter: Tissue Value: Whole Plant
  misc_feature: MA Experiment ID: 20001451 Result: Down-regulated in Transcription
  misc_feature: MA Experiment 20001451 PARAMETER Experiment Name: At_Far-red-induction_P Parameter: Age (day) Value: 7
  misc_feature: MA Experiment 20001451 PARAMETER Experiment Name: At_Far-red-induction_P Parameter: Light Value: Far-red vs. White
  misc_feature: MA Experiment 20001451 PARAMETER Experiment Name: At_Far-red-induction_P Parameter: Organism Value: A. thaliana
  misc_feature: MA Experiment 20001451 PARAMETER Experiment Name: At_Far-red-induction_P Parameter: Plant Line Value: Columbia
  misc_feature: MA Experiment 20001451 PARAMETER Experiment Name: At_Far-red-induction_P Parameter: Timepoint (hr) Value: 24
  misc_feature: MA Experiment 20001451 PARAMETER Experiment Name: At_Far-red-induction_P Parameter: Tissue Value: Whole Plant
  misc_feature: MA Experiment ID: 20001554 Result: Down-regulated in Transcription
  misc_feature: MA Experiment 20001554 PARAMETER Experiment Name: At_Drought_Soil_Dry_P Parameter: Age (day) Value: 21
  misc_feature: MA Experiment 20001554 PARAMETER Experiment Name: At_Drought_Soil_Dry_P Parameter: Organism Value: A. thaliana
  misc_feature: MA Experiment 20001554 PARAMETER Experiment Name: At_Drought_Soil_Dry_P Parameter: Plant Line Value: WS
  misc_feature: MA Experiment 20001554 PARAMETER Experiment Name: At_Drought_Soil_Dry_P Parameter: Post Timepoint (hr) Value: None
  misc_feature: MA Experiment 20001554 PARAMETER Experiment Name: At_Drought_Soil_Dry_P Parameter: Post-Treatment Value: None
  misc_feature: MA Experiment 20001554 PARAMETER Experiment Name: At_Drought_Soil_Dry_P Parameter: Timepoint (day) Value: 7
  misc_feature: MA Experiment 20001554 PARAMETER Experiment Name: At_Drought_Soil_Dry_P Parameter: Treatment Value: Drought vs. No Drought
  misc_feature: MA Experiment ID: 20001555 Result: Down-regulated in Transcription
  misc_feature: MA Experiment 20001555 PARAMETER Experiment Name: At_Drought_Soil_Dry_P Parameter: Age (day) Value: 24
  misc_feature: MA Experiment 20001555 PARAMETER Experiment Name: At_Drought_Soil_Dry_P Parameter: Organism Value: A. thaliana
  misc_feature: MA Experiment 20001555 PARAMETER Experiment Name: At_Drought_Soil_Dry_P Parameter: Plant Line Value: WS
  misc_feature: MA Experiment 20001555 PARAMETER Experiment Name: At_Drought_Soil_Dry_P Parameter: Post Timepoint (hr) Value: None
  misc_feature: MA Experiment 20001555 PARAMETER Experiment Name: At_Drought_Soil_Dry_P Parameter: Post-Treatment Value: None
  misc_feature: MA Experiment 20001555 PARAMETER Experiment Name: At_Drought_Soil_Dry_P Parameter: Timepoint (day) Value: 10
  misc_feature: MA Experiment 20001555 PARAMETER Experiment Name: At_Drought_Soil_Dry_P Parameter: Treatment Value: Drought vs. No Drought
  misc_feature: MA Experiment ID: 20001556 Result: Down-regulated in Transcription
  misc_feature: MA Experiment 20001556 PARAMETER Experiment Name: At_Drought_Soil_Dry_P Parameter: Age (day) Value: 26
  misc_feature: MA Experiment 20001556 PARAMETER Experiment Name: At_Drought_Soil_Dry_P Parameter: Organism Value: A. thaliana
  misc_feature: MA Experiment 20001556 PARAMETER Experiment Name: At_Drought_Soil_Dry_P Parameter: Plant Line Value: WS
  misc_feature: MA Experiment 20001556 PARAMETER Experiment Name: At_Drought_Soil_Dry_P Parameter: Post Timepoint (hr) Value: None
  misc_feature: MA Experiment 20001556 PARAMETER Experiment Name: At_Drought_Soil_Dry_P Parameter: Post-Treatment Value: None
  misc_feature: MA Experiment 20001556 PARAMETER Experiment Name: At_Drought_Soil_Dry_P Parameter: Timepoint (day) Value: 12
  misc_feature: MA Experiment 20001556 PARAMETER Experiment Name: At_Drought_Soil_Dry_P Parameter: Treatment Value: Drought vs. No Drought
  misc_feature: MA Experiment ID: 20001557 Result: Down-regulated in Transcription
  misc_feature: MA Experiment 20001557 PARAMETER Experiment Name: At_Drought_Soil_Dry_P Parameter: Age (day) Value: 27
  misc_feature: MA Experiment 20001557 PARAMETER Experiment Name: At_Drought_Soil_Dry_P Parameter: Organism Value: A. thaliana
  misc_feature: MA Experiment 20001557 PARAMETER Experiment Name: At_Drought_Soil_Dry_P Parameter: Plant Line Value: WS
  misc_feature: MA Experiment 20001557 PARAMETER Experiment Name: At_Drought_Soil_Dry_P Parameter: Post Timepoint (hr) Value: 3
  misc_feature: MA Experiment 20001557 PARAMETER Experiment Name: At_Drought_Soil_Dry_P Parameter: Post-Treatment Value: Re-Water vs. No Drought
  misc_feature: MA Experiment 20001557 PARAMETER Experiment Name: At_Drought_Soil_Dry_P Parameter: Timepoint (day) Value: 13
  misc_feature: MA Experiment 20001557 PARAMETER Experiment Name: At_Drought_Soil_Dry_P Parameter: Treatment Value: Drought vs. No Drought
  misc_feature: MA Experiment ID: 20001559 Result: Down-regulated in Transcription
  misc_feature: MA Experiment 20001559 PARAMETER Experiment Name: At_Drought_Soil_Dry_P Parameter: Age (day) Value: 28
  misc_feature: MA Experiment 20001559 PARAMETER Experiment Name: At_Drought_Soil_Dry_P Parameter: Organism Value: A. thaliana
  misc_feature: MA Experiment 20001559 PARAMETER Experiment Name: At_Drought_Soil_Dry_P Parameter: Plant Line Value: WS
  misc_feature: MA Experiment 20001559 PARAMETER Experiment Name: At_Drought_Soil_Dry_P Parameter: Post Timepoint (hr) Value: 29
  misc_feature: MA Experiment 20001559 PARAMETER Experiment Name: At_Drought_Soil_Dry_P Parameter: Post-Treatment Value: Re-Water vs. No Drought
  misc_feature: MA Experiment 20001559 PARAMETER Experiment Name: At_Drought_Soil_Dry_P Parameter: Timepoint (day) Value: 14
  misc_feature: MA Experiment 20001559 PARAMETER Experiment Name: At_Drought_Soil_Dry_P Parameter: Treatment Value: Drought vs. No Drought
  misc_feature: MA Experiment ID: 20001560 Result: Down-regulated in Transcription
  misc_feature: MA Experiment 20001560 PARAMETER Experiment Name: At_Drought_Soil_Dry_P Parameter: Age (day) Value: 28
  misc_feature: MA Experiment 20001560 PARAMETER Experiment Name: At_Drought_Soil_Dry_P Parameter: Organism Value: A. thaliana
  misc_feature: MA Experiment 20001560 PARAMETER Experiment Name: At_Drought_Soil_Dry_P Parameter: Plant Line Value: WS
  misc_feature: MA Experiment 20001560 PARAMETER Experiment Name: At_Drought_Soil_Dry_P Parameter: Post Timepoint (hr) Value: None
  misc_feature: MA Experiment 20001560 PARAMETER Experiment Name: At_Drought_Soil_Dry_P Parameter: Post-Treatment Value: None
  misc_feature: MA Experiment 20001560 PARAMETER Experiment Name: At_Drought_Soil_Dry_P Parameter: Timepoint (day) Value: 14
  misc_feature: MA Experiment 20001560 PARAMETER Experiment Name: At_Drought_Soil_Dry_P Parameter: Treatment Value: Drought vs. No Drought
  misc_feature: MA Experiment ID: 20001757 Result: Up-regulated in Transcription
  misc_feature: MA Experiment 20001757 PARAMETER Experiment Name: At_50mM_NH4NO3_L-to-H_P Parameter: Timepoint (hr) Value: 6
  misc_feature: MA Experiment 20001757 PARAMETER Experiment Name: At_50mM_NH4NO3_L-to-H_P Parameter: Tissue Value: Leaf
  misc_feature: MA Experiment 20001757 PARAMETER Experiment Name: At_50mM_NH4NO3_L-to-H_P Parameter: Treatment Value: 50mM NH4NO3 vs 100mM Mannitol
  misc_feature: MA Experiment ID: 20001904 Result: Down-regulated in Transcription
  misc_feature: MA Experiment 20001904 PARAMETER Experiment Name: At_Drought_Reproduction_P Parameter: Age (day) Value: 37
  misc_feature: MA Experiment 20001904 PARAMETER Experiment Name: At_Drought_Reproduction_P Parameter: Organism Value: A. thaliana
  misc_feature: MA Experiment 20001904 PARAMETER Experiment Name: At_Drought_Reproduction_P Parameter: Plant Line Value: WS
  misc_feature: MA Experiment 20001904 PARAMETER Experiment Name: At_Drought_Reproduction_P Parameter: Timepoint (day) Value: 7
  misc_feature: MA Experiment 20001904 PARAMETER Experiment Name: At_Drought_Reproduction_P Parameter: Tissue Value: Rosettes
  misc_feature: MA Experiment 20001904 PARAMETER Experiment Name: At_Drought_Reproduction_P Parameter: Treatment Value: Drought vs. No Drought
  misc_feature: MA Experiment ID: 20001905 Result: Down-regulated in Transcription
  misc_feature: MA Experiment 20001905 PARAMETER Experiment Name: At_Drought_Reproduction_P Parameter: Age (day) Value: 40
  misc_feature: MA Experiment 20001905 PARAMETER Experiment Name: At_Drought_Reproduction_P Parameter: Organism Value: A. thaliana
  misc_feature: MA Experiment 20001905 PARAMETER Experiment Name: At_Drought_Reproduction_P Parameter: Plant Line Value: WS
  misc_feature: MA Experiment 20001905 PARAMETER Experiment Name: At_Drought_Reproduction_P Parameter: Timepoint (day) Value: 10
  misc_feature: MA Experiment 20001905 PARAMETER Experiment Name: At_Drought_Reproduction_P Parameter: Tissue Value: Rosettes
  misc_feature: MA Experiment 20001905 PARAMETER Experiment Name: At_Drought_Reproduction_P Parameter: Treatment Value: Drought vs. No Drought
  misc_feature: MA Experiment ID: 20001907 Result: Down-regulated in Transcription
  misc_feature: MA Experiment 20001907 PARAMETER Experiment Name: At_Drought_Reproduction_P Parameter: Age (day) Value: 37
  misc_feature: MA Experiment 20001907 PARAMETER Experiment Name: At_Drought_Reproduction_P Parameter: Organism Value: A. thaliana
  misc_feature: MA Experiment 20001907 PARAMETER Experiment Name: At_Drought_Reproduction_P Parameter: Plant Line Value: WS
  misc_feature: MA Experiment 20001907 PARAMETER Experiment Name: At_Drought_Reproduction_P Parameter: Timepoint (day) Value: 7
  misc_feature: MA Experiment 20001907 PARAMETER Experiment Name: At_Drought_Reproduction_P Parameter: Tissue Value: Siliques
  misc_feature: MA Experiment 20001907 PARAMETER Experiment Name: At_Drought_Reproduction_P Parameter: Treatment Value: Drought vs. No Drought
  misc_feature: MA Experiment ID: 20001909 Result: Down-regulated in Transcription
  misc_feature: MA Experiment 20001909 PARAMETER Experiment Name: At_Drought_Reproduction_P Parameter: Age (day) Value: 35
  misc_feature: MA Experiment 20001909 PARAMETER Experiment Name: At_Drought_Reproduction_P Parameter: Organism Value: A. thaliana
  misc_feature: MA Experiment 20001909 PARAMETER Experiment Name: At_Drought_Reproduction_P Parameter: Plant Line Value: WS
  misc_feature: MA Experiment 20001909 PARAMETER Experiment Name: At_Drought_Reproduction_P Parameter: Timepoint (day) Value: 5
  misc_feature: MA Experiment 20001909 PARAMETER Experiment Name: At_Drought_Reproduction_P Parameter: Tissue Value: Flowers
  misc_feature: MA Experiment 20001909 PARAMETER Experiment Name: At_Drought_Reproduction_P Parameter: Treatment Value: Drought vs. No Drought
  misc_feature: MA Experiment ID: 20001910 Result: Down-regulated in Transcription
  misc_feature: MA Experiment 20001910 PARAMETER Experiment Name: At_Drought_Reproduction_P Parameter: Age (day) Value: 37
  misc_feature: MA Experiment 20001910 PARAMETER Experiment Name: At_Drought_Reproduction_P Parameter: Organism Value: A. thaliana
  misc_feature: MA Experiment 20001910 PARAMETER Experiment Name: At_Drought_Reproduction_P Parameter: Plant Line Value: WS
  misc_feature: MA Experiment 20001910 PARAMETER Experiment Name: At_Drought_Reproduction_P Parameter: Timepoint (day) Value: 7
  misc_feature: MA Experiment 20001910 PARAMETER Experiment Name: At_Drought_Reproduction_P Parameter: Tissue Value: Flowers
  misc_feature: MA Experiment 20001910 PARAMETER Experiment Name: At_Drought_Reproduction_P Parameter: Treatment Value: Drought vs. No Drought
  misc_feature: MA Experiment ID: 20001911 Result: Down-regulated in Transcription
  misc_feature: MA Experiment 20001911 PARAMETER Experiment Name: At_Drought_Reproduction_P Parameter: Age (day) Value: 40
  misc_feature: MA Experiment 20001911 PARAMETER Experiment Name: At_Drought_Reproduction_P Parameter: Organism Value: A. thaliana
  misc_feature: MA Experiment 20001911 PARAMETER Experiment Name: At_Drought_Reproduction_P Parameter: Plant Line Value: WS
  misc_feature: MA Experiment 20001911 PARAMETER Experiment Name: At_Drought_Reproduction_P Parameter: Timepoint (day) Value: 10
  misc_feature: MA Experiment 20001911 PARAMETER Experiment Name: At_Drought_Reproduction_P Parameter: Tissue Value: Flowers
  misc_feature: MA Experiment 20001911 PARAMETER Experiment Name: At_Drought_Reproduction_P Parameter: Treatment Value: Drought vs. No Drought
atggcttcaattctctcaattcttcttctcattctttcactttcaaatctccacttcacttcaaccaccggaaacaaccacattaacgacagaaaatccttagaaatcattatcggtggtggtaacgacaacaatcctccaccgtcaccttcaccggaaccagaaccagaacctgcagattgccctcctccccctcctcctcctccatttctccaaagatttaaggatctagtcgcagatgataaacttaagtcttgggaaggccccgacatttgcaacaaatacctcggactcaaatgcgccattttcccgaaaacaaagcatctcgcactcgcgagcgtccagtttaatgggttaaacttgagaggcaagataggcaagatcctcaagttagataacttcctcgacaagttagaagaagtcaccatcttccacgcaaactccaacggtttcacaggctctgtgcctgatttcagcaatttgaaattcttatacgagctcgatctaagcaacaacaaactcacaggagatttcccaactagtgtcttgaaaggaaacaatctcacgtttcttgatctcaggttcaattctttctcaggctctgttcctcctcaggtctttaatctcgacctcgacgtcttgttcatcaacaacaacaatcttgttcagaagcttccactcaatcttggatccatcactgctctttacctcaccttcgccaacaacaggttcacgggtccaattcccgaaagcataggcaacatcaagtacctacaagaagtccttttcctgaataacaagttaaccggatgcttaccgtaccaaatcggaaacctaacccgagccactgttttcgatgttgggttcaaccaattaaccggtccaataccgtactctttcggttgcttagaaacgatggaacaactcaatttagccggaaacaagttctatggaaccataccggagattgtatgcgagattgcttgtctccaaaacgtttctctctcgaataattacttcactcaggttggtccgaaatgtagaaaactcatcaagagaaaaattatggacgttagtatgaattgtatacttgatcttccaaaccagaaaacgccatcggagtgtgctaagttcttcatgcggaaacagacttgtcctaattccaagtctttgtttactgtcccttgtgataagaatccaaaccggggtaaaccggatcaagaacgattggaggaggaaaaagctcaagtttctcatccggtaacttacaacacacttaacccggaccggcttcggaatctataa

SEQ ID NO: 86951 - protein, 434 aa, Arabidopsis thaliana
  peptide (1)..(434): Ceres Seq. ID no. 12695670
  misc_feature (46)..(434): Homolog of NCBI NO: 15222811 NR Description: unknown protein; protein id: At1g49750.1
  misc_feature (1)..(69): Homolog of NCBI NO: 15222811 NR Description: unknown protein; protein id: At1g49750.1
  misc_feature (46)..(69): Homolog of NCBI NO: 15222811 NR Description: unknown protein; protein id: At1g49750.1
  misc_feature (47)..(69): Homolog of NCBI NO: 15222811 NR Description: unknown protein; protein id: At1g49750.1
  misc_feature (45)..(69): Homolog of NCBI NO: 15222811 NR Description: unknown protein; protein id: At1g49750.1
  misc_feature (46)..(434): Homolog of NCBI NO: 15230349 NR Description: unknown protein; protein id: At3g19320.1 thaliana] >gi|11994454|dbj|BAB02456.1| contains similarity to
  misc_feature (8)..(71): Homolog of NCBI NO: 15230349 NR Description: unknown protein; protein id: At3g19320.1 thaliana] >gi|11994454|dbj|BAB02456.1| contains similarity to
  misc_feature (69)..(387): Homolog of NCBI NO: 30680322 NR Description: extensin-related protein [Arabidopsis thaliana]
  misc_feature (71)..(428): Homolog of NCBI NO: 32490271 NR Description: OSJNBb0116K07.13 [Oryza sativa (japonica
  misc_feature (52)..(397): Homolog of NCBI NO: 32488397 NR Description: OSJNBa0043A12.27 [Oryza sativa (japonica
MASILSILLLILSLSNLHFTSTTGNNHINDRKSLEIIIGGGNDNNPPPSPSPEPEPEPADCPPPPPPPPFLQRFKDLVADDKLKSWEGPDICNKYLGLKCAIFPKTKHLALASVQFNGLNLRGKIGKILKLDNFLDKLEEVTIFHANSNGFTGSVPDFSNLKFLYELDLSNNKLTGDFPTSVLKGNNLTFLDLRFNSFSGSVPPQVFNLDLDVLFINNNNLVQKLPLNLGSITALYLTFANNRFTGPIPESIGNIKYLQEVLFLNNKLTGCLPYQIGNLTRATVFDVGFNQLTGPIPYSFGCLETMEQLNLAGNKFYGTIPEIVCEIACLQNVSLSNNYFTQVGPKCRKLIKRKIMDVSMNCILDLPNQKTPSECAKFFMRKQTCPNSKSLFTVPCDKNPNRGKPDQERLEEEKAQVSHPVTYNTLNPDRLRNL

SEQ ID NO: 86952 - DNA, 889 bp, Arabidopsis thaliana
  misc_feature (1)..(889): Ceres Seq. ID no. 12695794
  misc_feature: MA Experiment ID: 108434 Result: Up-regulated in Transcription
  misc_feature: MA Experiment 108434 PARAMETER Experiment Name: At_Root_Tips_cDNA_P Parameter: Tissue Value: Root Tips
  misc_feature: MA Experiment ID: 108435 Result: Up-regulated in Transcription
  misc_feature: MA Experiment 108435 PARAMETER Experiment Name: At_stm_Mutants_cDNA_P Parameter: Plant Line Value: wt Landsburg vs stm
  misc_feature: MA Experiment 108435 PARAMETER Experiment Name: At_stm_Mutants_cDNA_P Parameter: Tissue Value: Shoot Apical Meristem Region
  misc_feature: MA Experiment ID: 108461 Result: Up-regulated in Transcription
  misc_feature: MA Experiment 108461 PARAMETER Experiment Name: At_Germinating_Seeds_cDNA_P Parameter: Age (day) Value: 1 vs. 0
  misc_feature: MA Experiment 108461 PARAMETER Experiment Name: At_Germinating_Seeds_cDNA_P Parameter: Tissue Value: Germinating Seeds
  misc_feature: MA Experiment ID: 20000144 Result: Down-regulated in Transcription
  misc_feature: MA Experiment 20000144 PARAMETER Experiment Name: At_42deg_Heat_cDNA_P Parameter: Temperature (deg C) Value: 42 vs. 22
  misc_feature: MA Experiment 20000144 PARAMETER Experiment Name: At_42deg_Heat_cDNA_P Parameter: Timepoint (hr) Value: 1
  misc_feature: MA Experiment 20000144 PARAMETER Experiment Name: At_42deg_Heat_cDNA_P Parameter: Tissue Value: Aerial
  misc_feature: MA Experiment ID: 20000171 Result: Down-regulated in Transcription
  misc_feature: MA Experiment 20000171 PARAMETER Experiment Name: At_42deg_Heat_P Parameter: Age (day) Value: 14
  misc_feature: MA Experiment 20000171 PARAMETER Experiment Name: At_42deg_Heat_P Parameter: Organism Value: A. thaliana
  misc_feature: MA Experiment 20000171 PARAMETER Experiment Name: At_42deg_Heat_P Parameter: Plant Line Value: WS
  misc_feature: MA Experiment 20000171 PARAMETER Experiment Name: At_42deg_Heat_P Parameter: Temperature (deg C) Value: 42 vs. 22
  misc_feature: MA Experiment 20000171 PARAMETER Experiment Name: At_42deg_Heat_P Parameter: Timepoint (hr) Value: 1
  misc_feature: MA Experiment 20000171 PARAMETER Experiment Name: At_42deg_Heat_P Parameter: Tissue Value: Aerial
  misc_feature: MA Experiment ID: 20000173 Result: Down-regulated in Transcription
  misc_feature: MA Experiment 20000173 PARAMETER Experiment Name: At_42deg_Heat_P Parameter: Age (day) Value: 14
  misc_feature: MA Experiment 20000173 PARAMETER Experiment Name: At_42deg_Heat_P Parameter: Organism Value: A. thaliana
  misc_feature: MA Experiment 20000173 PARAMETER Experiment Name: At_42deg_Heat_P Parameter: Plant Line Value: WS
  misc_feature: MA Experiment 20000173 PARAMETER Experiment Name: At_42deg_Heat_P Parameter: Temperature (deg C) Value: 42 vs. 22
  misc_feature: MA Experiment 20000173 PARAMETER Experiment Name: At_42deg_Heat_P Parameter: Timepoint (hr) Value: 6
  misc_feature: MA Experiment 20000173 PARAMETER Experiment Name: At_42deg_Heat_P Parameter: Tissue Value: Aerial
  misc_feature: MA Experiment ID: 20000234 Result: Up-regulated in Transcription
  misc_feature: MA Experiment 20000234 PARAMETER Experiment Name: At_Siliques_P Parameter: Age (day) Value: 21
  misc_feature: MA Experiment 20000234 PARAMETER Experiment Name: At_Siliques_P Parameter: Organism Value: A. thaliana
  misc_feature: MA Experiment 20000234 PARAMETER Experiment Name: At_Siliques_P Parameter: Plant Line Value: WS
  misc_feature: MA Experiment 20000234 PARAMETER Experiment Name: At_Siliques_P Parameter: Tissue Value: Less Than 5mm Siliques vs. Whole Plant
  misc_feature: MA Experiment ID: 20000264 Result: Up-regulated in Transcription
  misc_feature: MA Experiment 20000264 PARAMETER Experiment Name: At_Open_Flower_P Parameter: Age (day) Value: 21
  misc_feature: MA Experiment 20000264 PARAMETER Experiment Name: At_Open_Flower_P Parameter: Plant Line Value: WS
  misc_feature: MA Experiment 20000264 PARAMETER Experiment Name: At_Open_Flower_P Parameter: Tissue Value: Open Flower vs. Whole Plant
  misc_feature: MA Experiment ID: 20000265 Result: Up-regulated in Transcription
  misc_feature: MA Experiment 20000265 PARAMETER Experiment Name: At_Open_Flower_P Parameter: Age (day) Value: 21
  misc_feature: MA Experiment 20000265 PARAMETER Experiment Name: At_Open_Flower_P Parameter: Plant Line Value: WS
  misc_feature: MA Experiment 20000265 PARAMETER Experiment Name: At_Open_Flower_P Parameter: Tissue Value: Closed Flower vs. Whole Plant
  misc_feature: MA Experiment ID: 20000437 Result: Down-regulated in Transcription
  misc_feature: MA Experiment 20000437 PARAMETER Experiment Name: At_Drought_P Parameter: Age (day) Value: 8
  misc_feature: MA Experiment 20000437 PARAMETER Experiment Name: At_Drought_P Parameter: Organism Value: A. thaliana
  misc_feature: MA Experiment 20000437 PARAMETER Experiment Name: At_Drought_P Parameter: Plant Line Value: WS
  misc_feature: MA Experiment 20000437 PARAMETER Experiment Name: At_Drought_P Parameter: Timepoint (hr) Value: 24
  misc_feature: MA Experiment 20000437 PARAMETER Experiment Name: At_Drought_P Parameter: Tissue Value: Whole Plant
  misc_feature: MA Experiment 20000437 PARAMETER Experiment Name: At_Drought_P Parameter: Treatment Value: Drought vs. No Drought
  misc_feature: MA Experiment ID: 20000495 Result: Up-regulated in Transcription
  misc_feature: MA Experiment 20000495 PARAMETER Experiment Name: At_Guard_Cells_P Parameter: Harvest Date Value: 8/2/2002
  misc_feature: MA Experiment 20000495 PARAMETER Experiment Name: At_Guard_Cells_P Parameter: Organism Value: A. thaliana
  misc_feature: MA Experiment 20000495 PARAMETER Experiment Name: At_Guard_Cells_P Parameter: Tissue Value: Guard Cells vs. Leaves
  misc_feature: MA Experiment ID: 20001450 Result: Down-regulated in Transcription
  misc_feature: MA Experiment 20001450 PARAMETER Experiment Name: At_Far-red-induction_P Parameter: Age (day) Value: 7
  misc_feature: MA Experiment 20001450 PARAMETER Experiment Name: At_Far-red-induction_P Parameter: Light Value: Far-red vs. White
  misc_feature: MA Experiment 20001450 PARAMETER Experiment Name: At_Far-red-induction_P Parameter: Organism Value: A. thaliana
  misc_feature: MA Experiment 20001450 PARAMETER Experiment Name: At_Far-red-induction_P Parameter: Plant Line Value: Columbia
  misc_feature: MA Experiment 20001450 PARAMETER Experiment Name: At_Far-red-induction_P Parameter: Timepoint (hr) Value: 8
  misc_feature: MA Experiment 20001450 PARAMETER Experiment Name: At_Far-red-induction_P Parameter: Tissue Value: Whole Plant
  misc_feature: MA Experiment ID: 20001451 Result: Down-regulated in Transcription
  misc_feature: MA Experiment 20001451 PARAMETER Experiment Name: At_Far-red-induction_P Parameter: Age (day) Value: 7
  misc_feature: MA Experiment 20001451 PARAMETER Experiment Name: At_Far-red-induction_P Parameter: Light Value: Far-red vs. White
  misc_feature: MA Experiment 20001451 PARAMETER Experiment Name: At_Far-red-induction_P Parameter: Organism Value: A. thaliana
  misc_feature: MA Experiment 20001451 PARAMETER Experiment Name: At_Far-red-induction_P Parameter: Plant Line Value: Columbia
  misc_feature: MA Experiment 20001451 PARAMETER Experiment Name: At_Far-red-induction_P Parameter: Timepoint (hr) Value: 24
  misc_feature: MA Experiment 20001451 PARAMETER Experiment Name: At_Far-red-induction_P Parameter: Tissue Value: Whole Plant
  misc_feature: MA Experiment ID: 20001560 Result: Up-regulated in Transcription
  misc_feature: MA Experiment 20001560 PARAMETER Experiment Name: At_Drought_Soil_Dry_P Parameter: Age (day) Value: 28
  misc_feature: MA Experiment 20001560 PARAMETER Experiment Name: At_Drought_Soil_Dry_P Parameter: Organism Value: A. thaliana
  misc_feature: MA Experiment 20001560 PARAMETER Experiment Name: At_Drought_Soil_Dry_P Parameter: Plant Line Value: WS
  misc_feature: MA Experiment 20001560 PARAMETER Experiment Name: At_Drought_Soil_Dry_P Parameter: Post Timepoint (hr) Value: None
  misc_feature: MA Experiment 20001560 PARAMETER Experiment Name: At_Drought_Soil_Dry_P Parameter: Post-Treatment Value: None
  misc_feature: MA Experiment 20001560 PARAMETER Experiment Name: At_Drought_Soil_Dry_P Parameter: Timepoint (day) Value: 14
  misc_feature: MA Experiment 20001560 PARAMETER Experiment Name: At_Drought_Soil_Dry_P Parameter: Treatment Value: Drought vs. No Drought
  misc_feature: MA Experiment ID: 20001911 Result: Down-regulated in Transcription
  misc_feature: MA Experiment 20001911 PARAMETER Experiment Name: At_Drought_Reproduction_P Parameter: Age (day) Value: 40
  misc_feature: MA Experiment 20001911 PARAMETER Experiment Name: At_Drought_Reproduction_P Parameter: Organism Value: A. thaliana
  misc_feature: MA Experiment 20001911 PARAMETER Experiment Name: At_Drought_Reproduction_P Parameter: Plant Line Value: WS
  misc_feature: MA Experiment 20001911 PARAMETER Experiment Name: At_Drought_Reproduction_P Parameter: Timepoint (day) Value: 10
  misc_feature: MA Experiment 20001911 PARAMETER Experiment Name: At_Drought_Reproduction_P Parameter: Tissue Value: Flowers
  misc_feature: MA Experiment 20001911 PARAMETER Experiment Name: At_Drought_Reproduction_P Parameter: Treatment Value: Drought vs. No Drought
gatctctctgtctctcgcatcggaagtacgaagaaggatctttgttttcttcctcttctccttcttctactttcgaacactcgtgaatctgattctactctagtctaattgggtgctttcgatttctgaataaaaattcgattttggtctgacgattaagaaagcgaaagtgatggccgccgtaaatggatatcagggaaatactccggcagatcctccggcgtctaatggatcaaaacaacctgcggctccgaccaagactgttgacagccaatctgttctcaaaagactgcaatctgaattgatgggcttgatgatgggcggtggtccaggaatatcggctttccctgaggaagacaacatattctgctggaaagggacaataacaggaagcaaagatactgtgtttgaaggaactgagtacagactctcactctctttctccaatgactatcctttcaagcctccaaaggttaagtttgagacatgttgcttccaccccaatgttgatgtctatggcaatatctgcttagacattcttcaggataagtggtcatctgcttacgatgtgaggacgatactactatcgattcagagcctcctgggagaaccgaacatcagttcaccattgaacactcaagcagctcagctttggagtaaccaagaagagtacaggaagatggttgagaagctttacaagcctccaagtgcatgatttctgcaagctgttctgattcataaatctccaatgcctctgatgatttcacataaaacgatttttcagaagaaaacactgtcattcatttgctttattctttgtttttgaacatcagaagttctatctgtaacgttaccttgagttcaaataatgagtagtatttcagagatt

SEQ ID NO: 86953 - protein, 180 aa, Arabidopsis thaliana; identical to SEQ ID NO: 76733
  peptide (1)..(180): Ceres Seq. ID no. 12695795
  misc_feature (1)..(180): Homolog of NCBI NO: 18403097 NR Description: E2, ubiquitin-conjugating enzyme, putative;
  misc_feature (1)..(180): Homolog of NCBI NO: 21618179 NR Description: E2, ubiquitin-conjugating enzyme, putative
  misc_feature (1)..(180): Homolog of NCBI NO: 25293673 NR Description: hypothetical protein F17J6.3 [imported] -
  misc_feature (36)..(180): Homolog of NCBI NO: 9454557 NR Description: Putative ubiquitin carrier protein [Arabidopsis
  misc_feature (1)..(180): Homolog of NCBI NO: 18402475 NR Description: E2, ubiquitin-conjugating enzyme, putative; id: At3g20060.1 [Arabidopsis thaliana]
  misc_feature (10)..(177): Homolog of NCBI NO: 34903234 NR Description: unnamed protein product [Oryza sativa (japonica group)] >gi|6815106|dbj|BAA90392.1| unnamed protein product
  misc_feature (16)..(176): Homolog of NCBI NO: 3915196 NR Description: Ubiquitin-conjugating enzyme E2-C
  misc_feature (28)..(176): Homolog of NCBI NO: 4388942 NR Description: E2-C, An Ubiquitin Conjugating Enzyme Required
  misc_feature (8)..(176): Homolog of NCBI NO: 31216813 NR Description: ENSANGP00000020629 [Anopheles gambiae]
  misc_feature (20)..(176): Homolog of NCBI NO: 24663332 NR Description: vihar CG10682-PA >gi|7294569|gb|AAF49909.1|

SEQ ID NO: 86954 - protein, 136 aa, Arabidopsis thaliana; identical to SEQ ID NO: 76734
  peptide (1)..(136): Ceres Seq. ID no. 12695796
  misc_feature (1)..(136): Homolog of NCBI NO: 18403097 NR Description: E2, ubiquitin-conjugating enzyme, putative;
  misc_feature (1)..(136): Homolog of NCBI NO: 21618179 NR Description: E2, ubiquitin-conjugating enzyme, putative
  misc_feature (1)..(136): Homolog of NCBI NO: 25293673 NR Description: hypothetical protein F17J6.3 [imported] -
  misc_feature (1)..(136): Homolog of NCBI NO: 9454557 NR Description: Putative ubiquitin carrier protein [Arabidopsis
  misc_feature (1)..(136): Homolog of NCBI NO: 18402475 NR Description: E2, ubiquitin-conjugating enzyme, putative; id: At3g20060.1 [Arabidopsis thaliana]
  misc_feature (1)..(133): Homolog of NCBI NO: 34903234 NR Description: unnamed protein product [Oryza sativa (japonica group)] >gi|6815106|dbj|BAA90392.1| unnamed protein product
  misc_feature (1)..(132): Homolog of NCBI NO: 3915196 NR Description: Ubiquitin-conjugating enzyme E2-C
  misc_feature (1)..(132): Homolog of NCBI NO: 4388942 NR Description: E2-C, An Ubiquitin Conjugating Enzyme Required
  misc_feature (1)..(132): Homolog of NCBI NO: 31216813 NR Description: ENSANGP00000020629 [Anopheles gambiae]
  misc_feature (1)..(132): Homolog of NCBI NO: 24663332 NR Description: vihar CG10682-PA >gi|7294569|gb|AAF49909.1|

SEQ ID NO: 86955 - protein, 133 aa, Arabidopsis thaliana; identical to SEQ ID NO: 76735
  peptide (1)..(133): Ceres Seq. ID no. 12695797
  misc_feature (1)..(133): Homolog of NCBI NO: 18403097 NR Description: E2, ubiquitin-conjugating enzyme, putative;
  misc_feature (1)..(133): Homolog of NCBI NO: 21618179 NR Description: E2, ubiquitin-conjugating enzyme, putative
  misc_feature (1)..(133): Homolog of NCBI NO: 25293673 NR Description: hypothetical protein F17J6.3 [imported] -
  misc_feature (1)..(133): Homolog of NCBI NO: 9454557 NR Description: Putative ubiquitin carrier protein [Arabidopsis
  misc_feature (1)..(133): Homolog of NCBI NO: 18402475 NR Description: E2, ubiquitin-conjugating enzyme, putative; id: At3g20060.1 [Arabidopsis thaliana]
  misc_feature (1)..(130): Homolog of NCBI NO: 34903234 NR Description: unnamed protein product [Oryza sativa (japonica group)] >gi|6815106|dbj|BAA90392.1| unnamed protein product
  misc_feature (1)..(129): Homolog of NCBI NO: 3915196 NR Description: Ubiquitin-conjugating enzyme E2-C
  misc_feature (1)..(129): Homolog of NCBI NO: 4388942 NR Description: E2-C, An Ubiquitin Conjugating Enzyme Required
  misc_feature (1)..(129): Homolog of NCBI NO: 31216813 NR Description: ENSANGP00000020629 [Anopheles gambiae]
  misc_feature (1)..(129): Homolog of NCBI NO: 24663332 NR Description: vihar CG10682-PA >gi|7294569|gb|AAF49909.1|

SEQ ID NO: 86956 - DNA, 2925 bp, Arabidopsis thaliana
  misc_feature (1)..(2925): Ceres Seq. ID no. 12695839
  misc_feature: MA Experiment ID: 20000327 Result: Down-regulated in Transcription
  misc_feature: MA Experiment 20000327 PARAMETER Experiment Name: At_42deg_Heat_Sub_P Parameter: Age (day) Value: 14
  misc_feature: MA Experiment 20000327 PARAMETER Experiment Name: At_42deg_Heat_Sub_P Parameter: Organism Value: A. thaliana
  misc_feature: MA Experiment 20000327 PARAMETER Experiment Name: At_42deg_Heat_Sub_P Parameter: Plant Line Value: WS
  misc_feature: MA Experiment 20000327 PARAMETER Experiment Name: At_42deg_Heat_Sub_P Parameter: Temperature (deg C) Value: 42 vs. 22
  misc_feature: MA Experiment 20000327 PARAMETER Experiment Name: At_42deg_Heat_Sub_P Parameter: Timepoint (hr) Value: 1
  misc_feature: MA Experiment 20000327 PARAMETER Experiment Name: At_42deg_Heat_Sub_P Parameter: Tissue Value: Aerial
  misc_feature: MA Experiment ID: 20000328 Result: Down-regulated in Transcription
  misc_feature: MA Experiment 20000328 PARAMETER Experiment Name: At_42deg_Heat_Sub_P Parameter: Age (day) Value: 14
  misc_feature: MA Experiment 20000328 PARAMETER Experiment Name: At_42deg_Heat_Sub_P Parameter: Organism Value: A. thaliana
  misc_feature: MA Experiment 20000328 PARAMETER Experiment Name: At_42deg_Heat_Sub_P Parameter: Plant Line Value: WS
  misc_feature: MA Experiment 20000328 PARAMETER Experiment Name: At_42deg_Heat_Sub_P Parameter: Temperature (deg C) Value: 42 vs. 22
  misc_feature: MA Experiment 20000328 PARAMETER Experiment Name: At_42deg_Heat_Sub_P Parameter: Timepoint (hr) Value: 6
  misc_feature: MA Experiment 20000328 PARAMETER Experiment Name: At_42deg_Heat_Sub_P Parameter: Tissue Value: Aerial
  misc_feature: MA Experiment ID: 20000634 Result: Down-regulated in Transcription
  misc_feature: MA Experiment 20000634 PARAMETER Experiment Name: At_10percent_PEG_Sub_P Parameter: Age (day) Value: 12
  misc_feature: MA Experiment 20000634 PARAMETER Experiment Name: At_10percent_PEG_Sub_P Parameter: Organism Value: A. thaliana
  misc_feature: MA Experiment 20000634 PARAMETER Experiment Name: At_10percent_PEG_Sub_P Parameter: Plant Line Value: WS
  misc_feature: MA Experiment 20000634 PARAMETER Experiment Name: At_10percent_PEG_Sub_P Parameter: Timepoint (day) Value: 12
  misc_feature: MA Experiment 20000634 PARAMETER Experiment Name: At_10percent_PEG_Sub_P Parameter: Tissue Value: Whole Plant
  misc_feature: MA Experiment 20000634 PARAMETER Experiment Name: At_10percent_PEG_Sub_P Parameter: Treatment Value: 10% PEG vs. No Treatment
atggaaggtggtcgtggtggtggagatggcaatttcttaccaaactctaactttggtgtattctctgactccgctatggatatggatttcatggatgaactcttgtttgatggatgttggcttgagacaactgatggtaagagcttgaagcagaccatgggacaacaagtatccgattctactaccatgaatgacaacaacaacaactcgtacctttacggttatcaatatgctgagaacctttcacaagatcatatctccaacgaagaaacagggagaaagtttcctccaataccaccgggctttctcaagatcgaggatctctccaatcaagtaccttttgaccagtctgcagttatgagttctgcacaagcagagaagtttctccttgaagaatctgagggaggaagaagatattggattgctccaagaacaagccaaggtccttcttcatcagtgaaagagagattagtacaagctatagagggtcttaacgaggaggtgcaagataaagacttcctcatacagatatggctaccaattcaacaagaaggcaagaactttctcacaacttcggagcagccacacttcttcaacccgaaatactcgagtcttaaaagatatagagatgtttcagtggcttataatttcctggctgatgaggattctaaagagtctgttggtctccccggtcgtgtttttcttaagaaactacctgagtggacacctgatgtgcggttctttagaagcgaagagtatccgcggatcaaagaagcagagcaatgtgatgttcgtggatcattagcccttcctgtgtttgaaagaggtagtggaacttgtttgggtgttgttgagattgttacaacaactcagaagatgaattacaggccagagcttgataatatctgtaaagctctcgagtctgttaatctaaggagttcaagaagcttgaatcccccaagcagagaggtgtgtaaaaatggtctcctaaatcaaacccttacttcatcaatacatagaaacaatgaattttggttgctaaatgtcatatgccctttttgtttcagtttctgcagagtatatgacctgcctctggctttaacgtgggcaccgtgtgctcggcaaggcaaagttggatcccgccattctgatgagaacttctctgagtgtgtttcaactgttgatgatgcttgcattgtccctgaccatcagagtcgtcattttctagaggcatgttctgaacaccatctgcttcaaggggaaggcattgtaggaaaagcattcaacgcaaccaaactgtttttcgtgcccgaagtaaccacttttagcaagaccaactaccctcttgcacaccatgctaagatctctggtctacatgctgctttagcagtcccattgaaaaacaaattcaatagttcggttgagtttgtgttggagtttttctttccaaaagcttgccttgacaccgaagcacaacaagatatgctcaagtctctgtctgcgacccttcagcaggatttcaggagcttaaatcttttcattgataaagagcttgagctagaagttgtatttcccgttagagaggaagttgtttttgcagagaacccacttatcaacgcaggaaccggagaggatatgaaaccattgcctttggaagaaatttctcaggaagattcttcatggatctcacacatgataaaggcaaatgagaaaggtaaaggcgtgtcactttcttgggagtaccaaaaagaagagccaaaagaagagtttatgcttacatctggatgggataacaatcagattggatcaggccacaataactttctttcagaagctgagcagtttcaaaaggtgacaaattcaggactcagaatcgacatggatccaagttttgaatcagcttcctttggtgttgggcagacattactaggcagtagaagaccaggtgagaagagaagaacaaaaacagaaaagacaattggtttagaagttcttcgacaatactttgcaggaagcctcaaagatgcagccaagagcattggtgtttgtccaactaccttgaaaagaatatgcagacaacacgggataacacgatggccttcccggaagatcaagaaagtggggcattcattaaagaaactccaacttgttatagactctgttcaaggtgttcaaggttctattcaacttgattcattctatacaagtttcccagaattaagctccccacatatgtctggtactggcacttccttcaagaatccaaatgctcaaacggagaacggtgtttcagcacagggaactgctgcagctccaaagtcaccaccatcatcttcttgtagccacagctctggttcaagcacctgttgttcaactggagctaatcaaagtaccaatactgggactacctcaaatactgtaaccactctgatggctgaaaatgctagcgcgatcttgaagagagctcgtagcgaagtgagacttcataccatgaatcaggatgaaacaaagtccctctctagaaccctgagccacaaaacattcagtgagcatcctcttttcgaaaatccacctcggttaccggagaatagtagcaggaagttgaaagctggaggggcctcaaaagtgaaagccacatttggtgaagccaaagtacggtttactttgcttcctacttggggcttcagagagttgcagcatgagattgctaggcgttttaacatagataatattgcaccctttgatcttaagtacctggatgatgacaaggaatgggttcttctgacatgtgaagcggatctcgaggaatgtatcgacatttatagatcatcacagagccgcacgatcaagataagtgttcatgaagcttctcaagtcaagctgggaggttcttttggtagcatcggtcttggtccctcgttataa

SEQ ID NO: 86957 - protein, 974 aa, Arabidopsis thaliana
  peptide (1)..(974): Ceres Seq. ID no. 12695840
  misc_feature (853)..(956): Pfam Name: PB1 domain Pfam Description: PB1 domain
  misc_feature (353)..(801): Homolog of NCBI NO: 25367427 NR Description: hypothetical protein At2g17150 [imported] -
  misc_feature (124)..(307): Homolog of NCBI NO: 25367427 NR Description: hypothetical protein At2g17150 [imported] -
  misc_feature (2)..(96): Homolog of NCBI NO: 25367427 NR Description: hypothetical protein At2g17150 [imported] -
  misc_feature (551)..(970): Homolog of NCBI NO: 25367427 NR Description: hypothetical protein At2g17150 [imported] -
  misc_feature (133)..(519): Homolog of NCBI NO: 33468530 NR Description: NIN-like protein 1 [Lotus corniculatus var.
  misc_feature (610)..(960): Homolog of NCBI NO: 33468530 NR Description: NIN-like protein 1 [Lotus corniculatus var.
  misc_feature (261)..(965): Homolog of NCBI NO: 6448579 NR Description: nodule inception protein [Lotus japonicus]
  misc_feature (136)..(295): Homolog of NCBI NO: 6448579 NR Description: nodule inception protein [Lotus japonicus]
  misc_feature (99)..(521): Homolog of NCBI NO: 15223014 NR Description: hypothetical protein; protein id: At1g76350.1
  misc_feature (520)..(788): Homolog of NCBI NO: 15223014 NR Description: hypothetical protein; protein id: At1g76350.1
MEGGRGGGDGNFLPNSNFGVFSDSAMDMDFMDELLFDGCWLETTDGKSLKQTMGQQVSDSTTMNDNNNNSYLYGYQYAENLSQDHISNEETGRKFPPIPPGFLKIEDLSNQVPFDQSAVMSSAQAEKFLLEESEGGRRYWIAPRTSQGPSSSVKERLVQAIEGLNEEVQDKDFLIQIWLPIQQEGKNFLTTSEQPHFFNPKYSSLKRYRDVSVAYNFLADEDSKESVGLPGRVFLKKLPEWTPDVRFFRSEEYPRIKEAEQCDVRGSLALPVFERGSGTCLGVVEIVTTTQKMNYRPELDNICKALESVNLRSSRSLNPPSREVCKNGLLNQTLTSSIHRNNEFWLLNVICPFCFSFCRVYDLPLALTWAPCARQGKVGSRHSDENFSECVSTVDDACIVPDHQSRHFLEACSEHHLLQGEGIVGKAFNATKLFFVPEVTTFSKTNYPLAHHAKISGLHAALAVPLKNKFNSSVEFVLEFFFPKACLDTEAQQDMLKSLSATLQQDFRSLNLFIDKELELEVVFPVREEVVFAENPLINAGTGEDMKPLPLEEISQEDSSWISHMIKANEKGKGVSLSWEYQKEEPKEEFMLTSGWDNNQIGSGHNNFLSEAEQFQKVTNSGLRIDMDPSFESASFGVGQTLLGSRRPGEKRRTKTEKTIGLEVLRQYFAGSLKDAAKSIGVCPTTLKRICRQHGITRWPSRKIKKVGHSLKKLQLVIDSVQGVQGSIQLDSFYTSFPELSSPHMSGTGTSFKNPNAQTENGVSAQGTAAAPKSPPSSSCSHSSGSSTCCSTGANQSTNTGTTSNTVTTLMAENASAILKRARSEVRLHTMNQDETKSLSRTLSHKTFSEHPLFENPPRLPENSSRKLKAGGASKVKATFGEAKVRFTLLPTWGFRELQHEIARRFNIDNIAPFDLKYLDDDKEWVLLTCEADLEECIDIYRSSQSRTIKISVHEASQVKLGGSFGSIGLGPSL

SEQ ID NO: 86958 - protein, 949 aa, Arabidopsis thaliana
  peptide (1)..(949): Ceres Seq. ID no. 12695841
  misc_feature (828)..(931): Pfam Name: PB1 domain Pfam Description: PB1 domain
  misc_feature (328)..(776): Homolog of NCBI NO: 25367427 NR Description: hypothetical protein At2g17150 [imported] -
  misc_feature (99)..(282): Homolog of NCBI NO: 25367427 NR Description: hypothetical protein At2g17150 [imported] -
  misc_feature (1)..(71): Homolog of NCBI NO: 25367427 NR Description: hypothetical protein At2g17150 [imported] -
  misc_feature (526)..(945): Homolog of NCBI NO: 25367427 NR Description: hypothetical protein At2g17150 [imported] -
  misc_feature (108)..(494): Homolog of NCBI NO: 33468530 NR Description: NIN-like protein 1 [Lotus corniculatus var.
  misc_feature (585)..(935): Homolog of NCBI NO: 33468530 NR Description: NIN-like protein 1 [Lotus corniculatus var.
  misc_feature (236)..(940): Homolog of NCBI NO: 6448579 NR Description: nodule inception protein [Lotus japonicus]
  misc_feature (111)..(270): Homolog of NCBI NO: 6448579 NR Description: nodule inception protein [Lotus japonicus]
  misc_feature (74)..(496): Homolog of NCBI NO: 15223014 NR Description: hypothetical protein; protein id: At1g76350.1
  misc_feature (495)..(763): Homolog of NCBI NO: 15223014 NR Description: hypothetical protein; protein id: At1g76350.1
MDMDFMDELLFDGCWLETTDGKSLKQTMGQQVSDSTTMNDNNNNSYLYGYQYAENLSQDHISNEETGRKFPPIPPGFLKIEDLSNQVPFDQSAVMSSAQAEKFLLEESEGGRRYWIAPRTSQGPSSSVKERLVQAIEGLNEEVQDKDFLIQIWLPIQQEGKNFLTTSEQPHFFNPKYSSLKRYRDVSVAYNFLADEDSKESVGLPGRVFLKKLPEWTPDVRFFRSEEYPRIKEAEQCDVRGSLALPVFERGSGTCLGVVEIVTTTQKMNYRPELDNICKALESVNLRSSRSLNPPSREVCKNGLLNQTLTSSIHRNNEFWLLNVICPFCFSFCRVYDLPLALTWAPCARQGKVGSRHSDENFSECVSTVDDACIVPDHQSRHFLEACSEHHLLQGEGIVGKAFNATKLFFVPEVTTFSKTNYPLAHHAKISGLHAALAVPLKNKFNSSVEFVLEFFFPKACLDTEAQQDMLKSLSATLQQDFRSLNLFIDKELELEVVFPVREEVVFAENPLINAGTGEDMKPLPLEEISQEDSSWISHMIKANEKGKGVSLSWEYQKEEPKEEFMLTSGWDNNQIGSGHNNFLSEAEQFQKVTNSGLRIDMDPSFESASFGVGQTLLGSRRPGEKRRTKTEKTIGLEVLRQYFAGSLKDAAKSIGVCPTTLKRICRQHGITRWPSRKIKKVGHSLKKLQLVIDSVQGVQGSIQLDSFYTSFPELSSPHMSGTGTSFKNPNAQTENGVSAQGTAAAPKSPPSSSCSHSSGSSTCCSTGANQSTNTGTTSNTVTTLMAENASAILKRARSEVRLHTMNQDETKSLSRTLSHKTFSEHPLFENPPRLPENSSRKLKAGGASKVKATFGEAKVRFTLLPTWGFRELQHEIARRFNIDNIAPFDLKYLDDDKEWVLLTCEADLEECIDIYRSSQSRTIKISVHEASQVKLGGSFGSIGLGPSL

SEQ ID NO: 86959 - protein, 947 aa, Arabidopsis thaliana
  peptide (1)..(947): Ceres Seq. ID no. 12695842
  misc_feature (826)..(929): Pfam Name: PB1 domain Pfam Description: PB1 domain
  misc_feature (326)..(774): Homolog of NCBI NO: 25367427 NR Description: hypothetical protein At2g17150 [imported] -
  misc_feature (97)..(280): Homolog of NCBI NO: 25367427 NR Description: hypothetical protein At2g17150 [imported] -
  misc_feature (1)..(69): Homolog of NCBI NO: 25367427 NR Description: hypothetical protein At2g17150 [imported] -
  misc_feature (524)..(943): Homolog of NCBI NO: 25367427 NR Description: hypothetical protein At2g17150 [imported] -
  misc_feature (106)..(492): Homolog of NCBI NO: 33468530 NR Description: NIN-like protein 1 [Lotus corniculatus var.
  misc_feature (583)..(933): Homolog of NCBI NO: 33468530 NR Description: NIN-like protein 1 [Lotus corniculatus var.
  misc_feature (234)..(938): Homolog of NCBI NO: 6448579 NR Description: nodule inception protein [Lotus japonicus]
  misc_feature (109)..(268): Homolog of NCBI NO: 6448579 NR Description: nodule inception protein [Lotus japonicus]
  misc_feature (72)..(494): Homolog of NCBI NO: 15223014 NR Description: hypothetical protein; protein id: At1g76350.1
  misc_feature (493)..(761): Homolog of NCBI NO: 15223014 NR Description: hypothetical protein; protein id: At1g76350.1
MDFMDELLFDGCWLETTDGKSLKQTMGQQVSDSTTMNDNNNNSYLYGYQYAENLSQDHISNEETGRKFPPIPPGFLKIEDLSNQVPFDQSAVMSSAQAEKFLLEESEGGRRYWIAPRTSQGPSSSVKERLVQAIEGLNEEVQDKDFLIQIWLPIQQEGKNFLTTSEQPHFFNPKYSSLKRYRDVSVAYNFLADEDSKESVGLPGRVFLKKLPEWTPDVRFFRSEEYPRIKEAEQCDVRGSLALPVFERGSGTCLGVVEIVTTTQKMNYRPELDNICKALESVNLRSSRSLNPPSREVCKNGLLNQTLTSSIHRNNEFWLLNVICPFCFSFCRVYDLPLALTWAPCARQGKVGSRHSDENFSECVSTVDDACIVPDHQSRHFLEACSEHHLLQGEGIVGKAFNATKLFFVPEVTTFSKTNYPLAHHAKISGLHAALAVPLKNKFNSSVEFVLEFFFPKACLDTEAQQDMLKSLSATLQQDFRSLNLFIDKELELEVVFPVREEVVFAENPLINAGTGEDMKPLPLEEISQEDSSWISHMIKANEKGKGVSLSWEYQKEEPKEEFMLTSGWDNNQIGSGHNNFLSEAEQFQKVTNSGLRIDMDPSFESASFGVGQTLLGSRRPGEKRRTKTEKTIGLEVLRQYFAGSLKDAAKSIGVCPTTLKRICRQHGITRWPSRKIKKVGHSLKKLQLVIDSVQGVQGSIQLDSFYTSFPELSSPHMSGTGTSFKNPNAQTENGVSAQGTAAAPKSPPSSSCSHSSGSSTCCSTGANQSTNTGTTSNTVTTLMAENASAILKRARSEVRLHTMNQDETKSLSRTLSHKTFSEHPLFENPPRLPENSSRKLKAGGASKVKATFGEAKVRFTLLPTWGFRELQHEIARRFNIDNIAPFDLKYLDDDKEWVLLTCEADLEECIDIYRSSQSRTIKISVHEASQVKLGGSFGSIGLGPSL

SEQ ID NO: 86960 - DNA, 872 bp, Arabidopsis thaliana
  misc_feature (1)..(872): Ceres Seq. ID no. 12695866
  misc_feature: MA Experiment ID: 108488 Result: Down-regulated in Transcription
  misc_feature: MA Experiment ID: 20000069 Result: Up-regulated in Transcription
  misc_feature: MA Experiment 20000069 PARAMETER Experiment Name: At_100uM_ABA_Mutants_cDNA_P Parameter: Plant Line Value: CS23
  misc_feature: MA Experiment 20000069 PARAMETER Experiment Name: At_100uM_ABA_Mutants_cDNA_P Parameter: Timepoint (hr) Value: 6
  misc_feature: MA Experiment 20000069 PARAMETER Experiment Name: At_100uM_ABA_Mutants_cDNA_P Parameter: Tissue Value: Aerial
  misc_feature: MA Experiment 20000069 PARAMETER Experiment Name: At_100uM_ABA_Mutants_cDNA_P Parameter: Treatment Value: 100uM ABA vs. No Treatment
  misc_feature: MA Experiment ID: 20000070 Result: Up-regulated in Transcription
  misc_feature: MA Experiment 20000070 PARAMETER Experiment Name: At_100uM_ABA_Mutants_cDNA_P Parameter: Plant Line Value: CS24
  misc_feature: MA Experiment 20000070 PARAMETER Experiment Name: At_100uM_ABA_Mutants_cDNA_P Parameter: Timepoint (hr) Value: 6
  misc_feature: MA Experiment 20000070 PARAMETER Experiment Name: At_100uM_ABA_Mutants_cDNA_P Parameter: Tissue Value: Aerial
  misc_feature: MA Experiment 20000070 PARAMETER Experiment Name: At_100uM_ABA_Mutants_cDNA_P Parameter: Treatment Value: 100uM ABA vs. No Treatment
  misc_feature: MA Experiment ID: 20000071 Result: Up-regulated in Transcription
  misc_feature: MA Experiment 20000071 PARAMETER Experiment Name: At_100uM_ABA_Mutants_cDNA_P Parameter: Plant Line Value: CS8104
  misc_feature: MA Experiment 20000071 PARAMETER Experiment Name: At_100uM_ABA_Mutants_cDNA_P Parameter: Timepoint (hr) Value: 6
  misc_feature: MA Experiment 20000071 PARAMETER Experiment Name: At_100uM_ABA_Mutants_cDNA_P Parameter: Tissue Value: Aerial
  misc_feature: MA Experiment 20000071 PARAMETER Experiment Name: At_100uM_ABA_Mutants_cDNA_P Parameter: Treatment Value: 100uM ABA vs. No Treatment
  misc_feature: MA Experiment ID: 20000072 Result: Up-regulated in Transcription
  misc_feature: MA Experiment 20000072 PARAMETER Experiment Name: At_100uM_ABA_Mutants_cDNA_P Parameter: Plant Line Value: CS8105
  misc_feature: MA Experiment 20000072 PARAMETER Experiment Name: At_100uM_ABA_Mutants_cDNA_P Parameter: Timepoint (hr) Value: 6
  misc_feature: MA Experiment 20000072 PARAMETER Experiment Name: At_100uM_ABA_Mutants_cDNA_P Parameter: Tissue Value: Aerial
  misc_feature: MA Experiment 20000072 PARAMETER Experiment Name: At_100uM_ABA_Mutants_cDNA_P Parameter: Treatment Value: 100uM ABA vs. No Treatment
  misc_feature: MA Experiment ID: 20000086 Result: Up-regulated in Transcription
  misc_feature: MA Experiment 20000086 PARAMETER Experiment Name: At_100uM_ABA_Mutants_cDNA_P Parameter: Plant Line Value: CS22
  misc_feature: MA Experiment 20000086 PARAMETER Experiment Name: At_100uM_ABA_Mutants_cDNA_P Parameter: Timepoint (hr) Value: 6
  misc_feature: MA Experiment 20000086 PARAMETER Experiment Name: At_100uM_ABA_Mutants_cDNA_P Parameter: Tissue Value: Aerial
  misc_feature: MA Experiment 20000086 PARAMETER Experiment Name: At_100uM_ABA_Mutants_cDNA_P Parameter: Treatment Value: 100uM ABA vs. No Treatment
  misc_feature: MA Experiment ID: 20000087 Result: Up-regulated in Transcription
  misc_feature: MA Experiment 20000087 PARAMETER Experiment Name: At_100uM_ABA_Mutants_cDNA_P Parameter: Plant Line Value: WS
  misc_feature: MA Experiment 20000087 PARAMETER Experiment Name: At_100uM_ABA_Mutants_cDNA_P Parameter: Timepoint (hr) Value: 6
  misc_feature: MA Experiment 20000087 PARAMETER Experiment Name: At_100uM_ABA_Mutants_cDNA_P Parameter: Tissue Value: Aerial
  misc_feature: MA Experiment 20000087 PARAMETER Experiment Name: At_100uM_ABA_Mutants_cDNA_P Parameter: Treatment Value: 100uM ABA vs. No Treatment
  misc_feature: MA Experiment ID: 20000089 Result: Up-regulated in Transcription
  misc_feature: MA Experiment ID: 20000090 Result: Up-regulated in Transcription
  misc_feature: MA Experiment ID: 20000117 Result: Up-regulated in Transcription
  misc_feature: MA Experiment 20000117 PARAMETER Experiment Name: At_100uM_ABA_Mutants_cDNA_P Parameter: Plant Line Value: Columbia
  misc_feature: MA Experiment 20000117 PARAMETER Experiment Name: At_100uM_ABA_Mutants_cDNA_P Parameter: Timepoint (hr) Value: 6
  misc_feature: MA Experiment 20000117 PARAMETER Experiment Name: At_100uM_ABA_Mutants_cDNA_P Parameter: Tissue Value: Aerial
  misc_feature: MA Experiment 20000117 PARAMETER Experiment Name: At_100uM_ABA_Mutants_cDNA_P Parameter: Treatment Value: 100uM ABA vs. No Treatment
  misc_feature: MA Experiment ID: 20000171 Result: Down-regulated in Transcription
  misc_feature: MA Experiment 20000171 PARAMETER Experiment Name: At_42deg_Heat_P Parameter: Age (day) Value: 14
  misc_feature: MA Experiment 20000171 PARAMETER Experiment Name: At_42deg_Heat_P Parameter: Organism Value: A. thaliana
  misc_feature: MA Experiment 20000171 PARAMETER Experiment Name: At_42deg_Heat_P Parameter: Plant Line Value: WS
  misc_feature: MA Experiment 20000171 PARAMETER Experiment Name: At_42deg_Heat_P Parameter: Temperature (deg C) Value: 42 vs. 22
  misc_feature: MA Experiment 20000171 PARAMETER Experiment Name: At_42deg_Heat_P Parameter: Timepoint (hr) Value: 1
  misc_feature: MA Experiment 20000171 PARAMETER Experiment Name: At_42deg_Heat_P Parameter: Tissue Value: Aerial
  misc_feature: MA Experiment ID: 20000173 Result: Down-regulated in Transcription
  misc_feature: MA Experiment 20000173 PARAMETER Experiment Name: At_42deg_Heat_P Parameter: Age (day) Value: 14
  misc_feature: MA Experiment 20000173 PARAMETER Experiment Name: At_42deg_Heat_P Parameter: Organism Value: A. thaliana
  misc_feature: MA Experiment 20000173 PARAMETER Experiment Name: At_42deg_Heat_P Parameter: Plant Line Value: WS
  misc_feature: MA Experiment 20000173 PARAMETER Experiment Name: At_42deg_Heat_P Parameter: Temperature (deg C) Value: 42 vs. 22
  misc_feature: MA Experiment 20000173 PARAMETER Experiment Name: At_42deg_Heat_P Parameter: Timepoint (hr) Value: 6
  misc_feature: MA Experiment 20000173 PARAMETER Experiment Name: At_42deg_Heat_P Parameter: Tissue Value: Aerial
  misc_feature: MA Experiment ID: 20000184 Result: Down-regulated in Transcription
  misc_feature: MA Experiment 20000184 PARAMETER Experiment Name: At_Shoots__P Parameter: Age (day) Value: 7
  misc_feature: MA Experiment 20000184 PARAMETER Experiment Name: At_Shoots__P Parameter: Tissue Value: Shoots vs. Whole Plant
  misc_feature: MA Experiment ID: 20000234 Result: Down-regulated in Transcription
  misc_feature: MA Experiment 20000234 PARAMETER Experiment Name: At_Siliques_P Parameter: Age (day) Value: 21
  misc_feature: MA Experiment 20000234 PARAMETER Experiment Name: At_Siliques_P Parameter: Organism Value: A. thaliana
  misc_feature: MA Experiment 20000234 PARAMETER Experiment Name: At_Siliques_P Parameter: Plant Line Value: WS
  misc_feature: MA Experiment 20000234 PARAMETER Experiment Name: At_Siliques_P Parameter: Tissue Value: Less Than 5mm Siliques vs. Whole Plant
  misc_feature: MA Experiment ID: 20000235 Result: Down-regulated in Transcription
  misc_feature: MA Experiment 20000235 PARAMETER Experiment Name: At_Siliques_P Parameter: Age (day) Value: 21
  misc_feature: MA Experiment 20000235 PARAMETER Experiment Name: At_Siliques_P Parameter: Organism Value: A. thaliana
  misc_feature: MA Experiment 20000235 PARAMETER Experiment Name: At_Siliques_P Parameter: Plant Line Value: WS
  misc_feature: MA Experiment 20000235 PARAMETER Experiment Name: At_Siliques_P Parameter: Tissue Value: 5-10mm Siliques vs. Whole Plant
  misc_feature: MA Experiment ID: 20000436 Result: Up-regulated in Transcription
  misc_feature: MA Experiment 20000436 PARAMETER Experiment Name: At_Drought_P Parameter: Age (day) Value: 7
  misc_feature: MA Experiment 20000436 PARAMETER Experiment Name: At_Drought_P Parameter: Organism Value: A. thaliana
  misc_feature: MA Experiment 20000436 PARAMETER Experiment Name: At_Drought_P Parameter: Plant Line Value: WS
  misc_feature: MA Experiment 20000436 PARAMETER Experiment Name: At_Drought_P Parameter: Timepoint (hr) Value: 12
  misc_feature: MA Experiment 20000436 PARAMETER Experiment Name: At_Drought_P Parameter: Tissue Value: Whole Plant
  misc_feature: MA Experiment 20000436 PARAMETER Experiment Name: At_Drought_P Parameter: Treatment Value: Drought vs. No Drought
  misc_feature: MA Experiment ID: 20000437 Result: Up-regulated in Transcription
  misc_feature: MA Experiment 20000437 PARAMETER Experiment Name: At_Drought_P Parameter: Age (day) Value: 8
  misc_feature: MA Experiment 20000437 PARAMETER Experiment Name: At_Drought_P Parameter: Organism Value: A. thaliana
  misc_feature: MA Experiment 20000437 PARAMETER Experiment Name: At_Drought_P Parameter: Plant Line Value: WS
  misc_feature: MA Experiment 20000437 PARAMETER Experiment Name: At_Drought_P Parameter: Timepoint (hr) Value: 24
  misc_feature: MA Experiment 20000437 PARAMETER Experiment Name: At_Drought_P Parameter: Tissue Value: Whole Plant
  misc_feature: MA Experiment 20000437 PARAMETER Experiment Name: At_Drought_P Parameter: Treatment Value: Drought vs. No Drought
  misc_feature: MA Experiment ID: 20000438 Result: Down-regulated in Transcription
  misc_feature: MA Experiment 20000438 PARAMETER Experiment Name: At_Shoots__P Parameter: Age (day) Value: 14
  misc_feature: MA Experiment 20000438 PARAMETER Experiment Name: At_Shoots__P Parameter: Tissue Value: Shoots vs. Whole Plant
  misc_feature: MA Experiment ID: 20000439 Result: Down-regulated in Transcription
  misc_feature: MA Experiment 20000439 PARAMETER Experiment Name: At_Roots__P Parameter: Age (day) Value: 14 vs. 21
  misc_feature: MA Experiment 20000439 PARAMETER Experiment Name: At_Roots__P Parameter: Organism Value: A. thaliana
  misc_feature: MA Experiment 20000439 PARAMETER Experiment Name: At_Roots__P Parameter: Tissue Value: Roots vs. Whole Plant
  misc_feature: MA Experiment ID: 20000495 Result: Down-regulated in Transcription
  misc_feature: MA Experiment 20000495 PARAMETER Experiment Name: At_Guard_Cells_P Parameter: Harvest Date Value: 8/2/2002
  misc_feature: MA Experiment 20000495 PARAMETER Experiment Name: At_Guard_Cells_P Parameter: Organism Value: A. thaliana
  misc_feature: MA Experiment 20000495 PARAMETER Experiment Name: At_Guard_Cells_P Parameter: Tissue Value: Guard Cells vs. Leaves
  misc_feature: MA Experiment ID: 20001451 Result: Down-regulated in Transcription
  misc_feature: MA Experiment 20001451 PARAMETER Experiment Name: At_Far-red-induction_P Parameter: Age (day) Value: 7
  misc_feature: MA Experiment 20001451 PARAMETER Experiment Name: At_Far-red-induction_P Parameter: Light Value: Far-red vs. White
  misc_feature: MA Experiment 20001451 PARAMETER Experiment Name: At_Far-red-induction_P Parameter: Organism Value: A. thaliana
  misc_feature: MA Experiment 20001451 PARAMETER Experiment Name: At_Far-red-induction_P Parameter: Plant Line Value: Columbia
  misc_feature: MA Experiment 20001451 PARAMETER Experiment Name: At_Far-red-induction_P Parameter: Timepoint (hr) Value: 24
  misc_feature: MA Experiment 20001451 PARAMETER Experiment Name: At_Far-red-induction_P Parameter: Tissue Value: Whole Plant
  misc_feature: MA Experiment ID: 20001558 Result: Down-regulated in Transcription
  misc_feature: MA Experiment 20001558 PARAMETER Experiment Name: At_Drought_Soil_Dry_P Parameter: Age (day) Value: 27
  misc_feature: MA Experiment 20001558 PARAMETER Experiment Name: At_Drought_Soil_Dry_P Parameter: Organism Value: A. thaliana
  misc_feature: MA Experiment 20001558 PARAMETER Experiment Name: At_Drought_Soil_Dry_P Parameter: Plant Line Value: WS
  misc_feature: MA Experiment 20001558 PARAMETER Experiment Name: At_Drought_Soil_Dry_P Parameter: Post Timepoint (hr) Value: 6
  misc_feature: MA Experiment 20001558 PARAMETER Experiment Name: At_Drought_Soil_Dry_P Parameter: Post-Treatment Value: Re-Water vs. No Drought
  misc_feature: MA Experiment 20001558 PARAMETER Experiment Name: At_Drought_Soil_Dry_P Parameter: Timepoint (day) Value: 13
  misc_feature: MA Experiment 20001558 PARAMETER Experiment Name: At_Drought_Soil_Dry_P Parameter: Treatment Value: Drought vs. No Drought
  misc_feature: MA Experiment ID: 20001560 Result: Down-regulated in Transcription
  misc_feature: MA Experiment 20001560 PARAMETER Experiment Name: At_Drought_Soil_Dry_P Parameter: Age (day) Value: 28
  misc_feature: MA Experiment 20001560 PARAMETER Experiment Name: At_Drought_Soil_Dry_P Parameter: Organism Value: A. thaliana
  misc_feature: MA Experiment 20001560 PARAMETER Experiment Name: At_Drought_Soil_Dry_P Parameter: Plant Line Value: WS
  misc_feature: MA Experiment 20001560 PARAMETER Experiment Name: At_Drought_Soil_Dry_P Parameter: Post Timepoint (hr) Value: None
  misc_feature: MA Experiment 20001560 PARAMETER Experiment Name: At_Drought_Soil_Dry_P Parameter: Post-Treatment Value: None
  misc_feature: MA Experiment 20001560 PARAMETER Experiment Name: At_Drought_Soil_Dry_P Parameter: Timepoint (day) Value: 14
  misc_feature: MA Experiment 20001560 PARAMETER Experiment Name: At_Drought_Soil_Dry_P Parameter: Treatment Value: Drought vs. No Drought
attataacttggatcagattcttcttctcctctaaacaacaacaaagtctctcttccttctgtctttcacatttcctcttcccctaaaaacagaactcaaaaccaaaacaaaatgactcgctcctctagattccttggtacggcgtcgcctccaccaccggaagaaatcctcgccgccgaaaccgacatggttgtgattctctcagcacttctctgcgctctcgtatgcgtagccggtttagccgccgtagctcgctgcgcttggctccgccgtctcaccggagttaatcccgccgccgtcggagaagctccaccgcctaacaaaggcctcaagaaaaaagcacttcaagctctccctaaatcaacttacaccgcctctgcctctaccgccgccgccgctgacgatctaccgtgctcttcagtcggagacggagattcatccaccgagtgtgcaatatgcataacggaattttcggagggcgaagaaatcagaatcttaccgctgtgtagtcacgccttccacgtggcgtgtatagacaagtggttgacttcacggtcgtcgtgtccgtcttgtcgtcggatactggtgccggtgaagtgtgataggtgtgggcaccatgcttcgacggcggagactcaggtcaaagatcaacctcctcatcaccaacatccttcacagttcacttccgccattattcctgcttttcttccttgaaatgttttcactttattaaatttttataatttgctaaaaatatcggcatgattaaaagtaaagtattaattaattaggaattagtgatctttagttaagtacttttatatttctcctctgtaatcctctgttctgaattaatcagatgaaatttcga

SEQ ID NO: 86961 - protein, 200 aa, Arabidopsis thaliana; identical to SEQ ID NO: 21756
  peptide (1)..(200): Ceres Seq. ID no. 12695867
  misc_feature (113)..(154): Pfam Name: Zinc finger, C3HC4 type (RING finger) Pfam Description: Zinc finger, C3HC4 type (RING finger)
  misc_feature (1)..(200): Homolog of NCBI NO: 15237013 NR Description: RING-H2 finger protein RHA3b; protein id: supported by cDNA: 31493., supported by cDNA: gi_3790574
  misc_feature (1)..(200): Homolog of NCBI NO: 15227839 NR Description: putative RING zinc finger protein; protein id: supported by cDNA: gi_13877952, supported by cDNA: gi_17065625,
  misc_feature (10)..(181): Homolog of NCBI NO: 15218042 NR Description: similar to putative RING zinc finger protein; id: At1g20823.1 [Arabidopsis thaliana] >gi|25402932|pir||F86340
  misc_feature (71)..(166): Homolog of NCBI NO: 37536508 NR Description: putative ring finger protein [Oryza sativa
  misc_feature (1)..(68): Homolog of NCBI NO: 37536508 NR Description: putative ring finger protein [Oryza sativa
  misc_feature (1)..(164): Homolog of NCBI NO: 7489432 NR Description: probable ring finger protein - barley
  misc_feature (6)..(167): Homolog of NCBI NO: 15223041 NR Description: putative RING zinc finger protein; protein id: supported by cDNA: 27464. [Arabidopsis thaliana]
  misc_feature (6)..(167): Homolog of NCBI NO: 21555237 NR Description: putative RING zinc finger protein [Arabidopsis
  misc_feature (20)..(188): Homolog of NCBI NO: 9293902 NR Description: contains similarity to RING zinc finger
  misc_feature (10)..(182): Homolog of NCBI NO: 15222073 NR Description: RING-H2 finger protein RHA3a, putative; protein

SEQ ID NO: 86962 - protein, 175 aa, Arabidopsis thaliana; identical to SEQ ID NO: 21757
  peptide (1)..(175): Ceres Seq. ID no. 12695868
  misc_feature (88)..(129): Pfam Name: Zinc finger, C3HC4 type (RING finger) Pfam Description: Zinc finger, C3HC4 type (RING finger)
  misc_feature (1)..(175): Homolog of NCBI NO: 15237013 NR Description: RING-H2 finger protein RHA3b; protein id: supported by cDNA: 31493., supported by cDNA: gi_3790574
  misc_feature (1)..(175): Homolog of NCBI NO: 15227839 NR Description: putative RING zinc finger protein; protein id: supported by cDNA: gi_13877952, supported by cDNA: gi_17065625,
  misc_feature (1)..(156): Homolog of NCBI NO: 15218042 NR Description: similar to putative RING zinc finger protein; id: At1g20823.1 [Arabidopsis thaliana] >gi|25402932|pir||F86340
  misc_feature (46)..(141): Homolog of NCBI NO: 37536508 NR Description: putative ring finger protein [Oryza sativa
  misc_feature (1)..(43): Homolog of NCBI NO: 37536508 NR Description: putative ring finger protein [Oryza sativa
  misc_feature (1)..(139): Homolog of NCBI NO: 7489432 NR Description: probable ring finger protein - barley
  misc_feature (1)..(142): Homolog of NCBI NO: 15223041 NR Description: putative RING zinc finger protein; protein id: supported by cDNA: 27464. [Arabidopsis thaliana]
  misc_feature (1)..(142): Homolog of NCBI NO: 21555237 NR Description: putative RING zinc finger protein [Arabidopsis
  misc_feature (1)..(163): Homolog of NCBI NO: 9293902 NR Description: contains similarity to RING zinc finger
  misc_feature (1)..(157): Homolog of NCBI NO: 15222073 NR Description: RING-H2 finger protein RHA3a, putative; protein

SEQ ID NO: 86963 - DNA, 1109 bp, Arabidopsis thaliana
  misc_feature (1)..(1109): Ceres Seq. ID no. 12695877
  misc_feature: MA Experiment ID: 108462 Result: Down-regulated in Transcription
  misc_feature: MA Experiment 108462 PARAMETER Experiment Name: At_Germinating_Seeds_cDNA_P Parameter: Age (day) Value: 2 vs. 0
  misc_feature: MA Experiment 108462 PARAMETER Experiment Name: At_Germinating_Seeds_cDNA_P Parameter: Tissue Value: Germinating Seeds
  misc_feature: MA Experiment ID: 108464 Result: Down-regulated in Transcription
  misc_feature: MA Experiment 108464 PARAMETER Experiment Name: At_Germinating_Seeds_cDNA_P Parameter: Age (day) Value: 4 vs. 0
  misc_feature: MA Experiment 108464 PARAMETER Experiment Name: At_Germinating_Seeds_cDNA_P Parameter: Tissue Value: Germinating Seeds
  misc_feature: MA Experiment ID: 108595 Result: Up-regulated in Transcription
  misc_feature: MA Experiment 108595 PARAMETER Experiment Name: At_Ler-pi_Ovule_cDNA_P Parameter: Plant Line Value: null
  misc_feature: MA Experiment ID: 20000184 Result: Down-regulated in Transcription
  misc_feature: MA Experiment 20000184 PARAMETER Experiment Name: At_Shoots__P Parameter: Age (day) Value: 7
  misc_feature: MA Experiment 20000184 PARAMETER Experiment Name: At_Shoots__P Parameter: Tissue Value: Shoots vs. Whole Plant
  misc_feature: MA Experiment ID: 20000227 Result: Down-regulated in Transcription
  misc_feature: MA Experiment 20000227 PARAMETER Experiment Name: At_Root-Tips-vs-Tops_P Parameter: Tissue Value: Root Tips vs. Root Tops
  misc_feature: MA Experiment ID: 20000235 Result: Down-regulated in Transcription
  misc_feature: MA Experiment 20000235 PARAMETER Experiment Name: At_Siliques_P Parameter: Age (day) Value: 21
  misc_feature: MA Experiment 20000235 PARAMETER Experiment Name: At_Siliques_P Parameter: Organism Value: A. thaliana
  misc_feature: MA Experiment 20000235 PARAMETER Experiment Name: At_Siliques_P Parameter: Plant Line Value: WS
  misc_feature: MA Experiment 20000235 PARAMETER Experiment Name: At_Siliques_P Parameter: Tissue Value: 5-10mm Siliques vs. Whole Plant
  misc_feature: MA Experiment ID: 20000496 Result: Down-regulated in Transcription
  misc_feature: MA Experiment 20000496 PARAMETER Experiment Name: At_Guard_Cells_P Parameter: Harvest Date Value: 7/19/2002
  misc_feature: MA Experiment 20000496 PARAMETER Experiment Name: At_Guard_Cells_P Parameter: Organism Value: Canola
  misc_feature: MA Experiment 20000496 PARAMETER Experiment Name: At_Guard_Cells_P Parameter: Tissue Value: Guard Cells vs. Leaves
  misc_feature: MA Experiment ID: 20001451 Result: Down-regulated in Transcription
  misc_feature: MA Experiment 20001451 PARAMETER Experiment Name: At_Far-red-induction_P Parameter: Age (day) Value: 7
  misc_feature: MA Experiment 20001451 PARAMETER Experiment Name: At_Far-red-induction_P Parameter: Light Value: Far-red vs. White
  misc_feature: MA Experiment 20001451 PARAMETER Experiment Name: At_Far-red-induction_P Parameter: Organism Value: A. thaliana
  misc_feature: MA Experiment 20001451 PARAMETER Experiment Name: At_Far-red-induction_P Parameter: Plant Line Value: Columbia
  misc_feature: MA Experiment 20001451 PARAMETER Experiment Name: At_Far-red-induction_P Parameter: Timepoint (hr) Value: 24
  misc_feature: MA Experiment 20001451 PARAMETER Experiment Name: At_Far-red-induction_P Parameter: Tissue Value: Whole Plant
gccgtcttttatctctttaccggtaagagaagccggtttcagatttgatcaattcgaagaattgtggctttcgttcgttgggtgaatccttgcttcgtcctttttgatagattgctactgtgttttcgaggaagttgtgtggagatagttagagagatttatgagatttcaagaggggttattataacgcacgcatggtgttcgacggaaagccgcagagaagttttgttgctatccgatttgactgagactcaaagtttgaaaattgttacttgggtattgagaaagctaaccttgggcaggttcgtatatgagttgggagtaaaacgacggtgatacatttgactgtttttcaactaaactagctttgaaatggtgagcttgtctgtttcgaataagagatacacttacatacacgaaagtggaagtaagtcaactagagaagccattgatattcaccatgtgattatcaacggaagcagcggaactggttatgcccgtcgttgggggcttggtttcttccttgtgtttctggcgagttctatgtactttttgcttggaaaggacaatccagctagaactctttcttggggctgccttttaagtggtttcttggttatgctacatagtcgcaagttcgtcaagaaagaatctgtgataatcttgccaaccttcgggatccaacttgaaactcaatatttaagtggaaaaactgtctccaggtttatccctattgacaagattttgaagcctgtgttggtcgaatgtgtcactcccattacgtgttactggagtctctctttatttcttcgtggtgaagaacaacttacattggtgtttaaggaactgcgtcctccattgaagatgttggttcccatttggaaagcattgtgtgctgctatcggtacagaccaccaaagtgaaacgatagctgaagaagaacatgatgtatctagttaactgcagttgtgattagagaacttgtagatttgttacttgttgttggcagttttgtttggaagatgatcacacaatatgttctgtaatgggagaattgacttgacacaaaaaaagaaaaaagaaaaaaactctttgagtggtgaacattt

SEQ ID NO: 86964 - protein, 195 aa, Arabidopsis thaliana; identical to SEQ ID NO: 42550
  peptide (1)..(195): Ceres Seq. ID no. 12695878
  misc_feature (1)..(195): Homolog of NCBI NO: 22329188 NR Description: putative protein; protein id: At4g35530.1, by cDNA: gi_18253010 [Arabidopsis thaliana] putative protein [Arabidopsis thaliana]
  misc_feature (1)..(195): Homolog of NCBI NO: 7486656 NR Description: hypothetical protein F8D20.40 - Arabidopsis >gi|3367571|emb|CAA20023.1| putative protein [Arabidopsis >gi|7270504|emb|CAB80269.1| putative protein [Arabidopsis

SEQ ID NO: 86965 - protein, 138 aa, Arabidopsis thaliana; identical to SEQ ID NO: 42551
  peptide (1)..(138): Ceres Seq. ID no. 12695879
  misc_feature (1)..(138): Homolog of NCBI NO: 22329188 NR Description: putative protein; protein id: At4g35530.1, by cDNA: gi_18253010 [Arabidopsis thaliana] putative protein [Arabidopsis thaliana]
  misc_feature (1)..(138): Homolog of NCBI NO: 7486656 NR Description: hypothetical protein F8D20.40 - Arabidopsis >gi|3367571|emb|CAA20023.1| putative protein [Arabidopsis >gi|7270504|emb|CAB80269.1| putative protein [Arabidopsis

SEQ ID NO: 86966 - protein, 113 aa, Arabidopsis thaliana; identical to SEQ ID NO: 42552
  peptide (1)..(113): Ceres Seq. ID no. 12695880
  misc_feature (1)..(113): Homolog of NCBI NO: 22329188 NR Description: putative protein; protein id: At4g35530.1, by cDNA: gi_18253010 [Arabidopsis thaliana] putative protein [Arabidopsis thaliana]
  misc_feature (1)..(113): Homolog of NCBI NO: 7486656 NR Description: hypothetical protein F8D20.40 - Arabidopsis >gi|3367571|emb|CAA20023.1| putative protein [Arabidopsis >gi|7270504|emb|CAB80269.1| putative protein [Arabidopsis

SEQ ID NO: 86967 - DNA, 1107 bp, Arabidopsis thaliana
  misc_feature (1)..(1107): Ceres Seq. ID no. 12695895
  misc_feature: MA Experiment ID: 20000265 Result: Up-regulated in Transcription
  misc_feature: MA Experiment 20000265 PARAMETER Experiment Name: At_Open_Flower_P Parameter: Age (day) Value: 21
  misc_feature: MA Experiment 20000265 PARAMETER Experiment Name: At_Open_Flower_P Parameter: Plant Line Value: WS
  misc_feature: MA Experiment 20000265 PARAMETER Experiment Name: At_Open_Flower_P Parameter: Tissue Value: Closed Flower vs. Whole Plant
atggcgagaagatccgtttcgatatttaatcgccttctggcgaatcctccttctccattcacatcactgtcccgatccatcacctacatgcctagacccggagatggagctccacgaaccgtaaccctaattcccggcgacggaatcggacctttggtgaccggtgcggtggaacaggtcatggaagcgatgcacgcgccagtgcatttcgagagatacgaggttctaggaaacatgagaaaagtccctgaagaagtgatcgagtctgtgaagagaaacaaggtttgtctcaaaggtggattagcgactcctgttggtgggggtgtcagttctttgaatatgcaattgaggaaagaactcgatatcttcgcttctcttgtcaattgcatcaatgtccctggattagtgacgcgacacgaaaatgttgatatcgttgtgataagagagaacactgaaggagagtactcaggtctcgagcatgaggttgttcctggtgttgtcgagagccttaaggtgataacaaagttttgttctgagagaatagcgagatatgcatttgagtatgcgtatctaaacaataggaagaaagtgactgctgttcataaagctaacattatgaagcttgcggatgggctcttccttgaatcttgtagagaggttgctaaacattattcggggattacttacaatgaaataatcgtagacaattgctgtatgcagcttgtcgccaagcctgagcaatttgatgtcatggtgacacctaatttgtatggtaaccttatagcaaacacggcggctggaatagccggtggcactggagtgatgccaggagggaatgttggtgcagaacatgcgatattcgagcaaggtgcatcagcagggaatgtggggaatgataagatggtggaacagaagaaagcgaatccggtggctctacttctctcgtcggctatgatgctaagacatctccggtttcctacttttgctgatcggcttgaaacagcagtgaaacaagtgattaaagaaggaaaatatagaacaaaagatcttggaggagattgtaccacgcaggaagttgttgatgctgtcatagcagctcttgagtga

SEQ ID NO: 86968 - protein, 368 aa, Arabidopsis thaliana
  peptide (1)..(368): Ceres Seq. ID no. 12695896
  misc_feature (40)..(363): Pfam Name: Isocitrate/isopropylmalate dehydrogenase Pfam Description: Isocitrate/isopropylmalate dehydrogenase
  misc_feature (1)..(368): Homolog of NCBI NO: 15237075 NR Description: NAD+ dependent isocitrate dehydrogenase -like protein id: At4g35650.1 [Arabidopsis thaliana]
  misc_feature (1)..(368): Homolog of NCBI NO: 28974502 NR Description: NAD-dependent isocitrate dehydrogenase beta
  misc_feature (1)..(368): Homolog of NCBI NO: 28974498 NR Description: NAD-dependent isocitrate dehydrogenase beta
  misc_feature (1)..(368): Homolog of NCBI NO: 15236932 NR Description: NAD+ dependent isocitrate dehydrogenase subunit protein id: At4g35260.1, supported by cDNA: 12228., supported by gi_15146237, supported by cDNA: gi_16226886, supported by cDNA:
  misc_feature (1)..(368): Homolog of NCBI NO: 21537157 NR Description: NAD+ dependent isocitrate dehydrogenase subunit 1
  misc_feature (1)..(368): Homolog of NCBI NO: 3790188 NR Description: NAD-dependent isocitrate dehydrogenase [Nicotiana
  misc_feature (1)..(368): Homolog of NCBI NO: 1766046 NR Description: NAD+ dependent isocitrate dehydrogenase subunit 1
  misc_feature (1)..(368): Homolog of NCBI NO: 15227370 NR Description: putative NAD+ dependent isocitrate dehydrogenase
  misc_feature (1)..(368): Homolog of NCBI NO: 1766048 NR Description: NAD+ dependent isocitrate dehydrogenase subunit 2
  misc_feature (1)..(368): Homolog of NCBI NO: 28974504 NR Description: NAD-dependent isocitrate dehydrogenase gamma
MARRSVSIFNRLLANPPSPFTSLSRSITYMPRPGDGAPRTVTLIPGDGIGPLVTGAVEQVMEAMHAPVHFERYEVLGNMRKVPEEVIESVKRNKVCLKGGLATPVGGGVSSLNMQLRKELDIFASLVNCINVPGLVTRHENVDIVVIRENTEGEYSGLEHEVVPGVVESLKVITKFCSERIARYAFEYAYLNNRKKVTAVHKANIMKLADGLFLESCREVAKHYSGITYNEIIVDNCCMQLVAKPEQFDVMVTPNLYGNLIANTAAGIAGGTGVMPGGNVGAEHAIFEQGASAGNVGNDKMVEQKKANPVALLLSSAMMLRHLRFPTFADRLETAVKQVIKEGKYRTKDLGGDCTTQEVVDAVIAALE

SEQ ID NO: 86969 - protein, 339 aa, Arabidopsis thaliana
  peptide (1)..(339): Ceres Seq. ID no. 12695897
  misc_feature (11)..(334): Pfam Name: Isocitrate/isopropylmalate dehydrogenase Pfam Description: Isocitrate/isopropylmalate dehydrogenase
  misc_feature (1)..(339): Homolog of NCBI NO: 15237075 NR Description: NAD+ dependent isocitrate dehydrogenase -like protein id: At4g35650.1 [Arabidopsis thaliana]
  misc_feature (1)..(339): Homolog of NCBI NO: 28974502 NR Description: NAD-dependent isocitrate dehydrogenase beta
  misc_feature (1)..(339): Homolog of NCBI NO: 28974498 NR Description: NAD-dependent isocitrate dehydrogenase beta
  misc_feature (1)..(339): Homolog of NCBI NO: 15236932 NR Description: NAD+ dependent isocitrate dehydrogenase subunit protein id: At4g35260.1, supported by cDNA: 12228., supported by gi_15146237, supported by cDNA: gi_16226886, supported by cDNA:
  misc_feature (1)..(339): Homolog of NCBI NO: 21537157 NR Description: NAD+ dependent isocitrate dehydrogenase subunit 1
  misc_feature (1)..(339): Homolog of NCBI NO: 3790188 NR Description: NAD-dependent isocitrate dehydrogenase [Nicotiana
  misc_feature (1)..(339): Homolog of NCBI NO: 1766046 NR Description: NAD+ dependent isocitrate dehydrogenase subunit 1
  misc_feature (1)..(339): Homolog of NCBI NO: 15227370 NR Description: putative NAD+ dependent isocitrate dehydrogenase
  misc_feature (1)..(339): Homolog of NCBI NO: 1766048 NR Description: NAD+ dependent isocitrate dehydrogenase subunit 2
  misc_feature (1)..(339): Homolog of NCBI NO: 28974504 NR Description: NAD-dependent isocitrate dehydrogenase gamma
MPRPGDGAPRTVTLIPGDGIGPLVTGAVEQVMEAMHAPVHFERYEVLGNMRKVPEEVIESVKRNKVCLKGGLATPVGGGVSSLNMQLRKELDIFASLVNCINVPGLVTRHENVDIVVIRENTEGEYSGLEHEVVPGVVESLKVITKFCSERIARYAFEYAYLNNRKKVTAVHKANIMKLADGLFLESCREVAKHYSGITYNEIIVDNCCMQLVAKPEQFDVMVTPNLYGNLIANTAAGIAGGTGVMPGGNVGAEHAIFEQGASAGNVGNDKMVEQKKANPVALLLSSAMMLRHLRFPTFADRLETAVKQVIKEGKYRTKDLGGDCTTQEVVDAVIAALE

SEQ ID NO: 86970 - protein, 308 aa, Arabidopsis thaliana
  peptide (1)..(308): Ceres Seq. ID no. 12695898
  misc_feature (1)..(303): Pfam Name: Isocitrate/isopropylmalate dehydrogenase Pfam Description: Isocitrate/isopropylmalate dehydrogenase
  misc_feature (1)..(308): Homolog of NCBI NO: 15237075 NR Description: NAD+ dependent isocitrate dehydrogenase -like protein id: At4g35650.1 [Arabidopsis thaliana]
  misc_feature (1)..(308): Homolog of NCBI NO: 28974502 NR Description: NAD-dependent isocitrate dehydrogenase beta
  misc_feature (1)..(308): Homolog of NCBI NO: 28974498 NR Description: NAD-dependent isocitrate dehydrogenase beta
  misc_feature (1)..(308): Homolog of NCBI NO: 15236932 NR Description: NAD+ dependent isocitrate dehydrogenase subunit protein id: At4g35260.1, supported by cDNA: 12228., supported by gi_15146237, supported by cDNA: gi_16226886, supported by cDNA:
  misc_feature (1)..(308): Homolog of NCBI NO: 21537157 NR Description: NAD+ dependent isocitrate dehydrogenase subunit 1
  misc_feature (1)..(308): Homolog of NCBI NO: 3790188 NR Description: NAD-dependent isocitrate dehydrogenase [Nicotiana
  misc_feature (1)..(308): Homolog of NCBI NO: 1766046 NR Description: NAD+ dependent isocitrate dehydrogenase subunit 1
  misc_feature (1)..(308): Homolog of NCBI NO: 15227370 NR Description: putative NAD+ dependent isocitrate dehydrogenase
  misc_feature (1)..(308): Homolog of NCBI NO: 1766048 NR Description: NAD+ dependent isocitrate dehydrogenase subunit 2
  misc_feature (1)..(308): Homolog of NCBI NO: 28974504 NR Description: NAD-dependent isocitrate dehydrogenase gamma
MEAMHAPVHFERYEVLGNMRKVPEEVIESVKRNKVCLKGGLATPVGGGVSSLNMQLRKELDIFASLVNCINVPGLVTRHENVDIVVIRENTEGEYSGLEHEVVPGVVESLKVITKFCSERIARYAFEYAYLNNRKKVTAVHKANIMKLADGLFLESCREVAKHYSGITYNEIIVDNCCMQLVAKPEQFDVMVTPNLYGNLIANTAAGIAGGTGVMPGGNVGAEHAIFEQGASAGNVGNDKMVEQKKANPVALLLSSAMMLRHLRFPTFADRLETAVKQVIKEGKYRTKDLGGDCTTQEVVDAVIAALE

SEQ ID NO: 86971 - DNA, 1780 bp, Arabidopsis thaliana
  misc_feature (1)..(1780): Ceres Seq. ID no. 12695923
  misc_feature: MA Experiment ID: 108434 Result: Up-regulated in Transcription
  misc_feature: MA Experiment 108434 PARAMETER Experiment Name: At_Root_Tips_cDNA_P Parameter: Tissue Value: Root Tips
  misc_feature: MA Experiment ID: 108462 Result: Down-regulated in Transcription
  misc_feature: MA Experiment 108462 PARAMETER Experiment Name: At_Germinating_Seeds_cDNA_P Parameter: Age (day) Value: 2 vs. 0
  misc_feature: MA Experiment 108462 PARAMETER Experiment Name: At_Germinating_Seeds_cDNA_P Parameter: Tissue Value: Germinating Seeds
  misc_feature: MA Experiment ID: 108463 Result: Down-regulated in Transcription
  misc_feature: MA Experiment 108463 PARAMETER Experiment Name: At_Germinating_Seeds_cDNA_P Parameter: Age (day) Value: 3 vs. 0
  misc_feature: MA Experiment 108463 PARAMETER Experiment Name: At_Germinating_Seeds_cDNA_P Parameter: Tissue Value: Germinating Seeds
  misc_feature: MA Experiment ID: 20000180 Result: Down-regulated in Transcription
  misc_feature: MA Experiment 20000180 PARAMETER Experiment Name: At_Germinating_Seeds_P Parameter: Age (hr) Value: 24 vs. 0
  misc_feature: MA Experiment 20000180 PARAMETER Experiment Name: At_Germinating_Seeds_P Parameter: Tissue Value: Germinating Seeds
  misc_feature: MA Experiment ID: 20001557 Result: Up-regulated in Transcription
  misc_feature: MA Experiment 20001557 PARAMETER Experiment Name: At_Drought_Soil_Dry_P Parameter: Age (day) Value: 27
  misc_feature: MA Experiment 20001557 PARAMETER Experiment Name: At_Drought_Soil_Dry_P Parameter: Organism Value: A. thaliana
  misc_feature: MA Experiment 20001557 PARAMETER Experiment Name: At_Drought_Soil_Dry_P Parameter: Plant Line Value: WS
  misc_feature: MA Experiment 20001557 PARAMETER Experiment Name: At_Drought_Soil_Dry_P Parameter: Post Timepoint (hr) Value: 3
  misc_feature: MA Experiment 20001557 PARAMETER Experiment Name: At_Drought_Soil_Dry_P Parameter: Post-Treatment Value: Re-Water vs. No Drought
  misc_feature: MA Experiment 20001557 PARAMETER Experiment Name: At_Drought_Soil_Dry_P Parameter: Timepoint (day) Value: 13
  misc_feature: MA Experiment 20001557 PARAMETER Experiment Name: At_Drought_Soil_Dry_P Parameter: Treatment Value: Drought vs. No Drought
gtttcagacaaagtagtgacatttttctaacaattaaaccaatatcgccgtagtcaaccaccgcataacgttttggcgccgcctgaggctgacctggggctgctaaagattttatcgcgacgactctctttctctctcaaactgtttcagctgcttgcgaattggaaatggcttgtaattcctcaggctgtgagtcaggttgctatgaccgtgagaaagataatggaagtaagatagtggatgatgcagtatctggtggcggtaatcatgagagtgtctgcgtcaagtgtaaatgcaatgcgcctatgacatttggtgacggtggcttcgacgatggaagattctgcgcagattgttttaggaacaatgtctttgggaaattccgtcttgctgttacttctcatgctatgatcactccttcagataacgtccttgttgctttctctggcggatcatcttccagggtttctcttcaatttgtgcacgagttgcaaatcaaggctttgaagaattacgaggcgagtcgagatagatctttacctgtgtttggtgttggtgttgcttttgtggatgaaactgcagcttttcctgctctttccactgaaatgattgatgcaattgagtgggttcgatatactgtctcgtgtttgtctccacctgctaaggatctccatgttgttccagtcgaaagcatatttggttcagactctcttgacgcacgggatagacttctgaagctattagattctgttcctgacgatactggaaaagaagaccttctgctgcatctgaaaatgttatctttgcaaaaggttgccgctgaaaatgggtacaatagattagtgttgggatcatgcacgtcgagaattgcttcccatgttcttacggctactgtcaagggacgaggttattcactatcagcagatattcagcatgttgatgctagatggaaggttcccattgtacttccacttcgagattgtgttcgactggaaataactagactctgccttttggatggacttaagactgtggagttggcttgtcgttctcaatgcggaatcaatgatttggtgtcttcatttgtcgctctgttgcaggaagaaaatccttcccgggaatgcacaattgtacggacagctgcgaagctgactccattttacttcaataaaattccggaaacagacgactctaatgtacctatggccactcagaggcgcctaaagagattcaatctcaaatatgatggatcaatgactactgaagctttctgtcctatctgcaatggcccgctaaatagatcagactcatcagagttggatacttttgaagaaggccaggaatctgatgtcctctatgctgcttgctgttcaagttgccggtttcaaatacttccacaggatggatcatctcttgagcaattcagttcatttctaccagatcacatgatttcccaagtgaaacatcaaaaagttgatagtcaagcttatctgagggagaaaattaaagactgtctgctcttggacgatgaagaggttgtctaaatctgcattcggatgcttgcacaaggtatgagaggaagtttaaatcctgtcatgcttatcaaggattattcctagaaacctaagatcatcttagtttaatgtcgatctgatatcatcgtagatgttaaaagtgtttttactcattcgttacaatgattgtctcaatgtgaagcaaaatcactgagcaattgaatgaagcatctacagttttacacatataatacaagaatcatggg

SEQ ID NO: 86972 - protein, 458 aa, Arabidopsis thaliana
  peptide (1)..(458): Ceres Seq. ID no. 12695924
  misc_feature (1)..(458): Homolog of NCBI NO: 18419746 NR Description: putative protein; protein id: At4g35910.1,
  misc_feature (1)..(458): Homolog of NCBI NO: 21553405 NR Description: unknown [Arabidopsis thaliana]
  misc_feature (1)..(285): Homolog of NCBI NO: 7486391 NR Description: hypothetical protein F4B14.180 - Arabidopsis >gi|3036795|emb|CAA18485.1| putative protein [Arabidopsis >gi|3805857|emb|CAA21477.1| putative protein [Arabidopsis
  misc_feature (286)..(453): Homolog of NCBI NO: 7486391 NR Description: hypothetical protein F4B14.180 - Arabidopsis >gi|3036795|emb|CAA18485.1| putative protein [Arabidopsis >gi|3805857|emb|CAA21477.1| putative protein [Arabidopsis
  misc_feature (186)..(328): Homolog of NCBI NO: 39645134 NR Description: Unknown (protein for IMAGE:3877613) [Homo sapiens]
  misc_feature (33)..(136): Homolog of NCBI NO: 39645134 NR Description: Unknown (protein for IMAGE:3877613) [Homo sapiens]
MACNSSGCESGCYDREKDNGSKIVDDAVSGGGNHESVCVKCKCNAPMTFGDGGFDDGRFCADCFRNNVFGKFRLAVTSHAMITPSDNVLVAFSGGSSSRVSLQFVHELQIKALKNYEASRDRSLPVFGVGVAFVDETAAFPALSTEMIDAIEWVRYTVSCLSPPAKDLHVVPVESIFGSDSLDARDRLLKLLDSVPDDTGKEDLLLHLKMLSLQKVAAENGYNRLVLGSCTSRIASHVLTATVKGRGYSLSADIQHVDARWKVPIVLPLRDCVRLEITRLCLLDGLKTVELACRSQCGINDLVSSFVALLQEENPSRECTIVRTAAKLTPFYFNKIPETDDSNVPMATQRRLKRFNLKYDGSMTTEAFCPICNGPLNRSDSSELDTFEEGQESDVLYAACCSSCRFQILPQDGSSLEQFSSFLPDHMISQVKHQKVDSQAYLREKIKDCLLLDDEEVV

SEQ ID NO: 86973 - protein, 412 aa, Arabidopsis thaliana
  peptide (1)..(412): Ceres Seq. ID no. 12695925
  misc_feature (1)..(412): Homolog of NCBI NO: 18419746 NR Description: putative protein; protein id: At4g35910.1,
  misc_feature (1)..(412): Homolog of NCBI NO: 21553405 NR Description: unknown [Arabidopsis thaliana]
  misc_feature (1)..(239): Homolog of NCBI NO: 7486391 NR Description: hypothetical protein F4B14.180 - Arabidopsis >gi|3036795|emb|CAA18485.1| putative protein [Arabidopsis >gi|3805857|emb|CAA21477.1| putative protein [Arabidopsis
  misc_feature (240)..(407): Homolog of NCBI NO: 7486391 NR Description: hypothetical protein F4B14.180 - Arabidopsis >gi|3036795|emb|CAA18485.1| putative protein [Arabidopsis >gi|3805857|emb|CAA21477.1| putative protein [Arabidopsis
  misc_feature (140)..(282): Homolog of NCBI NO: 39645134 NR Description: Unknown (protein for IMAGE:3877613) [Homo sapiens]
  misc_feature (1)..(90): Homolog of NCBI NO: 39645134 NR Description: Unknown (protein for IMAGE:3877613) [Homo sapiens]
MTFGDGGFDDGRFCADCFRNNVFGKFRLAVTSHAMITPSDNVLVAFSGGSSSRVSLQFVHELQIKALKNYEASRDRSLPVFGVGVAFVDETAAFPALSTEMIDAIEWVRYTVSCLSPPAKDLHVVPVESIFGSDSLDARDRLLKLLDSVPDDTGKEDLLLHLKMLSLQKVAAENGYNRLVLGSCTSRIASHVLTATVKGRGYSLSADIQHVDARWKVPIVLPLRDCVRLEITRLCLLDGLKTVELACRSQCGINDLVSSFVALLQEENPSRECTIVRTAAKLTPFYFNKIPETDDSNVPMATQRRLKRFNLKYDGSMTTEAFCPICNGPLNRSDSSELDTFEEGQESDVLYAACCSSCRFQILPQDGSSLEQFSSFLPDHMISQVKHQKVDSQAYLREKIKDCLLLDDEEVV

SEQ ID NO: 86974 - protein, 378 aa, Arabidopsis thaliana
  peptide (1)..(378): Ceres Seq. ID no. 12695926
  misc_feature (1)..(378): Homolog of NCBI NO: 18419746 NR Description: putative protein; protein id: At4g35910.1,
  misc_feature (1)..(378): Homolog of NCBI NO: 21553405 NR Description: unknown [Arabidopsis thaliana]
  misc_feature (1)..(205): Homolog of NCBI NO: 7486391 NR Description: hypothetical protein F4B14.180 - Arabidopsis >gi|3036795|emb|CAA18485.1| putative protein [Arabidopsis >gi|3805857|emb|CAA21477.1| putative protein [Arabidopsis
  misc_feature (206)..(373): Homolog of NCBI NO: 7486391 NR Description: hypothetical protein F4B14.180 - Arabidopsis >gi|3036795|emb|CAA18485.1| putative protein [Arabidopsis >gi|3805857|emb|CAA21477.1| putative protein [Arabidopsis
  misc_feature (106)..(248): Homolog of NCBI NO: 39645134 NR Description: Unknown (protein for IMAGE:3877613) [Homo sapiens]
  misc_feature (1)..(56): Homolog of NCBI NO: 39645134 NR Description: Unknown (protein for IMAGE:3877613) [Homo sapiens]
MITPSDNVLVAFSGGSSSRVSLQFVHELQIKALKNYEASRDRSLPVFGVGVAFVDETAAFPALSTEMIDAIEWVRYTVSCLSPPAKDLHVVPVESIFGSDSLDARDRLLKLLDSVPDDTGKEDLLLHLKMLSLQKVAAENGYNRLVLGSCTSRIASHVLTATVKGRGYSLSADIQHVDARWKVPIVLPLRDCVRLEITRLCLLDGLKTVELACRSQCGINDLVSSFVALLQEENPSRECTIVRTAAKLTPFYFNKIPETDDSNVPMATQRRLKRFNLKYDGSMTTEAFCPICNGPLNRSDSSELDTFEEGQESDVLYAACCSSCRFQILPQDGSSLEQFSSFLPDHMISQVKHQKVDSQAYLREKIKDCLLLDDEEVV

SEQ ID NO: 86975 - DNA, 1452 bp, Arabidopsis thaliana
  misc_feature (1)..(1452): Ceres Seq. ID no. 12695978
  misc_feature: MA Experiment ID: 20000173 Result: Down-regulated in Transcription
  misc_feature: MA Experiment 20000173 PARAMETER Experiment Name: At_42deg_Heat_P Parameter: Age (day) Value: 14
  misc_feature: MA Experiment 20000173 PARAMETER Experiment Name: At_42deg_Heat_P Parameter: Organism Value: A. thaliana
  misc_feature: MA Experiment 20000173 PARAMETER Experiment Name: At_42deg_Heat_P Parameter: Plant Line Value: WS
  misc_feature: MA Experiment 20000173 PARAMETER Experiment Name: At_42deg_Heat_P Parameter: Temperature (deg C) Value: 42 vs. 22
  misc_feature: MA Experiment 20000173 PARAMETER Experiment Name: At_42deg_Heat_P Parameter: Timepoint (hr) Value: 6
  misc_feature: MA Experiment 20000173 PARAMETER Experiment Name: At_42deg_Heat_P Parameter: Tissue Value: Aerial
  misc_feature: MA Experiment ID: 20000180 Result: Up-regulated in Transcription
  misc_feature: MA Experiment 20000180 PARAMETER Experiment Name: At_Germinating_Seeds_P Parameter: Age (hr) Value: 24 vs. 0
  misc_feature: MA Experiment 20000180 PARAMETER Experiment Name: At_Germinating_Seeds_P Parameter: Tissue Value: Germinating Seeds
  misc_feature: MA Experiment ID: 20000185 Result: Down-regulated in Transcription
  misc_feature: MA Experiment 20000185 PARAMETER Experiment Name: At_Roots__P Parameter: Age (day) Value: 7 vs. 21
  misc_feature: MA Experiment 20000185 PARAMETER Experiment Name: At_Roots__P Parameter: Organism Value: A. thaliana
  misc_feature: MA Experiment 20000185 PARAMETER Experiment Name: At_Roots__P Parameter: Tissue Value: Roots vs. Whole Plant
  misc_feature: MA Experiment ID: 20000234 Result: Up-regulated in Transcription
  misc_feature: MA Experiment 20000234 PARAMETER Experiment Name: At_Siliques_P Parameter: Age (day) Value: 21
  misc_feature: MA Experiment 20000234 PARAMETER Experiment Name: At_Siliques_P Parameter: Organism Value: A. thaliana
  misc_feature: MA Experiment 20000234 PARAMETER Experiment Name: At_Siliques_P Parameter: Plant Line Value: WS
  misc_feature: MA Experiment 20000234 PARAMETER Experiment Name: At_Siliques_P Parameter: Tissue Value: Less Than 5mm Siliques vs. Whole Plant
  misc_feature: MA Experiment ID: 20000235 Result: Up-regulated in Transcription
  misc_feature: MA Experiment 20000235 PARAMETER Experiment Name: At_Siliques_P Parameter: Age (day) Value: 21
  misc_feature: MA Experiment 20000235 PARAMETER Experiment Name: At_Siliques_P Parameter: Organism Value: A. thaliana
  misc_feature: MA Experiment 20000235 PARAMETER Experiment Name: At_Siliques_P Parameter: Plant Line Value: WS
  misc_feature: MA Experiment 20000235 PARAMETER Experiment Name: At_Siliques_P Parameter: Tissue Value: 5-10mm Siliques vs. Whole Plant
  misc_feature: MA Experiment ID: 20000264 Result: Up-regulated in Transcription
  misc_feature: MA Experiment 20000264 PARAMETER Experiment Name: At_Open_Flower_P Parameter: Age (day) Value: 21
  misc_feature: MA Experiment 20000264 PARAMETER Experiment Name: At_Open_Flower_P Parameter: Plant Line Value: WS
  misc_feature: MA Experiment 20000264 PARAMETER Experiment Name: At_Open_Flower_P Parameter: Tissue Value: Open Flower vs. Whole Plant
  misc_feature: MA Experiment ID: 20000265 Result: Up-regulated in Transcription
  misc_feature: MA Experiment 20000265 PARAMETER Experiment Name: At_Open_Flower_P Parameter: Age (day) Value: 21
  misc_feature: MA Experiment 20000265 PARAMETER Experiment Name: At_Open_Flower_P Parameter: Plant Line Value: WS
  misc_feature: MA Experiment 20000265 PARAMETER Experiment Name: At_Open_Flower_P Parameter: Tissue Value: Closed Flower vs. Whole Plant
  misc_feature: MA Experiment ID: 20000286 Result: Up-regulated in Transcription
  misc_feature: MA Experiment 20000286 PARAMETER Experiment Name: At_Open_Flower_P Parameter: Age (day) Value: 21
  misc_feature: MA Experiment 20000286 PARAMETER Experiment Name: At_Open_Flower_P Parameter: Plant Line Value: WS
  misc_feature: MA Experiment 20000286 PARAMETER Experiment Name: At_Open_Flower_P Parameter: Tissue Value: Half Open vs. Whole Plant
  misc_feature: MA Experiment ID: 20000439 Result: Down-regulated in Transcription
  misc_feature: MA Experiment 20000439 PARAMETER Experiment Name: At_Roots__P Parameter: Age (day) Value: 14 vs. 21
  misc_feature: MA Experiment 20000439 PARAMETER Experiment Name: At_Roots__P Parameter: Organism Value: A. thaliana
  misc_feature: MA Experiment 20000439 PARAMETER Experiment Name: At_Roots__P Parameter: Tissue Value: Roots vs. Whole Plant
  misc_feature: MA Experiment ID: 20000451 Result: Up-regulated in Transcription
  misc_feature: MA Experiment 20000451 PARAMETER Experiment Name: At_CS6879_Shoots-Roots_P Parameter: Age (day) Value: 14
  misc_feature: MA Experiment 20000451 PARAMETER Experiment Name: At_CS6879_Shoots-Roots_P Parameter: Organism Value: A. thaliana
  misc_feature: MA Experiment 20000451 PARAMETER Experiment Name: At_CS6879_Shoots-Roots_P Parameter: Plant Line Value: CS6879 vs. WS
  misc_feature: MA Experiment 20000451 PARAMETER Experiment Name: At_CS6879_Shoots-Roots_P Parameter: Tissue Value: Roots
  misc_feature: MA Experiment ID: 20000794 Result: Up-regulated in Transcription
  misc_feature: MA Experiment 20000794 PARAMETER Experiment Name: At_Petals_P Parameter: Age (day) Value: 23-25 days
  misc_feature: MA Experiment 20000794 PARAMETER Experiment Name: At_Petals_P Parameter: Plant Line Value: WS
  misc_feature: MA Experiment 20000794 PARAMETER Experiment Name: At_Petals_P Parameter: Tissue Value: Petals vs. Whole plant
  misc_feature: MA Experiment ID: 20001451 Result: Down-regulated in Transcription
  misc_feature: MA Experiment 20001451 PARAMETER Experiment Name: At_Far-red-induction_P Parameter: Age (day) Value: 7
  misc_feature: MA Experiment 20001451 PARAMETER Experiment Name: At_Far-red-induction_P Parameter: Light Value: Far-red vs. White
  misc_feature: MA Experiment 20001451 PARAMETER Experiment Name: At_Far-red-induction_P Parameter: Organism Value: A. thaliana
  misc_feature: MA Experiment 20001451 PARAMETER Experiment Name: At_Far-red-induction_P Parameter: Plant Line Value: Columbia
  misc_feature: MA Experiment 20001451 PARAMETER Experiment Name: At_Far-red-induction_P Parameter: Timepoint (hr) Value: 24
  misc_feature: MA Experiment 20001451 PARAMETER Experiment Name: At_Far-red-induction_P Parameter: Tissue Value: Whole Plant
  misc_feature: MA Experiment ID: 20001558 Result: Up-regulated in Transcription
  misc_feature: MA Experiment 20001558 PARAMETER Experiment Name: At_Drought_Soil_Dry_P Parameter: Age (day) Value: 27
  misc_feature: MA Experiment 20001558 PARAMETER Experiment Name: At_Drought_Soil_Dry_P Parameter: Organism Value: A. thaliana
  misc_feature: MA Experiment 20001558 PARAMETER Experiment Name: At_Drought_Soil_Dry_P Parameter: Plant Line Value: WS
  misc_feature: MA Experiment 20001558 PARAMETER Experiment Name: At_Drought_Soil_Dry_P Parameter: Post Timepoint (hr) Value: 6
  misc_feature: MA Experiment 20001558 PARAMETER Experiment Name: At_Drought_Soil_Dry_P Parameter: Post-Treatment Value: Re-Water vs. No Drought
  misc_feature: MA Experiment 20001558 PARAMETER Experiment Name: At_Drought_Soil_Dry_P Parameter: Timepoint (day) Value: 13
  misc_feature: MA Experiment 20001558 PARAMETER Experiment Name: At_Drought_Soil_Dry_P Parameter: Treatment Value: Drought vs. No Drought
  misc_feature: MA Experiment ID: 20001911 Result: Down-regulated in Transcription
  misc_feature: MA Experiment 20001911 PARAMETER Experiment Name: At_Drought_Reproduction_P Parameter: Age (day) Value: 40
  misc_feature: MA Experiment 20001911 PARAMETER Experiment Name: At_Drought_Reproduction_P Parameter: Organism Value: A. thaliana
  misc_feature: MA Experiment 20001911 PARAMETER Experiment Name: At_Drought_Reproduction_P Parameter: Plant Line Value: WS
  misc_feature: MA Experiment 20001911 PARAMETER Experiment Name: At_Drought_Reproduction_P Parameter: Timepoint (day) Value: 10
  misc_feature: MA Experiment 20001911 PARAMETER Experiment Name: At_Drought_Reproduction_P Parameter: Tissue Value: Flowers
  misc_feature: MA Experiment 20001911 PARAMETER Experiment Name: At_Drought_Reproduction_P Parameter: Treatment Value: Drought vs. No Drought
atggaagctatgaaggagactgtggaggagagcttgagagagatgagagagacgtttgcgagtgggaggacgaggagtctgaagtggaggaaggcacagatcggagctatatacgagatggttaaagacaacgaagacaagatctgcaatgctctgtttcaagatttgggcaaacacagtactgaagcttttagagatgagcttggtgttgtcttgcgaacagctactgttgcaatcaactgtcttgataaatgggccgtccccaaacatagcaaacttcctctgttgttctacccagcaaaagggaaagtcatatcggaaccctatgggacggttcttgttctgtctagctggaattttcctatatctttgtctctggatccattgattggggcaatagcagcaggaaataccgtgcttctcaagtcatctgaactaagccctaacgcatctgccttccttgccaagacaattccagcttatctcgatactaaagccatcaaagttatcgaaggaggacctgatgtcgctactatcctcttgcagcatcaatgggacaagatcttcttcaccgggagtcccaagattggaaggatcataatggctgcagcagcacagcatctgactcctgtgacattggagcttggtggaaaatgtcccaccattgttgatcatcacaccatttcaaagaacatcaagtcggttgtcaagaggattgctggaggaaaatggggatcttgcaatggacaagcttgtatctctgtagattacgttcttatcgaaaagagtttcgcgcctactctgattgatatgttgaagcctacgataaagtctttctttggcgaaaatcctaaagaatctggatgtctctcaaggattgcaaacaagcaccacgttcagagactgtctcgtcttcttagcgatcctcgtgtccaagcttccatcgtctatggtggttctatagacgaagataagtatgttgagccaacgatcttgttggaccctcctcttgattctgagatcatgaatgaagagatctttggtccaattctcccgattatcacggtacgtgacatccaagaaagcatagggatcattaatacaaaaccgaagccacttgccatttatgcattcacaaatgacgagaaccttaaaactagaattttgtcagaaacatcctcaggaagtgttaccttcaatgacgtcatgatccagtatatgtgtgatgcgttaccttttggaggagtgggagaaagtggaatagggaggtatcacgggaaatactcatttgattgtttcagtcacgagaaagcaataatggaaggaagcttaggtatggatcttgaagctcgataccctccatggaacaacttcaagctcaccttcatcagactcgcatttcgtgaagcttacttcaagcttatcctccttatgcttggtcttaaaagataa

SEQ ID NO: 86976 - protein, 483 aa, Arabidopsis thaliana
  peptide (1)..(483): Ceres Seq. ID no. 12695979
  misc_feature (1)..(231): Pfam Name: Aldehyde dehydrogenase family Pfam Description: Aldehyde dehydrogenase family
  misc_feature (1)..(231): Homolog of NCBI NO: 15234364 NR Description: aldehyde dehydrogenase like protein; protein id: [Arabidopsis thaliana] >gi|7431493|pir||T04594 aldehyde
  misc_feature (329)..(483): Homolog of NCBI NO: 15234364 NR Description: aldehyde dehydrogenase like protein; protein id: [Arabidopsis thaliana] >gi|7431493|pir||T04594 aldehyde
  misc_feature (249)..(310): Homolog of NCBI NO: 15234364 NR Description: aldehyde dehydrogenase like protein; protein id: [Arabidopsis thaliana] >gi|7431493|pir||T04594 aldehyde
  misc_feature (6)..(483): Homolog of NCBI NO: 33317836 NR Description: aldehyde dehydrogenase [Oryza sativa (indica group)] >gi|38344982|emb|CAE02788.2| OSJNBa0011L07.12 [Oryza
  misc_feature (15)..(479): Homolog of NCBI NO: 4973431 NR Description: putative aldehyde dehydrogenase OS-ALDH [Oryza
  misc_feature (14)..(481): Homolog of NCBI NO: 15219358 NR Description: aldehyde dehydrogenase, putative; protein id: supported by cDNA: 1141., supported by cDNA: gi_18175878
  misc_feature (14)..(481): Homolog of NCBI NO: 21536879 NR Description: aldehyde dehydrogenase, putative [Arabidopsis
  misc_feature (14)..(483): Homolog of NCBI NO: 18418408 NR Description: putative aldehyde dehydrogenase; protein id: supported by cDNA: gi_15451105, supported by cDNA: gi_20148406 thaliana] >gi|15451106|gb|AAK96824.1| putative aldehyde
  misc_feature (14)..(483): Homolog of NCBI NO: 17065876 NR Description: aldehyde dehydrogenase [Arabidopsis thaliana]
  misc_feature (15)..(480): Homolog of NCBI NO: 17065918 NR Description: aldehyde dehydrogenase [Craterostigma
MEAMKETVEESLREMRETFASGRTRSLKWRKAQIGAIYEMVKDNEDKICNALFQDLGKHSTEAFRDELGVVLRTATVAINCLDKWAVPKHSKLPLLFYPAKGKVISEPYGTVLVLSSWNFPISLSLDPLIGAIAAGNTVLLKSSELSPNASAFLAKTIPAYLDTKAIKVIEGGPDVATILLQHQWDKIFFTGSPKIGRIIMAAAAQHLTPVTLELGGKCPTIVDHHTISKNIKSVVKRIAGGKWGSCNGQACISVDYVLIEKSFAPTLIDMLKPTIKSFFGENPKESGCLSRIANKHHVQRLSRLLSDPRVQASIVYGGSIDEDKYVEPTILLDPPLDSEIMNEEIFGPILPIITVRDIQESIGIINTKPKPLAIYAFTNDENLKTRILSETSSGSVTFNDVMIQYMCDALPFGGVGESGIGRYHGKYSFDCFSHEKAIMEGSLGMDLEARYPPWNNFKLTFIRLAFREAYFKLILLMLGLKR

SEQ ID NO: 86977 - protein, 480 aa, Arabidopsis thaliana
  peptide (1)..(480): Ceres Seq. ID no. 12695980
  misc_feature (1)..(228): Pfam Name: Aldehyde dehydrogenase family Pfam Description: Aldehyde dehydrogenase family
  misc_feature (1)..(228): Homolog of NCBI NO: 15234364 NR Description: aldehyde dehydrogenase like protein; protein id: [Arabidopsis thaliana] >gi|7431493|pir||T04594 aldehyde
  misc_feature (326)..(480): Homolog of NCBI NO: 15234364 NR Description: aldehyde dehydrogenase like protein; protein id: [Arabidopsis thaliana] >gi|7431493|pir||T04594 aldehyde
  misc_feature (246)..(307): Homolog of NCBI NO: 15234364 NR Description: aldehyde dehydrogenase like protein; protein id: [Arabidopsis thaliana] >gi|7431493|pir||T04594 aldehyde
  misc_feature (3)..(480): Homolog of NCBI NO: 33317836 NR Description: aldehyde dehydrogenase [Oryza sativa (indica group)] >gi|38344982|emb|CAE02788.2| OSJNBa0011L07.12 [Oryza
  misc_feature (12)..(476): Homolog of NCBI NO: 4973431 NR Description: putative aldehyde dehydrogenase OS-ALDH [Oryza
  misc_feature (11)..(478): Homolog of NCBI NO: 15219358 NR Description: aldehyde dehydrogenase, putative; protein id: supported by cDNA: 1141., supported by cDNA: gi_18175878
  misc_feature (11)..(478): Homolog of NCBI NO: 21536879 NR Description: aldehyde dehydrogenase, putative [Arabidopsis
  misc_feature (11)..(480): Homolog of NCBI NO: 18418408 NR Description: putative aldehyde dehydrogenase; protein id: supported by cDNA: gi_15451105, supported by cDNA: gi_20148406 thaliana] >gi|15451106|gb|AAK96824.1| putative aldehyde
  misc_feature (11)..(480): Homolog of NCBI NO: 17065876 NR Description: aldehyde dehydrogenase [Arabidopsis thaliana]
  misc_feature (12)..(477): Homolog of NCBI NO: 17065918 NR Description: aldehyde dehydrogenase [Craterostigma
MKETVEESLREMRETFASGRTRSLKWRKAQIGAIYEMVKDNEDKICNALFQDLGKHSTEAFRDELGVVLRTATVAINCLDKWAVPKHSKLPLLFYPAKGKVISEPYGTVLVLSSWNFPISLSLDPLIGAIAAGNTVLLKSSELSPNASAFLAKTIPAYLDTKAIKVIEGGPDVATILLQHQWDKIFFTGSPKIGRIIMAAAAQHLTPVTLELGGKCPTIVDHHTISKNIKSVVKRIAGGKWGSCNGQACISVDYVLIEKSFAPTLIDMLKPTIKSFFGENPKESGCLSRIANKHHVQRLSRLLSDPRVQASIVYGGSIDEDKYVEPTILLDPPLDSEIMNEEIFGPILPIITVRDIQESIGIINTKPKPLAIYAFTNDENLKTRILSETSSGSVTFNDVMIQYMCDALPFGGVGESGIGRYHGKYSFDCFSHEKAIMEGSLGMDLEARYPPWNNFKLTFIRLAFREAYFKLILLMLGLKR

SEQ ID NO: 86978 - protein, 469 aa, Arabidopsis thaliana
  peptide (1)..(469): Ceres Seq. ID no. 12695981
  misc_feature (1)..(217): Pfam Name: Aldehyde dehydrogenase family Pfam Description: Aldehyde dehydrogenase family
  misc_feature (1)..(217): Homolog of NCBI NO: 15234364 NR Description: aldehyde dehydrogenase like protein; protein id: [Arabidopsis thaliana] >gi|7431493|pir||T04594 aldehyde
  misc_feature (315)..(469): Homolog of NCBI NO: 15234364 NR Description: aldehyde dehydrogenase like protein; protein id: [Arabidopsis thaliana] >gi|7431493|pir||T04594 aldehyde
  misc_feature (235)..(296): Homolog of NCBI NO: 15234364 NR Description: aldehyde dehydrogenase like protein; protein id: [Arabidopsis thaliana] >gi|7431493|pir||T04594 aldehyde
  misc_feature (1)..(469): Homolog of NCBI NO: 33317836 NR Description: aldehyde dehydrogenase [Oryza sativa (indica group)] >gi|38344982|emb|CAE02788.2| OSJNBa0011L07.12 [Oryza
  misc_feature (1)..(465): Homolog of NCBI NO: 4973431 NR Description: putative aldehyde dehydrogenase OS-ALDH [Oryza
  misc_feature (1)..(467): Homolog of NCBI NO: 15219358 NR Description: aldehyde dehydrogenase, putative; protein id: supported by cDNA: 1141., supported by cDNA: gi_18175878
  misc_feature (1)..(467): Homolog of NCBI NO: 21536879 NR Description: aldehyde dehydrogenase, putative [Arabidopsis
  misc_feature (1)..(469): Homolog of NCBI NO: 18418408 NR Description: putative aldehyde dehydrogenase; protein id: supported by cDNA: gi_15451105, supported by cDNA: gi_20148406 thaliana] >gi|15451106|gb|AAK96824.1| putative aldehyde
  misc_feature (1)..(469): Homolog of NCBI NO: 17065876 NR Description: aldehyde dehydrogenase [Arabidopsis thaliana]
  misc_feature (1)..(466): Homolog of NCBI NO: 17065918 NR Description: aldehyde dehydrogenase [Craterostigma
MRETFASGRTRSLKWRKAQIGAIYEMVKDNEDKICNALFQDLGKHSTEAFRDELGVVLRTATVAINCLDKWAVPKHSKLPLLFYPAKGKVISEPYGTVLVLSSWNFPISLSLDPLIGAIAAGNTVLLKSSELSPNASAFLAKTIPAYLDTKAIKVIEGGPDVATILLQHQWDKIFFTGSPKIGRIIMAAAAQHLTPVTLELGGKCPTIVDHHTISKNIKSVVKRIAGGKWGSCNGQACISVDYVLIEKSFAPTLIDMLKPTIKSFFGENPKESGCLSRIANKHHVQRLSRLLSDPRVQASIVYGGSIDEDKYVEPTILLDPPLDSEIMNEEIFGPILPIITVRDIQESIGIINTKPKPLAIYAFTNDENLKTRILSETSSGSVTFNDVMIQYMCDALPFGGVGESGIGRYHGKYSFDCFSHEKAIMEGSLGMDLEARYPPWNNFKLTFIRLAFREAYFKLILLMLGLKR

SEQ ID NO: 86979 - DNA, 1326 bp, Arabidopsis thaliana
  misc_feature (1)..(1326): Ceres Seq. ID no. 12695988
  misc_feature: MA Experiment ID: 20000440 Result: Up-regulated in Transcription
  misc_feature: MA Experiment 20000440 PARAMETER Experiment Name: At_Closed-Flower__Sub_P Parameter: Tissue Value: Closed Flower vs. Whole Plant
atgaggatgaacaaaattttacttgtttttgtgtttctaagcattgccactgtaatcaatagtggaacaacaagcaactttgtccgcacagctcaaccatcaactgagatgtctctcgaaacttttccatctccggctggtcataatgctccggaacaggttcatatcgtccaaggagattacaatggacgtggtataatcatatcgtgggtgacccccttaaacctagctggttcaaacgtggttacttattggaaggcagttgatggtgatgtgaaaccgaaaaagaagagaggtcatgcctctacctcgtcttaccgattttatgactatacttctggttttcttcatcacgccacaattaaaggactcgaggttggacctgacgttccatacactttcggcattattggtgatcttggacaaactttagcttctaacgagacattatatcattacatgtcaaaccctaaaggccaagctgttctcttccctggagacttatcttacgcagatgaccatccaaaccatgatcagagaaagtgggattcgtggggaagattcgtggagccttgtgctgcttaccaaaccttcatctatgctgccgggaatcacgaaattgattttgtcccaaacattggggagcctcatgccttcaagccctacattcaccgttatcataacgcctacaaggcctcgaagagcatatctcctctttggtactctattagacgtgcatctgctcacatcatcgtcctctcctcttattctgcctacggaaaatacacacctcaatacgtgtggctcgagcaagagttgaagaaggtgaacagagaagagactccatggcttattgtcatggttcactcgccgtggtacaacagtaataactaccattacatggaaggtgagagcatgagagcaatgtttgagtcgtggttcgttaacagcaaggttgatttggttttgtctggtcacgtccattcctatgagagatccgaacgtgtctccaatattaaatacaacatcaccaatggcttgagctatcctgtgaaagacccttctgctccaatctacatcactatcggagatggaggaaacattgaaggaatcgcaaatagttttactgatccgcaaccgagctattcggcgtatagagaagctagttttggtcatgcagttttggagatttacaatagaactcacgcatactacacatggcataggaaccaagacaatgaacctgttgccgctgattcaattatgttgcataacagatatttctttccagtagaggaattagaatctggcaacactagggcctaa

SEQ ID NO: 86980 - protein, 441 aa, Arabidopsis thaliana
  peptide (1)..(441): Ceres Seq. ID no. 12695989
  misc_feature (132)..(330): Pfam Name: Calcineurin-like phosphoesterase Pfam Description: Calcineurin-like phosphoesterase
  misc_feature (125)..(441): Homolog of NCBI NO: 15234369 NR Description: purple acid phosphatase like protein; protein id: [Arabidopsis thaliana] >gi|7435104|pir||T04599 acid phosphatase
  misc_feature (1)..(142): Homolog of NCBI NO: 15234369 NR Description: purple acid phosphatase like protein; protein id: [Arabidopsis thaliana] >gi|7435104|pir||T04599 acid phosphatase
  misc_feature (125)..(441): Homolog of NCBI NO: 15223530 NR Description: purple acid phosphatase, putative; protein id: [Arabidopsis thaliana] >gi|25752265|pir||F96605 acid phosphatase
  misc_feature (4)..(135): Homolog of NCBI NO: 15223530 NR Description: purple acid phosphatase, putative; protein id: [Arabidopsis thaliana] >gi|25752265|pir||F96605 acid phosphatase
  misc_feature (1)..(433): Homolog of NCBI NO: 15224112 NR Description: putative purple acid phosphatase precursor; id: At2g18130.1, supported by cDNA: gi_20257484 [Arabidopsis
MRMNKILLVFVFLSIATVINSGTTSNFVRTAQPSTEMSLETFPSPAGHNAPEQVHIVQGDYNGRGIIISWVTPLNLAGSNVVTYWKAVDGDVKPKKKRGHASTSSYRFYDYTSGFLHHATIKGLEVGPDVPYTFGIIGDLGQTLASNETLYHYMSNPKGQAVLFPGDLSYADDHPNHDQRKWDSWGRFVEPCAAYQTFIYAAGNHEIDFVPNIGEPHAFKPYIHRYHNAYKASKSISPLWYSIRRASAHIIVLSSYSAYGKYTPQYVWLEQELKKVNREETPWLIVMVHSPWYNSNNYHYMEGESMRAMFESWFVNSKVDLVLSGHVHSYERSERVSNIKYNITNGLSYPVKDPSAPIYITIGDGGNIEGIANSFTDPQPSYSAYREASFGHAVLEIYNRTHAYYTWHRNQDNEPVAADSIMLHNRYFFPVEELESGNTRA

SEQ ID NO: 86981 - protein, 439 aa, Arabidopsis thaliana
  peptide (1)..(439): Ceres Seq. ID no. 12695990
  misc_feature (130)..(328): Pfam Name: Calcineurin-like phosphoesterase Pfam Description: Calcineurin-like phosphoesterase
  misc_feature (123)..(439): Homolog of NCBI NO: 15234369 NR Description: purple acid phosphatase like protein; protein id: [Arabidopsis thaliana] >gi|7435104|pir||T04599 acid phosphatase
  misc_feature (1)..(140): Homolog of NCBI NO: 15234369 NR Description: purple acid phosphatase like protein; protein id: [Arabidopsis thaliana] >gi|7435104|pir||T04599 acid phosphatase
  misc_feature (123)..(439): Homolog of NCBI NO: 15223530 NR Description: purple acid phosphatase, putative; protein id: [Arabidopsis thaliana] >gi|25752265|pir||F96605 acid phosphatase
  misc_feature (2)..(133): Homolog of NCBI NO: 15223530 NR Description: purple acid phosphatase, putative; protein id: [Arabidopsis thaliana] >gi|25752265|pir||F96605 acid phosphatase
  misc_feature (1)..(431): Homolog of NCBI NO: 15224112 NR Description: putative purple acid phosphatase precursor; id: At2g18130.1, supported by cDNA: gi_20257484 [Arabidopsis
MNKILLVFVFLSIATVINSGTTSNFVRTAQPSTEMSLETFPSPAGHNAPEQVHIVQGDYNGRGIIISWVTPLNLAGSNVVTYWKAVDGDVKPKKKRGHASTSSYRFYDYTSGFLHHATIKGLEVGPDVPYTFGIIGDLGQTLASNETLYHYMSNPKGQAVLFPGDLSYADDHPNHDQRKWDSWGRFVEPCAAYQTFIYAAGNHEIDFVPNIGEPHAFKPYIHRYHNAYKASKSISPLWYSIRRASAHIIVLSSYSAYGKYTPQYVWLEQELKKVNREETPWLIVMVHSPWYNSNNYHYMEGESMRAMFESWFVNSKVDLVLSGHVHSYERSERVSNIKYNITNGLSYPVKDPSAPIYITIGDGGNIEGIANSFTDPQPSYSAYREASFGHAVLEIYNRTHAYYTWHRNQDNEPVAADSIMLHNRYFFPVEELESGNTRA

SEQ ID NO: 86982 - protein, 405 aa, Arabidopsis thaliana
  peptide (1)..(405): Ceres Seq. ID no. 12695991
  misc_feature (96)..(294): Pfam Name: Calcineurin-like phosphoesterase Pfam Description: Calcineurin-like phosphoesterase
  misc_feature (89)..(405): Homolog of NCBI NO: 15234369 NR Description: purple acid phosphatase like protein; protein id: [Arabidopsis thaliana] >gi|7435104|pir||T04599 acid phosphatase
  misc_feature (1)..(106): Homolog of NCBI NO: 15234369 NR Description: purple acid phosphatase like protein; protein id: [Arabidopsis thaliana] >gi|7435104|pir||T04599 acid phosphatase
  misc_feature (89)..(405): Homolog of NCBI NO: 15223530 NR Description: purple acid phosphatase, putative; protein id: [Arabidopsis thaliana] >gi|25752265|pir||F96605 acid phosphatase
  misc_feature (1)..(99): Homolog of NCBI NO: 15223530 NR Description: purple acid phosphatase, putative; protein id: [Arabidopsis thaliana] >gi|25752265|pir||F96605 acid phosphatase
  misc_feature (1)..(397): Homolog of NCBI NO: 15224112 NR Description: putative purple acid phosphatase precursor; id: At2g18130.1, supported by cDNA: gi_20257484 [Arabidopsis
MSLETFPSPAGHNAPEQVHIVQGDYNGRGIIISWVTPLNLAGSNVVTYWKAVDGDVKPKKKRGHASTSSYRFYDYTSGFLHHATIKGLEVGPDVPYTFGIIGDLGQTLASNETLYHYMSNPKGQAVLFPGDLSYADDHPNHDQRKWDSWGRFVEPCAAYQTFIYAAGNHEIDFVPNIGEPHAFKPYIHRYHNAYKASKSISPLWYSIRRASAHIIVLSSYSAYGKYTPQYVWLEQELKKVNREETPWLIVMVHSPWYNSNNYHYMEGESMRAMFESWFVNSKVDLVLSGHVHSYERSERVSNIKYNITNGLSYPVKDPSAPIYITIGDGGNIEGIANSFTDPQPSYSAYREASFGHAVLEIYNRTHAYYTWHRNQDNEPVAADSIMLHNRYFFPVEELESGNTRA

SEQ ID NO: 86983 - DNA, 546 bp, Arabidopsis thaliana
  misc_feature (1)..(546): Ceres Seq. ID no. 12696036
  misc_feature: MA Experiment ID: 20000227 Result: Up-regulated in Transcription
  misc_feature: MA Experiment 20000227 PARAMETER Experiment Name: At_Root-Tips-vs-Tops_P Parameter: Tissue Value: Root Tips vs. Root Tops
  misc_feature: MA Experiment ID: 20000451 Result: Up-regulated in Transcription
  misc_feature: MA Experiment 20000451 PARAMETER Experiment Name: At_CS6879_Shoots-Roots_P Parameter: Age (day) Value: 14
  misc_feature: MA Experiment 20000451 PARAMETER Experiment Name: At_CS6879_Shoots-Roots_P Parameter: Organism Value: A. thaliana
  misc_feature: MA Experiment 20000451 PARAMETER Experiment Name: At_CS6879_Shoots-Roots_P Parameter: Plant Line Value: CS6879 vs. WS
  misc_feature: MA Experiment 20000451 PARAMETER Experiment Name: At_CS6879_Shoots-Roots_P Parameter: Tissue Value: Roots
  misc_feature: MA Experiment ID: 20000573 Result: Down-regulated in Transcription
  misc_feature: MA Experiment 20000573 PARAMETER Experiment Name: At_100uM_ABA_Mutants__P Parameter: Organism Value: A. thaliana
  misc_feature: MA Experiment 20000573 PARAMETER Experiment Name: At_100uM_ABA_Mutants__P Parameter: Plant Line Value: CS22 vs. Ler wt
  misc_feature: MA Experiment 20000573 PARAMETER Experiment Name: At_100uM_ABA_Mutants__P Parameter: Timepoint (hr) Value: N/A
  misc_feature: MA Experiment 20000573 PARAMETER Experiment Name: At_100uM_ABA_Mutants__P Parameter: Tissue Value: Whole Plant
  misc_feature: MA Experiment 20000573 PARAMETER Experiment Name: At_100uM_ABA_Mutants__P Parameter: Treatment Value: None
  misc_feature: MA Experiment ID: 20000794 Result: Down-regulated in Transcription
  misc_feature: MA Experiment 20000794 PARAMETER Experiment Name: At_Petals_P Parameter: Age (day) Value: 23-25 days
  misc_feature: MA Experiment 20000794 PARAMETER Experiment Name: At_Petals_P Parameter: Plant Line Value: WS
  misc_feature: MA Experiment 20000794 PARAMETER Experiment Name: At_Petals_P Parameter: Tissue Value: Petals vs. Whole plant
atgaaggaggacgatgcattgccgacgacgacgacgactggtacggcgacgggaacagctatggcgaattcgaagaaggaaagctctgactcggtcttgtttggaagaggtcgatataagttctgggcgtttgctgcgattttgcttttggctttttggtcgatgtttactggcaccgtcactctccggttatctaccgggaatctgaaccggttatcggaagatctagggattccgaactacgataatctcgacgttctggaaatggaggagagagagaaagtggtgaagcatatgtgggatgtgtatactaatagtcgtcggatcaaattgcctagattttggcaagaggcttttgttgctgcttatgaagaactcactagtgatgtgcctggggttagagaagctgctattggtgaaatcgccaagatgtcggcgcggtcgatcactcttgatccacctccttctagatcaagtttgatgagtgcaagggatttgggaagaaacttgaagagaattctacacaagccagcagctagtagctga

SEQ ID NO: 86984 - protein, 181 aa, Arabidopsis thaliana
  peptide (1)..(181): Ceres Seq. ID no. 12696037
  misc_feature (1)..(158): Homolog of NCBI NO: 15234477 NR Description: hypothetical protein; protein id: At4g36660.1
  misc_feature (1)..(171): Homolog of NCBI NO: 18424975 NR Description: putative protein; protein id: At5g65650.1, by cDNA: 118150. [Arabidopsis thaliana] unknown [Arabidopsis thaliana] >gi|27754375|gb|AAO22636.1|
  misc_feature (1)..(160): Homolog of NCBI NO: 9858772 NR Description: BAC19.4 [Lycopersicon esculentum]
  misc_feature (34)..(172): Homolog of NCBI NO: 28209490 NR Description: unknown protein [Oryza sativa (japonica
  misc_feature (39)..(145): Homolog of NCBI NO: 15222008 NR Description: hypothetical protein; protein id: At1g19380.1 thaliana] >gi|8778415|gb|AAF79423.1|AC025808_5 F18O14.10
MKEDDALPTTTTTGTATGTAMANSKKESSDSVLFGRGRYKFWAFAAILLLAFWSMFTGTVTLRLSTGNLNRLSEDLGIPNYDNLDVLEMEEREKVVKHMWDVYTNSRRIKLPRFWQEAFVAAYEELTSDVPGVREAAIGEIAKMSARSITLDPPPSRSSLMSARDLGRNLKRILHKPAASS

SEQ ID NO: 86985 - protein, 161 aa, Arabidopsis thaliana
  peptide (1)..(161): Ceres Seq. ID no. 12696038
  misc_feature (1)..(138): Homolog of NCBI NO: 15234477 NR Description: hypothetical protein; protein id: At4g36660.1
  misc_feature (1)..(151): Homolog of NCBI NO: 18424975 NR Description: putative protein; protein id: At5g65650.1, by cDNA: 118150. [Arabidopsis thaliana] unknown [Arabidopsis thaliana] >gi|27754375|gb|AAO22636.1|
  misc_feature (1)..(140): Homolog of NCBI NO: 9858772 NR Description: BAC19.4 [Lycopersicon esculentum]
  misc_feature (14)..(152): Homolog of NCBI NO: 28209490 NR Description: unknown protein [Oryza sativa (japonica
  misc_feature (19)..(125): Homolog of NCBI NO: 15222008 NR Description: hypothetical protein; protein id: At1g19380.1 thaliana] >gi|8778415|gb|AAF79423.1|AC025808_5 F18O14.10
MANSKKESSDSVLFGRGRYKFWAFAAILLLAFWSMFTGTVTLRLSTGNLNRLSEDLGIPNYDNLDVLEMEEREKVVKHMWDVYTNSRRIKLPRFWQEAFVAAYEELTSDVPGVREAAIGEIAKMSARSITLDPPPSRSSLMSARDLGRNLKRILHKPAASS

SEQ ID NO: 86986 - protein, 127 aa, Arabidopsis thaliana
  peptide (1)..(127): Ceres Seq. ID no. 12696039
  misc_feature (1)..(104): Homolog of NCBI NO: 15234477 NR Description: hypothetical protein; protein id: At4g36660.1
  misc_feature (1)..(117): Homolog of NCBI NO: 18424975 NR Description: putative protein; protein id: At5g65650.1, by cDNA: 118150. [Arabidopsis thaliana] unknown [Arabidopsis thaliana] >gi|27754375|gb|AAO22636.1|
  misc_feature (1)..(106): Homolog of NCBI NO: 9858772 NR Description: BAC19.4 [Lycopersicon esculentum]
  misc_feature (1)..(118): Homolog of NCBI NO: 28209490 NR Description: unknown protein [Oryza sativa (japonica
  misc_feature (1)..(91): Homolog of NCBI NO: 15222008 NR Description: hypothetical protein; protein id: At1g19380.1 thaliana] >gi|8778415|gb|AAF79423.1|AC025808_5 F18O14.10
MFTGTVTLRLSTGNLNRLSEDLGIPNYDNLDVLEMEEREKVVKHMWDVYTNSRRIKLPRFWQEAFVAAYEELTSDVPGVREAAIGEIAKMSARSITLDPPPSRSSLMSARDLGRNLKRILHKPAASS

SEQ ID NO: 86987 - DNA, 1298 bp, Arabidopsis thaliana
  misc_feature (1)..(1298): Ceres Seq. ID no. 12696066
  misc_feature: MA Experiment ID: 20000171 Result: Down-regulated in Transcription
  misc_feature: MA Experiment 20000171 PARAMETER Experiment Name: At_42deg_Heat_P Parameter: Age (day) Value: 14
  misc_feature: MA Experiment 20000171 PARAMETER Experiment Name: At_42deg_Heat_P Parameter: Organism Value: A. thaliana
  misc_feature: MA Experiment 20000171 PARAMETER Experiment Name: At_42deg_Heat_P Parameter: Plant Line Value: WS
  misc_feature: MA Experiment 20000171 PARAMETER Experiment Name: At_42deg_Heat_P Parameter: Temperature (deg C) Value: 42 vs. 22
  misc_feature: MA Experiment 20000171 PARAMETER Experiment Name: At_42deg_Heat_P Parameter: Timepoint (hr) Value: 1
  misc_feature: MA Experiment 20000171 PARAMETER Experiment Name: At_42deg_Heat_P Parameter: Tissue Value: Aerial
  misc_feature: MA Experiment ID: 20000173 Result: Down-regulated in Transcription
  misc_feature: MA Experiment 20000173 PARAMETER Experiment Name: At_42deg_Heat_P Parameter: Age (day) Value: 14
  misc_feature: MA Experiment 20000173 PARAMETER Experiment Name: At_42deg_Heat_P Parameter: Organism Value: A. thaliana
  misc_feature: MA Experiment 20000173 PARAMETER Experiment Name: At_42deg_Heat_P Parameter: Plant Line Value: WS
  misc_feature: MA Experiment 20000173 PARAMETER Experiment Name: At_42deg_Heat_P Parameter: Temperature (deg C) Value: 42 vs. 22
  misc_feature: MA Experiment 20000173 PARAMETER Experiment Name: At_42deg_Heat_P Parameter: Timepoint (hr) Value: 6
  misc_feature: MA Experiment 20000173 PARAMETER Experiment Name: At_42deg_Heat_P Parameter: Tissue Value: Aerial
  misc_feature: MA Experiment ID: 20000184 Result: Up-regulated in Transcription
  misc_feature: MA Experiment 20000184 PARAMETER Experiment Name: At_Shoots__P Parameter: Age (day) Value: 7
  misc_feature: MA Experiment 20000184 PARAMETER Experiment Name: At_Shoots__P Parameter: Tissue Value: Shoots vs. Whole Plant
  misc_feature: MA Experiment ID: 20000185 Result: Down-regulated in Transcription
  misc_feature: MA Experiment 20000185 PARAMETER Experiment Name: At_Roots__P Parameter: Age (day) Value: 7 vs. 21
  misc_feature: MA Experiment 20000185 PARAMETER Experiment Name: At_Roots__P Parameter: Organism Value: A. thaliana
  misc_feature: MA Experiment 20000185 PARAMETER Experiment Name: At_Roots__P Parameter: Tissue Value: Roots vs. Whole Plant
  misc_feature: MA Experiment ID: 20000264 Result: Up-regulated in Transcription
  misc_feature: MA Experiment 20000264 PARAMETER Experiment Name: At_Open_Flower_P Parameter: Age (day) Value: 21
  misc_feature: MA Experiment 20000264 PARAMETER Experiment Name: At_Open_Flower_P Parameter: Plant Line Value: WS
  misc_feature: MA Experiment 20000264 PARAMETER Experiment Name: At_Open_Flower_P Parameter: Tissue Value: Open Flower vs. Whole Plant
  misc_feature: MA Experiment ID: 20000265 Result: Up-regulated in Transcription
  misc_feature: MA Experiment 20000265 PARAMETER Experiment Name: At_Open_Flower_P Parameter: Age (day) Value: 21
  misc_feature: MA Experiment 20000265 PARAMETER Experiment Name: At_Open_Flower_P Parameter: Plant Line Value: WS
  misc_feature: MA Experiment 20000265 PARAMETER Experiment Name: At_Open_Flower_P Parameter: Tissue Value: Closed Flower vs. Whole Plant
  misc_feature: MA Experiment ID: 20000286 Result: Up-regulated in Transcription
  misc_feature: MA Experiment 20000286 PARAMETER Experiment Name: At_Open_Flower_P Parameter: Age (day) Value: 21
  misc_feature: MA Experiment 20000286 PARAMETER Experiment Name: At_Open_Flower_P Parameter: Plant Line Value: WS
  misc_feature: MA Experiment 20000286 PARAMETER Experiment Name: At_Open_Flower_P Parameter: Tissue Value: Half Open vs. Whole Plant
  misc_feature: MA Experiment ID: 20000438 Result: Up-regulated in Transcription
  misc_feature: MA Experiment 20000438 PARAMETER Experiment Name: At_Shoots__P Parameter: Age (day) Value: 14
  misc_feature: MA Experiment 20000438 PARAMETER Experiment Name: At_Shoots__P Parameter: Tissue Value: Shoots vs. Whole Plant
  misc_feature: MA Experiment ID: 20000439 Result: Down-regulated in Transcription
  misc_feature: MA Experiment 20000439 PARAMETER Experiment Name: At_Roots__P Parameter: Age (day) Value: 14 vs. 21
  misc_feature: MA Experiment 20000439 PARAMETER Experiment Name: At_Roots__P Parameter: Organism Value: A. thaliana
  misc_feature: MA Experiment 20000439 PARAMETER Experiment Name: At_Roots__P Parameter: Tissue Value: Roots vs. Whole Plant
  misc_feature: MA Experiment ID: 20000794 Result: Up-regulated in Transcription
  misc_feature: MA Experiment 20000794 PARAMETER Experiment Name: At_Petals_P Parameter: Age (day) Value: 23-25 days
  misc_feature: MA Experiment 20000794 PARAMETER Experiment Name: At_Petals_P Parameter: Plant Line Value: WS
  misc_feature: MA Experiment 20000794 PARAMETER Experiment Name: At_Petals_P Parameter: Tissue Value: Petals vs. Whole plant
  misc_feature: MA Experiment ID: 20001450 Result: Up-regulated in Transcription
  misc_feature: MA Experiment 20001450 PARAMETER Experiment Name: At_Far-red-induction_P Parameter: Age (day) Value: 7
  misc_feature: MA Experiment 20001450 PARAMETER Experiment Name: At_Far-red-induction_P Parameter: Light Value: Far-red vs. White
  misc_feature: MA Experiment 20001450 PARAMETER Experiment Name: At_Far-red-induction_P Parameter: Organism Value: A. thaliana
  misc_feature: MA Experiment 20001450 PARAMETER Experiment Name: At_Far-red-induction_P Parameter: Plant Line Value: Columbia
  misc_feature: MA Experiment 20001450 PARAMETER Experiment Name: At_Far-red-induction_P Parameter: Timepoint (hr) Value: 8
  misc_feature: MA Experiment 20001450 PARAMETER Experiment Name: At_Far-red-induction_P Parameter: Tissue Value: Whole Plant
cctcacccatcaagtcccaattcccaacactgtcactcaaaaagaatcttcaaacaatgaatctcaacgtcgtcgttttactcctactccttctaatctcatccgccacgtgttgtccgccgtcagaccgccgtgcacttctagctttccgatcagctcttcacgagccttacctcggcattttcaactcatggacaggccaagactgttgccacaactggtacggtattagctgcgactcgctcactcaccgagtcgccgacataaatctccgcggcgagtcagaagatccaatcttcgaacgagctcaccgaaccggttacatgaccggacacatctccgcctcgatatgtgagctcactcgtctctccgccattacaatcgccgattggaaaggtatctccggcgaaatccctaaatgtatcactcgtcttccttttctccgtacactcgacttaatcggaaaccaaatctccggtgggattccatacgacatcggaagattaaaccggttagctgttttaaacgtagccgataaccgaatctccggttcaattccaaaatcattaaccaatctctctagcttaatgcatttagatctccgtaacaacttaatctccggtgtaatcccgtcggacgtcggaagattaaaaatgctcagccgtgcgttattatccggtaaccgaataaccggtcggatcccagaatcattaaccaatatctaccggttagctgacgtggatctctccggtaaccaactctacggtacaatcccaccgtctctaggacgtatgtcggtactagccacacttaacctcgacggaaacaaaatctccggcgagatacctcaaactctgatgacgtcgtcggtgatgaatctgaatttgagccggaacttgctacaagggaagatacctgaagggtttggaccaaggtcttacttcacagttcttgatttgtcgtataataatctgaaaggaccaataccgagatcgatctcaggtgcgtcgtttattggtcatttggatcttagccataaccatctctgtgggaggattccggtaggttcaccgtttgatcatcttgaagcggcgtcgtttatgtttaacgactgtctttgtggtaaacctttaagagcttgcttgaaaaattgatttttatatgtaatttgagttttttcattagagacattattatatttatggttatgcattttataaaaaaaagatttaaaattgtatgctacgtttagttgaattatgggatgattaacaaaatatataaacttccagtttcat

SEQ ID NO: 86988 - protein, 383 aa, Arabidopsis thaliana; identical to SEQ ID NO: 39969
  peptide (1)..(383): Ceres Seq. ID no. 12696067
  misc_feature (146)..(169): Pfam Name: Leucine Rich Repeat Pfam Description: Leucine Rich Repeat
  misc_feature (19)..(383): Homolog of NCBI NO: 15232373 NR Description: disease resistance protein family (LRR); protein At3g20820.1, supported by cDNA: gi_17380931 [Arabidopsis
  misc_feature (10)..(382): Homolog of NCBI NO: 21593689 NR Description: leucine rich repeat protein, putative
  misc_feature (10)..(382): Homolog of NCBI NO: 15239943 NR Description: leucine rich repeat protein family; protein id: supported by cDNA: 41409., supported by cDNA: gi_14532721
  misc_feature (61)..(380): Homolog of NCBI NO: 25004882 NR Description: polygalacturonase inhibitor-like protein [Cicer
  misc_feature (10)..(382): Homolog of NCBI NO: 14532722 NR Description: unknown protein [Arabidopsis thaliana]
  misc_feature (24)..(380): Homolog of NCBI NO: 38566726 NR Description: leucine rich repeat protein [Cicer arietinum]
  misc_feature (12)..(377): Homolog of NCBI NO: 15230539 NR Description: DNA-damage-repair/toleration protein, putative protein id: At3g12610.1 [Arabidopsis thaliana]
  misc_feature (40)..(373): Homolog of NCBI NO: 421844 NR Description: DRT100 protein precursor - Arabidopsis thaliana
  misc_feature (24)..(346): Homolog of NCBI NO: 15225296 NR Description: disease resistance protien-related (LRR); protein At2g26380.1 [Arabidopsis thaliana] >gi|7487889|pir||T00971
  misc_feature (5)..(353): Homolog of NCBI NO: 25518158 NR Description: Hypothetical 55.6 kDa protein - Arabidopsis >gi|10998936|gb|AAG26075.1|AC069299_1 hypothetical protein

SEQ ID NO: 86989 - protein, 365 aa, Arabidopsis thaliana; identical to SEQ ID NO: 39970
  peptide (1)..(365): Ceres Seq. ID no. 12696068
  misc_feature (128)..(151): Pfam Name: Leucine Rich Repeat Pfam Description: Leucine Rich Repeat
  misc_feature (1)..(365): Homolog of NCBI NO: 15232373 NR Description: disease resistance protein family (LRR); protein At3g20820.1, supported by cDNA: gi_17380931 [Arabidopsis
  misc_feature (1)..(364): Homolog of NCBI NO: 21593689 NR Description: leucine rich repeat protein, putative
  misc_feature (1)..(364): Homolog of NCBI NO: 15239943 NR Description: leucine rich repeat protein family; protein id: supported by cDNA: 41409., supported by cDNA: gi_14532721
  misc_feature (43)..(362): Homolog of NCBI NO: 25004882 NR Description: polygalacturonase inhibitor-like protein [Cicer
  misc_feature (1)..(364): Homolog of NCBI NO: 14532722 NR Description: unknown protein [Arabidopsis thaliana]
  misc_feature (6)..(362): Homolog of NCBI NO: 38566726 NR Description: leucine rich repeat protein [Cicer arietinum]
  misc_feature (1)..(359): Homolog of NCBI NO: 15230539 NR Description: DNA-damage-repair/toleration protein, putative protein id: At3g12610.1 [Arabidopsis thaliana]
  misc_feature (22)..(355): Homolog of NCBI NO: 421844 NR Description: DRT100 protein precursor - Arabidopsis thaliana
  misc_feature (6)..(328): Homolog of NCBI NO: 15225296 NR Description: disease resistance protien-related (LRR); protein At2g26380.1 [Arabidopsis thaliana] >gi|7487889|pir||T00971
  misc_feature (1)..(335): Homolog of NCBI NO: 25518158 NR Description: Hypothetical 55.6 kDa protein - Arabidopsis >gi|10998936|gb|AAG26075.1|AC069299_1 hypothetical protein

SEQ ID NO: 86990 - protein, 276 aa, Arabidopsis thaliana; identical to SEQ ID NO: 39971
  peptide (1)..(276): Ceres Seq. ID no. 12696069
  misc_feature (39)..(62): Pfam Name: Leucine Rich Repeat Pfam Description: Leucine Rich Repeat
  misc_feature (1)..(276): Homolog of NCBI NO: 15232373 NR Description: disease resistance protein family (LRR); protein At3g20820.1, supported by cDNA: gi_17380931 [Arabidopsis
  misc_feature (1)..(275): Homolog of NCBI NO: 21593689 NR Description: leucine rich repeat protein, putative
  misc_feature (1)..(275): Homolog of NCBI NO: 15239943 NR Description: leucine rich repeat protein family; protein id: supported by cDNA: 41409., supported by cDNA: gi_14532721
  misc_feature (1)..(273): Homolog of NCBI NO: 25004882 NR Description: polygalacturonase inhibitor-like protein [Cicer
  misc_feature (1)..(275): Homolog of NCBI NO: 14532722 NR Description: unknown protein [Arabidopsis thaliana]
  misc_feature (1)..(273): Homolog of NCBI NO: 38566726 NR Description: leucine rich repeat protein [Cicer arietinum]
  misc_feature (1)..(270): Homolog of NCBI NO: 15230539 NR Description: DNA-damage-repair/toleration protein, putative protein id: At3g12610.1 [Arabidopsis thaliana]
  misc_feature (1)..(266): Homolog of NCBI NO: 421844 NR Description: DRT100 protein precursor - Arabidopsis thaliana
  misc_feature (1)..(239): Homolog of NCBI NO: 15225296 NR Description: disease resistance protien-related (LRR); protein At2g26380.1 [Arabidopsis thaliana] >gi|7487889|pir||T00971
  misc_feature (1)..(246): Homolog of NCBI NO: 25518158 NR Description: Hypothetical 55.6 kDa protein - Arabidopsis >gi|10998936|gb|AAG26075.1|AC069299_1 hypothetical protein

SEQ ID NO: 86991 - DNA, 1920 bp, Arabidopsis thaliana
  misc_feature (1)..(1920): Ceres Seq. ID no. 12696098
  misc_feature: MA Experiment ID: 20000171 Result: Up-regulated in Transcription
  misc_feature: MA Experiment 20000171 PARAMETER Experiment Name: At_42deg_Heat_P Parameter: Age (day) Value: 14
  misc_feature: MA Experiment 20000171 PARAMETER Experiment Name: At_42deg_Heat_P Parameter: Organism Value: A. thaliana
  misc_feature: MA Experiment 20000171 PARAMETER Experiment Name: At_42deg_Heat_P Parameter: Plant Line Value: WS
  misc_feature: MA Experiment 20000171 PARAMETER Experiment Name: At_42deg_Heat_P Parameter: Temperature (deg C) Value: 42 vs. 22
  misc_feature: MA Experiment 20000171 PARAMETER Experiment Name: At_42deg_Heat_P Parameter: Timepoint (hr) Value: 1
  misc_feature: MA Experiment 20000171 PARAMETER Experiment Name: At_42deg_Heat_P Parameter: Tissue Value: Aerial
  misc_feature: MA Experiment ID: 20000173 Result: Up-regulated in Transcription
  misc_feature: MA Experiment 20000173 PARAMETER Experiment Name: At_42deg_Heat_P Parameter: Age (day) Value: 14
  misc_feature: MA Experiment 20000173 PARAMETER Experiment Name: At_42deg_Heat_P Parameter: Organism Value: A. thaliana
  misc_feature: MA Experiment 20000173 PARAMETER Experiment Name: At_42deg_Heat_P Parameter: Plant Line Value: WS
  misc_feature: MA Experiment 20000173 PARAMETER Experiment Name: At_42deg_Heat_P Parameter: Temperature (deg C) Value: 42 vs. 22
  misc_feature: MA Experiment 20000173 PARAMETER Experiment Name: At_42deg_Heat_P Parameter: Timepoint (hr) Value: 6
  misc_feature: MA Experiment 20000173 PARAMETER Experiment Name: At_42deg_Heat_P Parameter: Tissue Value: Aerial
  misc_feature: MA Experiment ID: 20000265 Result: Up-regulated in Transcription
  misc_feature: MA Experiment 20000265 PARAMETER Experiment Name: At_Open_Flower_P Parameter: Age (day) Value: 21
  misc_feature: MA Experiment 20000265 PARAMETER Experiment Name: At_Open_Flower_P Parameter: Plant Line Value: WS
  misc_feature: MA Experiment 20000265 PARAMETER Experiment Name: At_Open_Flower_P Parameter: Tissue Value: Closed Flower vs. Whole Plant
  misc_feature: MA Experiment ID: 20000286 Result: Up-regulated in Transcription
  misc_feature: MA Experiment 20000286 PARAMETER Experiment Name: At_Open_Flower_P Parameter: Age (day) Value: 21
  misc_feature: MA Experiment 20000286 PARAMETER Experiment Name: At_Open_Flower_P Parameter: Plant Line Value: WS
  misc_feature: MA Experiment 20000286 PARAMETER Experiment Name: At_Open_Flower_P Parameter: Tissue Value: Half Open vs. Whole Plant
atggcagcaatgatcacctttgactttcaaaacagcttcatcttcatcctcttttttctcttctctctcctttgttactctctcttcttcaggaaaccaaagggctcacgagctggccgtgatcttcctccgagccctccttcttttcctgtaattggtcatcttcaccttcttctctctgctcttgttcacaagtcttttcaaaacatctcctctaagtatggacctcttctccatctccgcgtcttccacattcccatagtcctcgcctcctcggcctcagtggcctacgagatcttcaaggcccaagatgtgaatgtctcctctcgcggtcacgctccagtcggggagtctctctggtttggatcgtctagcttcttcttcgctccctatggagattactttaaatttatgaggaagctcatagccacaaagcttcttggaccacaggcactcgagcgttcacgaaaaatccgtgcagatgagctagatcggttttacaaaaccttgcttgacaaggcgatgaagaaggagagtgttgagatcggtgaggaagcagcgaagctcaataacaatatcatctgcaagatgatcatggggaggagttgttcagaggagaatggtgaggcggagaaattcagacacttggtgatcgagtcgatggctttgacaaagcaaatcttctttggtatgatctttcacaaaccgcttaaaaagctcgggatctcactgttccaaaaggatatactaagtctttcccgcaagttcgacgagttgctggagaagattctttttgaacacgaagagaaaaaggcggagcacaatcaagctaatgacatgatggattttttgttggaagcttatggagacgaaaatgcagagtataaaatcacaagaaaccatatcaagtccttgttcgtggatcttgtcattgcagggactgacacctcggtgcaagcaacacagtggacaatgggggagctcattaacaaccctaagattcttcagagattgagagaagaaatcgaatcggttgtagggaacacaagattaattcaagaaaatgatttaccaaacctcccttacttgcaagcggtagtcaaagaagggctaagattgcatccgccggggtctatctcggtaaggatgtttcaagaaaggtgtgaactcaaagggttctacataccggagaagacattacttgttgttaatacttatgctataatgagagatcctaatttctgggaagatcctgaggagtttaaacctgagaggtttatagcatcttcaagatcagagcaagaggacgaggtaagagaggaagtcttgaaatacattcctttctccgcgggaaggagaggctgtcctggatcaaatctagcttatatctctctaggaatcgtgattggggtaatggtgcagtgctttgattggagaattgaaggagagaaagtaaacatgaatgaggctgctgaaacaactgcgttgtccatggctcagcctcttaagtgcactcctgtttctcgaaccaaaaaccctttgccatcaaattttagctttgccttttgttgtttttgtctcatgattgcgcgtgattcctgtttactggttacctttggtttaaattgcttcttcaataaactgtgttgttcttgtgtgccttgtgtgttacatacaacaagattatgtctttcacaacatattggcattttacactctacaaaaccagaaaacttacactttaacttccccatcatccttgtttcctcggcctcagtggccggcgagatcttcagggcccacgacatgaacgtatcctctcgcggtgctgctgcgatagatgagtccctcgtgtttggatcttctggtgtcgtctacgctccctatggagataacttgaagttcgtgaagaagaaataa

SEQ ID NO: 86992 - protein, 639 aa, Arabidopsis thaliana
  peptide (1)..(639): Ceres Seq. ID no. 12696099
  misc_feature (43)..(506): Pfam Name: Cytochrome P450 Pfam Description: Cytochrome P450
  misc_feature (1)..(517): Homolog of NCBI NO: 30685997 NR Description: cytochrome P450 family [Arabidopsis thaliana]
  misc_feature (1)..(517): Homolog of NCBI NO: 15232418 NR Description: cytochrome P450, putative; protein id: At3g20950.1
  misc_feature (14)..(515): Homolog of NCBI NO: 15233774 NR Description: cytochrome p450 family; protein id: At4g15350.1
  misc_feature (14)..(515): Homolog of NCBI NO: 7430617 NR Description: cytochrome P450 - Arabidopsis thaliana
  misc_feature (1)..(512): Homolog of NCBI NO: 15238866 NR Description: cytochrome p450 family; protein id: At5g47990.1 thaliana] >gi|10177750|dbj|BAB11063.1| cytochrome P450
  misc_feature (1)..(511): Homolog of NCBI NO: 15231047 NR Description: cytochrome P450, putative; protein id: At3g20090.1
  misc_feature (1)..(514): Homolog of NCBI NO: 15231052 NR Description: cytochrome p450 family; protein id: At3g20130.1
  misc_feature (1)..(517): Homolog of NCBI NO: 9294003 NR Description: cytochrome P450-like protein [Arabidopsis
  misc_feature (4)..(513): Homolog of NCBI NO: 15231049 NR Description: cytochrome p450 family; protein id: At3g20100.1, by cDNA: 149380., supported by cDNA: gi_15215771 [Arabidopsis
  misc_feature (1)..(514): Homolog of NCBI NO: 9293969 NR Description: cytochrome P450-like protein [Arabidopsis
MAAMITFDFQNSFIFILFFLFSLLCYSLFFRKPKGSRAGRDLPPSPPSFPVIGHLHLLLSALVHKSFQNISSKYGPLLHLRVFHIPIVLASSASVAYEIFKAQDVNVSSRGHAPVGESLWFGSSSFFFAPYGDYFKFMRKLIATKLLGPQALERSRKIRADELDRFYKTLLDKAMKKESVEIGEEAAKLNNNIICKMIMGRSCSEENGEAEKFRHLVIESMALTKQIFFGMIFHKPLKKLGISLFQKDILSLSRKFDELLEKILFEHEEKKAEHNQANDMMDFLLEAYGDENAEYKITRNHIKSLFVDLVIAGTDTSVQATQWTMGELINNPKILQRLREEIESVVGNTRLIQENDLPNLPYLQAVVKEGLRLHPPGSISVRMFQERCELKGFYIPEKTLLVVNTYAIMRDPNFWEDPEEFKPERFIASSRSEQEDEVREEVLKYIPFSAGRRGCPGSNLAYISLGIVIGVMVQCFDWRIEGEKVNMNEAAETTALSMAQPLKCTPVSRTKNPLPSNFSFAFCCFCLMIARDSCLLVTFGLNCFFNKLCCSCVPCVLHTTRLCLSQHIGILHSTKPENLHFNFPIILVSSASVAGEIFRAHDMNVSSRGAAAIDESLVFGSSGVVYAPYGDNLKFVKKK

SEQ ID NO: 86993 - protein, 636 aa, Arabidopsis thaliana
  peptide (1)..(636): Ceres Seq. ID no. 12696100
  misc_feature (40)..(503): Pfam Name: Cytochrome P450 Pfam Description: Cytochrome P450
  misc_feature (1)..(514): Homolog of NCBI NO: 30685997 NR Description: cytochrome P450 family [Arabidopsis thaliana]
  misc_feature (1)..(514): Homolog of NCBI NO: 15232418 NR Description: cytochrome P450, putative; protein id: At3g20950.1
  misc_feature (11)..(512): Homolog of NCBI NO: 15233774 NR Description: cytochrome p450 family; protein id: At4g15350.1
  misc_feature (11)..(512): Homolog of NCBI NO: 7430617 NR Description: cytochrome P450 - Arabidopsis thaliana
  misc_feature (1)..(509): Homolog of NCBI NO: 15238866 NR Description: cytochrome p450 family; protein id: At5g47990.1 thaliana] >gi|10177750|dbj|BAB11063.1| cytochrome P450
  misc_feature (1)..(508): Homolog of NCBI NO: 15231047 NR Description: cytochrome P450, putative; protein id: At3g20090.1
  misc_feature (1)..(511): Homolog of NCBI NO: 15231052 NR Description: cytochrome p450 family; protein id: At3g20130.1
  misc_feature (1)..(514): Homolog of NCBI NO: 9294003 NR Description: cytochrome P450-like protein [Arabidopsis
  misc_feature (1)..(510): Homolog of NCBI NO: 15231049 NR Description: cytochrome p450 family; protein id: At3g20100.1, by cDNA: 149380., supported by cDNA: gi_15215771 [Arabidopsis
  misc_feature (1)..(511): Homolog of NCBI NO: 9293969 NR Description: cytochrome P450-like protein [Arabidopsis
MITFDFQNSFIFILFFLFSLLCYSLFFRKPKGSRAGRDLPPSPPSFPVIGHLHLLLSALVHKSFQNISSKYGPLLHLRVFHIPIVLASSASVAYEIFKAQDVNVSSRGHAPVGESLWFGSSSFFFAPYGDYFKFMRKLIATKLLGPQALERSRKIRADELDRFYKTLLDKAMKKESVEIGEEAAKLNNNIICKMIMGRSCSEENGEAEKFRHLVIESMALTKQIFFGMIFHKPLKKLGISLFQKDILSLSRKFDELLEKILFEHEEKKAEHNQANDMMDFLLEAYGDENAEYKITRNHIKSLFVDLVIAGTDTSVQATQWTMGELINNPKILQRLREEIESVVGNTRLIQENDLPNLPYLQAVVKEGLRLHPPGSISVRMFQERCELKGFYIPEKTLLVVNTYAIMRDPNFWEDPEEFKPERFIASSRSEQEDEVREEVLKYIPFSAGRRGCPGSNLAYISLGIVIGVMVQCFDWRIEGEKVNMNEAAETTALSMAQPLKCTPVSRTKNPLPSNFSFAFCCFCLMIARDSCLLVTFGLNCFFNKLCCSCVPCVLHTTRLCLSQHIGILHSTKPENLHFNFPIILVSSASVAGEIFRAHDMNVSSRGAAAIDESLVFGSSGVVYAPYGDNLKFVKKK

SEQ ID NO: 86994 - protein, 502 aa, Arabidopsis thaliana
  peptide (1)..(502): Ceres Seq. ID no. 12696101
  misc_feature (1)..(369): Pfam Name: Cytochrome P450 Pfam Description: Cytochrome P450
  misc_feature (1)..(380): Homolog of NCBI NO: 30685997 NR Description: cytochrome P450 family [Arabidopsis thaliana]
  misc_feature (1)..(380): Homolog of NCBI NO: 15232418 NR Description: cytochrome P450, putative; protein id: At3g20950.1
  misc_feature (1)..(378): Homolog of NCBI NO: 15233774 NR Description: cytochrome p450 family; protein id: At4g15350.1
  misc_feature (1)..(378): Homolog of NCBI NO: 7430617 NR Description: cytochrome P450 - Arabidopsis thaliana
  misc_feature (1)..(375): Homolog of NCBI NO: 15238866 NR Description: cytochrome p450 family; protein id: At5g47990.1 thaliana] >gi|10177750|dbj|BAB11063.1| cytochrome P450
  misc_feature (1)..(374): Homolog of NCBI NO: 15231047 NR Description: cytochrome P450, putative; protein id: At3g20090.1
  misc_feature (1)..(377): Homolog of NCBI NO: 15231052 NR Description: cytochrome p450 family; protein id: At3g20130.1
  misc_feature (1)..(380): Homolog of NCBI NO: 9294003 NR Description: cytochrome P450-like protein [Arabidopsis
  misc_feature (1)..(376): Homolog of NCBI NO: 15231049 NR Description: cytochrome p450 family; protein id: At3g20100.1, by cDNA: 149380., supported by cDNA: gi_15215771 [Arabidopsis
  misc_feature (1)..(377): Homolog of NCBI NO: 9293969 NR Description: cytochrome P450-like protein [Arabidopsis
MRKLIATKLLGPQALERSRKIRADELDRFYKTLLDKAMKKESVEIGEEAAKLNNNIICKMIMGRSCSEENGEAEKFRHLVIESMALTKQIFFGMIFHKPLKKLGISLFQKDILSLSRKFDELLEKILFEHEEKKAEHNQANDMMDFLLEAYGDENAEYKITRNHIKSLFVDLVIAGTDTSVQATQWTMGELINNPKILQRLREEIESVVGNTRLIQENDLPNLPYLQAVVKEGLRLHPPGSISVRMFQERCELKGFYIPEKTLLVVNTYAIMRDPNFWEDPEEFKPERFIASSRSEQEDEVREEVLKYIPFSAGRRGCPGSNLAYISLGIVIGVMVQCFDWRIEGEKVNMNEAAETTALSMAQPLKCTPVSRTKNPLPSNFSFAFCCFCLMIARDSCLLVTFGLNCFFNKLCCSCVPCVLHTTRLCLSQHIGILHSTKPENLHFNFPIILVSSASVAGEIFRAHDMNVSSRGAAAIDESLVFGSSGVVYAPYGDNLKFVKKK

SEQ ID NO: 86995 - DNA, 1285 bp, Arabidopsis thaliana
  misc_feature (1)..(1285): Ceres Seq. ID no. 12696133
  misc_feature: MA Experiment ID: 20000069 Result: Up-regulated in Transcription
  misc_feature: MA Experiment 20000069 PARAMETER Experiment Name: At_100uM_ABA_Mutants_cDNA_P Parameter: Plant Line Value: CS23
  misc_feature: MA Experiment 20000069 PARAMETER Experiment Name: At_100uM_ABA_Mutants_cDNA_P Parameter: Timepoint (hr) Value: 6
  misc_feature: MA Experiment 20000069 PARAMETER Experiment Name: At_100uM_ABA_Mutants_cDNA_P Parameter: Tissue Value: Aerial
  misc_feature: MA Experiment 20000069 PARAMETER Experiment Name: At_100uM_ABA_Mutants_cDNA_P Parameter: Treatment Value: 100uM ABA vs. No Treatment
atcaaaggagcttccttttttcgctctcgtctccgtttacccttttgggatttttccctaaacctttttctctctttgtataatcaaatcctctttatctttcattgtttcgcgtgaattagctctgcaaaggctcttcattcttctcgcttggattcctctgcacaaaagaaaaaagaccatggatgatcttcatggaagaaatggtcgaatgcacattggtgtagcgcaaaatccaatgcatgtgcagtatgaagatcacggtttgcaccatatcgacaatgaaaacagtatgatggatgaccatgctgatggtgggatggatgaaggagtggagacagacattccttctcaccctggaaactcagctgataatcgtggtgaagttgtagaccgtggaattgaaaatggagatcaattgacattgtccttccagggacaagtttatgtttttgaccgtgtctcgcctgagaaggttcaagctgtgcttttgttacttggtggaagggaagtaccacatacactcccaacaaccctaggatcacctcatcagaacaatagggtactgggtctatctggtactcctcaacggcttagcgttccgcagcggttagcttctttgctcaggtttagggagaaacgaaaagggaggaactttgataagactattcgctatacagtcaggaaagaagtagccttgagaatgcagcgtaagaaaggtcagttcacgtcggctaaatcaagcaatgatgattctggatccactggatcggattgggggtcaaaccagagctgggccgtagaagggactgagactcagaagccagaggttttatgtcgacactgtggaacaagtgagaagtcaactccaatgatgcgacgtggacctgatgggccaagaacactttgtaatgcgtgtggactgatgtgggcaaacaaggggactcttagagacctatccaaagtccctcctccgcaaacacctcagcatctatctctgaataagaatgaggacgcaaatcttgaggctgatcaaatgatggaagtaactggtgacattagcaacacacagtgagaactgagaaaccattggaagcaagaaaggatctcaaacaaaaacagttgttatcatttcatttgatgatggaatcgaatctgagttgtgtttagggtttctctgggttaatctcagtctatgtgggcacattttagtcttctacaaattataagacactcttcacttatttagaagctcactcatcagaaaagaaaaaaaaaactttgc

SEQ ID NO: 86996 - protein, 297 aa, Arabidopsis thaliana
  peptide (1)..(297): Ceres Seq. ID no. 12696134
  misc_feature (148)..(187): Pfam Name: CCT motif Pfam Description: CCT motif
  misc_feature (1)..(297): Homolog of NCBI NO: 18402914 NR Description: GATA zinc finger protein; protein id: supported by cDNA: 12996. [Arabidopsis thaliana] emb|CAB45082.1~gene_id:MXL8.2~similar to unknown protein
  misc_feature (1)..(297): Homolog of NCBI NO: 21537322 NR Description: flowering protein CONSTANS, putative [Arabidopsis
  misc_feature (1)..(297): Homolog of NCBI NO: 30686115 NR Description: GATA zinc finger protein [Arabidopsis thaliana] Unknown protein [Arabidopsis thaliana]
  misc_feature (1)..(297): Homolog of NCBI NO: 18403600 NR Description: flowering protein CONSTANS, putative; protein id: supported by cDNA: gi_15028098 [Arabidopsis thaliana]
  misc_feature (1)..(297): Homolog of NCBI NO: 15028099 NR Description: putative flowering protein CONSTANS [Arabidopsis
  misc_feature (1)..(297): Homolog of NCBI NO: 25405485 NR Description: hypothetical protein F19C24.17 [imported] - thaliana >gi|12321671|gb|AAG50873.1|AC025294_11 hypothetical [Arabidopsis thaliana] >gi|12325361|gb|AAG52620.1|AC024261_7
  misc_feature (175)..(297): Homolog of NCBI NO: 26451385 NR Description: unknown protein [Arabidopsis thaliana]
  misc_feature (33)..(261): Homolog of NCBI NO: 13174240 NR Description: putative zinc finger protein [Oryza sativa]
  misc_feature (63)..(284): Homolog of NCBI NO: 11358938 NR Description: zinc-finger protein - Arabidopsis thaliana
  misc_feature (63)..(284): Homolog of NCBI NO: 15233844 NR Description: Zinc finger protein, Zim; protein id: supported by cDNA: 20769., supported by cDNA: gi_8918530
MDDLHGRNGRMHIGVAQNPMHVQYEDHGLHHIDNENSMMDDHADGGMDEGVETDIPSHPGNSADNRGEVVDRGIENGDQLTLSFQGQVYVFDRVSPEKVQAVLLLLGGREVPHTLPTTLGSPHQNNRVLGLSGTPQRLSVPQRLASLLRFREKRKGRNFDKTIRYTVRKEVALRMQRKKGQFTSAKSSNDDSGSTGSDWGSNQSWAVEGTETQKPEVLCRHCGTSEKSTPMMRRGPDGPRTLCNACGLMWANKGTLRDLSKVPPPQTPQHLSLNKNEDANLEADQMMEVTGDISNTQ

SEQ ID NO: 86997 - protein, 287 aa, Arabidopsis thaliana
  peptide (1)..(287): Ceres Seq. ID no. 12696135
  misc_feature (138)..(177): Pfam Name: CCT motif Pfam Description: CCT motif
  misc_feature (1)..(287): Homolog of NCBI NO: 18402914 NR Description: GATA zinc finger protein; protein id: supported by cDNA: 12996. [Arabidopsis thaliana] emb|CAB45082.1~gene_id:MXL8.2~similar to unknown protein
  misc_feature (1)..(287): Homolog of NCBI NO: 21537322 NR Description: flowering protein CONSTANS, putative [Arabidopsis
  misc_feature (1)..(287): Homolog of NCBI NO: 30686115 NR Description: GATA zinc finger protein [Arabidopsis thaliana] Unknown protein [Arabidopsis thaliana]
  misc_feature (1)..(287): Homolog of NCBI NO: 18403600 NR Description: flowering protein CONSTANS, putative; protein id: supported by cDNA: gi_15028098 [Arabidopsis thaliana]
  misc_feature (1)..(287): Homolog of NCBI NO: 15028099 NR Description: putative flowering protein CONSTANS [Arabidopsis
  misc_feature (1)..(287): Homolog of NCBI NO: 25405485 NR Description: hypothetical protein F19C24.17 [imported] - thaliana >gi|12321671|gb|AAG50873.1|AC025294_11 hypothetical [Arabidopsis thaliana] >gi|12325361|gb|AAG52620.1|AC024261_7
  misc_feature (165)..(287): Homolog of NCBI NO: 26451385 NR Description: unknown protein [Arabidopsis thaliana]
  misc_feature (23)..(251): Homolog of NCBI NO: 13174240 NR Description: putative zinc finger protein [Oryza sativa]
  misc_feature (53)..(274): Homolog of NCBI NO: 11358938 NR Description: zinc-finger protein - Arabidopsis thaliana
  misc_feature (53)..(274): Homolog of NCBI NO: 15233844 NR Description: Zinc finger protein, Zim; protein id: supported by cDNA: 20769., supported by cDNA: gi_8918530
MHIGVAQNPMHVQYEDHGLHHIDNENSMMDDHADGGMDEGVETDIPSHPGNSADNRGEVVDRGIENGDQLTLSFQGQVYVFDRVSPEKVQAVLLLLGGREVPHTLPTTLGSPHQNNRVLGLSGTPQRLSVPQRLASLLRFREKRKGRNFDKTIRYTVRKEVALRMQRKKGQFTSAKSSNDDSGSTGSDWGSNQSWAVEGTETQKPEVLCRHCGTSEKSTPMMRRGPDGPRTLCNACGLMWANKGTLRDLSKVPPPQTPQHLSLNKNEDANLEADQMMEVTGDISNTQ

SEQ ID NO: 86998 - protein, 278 aa, Arabidopsis thaliana
  peptide (1)..(278): Ceres Seq. ID no. 12696136
  misc_feature (129)..(168): Pfam Name: CCT motif Pfam Description: CCT motif
  misc_feature (1)..(278): Homolog of NCBI NO: 18402914 NR Description: GATA zinc finger protein; protein id: supported by cDNA: 12996. [Arabidopsis thaliana] emb|CAB45082.1~gene_id:MXL8.2~similar to unknown protein
  misc_feature (1)..(278): Homolog of NCBI NO: 21537322 NR Description: flowering protein CONSTANS, putative [Arabidopsis
  misc_feature (1)..(278): Homolog of NCBI NO: 30686115 NR Description: GATA zinc finger protein [Arabidopsis thaliana] Unknown protein [Arabidopsis thaliana]
  misc_feature (1)..(278): Homolog of NCBI NO: 18403600 NR Description: flowering protein CONSTANS, putative; protein id: supported by cDNA: gi_15028098 [Arabidopsis thaliana]
  misc_feature (1)..(278): Homolog of NCBI NO: 15028099 NR Description: putative flowering protein CONSTANS [Arabidopsis
  misc_feature (1)..(278): Homolog of NCBI NO: 25405485 NR Description: hypothetical protein F19C24.17 [imported] - thaliana >gi|12321671|gb|AAG50873.1|AC025294_11 hypothetical [Arabidopsis thaliana] >gi|12325361|gb|AAG52620.1|AC024261_7
  misc_feature (156)..(278): Homolog of NCBI NO: 26451385 NR Description: unknown protein [Arabidopsis thaliana]
  misc_feature (14)..(242): Homolog of NCBI NO: 13174240 NR Description: putative zinc finger protein [Oryza sativa]
  misc_feature (44)..(265): Homolog of NCBI NO: 11358938 NR Description: zinc-finger protein - Arabidopsis thaliana
  misc_feature (44)..(265): Homolog of NCBI NO: 15233844 NR Description: Zinc finger protein, Zim; protein id: supported by cDNA: 20769., supported by cDNA: gi_8918530
MHVQYEDHGLHHIDNENSMMDDHADGGMDEGVETDIPSHPGNSADNRGEVVDRGIENGDQLTLSFQGQVYVFDRVSPEKVQAVLLLLGGREVPHTLPTTLGSPHQNNRVLGLSGTPQRLSVPQRLASLLRFREKRKGRNFDKTIRYTVRKEVALRMQRKKGQFTSAKSSNDDSGSTGSDWGSNQSWAVEGTETQKPEVLCRHCGTSEKSTPMMRRGPDGPRTLCNACGLMWANKGTLRDLSKVPPPQTPQHLSLNKNEDANLEADQMMEVTGDISNTQ

SEQ ID NO: 86999 - DNA, 2844 bp, Arabidopsis thaliana
  misc_feature (1)..(2844): Ceres Seq. ID no. 12696179
  misc_feature: MA Experiment ID: 20000173 Result: Down-regulated in Transcription
  misc_feature: MA Experiment 20000173 PARAMETER Experiment Name: At_42deg_Heat_P Parameter: Age (day) Value: 14
  misc_feature: MA Experiment 20000173 PARAMETER Experiment Name: At_42deg_Heat_P Parameter: Organism Value: A. thaliana
  misc_feature: MA Experiment 20000173 PARAMETER Experiment Name: At_42deg_Heat_P Parameter: Plant Line Value: WS
  misc_feature: MA Experiment 20000173 PARAMETER Experiment Name: At_42deg_Heat_P Parameter: Temperature (deg C) Value: 42 vs. 22
  misc_feature: MA Experiment 20000173 PARAMETER Experiment Name: At_42deg_Heat_P Parameter: Timepoint (hr) Value: 6
  misc_feature: MA Experiment 20000173 PARAMETER Experiment Name: At_42deg_Heat_P Parameter: Tissue Value: Aerial
  misc_feature: MA Experiment ID: 20000439 Result: Up-regulated in Transcription
  misc_feature: MA Experiment 20000439 PARAMETER Experiment Name: At_Roots__P Parameter: Age (day) Value: 14 vs. 21
  misc_feature: MA Experiment 20000439 PARAMETER Experiment Name: At_Roots__P Parameter: Organism Value: A. thaliana
  misc_feature: MA Experiment 20000439 PARAMETER Experiment Name: At_Roots__P Parameter: Tissue Value: Roots vs. Whole Plant
  misc_feature: MA Experiment ID: 20000794 Result: Up-regulated in Transcription
  misc_feature: MA Experiment 20000794 PARAMETER Experiment Name: At_Petals_P Parameter: Age (day) Value: 23-25 days
  misc_feature: MA Experiment 20000794 PARAMETER Experiment Name: At_Petals_P Parameter: Plant Line Value: WS
  misc_feature: MA Experiment 20000794 PARAMETER Experiment Name: At_Petals_P Parameter: Tissue Value: Petals vs. Whole plant
atgcctcgtgctgttggaaaaaggactcctagaattcctatctcatacacccttgagaaggatactagggaaagatatttatcacctgttaagagaggtttaaatcagaagggggatgatactgatgatgatatggaacatgagatagcattagcattggctgaggcttcacaacgaggtggctctacaaagaactcccacacaccaaatagaaaagcaaagatgtacccccctgataaaaagggtgaaagaatgcgtgccgatattgacttggcgattgccaagcttcatgccactgatatggaagatgtccgctgtgaaccaagcttaggaagcactgaagctgataatgcggattattctggaggtagaaatgacttgacacatggagaaggttctagtgccgtggaaaagcagcaaaaaggaagaacatactataggaggagagtaggcattaaagaagaagatgcaaaagaagcctgcagtggtacagatgaagcaccaagcttaggcgctcccgatgagaaatttgaacaagaaagggaagggaaggctttgaaattcacatataaagtttcaaggagaaaaagtaaaaaaagtctttttactgcagatgaagacacagcatgtgatgctctccatacgctggcagatctatcgctgatgatgcctgaaactgccactgatactgagtcatcagttcaagctgaggaaaagaaagctggagaagcttatgtttcagattttaaagggactgatccggcatccatgtctaaaagtagttctcttagaaactccaaacagagaagatacggcagcaatgacctttgtaaccctgaactcgagagaaaaagtccaagtagttctttaatccaaaagagacggcagaaagcattaccagctaaagttcttaaagatgagcttgctgcaagctcacaagtcatagagccttgtaatagcaagggaataggtgaggaatataagcctgttgggagaggtaaacggtccgcaagtattcgaaactcacatgaaaagaaatctgccaaatctcatgatcatacttcgtcaagtaacaacatagtagaagaagatgagtcagctccatcaaatgcagtcattaaaaaacaagttaacttgccaactaaagttaggagcagaagaaagatagtaactgagaaacctctaactattgatgacgggaaaatttctgagactatagagaagttttcgcattgcatttctagtttccgagcacggagatggtgtatttttgagtggttctacagtgcaattgactatccatggtttgccagacaagagtttgttgagtatttggatcatgtagggttgggtcatgttcctagattaactcgcgttgaatggggtgtcataaggagttctcttgggaaaccaaggcgattttctgaacagtttttgaaggaggaaaaagaaaagctatacctatacagggactctgtaagaaaacattatgatgaactaaacacgggcatgagggaaggacttccaatggatttggcccggcctctaaatgtttcacagagagtcatttgcctgcatccaaagtcaagagagattcatgacggcaatgtcctaactgttgatcactgtaggtaccggattcagtttgacaaccctgaattaggggtagaatttgttaaggatactgaatgcatgccactgaatcctctagaaaacatgccagcatcgctggcaaggcactatgctttctcaaattatcacattcagaatcccattgaggagaaaatgcatgaacgggcaaaggaaagcatgctggaaggatatcccaaactttcgtgtgagacaggccatctcttgtcctctccaaattataacattagcaattcactaaagcaggaaaaggtagatatctcaagttcaaatccacaagctcaagacggagttgatgaggctcttgctttacaattgtttaattctcagccctcaagtattggacaaatccaggcaagagaagctgatgtccaagctctttctgaactaacgcgtgcgcttgacaagaaggagctagttttgagggagctaaaatgcatgaacgacgaggttgtggaaagtcagaaagatggacataataatgccctaaaggattctgaatcttttaagaaacaatatgcagcactaagcgaaatcaatgagcaggtttcattggcacttcttggcttgaggcaacgaaatacttaccaggagaatgtaccatattcatcaataagacgcatgagtaaatcaggggaacctgatggtcagttgacatacgaagacaataatgcatcagacactaatggattccatgtgtctgagatcgtcgaaagttctagaataaaagcacggaaaatggtatacagagctgtacaggcattggagttactgagaaaagacgaaaataataatgtaaatatggaagaagccattgattttgtaaataatcagctctcaatagatcaaacagaaggatcatcagtccagcaaacacaaggtggccaggatcagcgtcttccctctacaccaaatccacctagctcaactcctgccaatgattcccacctaaaccaacccgatcaaaatgacctgcaagtcccgtccgatcttgtgtcccgatgtatcgctacattgcttatgattcagaaatgtacagagaggcaattcccaccaagtgaagtagcccaggttctagactcggcagtggcgagtttacagccttgctgctcgcagaaccttccgatctatacagagattcagaagtgcatgggaatcataagaaaccagattctagccctcgtaccctcctaa

SEQ ID NO: 87000 - protein, 947 aa, Arabidopsis thaliana
  peptide (1)..(947): Ceres Seq. ID no. 12696180
  misc_feature (4)..(403): Homolog of NCBI NO: 15229976 NR Description: unknown protein; protein id: At3g05380.1 thaliana] >gi|7596773|gb|AAF64544.1| unknown protein [Arabidopsis
  misc_feature (407)..(789): Homolog of NCBI NO: 15229976 NR Description: unknown protein; protein id: At3g05380.1 thaliana] >gi|7596773|gb|AAF64544.1| unknown protein [Arabidopsis
  misc_feature (365)..(735): Homolog of NCBI NO: 15240995 NR Description: putative protein; protein id: At5g27610.1
  misc_feature (3)..(44): Homolog of NCBI NO: 15240995 NR Description: putative protein; protein id: At5g27610.1
  misc_feature (407)..(789): Homolog of NCBI NO: 19347724 NR Description: unknown protein [Arabidopsis thaliana]
  misc_feature (352)..(729): Homolog of NCBI NO: 34903510 NR Description: P0001B06.7 [Oryza sativa (japonica
  misc_feature (731)..(947): Homolog of NCBI NO: 15229976 NR Description: unknown protein; protein id: At3g05380.1 thaliana] >gi|7596773|gb|AAF64544.1| unknown protein [Arabidopsis
  misc_feature (731)..(947): Homolog of NCBI NO: 19347724 NR Description: unknown protein [Arabidopsis thaliana]
  misc_feature (575)..(945): Homolog of NCBI NO: 15240995 NR Description: putative protein; protein id: At5g27610.1
  misc_feature (251)..(591): Homolog of NCBI NO: 27369419 NR Description: TGS2 [Homo sapiens]
MPRAVGKRTPRIPISYTLEKDTRERYLSPVKRGLNQKGDDTDDDMEHEIALALAEASQRGGSTKNSHTPNRKAKMYPPDKKGERMRADIDLAIAKLHATDMEDVRCEPSLGSTEADNADYSGGRNDLTHGEGSSAVEKQQKGRTYYRRRVGIKEEDAKEACSGTDEAPSLGAPDEKFEQEREGKALKFTYKVSRRKSKKSLFTADEDTACDALHTLADLSLMMPETATDTESSVQAEEKKAGEAYVSDFKGTDPASMSKSSSLRNSKQRRYGSNDLCNPELERKSPSSSLIQKRRQKALPAKVLKDELAASSQVIEPCNSKGIGEEYKPVGRGKRSASIRNSHEKKSAKSHDHTSSSNNIVEEDESAPSNAVIKKQVNLPTKVRSRRKIVTEKPLTIDDGKISETIEKFSHCISSFRARRWCIFEWFYSAIDYPWFARQEFVEYLDHVGLGHVPRLTRVEWGVIRSSLGKPRRFSEQFLKEEKEKLYLYRDSVRKHYDELNTGMREGLPMDLARPLNVSQRVICLHPKSREIHDGNVLTVDHCRYRIQFDNPELGVEFVKDTECMPLNPLENMPASLARHYAFSNYHIQNPIEEKMHERAKESMLEGYPKLSCETGHLLSSPNYNISNSLKQEKVDISSSNPQAQDGVDEALALQLFNSQPSSIGQIQAREADVQALSELTRALDKKELVLRELKCMNDEVVESQKDGHNNALKDSESFKKQYAALSEINEQVSLALLGLRQRNTYQENVPYSSIRRMSKSGEPDGQLTYEDNNASDTNGFHVSEIVESSRIKARKMVYRAVQALELLRKDENNNVNMEEAIDFVNNQLSIDQTEGSSVQQTQGGQDQRLPSTPNPPSSTPANDSHLNQPDQNDLQVPSDLVSRCIATLLMIQKCTERQFPPSEVAQVLDSAVASLQPCCSQNLPIYTEIQKCMGIIRNQILALVPS

SEQ ID NO: 87001 - protein, 903 aa, Arabidopsis thaliana
  peptide (1)..(903): Ceres Seq. ID no. 12696181
  misc_feature (1)..(359): Homolog of NCBI NO: 15229976 NR Description: unknown protein; protein id: At3g05380.1 thaliana] >gi|7596773|gb|AAF64544.1| unknown protein [Arabidopsis
  misc_feature (363)..(745): Homolog of NCBI NO: 15229976 NR Description: unknown protein; protein id: At3g05380.1 thaliana] >gi|7596773|gb|AAF64544.1| unknown protein [Arabidopsis
  misc_feature (321)..(691): Homolog of NCBI NO: 15240995 NR Description: putative protein; protein id: At5g27610.1
  misc_feature (363)..(745): Homolog of NCBI NO: 19347724 NR Description: unknown protein [Arabidopsis thaliana]
  misc_feature (308)..(685): Homolog of NCBI NO: 34903510 NR Description: P0001B06.7 [Oryza sativa (japonica
  misc_feature (687)..(903): Homolog of NCBI NO: 15229976 NR Description: unknown protein; protein id: At3g05380.1 thaliana] >gi|7596773|gb|AAF64544.1| unknown protein [Arabidopsis
  misc_feature (687)..(903): Homolog of NCBI NO: 19347724 NR Description: unknown protein [Arabidopsis thaliana]
  misc_feature (531)..(901): Homolog of NCBI NO: 15240995 NR Description: putative protein; protein id: At5g27610.1
  misc_feature (207)..(547): Homolog of NCBI NO: 27369419 NR Description: TGS2 [Homo sapiens]
  misc_feature (331)..(547): Homolog of NCBI NO: 27369417 NR Description: TGS1 [Homo sapiens]
MEHEIALALAEASQRGGSTKNSHTPNRKAKMYPPDKKGERMRADIDLAIAKLHATDMEDVRCEPSLGSTEADNADYSGGRNDLTHGEGSSAVEKQQKGRTYYRRRVGIKEEDAKEACSGTDEAPSLGAPDEKFEQEREGKALKFTYKVSRRKSKKSLFTADEDTACDALHTLADLSLMMPETATDTESSVQAEEKKAGEAYVSDFKGTDPASMSKSSSLRNSKQRRYGSNDLCNPELERKSPSSSLIQKRRQKALPAKVLKDELAASSQVIEPCNSKGIGEEYKPVGRGKRSASIRNSHEKKSAKSHDHTSSSNNIVEEDESAPSNAVIKKQVNLPTKVRSRRKIVTEKPLTIDDGKISETIEKFSHCISSFRARRWCIFEWFYSAIDYPWFARQEFVEYLDHVGLGHVPRLTRVEWGVIRSSLGKPRRFSEQFLKEEKEKLYLYRDSVRKHYDELNTGMREGLPMDLARPLNVSQRVICLHPKSREIHDGNVLTVDHCRYRIQFDNPELGVEFVKDTECMPLNPLENMPASLARHYAFSNYHIQNPIEEKMHERAKESMLEGYPKLSCETGHLLSSPNYNISNSLKQEKVDISSSNPQAQDGVDEALALQLFNSQPSSIGQIQAREADVQALSELTRALDKKELVLRELKCMNDEVVESQKDGHNNALKDSESFKKQYAALSEINEQVSLALLGLRQRNTYQENVPYSSIRRMSKSGEPDGQLTYEDNNASDTNGFHVSEIVESSRIKARKMVYRAVQALELLRKDENNNVNMEEAIDFVNNQLSIDQTEGSSVQQTQGGQDQRLPSTPNPPSSTPANDSHLNQPDQNDLQVPSDLVSRCIATLLMIQKCTERQFPPSEVAQVLDSAVASLQPCCSQNLPIYTEIQKCMGIIRNQILALVPS

SEQ ID NO: 87002 - protein, 873 aa, Arabidopsis thaliana
  peptide (1)..(873): Ceres Seq. ID no. 12696182
  misc_feature (1)..(329): Homolog of NCBI NO: 15229976 NR Description: unknown protein; protein id: At3g05380.1 thaliana] >gi|7596773|gb|AAF64544.1| unknown protein [Arabidopsis
  misc_feature (333)..(715): Homolog of NCBI NO: 15229976 NR Description: unknown protein; protein id: At3g05380.1 thaliana] >gi|7596773|gb|AAF64544.1| unknown protein [Arabidopsis
  misc_feature (291)..(661): Homolog of NCBI NO: 15240995 NR Description: putative protein; protein id: At5g27610.1
  misc_feature (333)..(715): Homolog of NCBI NO: 19347724 NR Description: unknown protein [Arabidopsis thaliana]
  misc_feature (278)..(655): Homolog of NCBI NO: 34903510 NR Description: P0001B06.7 [Oryza sativa (japonica
  misc_feature (657)..(873): Homolog of NCBI NO: 15229976 NR Description: unknown protein; protein id: At3g05380.1 thaliana] >gi|7596773|gb|AAF64544.1| unknown protein [Arabidopsis
  misc_feature (657)..(873): Homolog of NCBI NO: 19347724 NR Description: unknown protein [Arabidopsis thaliana]
  misc_feature (501)..(871): Homolog of NCBI NO: 15240995 NR Description: putative protein; protein id: At5g27610.1
  misc_feature (177)..(517): Homolog of NCBI NO: 27369419 NR Description: TGS2 [Homo sapiens]
  misc_feature (301)..(517): Homolog of NCBI NO: 27369417 NR Description: TGS1 [Homo sapiens]
MYPPDKKGERMRADIDLAIAKLHATDMEDVRCEPSLGSTEADNADYSGGRNDLTHGEGSSAVEKQQKGRTYYRRRVGIKEEDAKEACSGTDEAPSLGAPDEKFEQEREGKALKFTYKVSRRKSKKSLFTADEDTACDALHTLADLSLMMPETATDTESSVQAEEKKAGEAYVSDFKGTDPASMSKSSSLRNSKQRRYGSNDLCNPELERKSPSSSLIQKRRQKALPAKVLKDELAASSQVIEPCNSKGIGEEYKPVGRGKRSASIRNSHEKKSAKSHDHTSSSNNIVEEDESAPSNAVIKKQVNLPTKVRSRRKIVTEKPLTIDDGKISETIEKFSHCISSFRARRWCIFEWFYSAIDYPWFARQEFVEYLDHVGLGHVPRLTRVEWGVIRSSLGKPRRFSEQFLKEEKEKLYLYRDSVRKHYDELNTGMREGLPMDLARPLNVSQRVICLHPKSREIHDGNVLTVDHCRYRIQFDNPELGVEFVKDTECMPLNPLENMPASLARHYAFSNYHIQNPIEEKMHERAKESMLEGYPKLSCETGHLLSSPNYNISNSLKQEKVDISSSNPQAQDGVDEALALQLFNSQPSSIGQIQAREADVQALSELTRALDKKELVLRELKCMNDEVVESQKDGHNNALKDSESFKKQYAALSEINEQVSLALLGLRQRNTYQENVPYSSIRRMSKSGEPDGQLTYEDNNASDTNGFHVSEIVESSRIKARKMVYRAVQALELLRKDENNNVNMEEAIDFVNNQLSIDQTEGSSVQQTQGGQDQRLPSTPNPPSSTPANDSHLNQPDQNDLQVPSDLVSRCIATLLMIQKCTERQFPPSEVAQVLDSAVASLQPCCSQNLPIYTEIQKCMGIIRNQILALVPS

SEQ ID NO: 87003 - DNA, 879 bp, Arabidopsis thaliana
  misc_feature (1)..(879): Ceres Seq. ID no. 12696231
  misc_feature: MA Experiment ID: 20000173 Result: Down-regulated in Transcription
  misc_feature: MA Experiment 20000173 PARAMETER Experiment Name: At_42deg_Heat_P Parameter: Age (day) Value: 14
  misc_feature: MA Experiment 20000173 PARAMETER Experiment Name: At_42deg_Heat_P Parameter: Organism Value: A. thaliana
  misc_feature: MA Experiment 20000173 PARAMETER Experiment Name: At_42deg_Heat_P Parameter: Plant Line Value: WS
  misc_feature: MA Experiment 20000173 PARAMETER Experiment Name: At_42deg_Heat_P Parameter: Temperature (deg C) Value: 42 vs. 22
  misc_feature: MA Experiment 20000173 PARAMETER Experiment Name: At_42deg_Heat_P Parameter: Timepoint (hr) Value: 6
  misc_feature: MA Experiment 20000173 PARAMETER Experiment Name: At_42deg_Heat_P Parameter: Tissue Value: Aerial
  misc_feature: MA Experiment ID: 20000264 Result: Up-regulated in Transcription
  misc_feature: MA Experiment 20000264 PARAMETER Experiment Name: At_Open_Flower_P Parameter: Age (day) Value: 21
  misc_feature: MA Experiment 20000264 PARAMETER Experiment Name: At_Open_Flower_P Parameter: Plant Line Value: WS
  misc_feature: MA Experiment 20000264 PARAMETER Experiment Name: At_Open_Flower_P Parameter: Tissue Value: Open Flower vs. Whole Plant
  misc_feature: MA Experiment ID: 20000265 Result: Up-regulated in Transcription
  misc_feature: MA Experiment 20000265 PARAMETER Experiment Name: At_Open_Flower_P Parameter: Age (day) Value: 21
  misc_feature: MA Experiment 20000265 PARAMETER Experiment Name: At_Open_Flower_P Parameter: Plant Line Value: WS
  misc_feature: MA Experiment 20000265 PARAMETER Experiment Name: At_Open_Flower_P Parameter: Tissue Value: Closed Flower vs. Whole Plant
  misc_feature: MA Experiment ID: 20000453 Result: Down-regulated in Transcription
  misc_feature: MA Experiment 20000453 PARAMETER Experiment Name: At_100uM_ABA_P Parameter: Age (day) Value: 15
  misc_feature: MA Experiment 20000453 PARAMETER Experiment Name: At_100uM_ABA_P Parameter: Organism Value: A. thaliana
  misc_feature: MA Experiment 20000453 PARAMETER Experiment Name: At_100uM_ABA_P Parameter: Plant Line Value: WS
  misc_feature: MA Experiment 20000453 PARAMETER Experiment Name: At_100uM_ABA_P Parameter: Timepoint (hr) Value: 24
  misc_feature: MA Experiment 20000453 PARAMETER Experiment Name: At_100uM_ABA_P Parameter: Tissue Value: Aerial
  misc_feature: MA Experiment 20000453 PARAMETER Experiment Name: At_100uM_ABA_P Parameter: Treatment Value: 100uM ABA vs. No Treatment
  misc_feature: MA Experiment ID: 20000794 Result: Up-regulated in Transcription
  misc_feature: MA Experiment 20000794 PARAMETER Experiment Name: At_Petals_P Parameter: Age (day) Value: 23-25 days
  misc_feature: MA Experiment 20000794 PARAMETER Experiment Name: At_Petals_P Parameter: Plant Line Value: WS
  misc_feature: MA Experiment 20000794 PARAMETER Experiment Name: At_Petals_P Parameter: Tissue Value: Petals vs. Whole plant
  misc_feature: MA Experiment ID: 20001905 Result: Up-regulated in Transcription
  misc_feature: MA Experiment 20001905 PARAMETER Experiment Name: At_Drought_Reproduction_P Parameter: Age (day) Value: 40
  misc_feature: MA Experiment 20001905 PARAMETER Experiment Name: At_Drought_Reproduction_P Parameter: Organism Value: A. thaliana
  misc_feature: MA Experiment 20001905 PARAMETER Experiment Name: At_Drought_Reproduction_P Parameter: Plant Line Value: WS
  misc_feature: MA Experiment 20001905 PARAMETER Experiment Name: At_Drought_Reproduction_P Parameter: Timepoint (day) Value: 10
  misc_feature: MA Experiment 20001905 PARAMETER Experiment Name: At_Drought_Reproduction_P Parameter: Tissue Value: Rosettes
  misc_feature: MA Experiment 20001905 PARAMETER Experiment Name: At_Drought_Reproduction_P Parameter: Treatment Value: Drought vs. No Drought
  misc_feature: MA Experiment ID: 20001910 Result: Up-regulated in Transcription
  misc_feature: MA Experiment 20001910 PARAMETER Experiment Name: At_Drought_Reproduction_P Parameter: Age (day) Value: 37
  misc_feature: MA Experiment 20001910 PARAMETER Experiment Name: At_Drought_Reproduction_P Parameter: Organism Value: A. thaliana
  misc_feature: MA Experiment 20001910 PARAMETER Experiment Name: At_Drought_Reproduction_P Parameter: Plant Line Value: WS
  misc_feature: MA Experiment 20001910 PARAMETER Experiment Name: At_Drought_Reproduction_P Parameter: Timepoint (day) Value: 7
  misc_feature: MA Experiment 20001910 PARAMETER Experiment Name: At_Drought_Reproduction_P Parameter: Tissue Value: Flowers
  misc_feature: MA Experiment 20001910 PARAMETER Experiment Name: At_Drought_Reproduction_P Parameter: Treatment Value: Drought vs. No Drought
atggctcaatcgtgtcttaaaattgttcgaatcaacaatctaaggaacagagtgaatcgtcggattttgattctccgacgattcacacggttgttatggagtagaatcgttgcttgtactcctggcaaatctcggagatatctcttgctttctcgcgctcttccgtctccgactgtttctcgtccttctccttctccgatccccgccgtcgatgtcgtcgtcggtggtggtggtggtggtggtgagtttgttcgtcgttcgtcggttgtttacgataatgataacagtcatcggagatcggattctgatttggtttctttgaagattagtctcttaggagatccagaaatcggaaaaactagcttcctggcgaaatatgttggagaagagaaagaagtagaaatgagagaattggagaaaggtataaattgtacggacaagacgttatacatgggaggtgctcgcatttcatatagtatctgggaattagaaggagctgagagatcacgagatcaaatccctgtggcttgcaaggactctgttgccattctctttatgtttgatttaaccagtcgttgcacgcttaatagtgtcattagctggtatcaacaagctaggaagtctaatcagacggcgataccagttatggtaggaaccaagtttgatgagtttattcagcttcctattgatctgcaatggacaattgctagccaggcgagaacatatgcgaaggctttaaacgcgacgctcttcttctcgagtgcttcatacaacataaacgtgaataagatctttaagtttgtgacggcgaagctcttcgacttaccatggacggtggagcgcaatctcacaatcggagaaccaatcatcgacttctag

SEQ ID NO: 87004 - protein, 292 aa, Arabidopsis thaliana
  peptide (1)..(292): Ceres Seq. ID no. 12696232
  misc_feature (111)..(274): Pfam Name: Ras family Pfam Description: Ras family
  misc_feature (1)..(292): Homolog of NCBI NO: 30686351 NR Description: SGP1 monomeric G-protein -related [Arabidopsis
  misc_feature (1)..(292): Homolog of NCBI NO: 18403119 NR Description: putative SGP1 monomeric G-protein; protein id: supported by cDNA: 30989. [Arabidopsis thaliana]
  misc_feature (1)..(238): Homolog of NCBI NO: 30686347 NR Description: SGP1 monomeric G-protein -related [Arabidopsis
  misc_feature (13)..(292): Homolog of NCBI NO: 15239761 NR Description: SGP1 monomeric G-protein (emb|CAB54517.1);
  misc_feature (103)..(292): Homolog of NCBI NO: 33146727 NR Description: putative Septum-promoting GTP-binding protein 1
  misc_feature (55)..(290): Homolog of NCBI NO: 38105787 NR Description: hypothetical protein MG04862.4 [Magnaporthe
  misc_feature (105)..(292): Homolog of NCBI NO: 2408103 NR Description: sid3 [Schizosaccharomyces pombe]
  misc_feature (105)..(292): Homolog of NCBI NO: 19114197 NR Description: sid3 protein; gtpase; inducer of septum formation
  misc_feature (102)..(292): Homolog of NCBI NO: 28396142 NR Description: Tem-1-like protein [Giardia intestinalis]
  misc_feature (102)..(292): Homolog of NCBI NO: 29250300 NR Description: GLP_111_18072_18662 [Giardia lamblia ATCC 50803]
MAQSCLKIVRINNLRNRVNRRILILRRFTRLLWSRIVACTPGKSRRYLLLSRALPSPTVSRPSPSPIPAVDVVVGGGGGGGEFVRRSSVVYDNDNSHRRSDSDLVSLKISLLGDPEIGKTSFLAKYVGEEKEVEMRELEKGINCTDKTLYMGGARISYSIWELEGAERSRDQIPVACKDSVAILFMFDLTSRCTLNSVISWYQQARKSNQTAIPVMVGTKFDEFIQLPIDLQWTIASQARTYAKALNATLFFSSASYNINVNKIFKFVTAKLFDLPWTVERNLTIGEPIIDF

SEQ ID NO: 87005 - protein, 158 aa, Arabidopsis thaliana
  peptide (1)..(158): Ceres Seq. ID no. 12696233
  misc_feature (1)..(140): Pfam Name: Ras family Pfam Description: Ras family
  misc_feature (1)..(158): Homolog of NCBI NO: 30686351 NR Description: SGP1 monomeric G-protein -related [Arabidopsis
  misc_feature (1)..(158): Homolog of NCBI NO: 18403119 NR Description: putative SGP1 monomeric G-protein; protein id: supported by cDNA: 30989. [Arabidopsis thaliana]
  misc_feature (1)..(104): Homolog of NCBI NO: 30686347 NR Description: SGP1 monomeric G-protein -related [Arabidopsis
  misc_feature (1)..(158): Homolog of NCBI NO: 15239761 NR Description: SGP1 monomeric G-protein (emb|CAB54517.1);
  misc_feature (1)..(158): Homolog of NCBI NO: 33146727 NR Description: putative Septum-promoting GTP-binding protein 1
  misc_feature (1)..(156): Homolog of NCBI NO: 38105787 NR Description: hypothetical protein MG04862.4 [Magnaporthe
  misc_feature (1)..(158): Homolog of NCBI NO: 2408103 NR Description: sid3 [Schizosaccharomyces pombe]
  misc_feature (1)..(158): Homolog of NCBI NO: 19114197 NR Description: sid3 protein; gtpase; inducer of septum formation
  misc_feature (1)..(158): Homolog of NCBI NO: 28396142 NR Description: Tem-1-like protein [Giardia intestinalis]
  misc_feature (1)..(158): Homolog of NCBI NO: 29250300 NR Description: GLP_111_18072_18662 [Giardia lamblia ATCC 50803]
MRELEKGINCTDKTLYMGGARISYSIWELEGAERSRDQIPVACKDSVAILFMFDLTSRCTLNSVISWYQQARKSNQTAIPVMVGTKFDEFIQLPIDLQWTIASQARTYAKALNATLFFSSASYNINVNKIFKFVTAKLFDLPWTVERNLTIGEPIIDF

SEQ ID NO: 87006 - DNA, 1208 bp, Arabidopsis thaliana
  misc_feature (1)..(1208): Ceres Seq. ID no. 12696240
  misc_feature: MA Experiment ID: 20000180 Result: Up-regulated in Transcription
  misc_feature: MA Experiment 20000180 PARAMETER Experiment Name: At_Germinating_Seeds_P Parameter: Age (hr) Value: 24 vs. 0
  misc_feature: MA Experiment 20000180 PARAMETER Experiment Name: At_Germinating_Seeds_P Parameter: Tissue Value: Germinating Seeds
  misc_feature: MA Experiment ID: 20000182 Result: Up-regulated in Transcription
  misc_feature: MA Experiment 20000182 PARAMETER Experiment Name: At_2mM_SA_P Parameter: Age (day) Value: 14
  misc_feature: MA Experiment 20000182 PARAMETER Experiment Name: At_2mM_SA_P Parameter: Organism Value: A. thaliana
  misc_feature: MA Experiment 20000182 PARAMETER Experiment Name: At_2mM_SA_P Parameter: Plant Line Value: WS
  misc_feature: MA Experiment 20000182 PARAMETER Experiment Name: At_2mM_SA_P Parameter: Timepoint (hr) Value: 6
  misc_feature: MA Experiment 20000182 PARAMETER Experiment Name: At_2mM_SA_P Parameter: Tissue Value: Aerial
  misc_feature: MA Experiment 20000182 PARAMETER Experiment Name: At_2mM_SA_P Parameter: Treatment Value: 2mM SA vs. No Treatment
  misc_feature: MA Experiment ID: 20000437 Result: Up-regulated in Transcription
  misc_feature: MA Experiment 20000437 PARAMETER Experiment Name: At_Drought_P Parameter: Age (day) Value: 8
  misc_feature: MA Experiment 20000437 PARAMETER Experiment Name: At_Drought_P Parameter: Organism Value: A. thaliana
  misc_feature: MA Experiment 20000437 PARAMETER Experiment Name: At_Drought_P Parameter: Plant Line Value: WS
  misc_feature: MA Experiment 20000437 PARAMETER Experiment Name: At_Drought_P Parameter: Timepoint (hr) Value: 24
  misc_feature: MA Experiment 20000437 PARAMETER Experiment Name: At_Drought_P Parameter: Tissue Value: Whole Plant
  misc_feature: MA Experiment 20000437 PARAMETER Experiment Name: At_Drought_P Parameter: Treatment Value: Drought vs. No Drought
aggaggctcgagaacagtgccccatatctgaaagctgaagctaagaatctggacgttcgtgtttaaaccgacgacgtatttgaaattggctttgaaggaaaggtgaaattaatggcggaatcgtcgtcgccgtcgcctactgaagagatcgttcggttgattaagcgtttaagcgcttacgttgctttcaaaatgtcaagccttttctccactacatcgattcgaaatctggattcaagatcaattggtgcgattgcggggcttgcgattgcggtgatatttacgtggagggcgataagaacgcccggagagcaacgtcagagaaggcagccgaagcgtaggattcacaatgctgaaacgtctagtgctgctgctgctgcttctcagtcgaatctagcttcttcggttgctccggaagtttcttcgcctcgtgaggataatgcggtgcaagatgttgttgatcagttctttcaacctgttaaacctactttggggcaaatagttagacagaagcttagtgaaggaaggaaggtaacatgccgtcttcttggagtaattcttgaggaaacaagtccagaagaactccaaaaacaagccacagtgaggtcatctgttttggaagttctactagagattacaaagtatagtgatttgtatcttatggaaagagttcttgacgatgaaagcgaggccaaagttttacaggctttagagaatgcaggagtttttacatctggtggtttagtcaaagataaggtgctcttttgtagtacagagataggaagaacttcctttgtcagacagctagaacctgactggcatattgatacaaacccggaaatcagcacacaactagctaggttcatcaaatatcagcttcatgtcgctacggtgaaacccgagcgaacagctccaaatgtgttcacctcgcagtcaatagaacagttctttggaagtgtttaatatcaacaaaaaaagagaggtgaaagatattacgttgtcctgacttaagcatcgttgatcgagtgtctcttaggctgaaacttgaaacttgtttttcatttttctttgattgtgtctaaattaaagtttgatatacatttggagttagatattactgcgagtgcctctgtgaaagtatccaagtttgtaatttttgtattagcaacttagcaaaattctttaagaaataaacaaatgtccgttgt

SEQ ID NO: 87007 - protein, 283 aa, Arabidopsis thaliana; identical to SEQ ID NO: 36533
  peptide (1)..(283): Ceres Seq. ID no. 12696241
  misc_feature (1)..(283): Homolog of NCBI NO: 17381010 NR Description: unknown protein [Arabidopsis thaliana]
  misc_feature (133)..(283): Homolog of NCBI NO: 21618311 NR Description: unknown [Arabidopsis thaliana]
  misc_feature (101)..(280): Homolog of NCBI NO: 38345629 NR Description: OSJNBb0004A17.10 [Oryza sativa (japonica
  misc_feature (11)..(94): Homolog of NCBI NO: 38345629 NR Description: OSJNBb0004A17.10 [Oryza sativa (japonica
  misc_feature (184)..(283): Homolog of NCBI NO: 18403177 NR Description: unknown protein; protein id: At3g21865.1, by cDNA: 250935., supported by cDNA: gi_20465874 [Arabidopsis
  misc_feature (85)..(257): Homolog of NCBI NO: 39546241 NR Description: OSJNBa0089N06.11 [Oryza sativa (japonica
  misc_feature (145)..(283): Homolog of NCBI NO: 23481990 NR Description: hypothetical protein [Plasmodium yoelii yoelii]

SEQ ID NO: 87008 - protein, 256 aa, Arabidopsis thaliana; identical to SEQ ID NO: 36534
  peptide (1)..(256): Ceres Seq. ID no. 12696242
  misc_feature (1)..(256): Homolog of NCBI NO: 17381010 NR Description: unknown protein [Arabidopsis thaliana]
  misc_feature (106)..(256): Homolog of NCBI NO: 21618311 NR Description: unknown [Arabidopsis thaliana]
  misc_feature (74)..(253): Homolog of NCBI NO: 38345629 NR Description: OSJNBb0004A17.10 [Oryza sativa (japonica
  misc_feature (1)..(67): Homolog of NCBI NO: 38345629 NR Description: OSJNBb0004A17.10 [Oryza sativa (japonica
  misc_feature (157)..(256): Homolog of NCBI NO: 18403177 NR Description: unknown protein; protein id: At3g21865.1, by cDNA: 250935., supported by cDNA: gi_20465874 [Arabidopsis
  misc_feature (58)..(230): Homolog of NCBI NO: 39546241 NR Description: OSJNBa0089N06.11 [Oryza sativa (japonica
  misc_feature (118)..(256): Homolog of NCBI NO: 23481990 NR Description: hypothetical protein [Plasmodium yoelii yoelii]

SEQ ID NO: 87009 - DNA, 1791 bp, Arabidopsis thaliana
  misc_feature (1)..(1791): Ceres Seq. ID no. 12696261
  misc_feature: MA Experiment ID: 20000185 Result: Up-regulated in Transcription
  misc_feature: MA Experiment 20000185 PARAMETER Experiment Name: At_Roots__P Parameter: Age (day) Value: 7 vs. 21
  misc_feature: MA Experiment 20000185 PARAMETER Experiment Name: At_Roots__P Parameter: Organism Value: A. thaliana
  misc_feature: MA Experiment 20000185 PARAMETER Experiment Name: At_Roots__P Parameter: Tissue Value: Roots vs. Whole Plant
  misc_feature: MA Experiment ID: 20000227 Result: Down-regulated in Transcription
  misc_feature: MA Experiment 20000227 PARAMETER Experiment Name: At_Root-Tips-vs-Tops_P Parameter: Tissue Value: Root Tips vs. Root Tops
  misc_feature: MA Experiment ID: 20000267 Result: Down-regulated in Transcription
  misc_feature: MA Experiment 20000267 PARAMETER Experiment Name: At_Drought_P Parameter: Age (day) Value: 7
  misc_feature: MA Experiment 20000267 PARAMETER Experiment Name: At_Drought_P Parameter: Organism Value: A. thaliana
  misc_feature: MA Experiment 20000267 PARAMETER Experiment Name: At_Drought_P Parameter: Plant Line Value: WS
  misc_feature: MA Experiment 20000267 PARAMETER Experiment Name: At_Drought_P Parameter: Timepoint (hr) Value: 6
  misc_feature: MA Experiment 20000267 PARAMETER Experiment Name: At_Drought_P Parameter: Tissue Value: Whole Plant
  misc_feature: MA Experiment 20000267 PARAMETER Experiment Name: At_Drought_P Parameter: Treatment Value: Drought vs. No Drought
  misc_feature: MA Experiment ID: 20000439 Result: Up-regulated in Transcription
  misc_feature: MA Experiment 20000439 PARAMETER Experiment Name: At_Roots__P Parameter: Age (day) Value: 14 vs. 21
  misc_feature: MA Experiment 20000439 PARAMETER Experiment Name: At_Roots__P Parameter: Organism Value: A. thaliana
  misc_feature: MA Experiment 20000439 PARAMETER Experiment Name: At_Roots__P Parameter: Tissue Value: Roots vs. Whole Plant
  misc_feature: MA Experiment ID: 20000460 Result: Down-regulated in Transcription
  misc_feature: MA Experiment 20000460 PARAMETER Experiment Name: At_10percent_PEG_P Parameter: Age (day) Value: 12
  misc_feature: MA Experiment 20000460 PARAMETER Experiment Name: At_10percent_PEG_P Parameter: Organism Value: A. thaliana
  misc_feature: MA Experiment 20000460 PARAMETER Experiment Name: At_10percent_PEG_P Parameter: Plant Line Value: WS
  misc_feature: MA Experiment 20000460 PARAMETER Experiment Name: At_10percent_PEG_P Parameter: Timepoint (day) Value: 12
  misc_feature: MA Experiment 20000460 PARAMETER Experiment Name: At_10percent_PEG_P Parameter: Tissue Value: Whole Plant
  misc_feature: MA Experiment 20000460 PARAMETER Experiment Name: At_10percent_PEG_P Parameter: Treatment Value: 10percent PEG vs. No Treatment
atggaggaaaccgttgaggccgcagaatcaatcatcaagaaatgggatccgaactcaccatcctacacaaagatcatctctctgtttagtcatagcagaagagaggccaaagaattcatcagatgcatccgtgacttacgcagagccatgcactttcttatctctcagcactcaaaatctgccaagctagttcttgcacagcacctgatgcagattgctatggccaggctcgaaaaagagttcttccagattctgtcttcaaaccgagaccaacttgatcctgaatctgtctctggtcactcctccatttcaagcaattcagaatttgaagatgttatgcaatcttctgatgatgaagaagaagatgagctgaagaaggctggtgaaacgatcactaaggtcgaaaaagctgcagcacttgtgatgtcagacctcaaggtcatagcagagactatgatcagctgtggatatggtaaagagtgcataaagagctataagttgatcagaaagtcaattgtagatgaagggctacacttacttggtatcgaaaagtgcaagatctcccggttcaacagaatggactgggacgtgctcgagcatatgatcaagaactggatcaaagctgcaaagattggtgtcataacactcctccgcggagagaaacttctatgtgatcatgtcttctctgcttcaagtacaataagagagtcttgcttttacgagatagtgaacgaagcaggaatcaatcttttcaagttcccagaactcgttgcggagaaaaaaccatcgccagagaggatcttcaggctgatggatctctatgcagcaatctctgaccttagaccagacatagaactgatattccactttgactcagtagctgctgttaaaactctggtcctctcatcgctgaagaaactcaaggactcaatctacacaagtctcatggaatttgagtcaacaatacaaaaggattcttctaaagcactaactgcaggaggagggattcacaagctgactagatcaaccatgagtttcatatcatctctttctgaatacagccgtgtgttatcagagattcttgcagagcatccacttaagaaaaacacacgtatgctagaatcttatttcacagctccaatcttagaagatgaacacaacaaccacgcagtctcggtccatctagcttggctcatcttgattttcctatgcaaactagacatcaaagcagagagttacaaggatgtttccctctcttacctcttcctagtgaacaacattcagtttgtggttgataccgttcgttcaacacacctcaggaacctcctcggagacgactggctcacaaagcacgaagcaaaactcagaagctacgctgcaaactatgagatcgcagcgtgggccaatgtatacatatctttaccagagaaaacaagtagcagactatcaccagaggaagccaaaacacatttcaagaggtttcacgcggtattcgaagaagcttatatgaaacaatcatcatgtgtgataacagatgcaaaacttaggaacgagctaaaagtttccatagcaaagaaaatagtaccggaatacagagagttttacggtaagtacttgccaacgctgagtaaggagagaaacatagagatgctggtgagctttaagcctgataacttggagaactatctctcggatttgttccatggaacaccaatacttagtggctcttcttcttcttcttcctctttgtcttcttcatcttgtatctcacttggatgtgtaagaaactaa

SEQ ID NO: 87010 - protein, 596 aa, Arabidopsis thaliana; identical to SEQ ID NO: 69860
  peptide (1)..(596): Ceres Seq. ID no. 12696262
  misc_feature (1)..(568): Pfam Name: Exo70 exocyst complex subunit Pfam Description: Exo70 exocyst complex subunit
  misc_feature (1)..(596): Homolog of NCBI NO: 15225082 NR Description: hypothetical protein; protein id: At2g39380.1
  misc_feature (1)..(594): Homolog of NCBI NO: 11278980 NR Description: hypothetical protein T26I12.30 - Arabidopsis >gi|7019648|emb|CAB75749.1| putative protein [Arabidopsis
  misc_feature (1)..(594): Homolog of NCBI NO: 22331801 NR Description: putative protein; protein id: At3g55150.1, by cDNA: gi_18377617, supported by cDNA: gi_20465378 [Arabidopsis >gi|18377618|gb|AAL66959.1| unknown protein [Arabidopsis
  misc_feature (5)..(590): Homolog of NCBI NO: 15232697 NR Description: hypothetical protein; protein id: At3g09520.1 thaliana] >gi|6682261|gb|AAF23313.1|AC016661_38 hypothetical
  misc_feature (1)..(587): Homolog of NCBI NO: 23397263 NR Description: unknown protein [Arabidopsis thaliana]
  misc_feature (1)..(587): Homolog of NCBI NO: 15238510 NR Description: putative protein; protein id: At5g59730.1, by cDNA: gi_13430533, supported by cDNA: gi_14334437, supported cDNA: gi_15010739, supported by cDNA: gi_16974428, supported by
  misc_feature (1)..(572): Homolog of NCBI NO: 15232699 NR Description: hypothetical protein; protein id: At3g09530.1 thaliana] >gi|6682232|gb|AAF23284.1|AC016661_9 hypothetical
  misc_feature (1)..(528): Homolog of NCBI NO: 23397289 NR Description: unknown protein [Arabidopsis thaliana]
  misc_feature (3)..(587): Homolog of NCBI NO: 15226917 NR Description: unknown protein; protein id: At2g28640.1
  misc_feature (3)..(569): Homolog of NCBI NO: 25308573 NR Description: hypothetical protein [imported] - Arabidopsis >gi|8439895|gb|AAF75081.1|AC007583_17 It contains a interferon domain PF|00143. EST gb|N96176 comes from this gene. [Arabidopsis

SEQ ID NO: 87011 - protein, 547 aa, Arabidopsis thaliana
  peptide (1)..(547): Ceres Seq. ID no. 12696263
  misc_feature (1)..(519): Pfam Name: Exo70 exocyst complex subunit Pfam Description: Exo70 exocyst complex subunit
  misc_feature (1)..(547): Homolog of NCBI NO: 15225082 NR Description: hypothetical protein; protein id: At2g39380.1
  misc_feature (1)..(545): Homolog of NCBI NO: 11278980 NR Description: hypothetical protein T26I12.30 - Arabidopsis >gi|7019648|emb|CAB75749.1| putative protein [Arabidopsis
  misc_feature (1)..(545): Homolog of NCBI NO: 22331801 NR Description: putative protein; protein id: At3g55150.1, by cDNA: gi_18377617, supported by cDNA: gi_20465378 [Arabidopsis >gi|18377618|gb|AAL66959.1| unknown protein [Arabidopsis
  misc_feature (1)..(541): Homolog of NCBI NO: 15232697 NR Description: hypothetical protein; protein id: At3g09520.1 thaliana] >gi|6682261|gb|AAF23313.1|AC016661_38 hypothetical
  misc_feature (1)..(538): Homolog of NCBI NO: 23397263 NR Description: unknown protein [Arabidopsis thaliana]
  misc_feature (1)..(538): Homolog of NCBI NO: 15238510 NR Description: putative protein; protein id: At5g59730.1, by cDNA: gi_13430533, supported by cDNA: gi_14334437, supported cDNA: gi_15010739, supported by cDNA: gi_16974428, supported by
  misc_feature (1)..(523): Homolog of NCBI NO: 15232699 NR Description: hypothetical protein; protein id: At3g09530.1 thaliana] >gi|6682232|gb|AAF23284.1|AC016661_9 hypothetical
  misc_feature (1)..(479): Homolog of NCBI NO: 23397289 NR Description: unknown protein [Arabidopsis thaliana]
  misc_feature (1)..(538): Homolog of NCBI NO: 15226917 NR Description: unknown protein; protein id: At2g28640.1
  misc_feature (1)..(520): Homolog of NCBI NO: 25308573 NR Description: hypothetical protein [imported] - Arabidopsis >gi|8439895|gb|AAF75081.1|AC007583_17 It contains a interferon domain PF|00143. EST gb|N96176 comes from this gene. [Arabidopsis
MHFLISQHSKSAKLVLAQHLMQIAMARLEKEFFQILSSNRDQLDPESVSGHSSISSNSEFEDVMQSSDDEEEDELKKAGETITKVEKAAALVMSDLKVIAETMISCGYGKECIKSYKLIRKSIVDEGLHLLGIEKCKISRFNRMDWDVLEHMIKNWIKAAKIGVITLLRGEKLLCDHVFSASSTIRESCFYEIVNEAGINLFKFPELVAEKKPSPERIFRLMDLYAAISDLRPDIELIFHFDSVAAVKTLVLSSLKKLKDSIYTSLMEFESTIQKDSSKALTAGGGIHKLTRSTMSFISSLSEYSRVLSEILAEHPLKKNTRMLESYFTAPILEDEHNNHAVSVHLAWLILIFLCKLDIKAESYKDVSLSYLFLVNNIQFVVDTVRSTHLRNLLGDDWLTKHEAKLRSYAANYEIAAWANVYISLPEKTSSRLSPEEAKTHFKRFHAVFEEAYMKQSSCVITDAKLRNELKVSIAKKIVPEYREFYGKYLPTLSKERNIEMLVSFKPDNLENYLSDLFHGTPILSGSSSSSSSLSSSSCISLGCVRN

SEQ ID NO: 87012 - protein, 527 aa, Arabidopsis thaliana
  peptide (1)..(527): Ceres Seq. ID no. 12696264
  misc_feature (1)..(499): Pfam Name: Exo70 exocyst complex subunit Pfam Description: Exo70 exocyst complex subunit
  misc_feature (1)..(527): Homolog of NCBI NO: 15225082 NR Description: hypothetical protein; protein id: At2g39380.1
  misc_feature (1)..(525): Homolog of NCBI NO: 11278980 NR Description: hypothetical protein T26I12.30 - Arabidopsis >gi|7019648|emb|CAB75749.1| putative protein [Arabidopsis
  misc_feature (1)..(525): Homolog of NCBI NO: 22331801 NR Description: putative protein; protein id: At3g55150.1, by cDNA: gi_18377617, supported by cDNA: gi_20465378 [Arabidopsis >gi|18377618|gb|AAL66959.1| unknown protein [Arabidopsis
  misc_feature (1)..(521): Homolog of NCBI NO: 15232697 NR Description: hypothetical protein; protein id: At3g09520.1 thaliana] >gi|6682261|gb|AAF23313.1|AC016661_38 hypothetical
  misc_feature (1)..(518): Homolog of NCBI NO: 23397263 NR Description: unknown protein [Arabidopsis thaliana]
  misc_feature (1)..(518): Homolog of NCBI NO: 15238510 NR Description: putative protein; protein id: At5g59730.1, by cDNA: gi_13430533, supported by cDNA: gi_14334437, supported cDNA: gi_15010739, supported by cDNA: gi_16974428, supported by
  misc_feature (1)..(503): Homolog of NCBI NO: 15232699 NR Description: hypothetical protein; protein id: At3g09530.1 thaliana] >gi|6682232|gb|AAF23284.1|AC016661_9 hypothetical
  misc_feature (1)..(459): Homolog of NCBI NO: 23397289 NR Description: unknown protein [Arabidopsis thaliana]
  misc_feature (1)..(518): Homolog of NCBI NO: 15226917 NR Description: unknown protein; protein id: At2g28640.1
  misc_feature (1)..(500): Homolog of NCBI NO: 25308573 NR Description: hypothetical protein [imported] - Arabidopsis >gi|8439895|gb|AAF75081.1|AC007583_17 It contains a interferon domain PF|00143. EST gb|N96176 comes from this gene. [Arabidopsis
MQIAMARLEKEFFQILSSNRDQLDPESVSGHSSISSNSEFEDVMQSSDDEEEDELKKAGETITKVEKAAALVMSDLKVIAETMISCGYGKECIKSYKLIRKSIVDEGLHLLGIEKCKISRFNRMDWDVLEHMIKNWIKAAKIGVITLLRGEKLLCDHVFSASSTIRESCFYEIVNEAGINLFKFPELVAEKKPSPERIFRLMDLYAAISDLRPDIELIFHFDSVAAVKTLVLSSLKKLKDSIYTSLMEFESTIQKDSSKALTAGGGIHKLTRSTMSFISSLSEYSRVLSEILAEHPLKKNTRMLESYFTAPILEDEHNNHAVSVHLAWLILIFLCKLDIKAESYKDVSLSYLFLVNNIQFVVDTVRSTHLRNLLGDDWLTKHEAKLRSYAANYEIAAWANVYISLPEKTSSRLSPEEAKTHFKRFHAVFEEAYMKQSSCVITDAKLRNELKVSIAKKIVPEYREFYGKYLPTLSKERNIEMLVSFKPDNLENYLSDLFHGTPILSGSSSSSSSLSSSSCISLGCVRN

SEQ ID NO: 87013 - DNA, 2874 bp, Arabidopsis thaliana
  misc_feature (1)..(2874): Ceres Seq. ID no. 12696288
  misc_feature: MA Experiment ID: 20000355 Result: Down-regulated in Transcription
  misc_feature: MA Experiment 20000355 PARAMETER Experiment Name: At_Siliques_Sub_P Parameter: Age (day) Value: 21
  misc_feature: MA Experiment 20000355 PARAMETER Experiment Name: At_Siliques_Sub_P Parameter: Organism Value: A. thaliana
  misc_feature: MA Experiment 20000355 PARAMETER Experiment Name: At_Siliques_Sub_P Parameter: Plant Line Value: WS
  misc_feature: MA Experiment 20000355 PARAMETER Experiment Name: At_Siliques_Sub_P Parameter: Tissue Value: Less Than 5mm Siliques vs. Whole Plant
atgccaattaactacactaacctcctccttatgctccgggaatgtaagaacttccggtgtcttcttcaagttcacggcagcttgatagtctcaggtcttaaacctcataaccagctcataaacgcttattctctctttcaaagacaggacctttctcgcgtcatctttgattcagttcgagatccaggtgttgtcttgtggaattcaatgatcagaggatacacgagagccggtttgcacagagaagctctcggattcttcgggtatatgtcggaggagaaaggtattgatccagacaagtacagtttcacttttgctttgaaggcttgtgccggatctatggactttaagaagggtttacggatacatgatttgattgctgagatgggtcttgagtctgatgtttatataggaactgcgttagttgaaatgtattgtaaagctcgtgacttggtttctgcaagacaagtgttcgataaaatgcatgtgaaggatgttgttacttggaacactatggtttccgggttggctcaaaatggatgttctagtgcagctttgctgttgtttcatgatatgcgttcgtgttgtgttgacattgatcatgttagtttatataatctgatccctgcggtttcgaagctagagaagagtgatgtctgtagatgtcttcacggacttgtgattaagaaaggttttatctttgctttctctagtgggctgattgacatgtattgcaactgcgcggatttatatgctgctgaatctgtttttgaagaagtgtggaggaaggatgagtcttcatggggtacaatgatggcagcttatgcacataatgggttctttgaggaggtattggagttgtttgaccttatgagaaactatgatgttagaatgaataaggtagctgcagcaagtgctcttcaagctgctgcatatgtaggggatttagtgaaggggattgcaattcatgattacgcagtgcaacaaggattgatcggtgatgtctcagttgctacttctcttatgagtatgtattccaaatgtggtgagttggagatagccgaacaactgttcattaatattgaagatagagatgttgtttcttggtctgccatgattgcgtcgtatgagcaagcagggcaacacgatgaggctatctctttgtttagagatatgatgagaatacatatcaagcctaatgctgtaactttgactagtgtgctacaagggtgtgcaggagtagccgcctctagattgggtaagagcatacattgttatgctataaaggctgatattgagtctgagttggaaactgccacagctgttatttcaatgtacgctaaatgtggtcgattttctcccgcgctcaaagcctttgaaagactgccaattaaagatgctgtggcattcaacgctctagcgcaagggtatactcagattggtgatgccaataaagcatttgatgtgtacaagaacatgaagttacatggtgtatgcccagactcaagaactatggttggtatgcttcaaacttgtgccttctgtagtgactatgctcgaggttcttgtgtttatggacaaattataaagcatgggttcgattcagaatgtcacgtggcacatgctcttatcaatatgttcaccaaatgtgatgccctcgctgcagcgatagttttgtttgacaagtgtggattcgagaaaagtactgtatcttggaatataatgatgaacgggtacttactccatggccaggctgaagaagctgttgccacttttcgtcagatgaaggttgagaaatttcagccaaatgcagtcacttttgttaacatagtacgcgcagcagcagaattatcagccttgagagtaggaatgtcggttcattccagtctcattcagtgtggattttgttcccaaacaccagtaggaaacagccttgttgacatgtatgcgaaatgtggaatgatagaatcttccgagaaatgctttattgagataagcaacaaatacatagtttcatggaacactatgctatccgcttacgcagcccacggtctagcaagctgtgcggtctcacttttcttgtccatgcaagaaaacgaactcaaaccagactctgtttcctttctcagtgttctttcagcttgtagacacgcagggttagtcgaagaaggaaaacgaattttcgaggaaatgggagagagacacaagatcgaagcagaagttgaacattacgcgtgtatggtagatctattagggaaggctggtttgtttggtgaagctgtggaaatgatgagaagaatgagagtgaaaacaagtgtaggagtatggggagctttattaaattcttcaagaatgcattgtaatttgtggttaagcaatgctgcattgtgtcagcttgttaaacttgagccactaaatccttctcattatagtcaagatcggagattaggagagttgaaattgaaatcggcagaggcgataatggtgagggctagcgtcttaaacgattgtctcaagagcatgagtaatgcagagaaacaagggaaacgccaagtcatgataagaccatcttccaaagtgatcattaagtttctcactgtgatgcaaaagcatggttacattgcagagtttgaatatgtggatgatcacagatccgggaagattgtggttgagcttaatggaaggcttaacaactgcggtgttattagtcctcgatatgaccttggcgtcaaggaaattgaaggttggactgctaaattgctcccttcaagacagtttgggtacattgtcctgacaacatcagctggaatcatggaccatgaagaggctaggaagaaaaatgttgggggcaaagtgcttggttttttctactag

SEQ ID NO: 87014 - protein, 957 aa, Arabidopsis thaliana
  peptide (1)..(957): Ceres Seq. ID no. 12696289
  misc_feature (832)..(957): Pfam Name: Ribosomal protein S8 Pfam Description: Ribosomal protein S8
  misc_feature (52)..(810): Homolog of NCBI NO: 34903762 NR Description: unnamed protein product [Oryza sativa (japonica group)] >gi|7340873|dbj|BAA92963.1| unnamed protein product
  misc_feature (96)..(810): Homolog of NCBI NO: 15232006 NR Description: hypothetical protein; protein id: At3g09040.1 thaliana] >gi|5923669|gb|AAD56320.1|AC009326_7 hypothetical
  misc_feature (23)..(810): Homolog of NCBI NO: 15236324 NR Description: putative protein; protein id: At4g13650.1
  misc_feature (221)..(810): Homolog of NCBI NO: 25354624 NR Description: protein F3O9.28 [imported] - Arabidopsis thaliana
  misc_feature (24)..(191): Homolog of NCBI NO: 25354624 NR Description: protein F3O9.28 [imported] - Arabidopsis thaliana
  misc_feature (134)..(810): Homolog of NCBI NO: 37536800 NR Description: putative PPR-repeat protein [Oryza sativa
  misc_feature (78)..(192): Homolog of NCBI NO: 37536800 NR Description: putative PPR-repeat protein [Oryza sativa
  misc_feature (2)..(810): Homolog of NCBI NO: 15221304 NR Description: hypothetical protein; protein id: At1g74600.1
  misc_feature (122)..(882): Homolog of NCBI NO: 15235115 NR Description: putative protein; protein id: At4g39530.1
  misc_feature (122)..(810): Homolog of NCBI NO: 38423978 NR Description: PPR-repeat protein-like [Oryza sativa (japonica
MPINYTNLLLMLRECKNFRCLLQVHGSLIVSGLKPHNQLINAYSLFQRQDLSRVIFDSVRDPGVVLWNSMIRGYTRAGLHREALGFFGYMSEEKGIDPDKYSFTFALKACAGSMDFKKGLRIHDLIAEMGLESDVYIGTALVEMYCKARDLVSARQVFDKMHVKDVVTWNTMVSGLAQNGCSSAALLLFHDMRSCCVDIDHVSLYNLIPAVSKLEKSDVCRCLHGLVIKKGFIFAFSSGLIDMYCNCADLYAAESVFEEVWRKDESSWGTMMAAYAHNGFFEEVLELFDLMRNYDVRMNKVAAASALQAAAYVGDLVKGIAIHDYAVQQGLIGDVSVATSLMSMYSKCGELEIAEQLFINIEDRDVVSWSAMIASYEQAGQHDEAISLFRDMMRIHIKPNAVTLTSVLQGCAGVAASRLGKSIHCYAIKADIESELETATAVISMYAKCGRFSPALKAFERLPIKDAVAFNALAQGYTQIGDANKAFDVYKNMKLHGVCPDSRTMVGMLQTCAFCSDYARGSCVYGQIIKHGFDSECHVAHALINMFTKCDALAAAIVLFDKCGFEKSTVSWNIMMNGYLLHGQAEEAVATFRQMKVEKFQPNAVTFVNIVRAAAELSALRVGMSVHSSLIQCGFCSQTPVGNSLVDMYAKCGMIESSEKCFIEISNKYIVSWNTMLSAYAAHGLASCAVSLFLSMQENELKPDSVSFLSVLSACRHAGLVEEGKRIFEEMGERHKIEAEVEHYACMVDLLGKAGLFGEAVEMMRRMRVKTSVGVWGALLNSSRMHCNLWLSNAALCQLVKLEPLNPSHYSQDRRLGELKLKSAEAIMVRASVLNDCLKSMSNAEKQGKRQVMIRPSSKVIIKFLTVMQKHGYIAEFEYVDDHRSGKIVVELNGRLNNCGVISPRYDLGVKEIEGWTAKLLPSRQFGYIVLTTSAGIMDHEEARKKNVGGKVLGFFY

SEQ ID NO: 87015 - protein, 947 aa, Arabidopsis thaliana
  peptide (1)..(947): Ceres Seq. ID no. 12696290
  misc_feature (822)..(947): Pfam Name: Ribosomal protein S8 Pfam Description: Ribosomal protein S8
  misc_feature (42)..(800): Homolog of NCBI NO: 34903762 NR Description: unnamed protein product [Oryza sativa (japonica group)] >gi|7340873|dbj|BAA92963.1| unnamed protein product
  misc_feature (86)..(800): Homolog of NCBI NO: 15232006 NR Description: hypothetical protein; protein id: At3g09040.1 thaliana] >gi|5923669|gb|AAD56320.1|AC009326_7 hypothetical
  misc_feature (13)..(800): Homolog of NCBI NO: 15236324 NR Description: putative protein; protein id: At4g13650.1
  misc_feature (211)..(800): Homolog of NCBI NO: 25354624 NR Description: protein F3O9.28 [imported] - Arabidopsis thaliana
  misc_feature (14)..(181): Homolog of NCBI NO: 25354624 NR Description: protein F3O9.28 [imported] - Arabidopsis thaliana
  misc_feature (124)..(800): Homolog of NCBI NO: 37536800 NR Description: putative PPR-repeat protein [Oryza sativa
  misc_feature (68)..(182): Homolog of NCBI NO: 37536800 NR Description: putative PPR-repeat protein [Oryza sativa
  misc_feature (1)..(800): Homolog of NCBI NO: 15221304 NR Description: hypothetical protein; protein id: At1g74600.1
  misc_feature (112)..(872): Homolog of NCBI NO: 15235115 NR Description: putative protein; protein id: At4g39530.1
  misc_feature (112)..(800): Homolog of NCBI NO: 38423978 NR Description: PPR-repeat protein-like [Oryza sativa (japonica
MLRECKNFRCLLQVHGSLIVSGLKPHNQLINAYSLFQRQDLSRVIFDSVRDPGVVLWNSMIRGYTRAGLHREALGFFGYMSEEKGIDPDKYSFTFALKACAGSMDFKKGLRIHDLIAEMGLESDVYIGTALVEMYCKARDLVSARQVFDKMHVKDVVTWNTMVSGLAQNGCSSAALLLFHDMRSCCVDIDHVSLYNLIPAVSKLEKSDVCRCLHGLVIKKGFIFAFSSGLIDMYCNCADLYAAESVFEEVWRKDESSWGTMMAAYAHNGFFEEVLELFDLMRNYDVRMNKVAAASALQAAAYVGDLVKGIAIHDYAVQQGLIGDVSVATSLMSMYSKCGELEIAEQLFINIEDRDVVSWSAMIASYEQAGQHDEAISLFRDMMRIHIKPNAVTLTSVLQGCAGVAASRLGKSIHCYAIKADIESELETATAVISMYAKCGRFSPALKAFERLPIKDAVAFNALAQGYTQIGDANKAFDVYKNMKLHGVCPDSRTMVGMLQTCAFCSDYARGSCVYGQIIKHGFDSECHVAHALINMFTKCDALAAAIVLFDKCGFEKSTVSWNIMMNGYLLHGQAEEAVATFRQMKVEKFQPNAVTFVNIVRAAAELSALRVGMSVHSSLIQCGFCSQTPVGNSLVDMYAKCGMIESSEKCFIEISNKYIVSWNTMLSAYAAHGLASCAVSLFLSMQENELKPDSVSFLSVLSACRHAGLVEEGKRIFEEMGERHKIEAEVEHYACMVDLLGKAGLFGEAVEMMRRMRVKTSVGVWGALLNSSRMHCNLWLSNAALCQLVKLEPLNPSHYSQDRRLGELKLKSAEAIMVRASVLNDCLKSMSNAEKQGKRQVMIRPSSKVIIKFLTVMQKHGYIAEFEYVDDHRSGKIVVELNGRLNNCGVISPRYDLGVKEIEGWTAKLLPSRQFGYIVLTTSAGIMDHEEARKKNVGGKVLGFFY

SEQ ID NO: 87016 - protein, 888 aa, Arabidopsis thaliana
  peptide (1)..(888): Ceres Seq. ID no. 12696291
  misc_feature (763)..(888): Pfam Name: Ribosomal protein S8 Pfam Description: Ribosomal protein S8
  misc_feature (1)..(741): Homolog of NCBI NO: 34903762 NR Description: unnamed protein product [Oryza sativa (japonica group)] >gi|7340873|dbj|BAA92963.1| unnamed protein product
  misc_feature (27)..(741): Homolog of NCBI NO: 15232006 NR Description: hypothetical protein; protein id: At3g09040.1 thaliana] >gi|5923669|gb|AAD56320.1|AC009326_7 hypothetical
  misc_feature (1)..(741): Homolog of NCBI NO: 15236324 NR Description: putative protein; protein id: At4g13650.1
  misc_feature (152)..(741): Homolog of NCBI NO: 25354624 NR Description: protein F3O9.28 [imported] - Arabidopsis thaliana
  misc_feature (1)..(122): Homolog of NCBI NO: 25354624 NR Description: protein F3O9.28 [imported] - Arabidopsis thaliana
  misc_feature (65)..(741): Homolog of NCBI NO: 37536800 NR Description: putative PPR-repeat protein [Oryza sativa
  misc_feature (9)..(123): Homolog of NCBI NO: 37536800 NR Description: putative PPR-repeat protein [Oryza sativa
  misc_feature (1)..(741): Homolog of NCBI NO: 15221304 NR Description: hypothetical protein; protein id: At1g74600.1
  misc_feature (53)..(813): Homolog of NCBI NO: 15235115 NR Description: putative protein; protein id: At4g39530.1
  misc_feature (53)..(741): Homolog of NCBI NO: 38423978 NR Description: PPR-repeat protein-like [Oryza sativa (japonica
MIRGYTRAGLHREALGFFGYMSEEKGIDPDKYSFTFALKACAGSMDFKKGLRIHDLIAEMGLESDVYIGTALVEMYCKARDLVSARQVFDKMHVKDVVTWNTMVSGLAQNGCSSAALLLFHDMRSCCVDIDHVSLYNLIPAVSKLEKSDVCRCLHGLVIKKGFIFAFSSGLIDMYCNCADLYAAESVFEEVWRKDESSWGTMMAAYAHNGFFEEVLELFDLMRNYDVRMNKVAAASALQAAAYVGDLVKGIAIHDYAVQQGLIGDVSVATSLMSMYSKCGELEIAEQLFINIEDRDVVSWSAMIASYEQAGQHDEAISLFRDMMRIHIKPNAVTLTSVLQGCAGVAASRLGKSIHCYAIKADIESELETATAVISMYAKCGRFSPALKAFERLPIKDAVAFNALAQGYTQIGDANKAFDVYKNMKLHGVCPDSRTMVGMLQTCAFCSDYARGSCVYGQIIKHGFDSECHVAHALINMFTKCDALAAAIVLFDKCGFEKSTVSWNIMMNGYLLHGQAEEAVATFRQMKVEKFQPNAVTFVNIVRAAAELSALRVGMSVHSSLIQCGFCSQTPVGNSLVDMYAKCGMIESSEKCFIEISNKYIVSWNTMLSAYAAHGLASCAVSLFLSMQENELKPDSVSFLSVLSACRHAGLVEEGKRIFEEMGERHKIEAEVEHYACMVDLLGKAGLFGEAVEMMRRMRVKTSVGVWGALLNSSRMHCNLWLSNAALCQLVKLEPLNPSHYSQDRRLGELKLKSAEAIMVRASVLNDCLKSMSNAEKQGKRQVMIRPSSKVIIKFLTVMQKHGYIAEFEYVDDHRSGKIVVELNGRLNNCGVISPRYDLGVKEIEGWTAKLLPSRQFGYIVLTTSAGIMDHEEARKKNVGGKVLGFFY

SEQ ID NO: 87017 - DNA, 1533 bp, Arabidopsis thaliana
  misc_feature (1)..(1533): Ceres Seq. ID no. 12696296
  misc_feature: MA Experiment ID: 20000227 Result: Up-regulated in Transcription
  misc_feature: MA Experiment 20000227 PARAMETER Experiment Name: At_Root-Tips-vs-Tops_P Parameter: Tissue Value: Root Tips vs. Root Tops
  misc_feature: MA Experiment ID: 20001451 Result: Down-regulated in Transcription
  misc_feature: MA Experiment 20001451 PARAMETER Experiment Name: At_Far-red-induction_P Parameter: Age (day) Value: 7
  misc_feature: MA Experiment 20001451 PARAMETER Experiment Name: At_Far-red-induction_P Parameter: Light Value: Far-red vs. White
  misc_feature: MA Experiment 20001451 PARAMETER Experiment Name: At_Far-red-induction_P Parameter: Organism Value: A. thaliana
  misc_feature: MA Experiment 20001451 PARAMETER Experiment Name: At_Far-red-induction_P Parameter: Plant Line Value: Columbia
  misc_feature: MA Experiment 20001451 PARAMETER Experiment Name: At_Far-red-induction_P Parameter: Timepoint (hr) Value: 24
  misc_feature: MA Experiment 20001451 PARAMETER Experiment Name: At_Far-red-induction_P Parameter: Tissue Value: Whole Plant
atgaaatgtcatcgaatggacccgtttccttcttcttatgtttctctgaaactcatgaaatttgaggaactactcatggaagattcatcacagctacatagtaacaagagacatgacttagaggaaggagtgatgcatcttaaagagagactagaggaagaagaagcagtgactagaactttacgagttgcttttgatggctctattgtttctctcccaagtctctcctcattgtttcttccacctcaggcaataccaataaacataacctcacataatatgaccgagcagaagaggacattggcaagacagagccatgtgagacagagtactctgccactaagacatgatcttcatcaacgatctttgtctcattgttaccaacgttctacactagacactgcctcaactactcattcaagactctcattctcttacgctcctgatttcttggatgccacttcttcaggtggcttcacagacgaatttgatggagtcacgaggatgcagatgggtagagtaagaaaagggcttcgacttgttgaagcaaagaccaaagacgacccaaacgaagtatcagaacaactcatcaactgtcttataggcatttacttggaactcaatcatgtttcatcaaagaccaaaggggatgtctcgctctcaagaaggccatcttcttgtagccggaaatcaaacacatatagttattatcaaaatgcaatgaatcttgatccttatcacgtattgccagactcgagcggaggagtcaccagagacattggcccttacaagaacttcatccacatttcaagaagttccatcgatgtgacacatttcacccattattgttcaccggctgttccacgcttgagcgttttgatggagaaattatcggaggtagatttgagttttttgacctacaagcaaaaactagccttctggatcaatatctacaacgcatgtatcatgcatgcatttcttgagtatgggttaccatcgtcacacaatagactacttaccttgatgaacaaggcttcactcaacgtaggtggcatagtcctcaacgctttggcgattgaacatttcgtcttgcggcatccttgtgaaccagaagatgactcgcttgacgagaaagaaacgctccttcgtcacacttacggtttaggatattcagagcccaatgtgacatttgcactttgccgtggaagttggtcttcaccagcactaagagtctatacagcagatgaagtggtgaatgatttaggaagagcaagagtggaatatctagaagcttctgtgggtgtttcaagcaagaaaaagattgtggttccacagcttctgcaatggcacatgaaagattttgcagatgatattgaatctcttttggaatggatctatagccagttgcctcgatcagggaacctaaagggcatgattatggaatgtctaaagagaaaagcaaaagttcctttagctaaaattgtagagattcaaacatatggacacgaatttcgttacttgttgtcattgtaa

SEQ ID NO: 87018 - protein, 510 aa, Arabidopsis thaliana
  peptide (1)..(510): Ceres Seq. ID no. 12696297
  misc_feature (291)..(429): Pfam Name: Protein of unknown function, DUF547 Pfam Description: Protein of unknown function, DUF547
  misc_feature (1)..(510): Homolog of NCBI NO: 15225527 NR Description: hypothetical protein; protein id: At2g39690.1
  misc_feature (94)..(510): Homolog of NCBI NO: 9294368 NR Description: gb|AAB97123.1~gene_id:T16H11.2~similar to unknown
  misc_feature (4)..(83): Homolog of NCBI NO: 9294368 NR Description: gb|AAB97123.1~gene_id:T16H11.2~similar to unknown
  misc_feature (94)..(510): Homolog of NCBI NO: 15230524 NR Description: hypothetical protein; protein id: At3g12540.1
  misc_feature (4)..(83): Homolog of NCBI NO: 15230524 NR Description: hypothetical protein; protein id: At3g12540.1
  misc_feature (176)..(510): Homolog of NCBI NO: 34895788 NR Description: P0434B04.9 [Oryza sativa (japonica
  misc_feature (243)..(508): Homolog of NCBI NO: 25407787 NR Description: hypothetical protein AT4g37080 [imported] - thaliana >gi|4006868|emb|CAB16786.1| putative protein thaliana] >gi|7270657|emb|CAB80374.1| putative protein
  misc_feature (243)..(508): Homolog of NCBI NO: 30690854 NR Description: expressed protein [Arabidopsis thaliana] AT4g37080/C7A10_280 [Arabidopsis thaliana]
  misc_feature (32)..(510): Homolog of NCBI NO: 15239037 NR Description: putative protein; protein id: At5g42690.1 thaliana] >gi|10177272|dbj|BAB10625.1|
  misc_feature (225)..(510): Homolog of NCBI NO: 15983811 NR Description: AT5g60720/mup24_130 [Arabidopsis thaliana]
MKCHRMDPFPSSYVSLKLMKFEELLMEDSSQLHSNKRHDLEEGVMHLKERLEEEEAVTRTLRVAFDGSIVSLPSLSSLFLPPQAIPINITSHNMTEQKRTLARQSHVRQSTLPLRHDLHQRSLSHCYQRSTLDTASTTHSRLSFSYAPDFLDATSSGGFTDEFDGVTRMQMGRVRKGLRLVEAKTKDDPNEVSEQLINCLIGIYLELNHVSSKTKGDVSLSRRPSSCSRKSNTYSYYQNAMNLDPYHVLPDSSGGVTRDIGPYKNFIHISRSSIDVTHFTHYCSPAVPRLSVLMEKLSEVDLSFLTYKQKLAFWINIYNACIMHAFLEYGLPSSHNRLLTLMNKASLNVGGIVLNALAIEHFVLRHPCEPEDDSLDEKETLLRHTYGLGYSEPNVTFALCRGSWSSPALRVYTADEVVNDLGRARVEYLEASVGVSSKKKIVVPQLLQWHMKDFADDIESLLEWIYSQLPRSGNLKGMIMECLKRKAKVPLAKIVEIQTYGHEFRYLLSL

SEQ ID NO: 87019 - protein, 505 aa, Arabidopsis thaliana
  peptide (1)..(505): Ceres Seq. ID no. 12696298
  misc_feature (286)..(424): Pfam Name: Protein of unknown function, DUF547 Pfam Description: Protein of unknown function, DUF547
  misc_feature (1)..(505): Homolog of NCBI NO: 15225527 NR Description: hypothetical protein; protein id: At2g39690.1
  misc_feature (89)..(505): Homolog of NCBI NO: 9294368 NR Description: gb|AAB97123.1~gene_id:T16H11.2~similar to unknown
  misc_feature (1)..(78): Homolog of NCBI NO: 9294368 NR Description: gb|AAB97123.1~gene_id:T16H11.2~similar to unknown
  misc_feature (89)..(505): Homolog of NCBI NO: 15230524 NR Description: hypothetical protein; protein id: At3g12540.1
  misc_feature (1)..(78): Homolog of NCBI NO: 15230524 NR Description: hypothetical protein; protein id: At3g12540.1
  misc_feature (171)..(505): Homolog of NCBI NO: 34895788 NR Description: P0434B04.9 [Oryza sativa (japonica
  misc_feature (238)..(503): Homolog of NCBI NO: 25407787 NR Description: hypothetical protein AT4g37080 [imported] - thaliana >gi|4006868|emb|CAB16786.1| putative protein thaliana] >gi|7270657|emb|CAB80374.1| putative protein
  misc_feature (238)..(503): Homolog of NCBI NO: 30690854 NR Description: expressed protein [Arabidopsis thaliana] AT4g37080/C7A10_280 [Arabidopsis thaliana]
  misc_feature (27)..(505): Homolog of NCBI NO: 15239037 NR Description: putative protein; protein id: At5g42690.1 thaliana] >gi|10177272|dbj|BAB10625.1|
  misc_feature (220)..(505): Homolog of NCBI NO: 15983811 NR Description: AT5g60720/mup24_130 [Arabidopsis thaliana]
MDPFPSSYVSLKLMKFEELLMEDSSQLHSNKRHDLEEGVMHLKERLEEEEAVTRTLRVAFDGSIVSLPSLSSLFLPPQAIPINITSHNMTEQKRTLARQSHVRQSTLPLRHDLHQRSLSHCYQRSTLDTASTTHSRLSFSYAPDFLDATSSGGFTDEFDGVTRMQMGRVRKGLRLVEAKTKDDPNEVSEQLINCLIGIYLELNHVSSKTKGDVSLSRRPSSCSRKSNTYSYYQNAMNLDPYHVLPDSSGGVTRDIGPYKNFIHISRSSIDVTHFTHYCSPAVPRLSVLMEKLSEVDLSFLTYKQKLAFWINIYNACIMHAFLEYGLPSSHNRLLTLMNKASLNVGGIVLNALAIEHFVLRHPCEPEDDSLDEKETLLRHTYGLGYSEPNVTFALCRGSWSSPALRVYTADEVVNDLGRARVEYLEASVGVSSKKKIVVPQLLQWHMKDFADDIESLLEWIYSQLPRSGNLKGMIMECLKRKAKVPLAKIVEIQTYGHEFRYLLSL

SEQ ID NO: 87020 - protein, 492 aa, Arabidopsis thaliana
  peptide (1)..(492): Ceres Seq. ID no. 12696299
  misc_feature (273)..(411): Pfam Name: Protein of unknown function, DUF547 Pfam Description: Protein of unknown function, DUF547
  misc_feature (1)..(492): Homolog of NCBI NO: 15225527 NR Description: hypothetical protein; protein id: At2g39690.1
  misc_feature (76)..(492): Homolog of NCBI NO: 9294368 NR Description: gb|AAB97123.1~gene_id:T16H11.2~similar to unknown
  misc_feature (1)..(65): Homolog of NCBI NO: 9294368 NR Description: gb|AAB97123.1~gene_id:T16H11.2~similar to unknown
  misc_feature (76)..(492): Homolog of NCBI NO: 15230524 NR Description: hypothetical protein; protein id: At3g12540.1
  misc_feature (1)..(65): Homolog of NCBI NO: 15230524 NR Description: hypothetical protein; protein id: At3g12540.1
  misc_feature (158)..(492): Homolog of NCBI NO: 34895788 NR Description: P0434B04.9 [Oryza sativa (japonica
  misc_feature (225)..(490): Homolog of NCBI NO: 25407787 NR Description: hypothetical protein AT4g37080 [imported] - thaliana >gi|4006868|emb|CAB16786.1| putative protein thaliana] >gi|7270657|emb|CAB80374.1| putative protein
  misc_feature (225)..(490): Homolog of NCBI NO: 30690854 NR Description: expressed protein [Arabidopsis thaliana] AT4g37080/C7A10_280 [Arabidopsis thaliana]
  misc_feature (14)..(492): Homolog of NCBI NO: 15239037 NR Description: putative protein; protein id: At5g42690.1 thaliana] >gi|10177272|dbj|BAB10625.1|
  misc_feature (207)..(492): Homolog of NCBI NO: 15983811 NR Description: AT5g60720/mup24_130 [Arabidopsis thaliana]
MKFEELLMEDSSQLHSNKRHDLEEGVMHLKERLEEEEAVTRTLRVAFDGSIVSLPSLSSLFLPPQAIPINITSHNMTEQKRTLARQSHVRQSTLPLRHDLHQRSLSHCYQRSTLDTASTTHSRLSFSYAPDFLDATSSGGFTDEFDGVTRMQMGRVRKGLRLVEAKTKDDPNEVSEQLINCLIGIYLELNHVSSKTKGDVSLSRRPSSCSRKSNTYSYYQNAMNLDPYHVLPDSSGGVTRDIGPYKNFIHISRSSIDVTHFTHYCSPAVPRLSVLMEKLSEVDLSFLTYKQKLAFWINIYNACIMHAFLEYGLPSSHNRLLTLMNKASLNVGGIVLNALAIEHFVLRHPCEPEDDSLDEKETLLRHTYGLGYSEPNVTFALCRGSWSSPALRVYTADEVVNDLGRARVEYLEASVGVSSKKKIVVPQLLQWHMKDFADDIESLLEWIYSQLPRSGNLKGMIMECLKRKAKVPLAKIVEIQTYGHEFRYLLSL

SEQ ID NO: 87021 - DNA, 924 bp, Arabidopsis thaliana
  misc_feature (1)..(924): Ceres Seq. ID no. 12696315
  misc_feature: MA Experiment ID: 108434 Result: Up-regulated in Transcription
  misc_feature: MA Experiment 108434 PARAMETER Experiment Name: At_Root_Tips_cDNA_P Parameter: Tissue Value: Root Tips
  misc_feature: MA Experiment ID: 108461 Result: Down-regulated in Transcription
  misc_feature: MA Experiment 108461 PARAMETER Experiment Name: At_Germinating_Seeds_cDNA_P Parameter: Age (day) Value: 1 vs. 0
  misc_feature: MA Experiment 108461 PARAMETER Experiment Name: At_Germinating_Seeds_cDNA_P Parameter: Tissue Value: Germinating Seeds
  misc_feature: MA Experiment ID: 108462 Result: Down-regulated in Transcription
  misc_feature: MA Experiment 108462 PARAMETER Experiment Name: At_Germinating_Seeds_cDNA_P Parameter: Age (day) Value: 2 vs. 0
  misc_feature: MA Experiment 108462 PARAMETER Experiment Name: At_Germinating_Seeds_cDNA_P Parameter: Tissue Value: Germinating Seeds
  misc_feature: MA Experiment ID: 108463 Result: Down-regulated in Transcription
  misc_feature: MA Experiment 108463 PARAMETER Experiment Name: At_Germinating_Seeds_cDNA_P Parameter: Age (day) Value: 3 vs. 0
  misc_feature: MA Experiment 108463 PARAMETER Experiment Name: At_Germinating_Seeds_cDNA_P Parameter: Tissue Value: Germinating Seeds
  misc_feature: MA Experiment ID: 108464 Result: Down-regulated in Transcription
  misc_feature: MA Experiment 108464 PARAMETER Experiment Name: At_Germinating_Seeds_cDNA_P Parameter: Age (day) Value: 4 vs. 0
  misc_feature: MA Experiment 108464 PARAMETER Experiment Name: At_Germinating_Seeds_cDNA_P Parameter: Tissue Value: Germinating Seeds
  misc_feature: MA Experiment ID: 20000180 Result: Down-regulated in Transcription
  misc_feature: MA Experiment 20000180 PARAMETER Experiment Name: At_Germinating_Seeds_P Parameter: Age (hr) Value: 24 vs. 0
  misc_feature: MA Experiment 20000180 PARAMETER Experiment Name: At_Germinating_Seeds_P Parameter: Tissue Value: Germinating Seeds
  misc_feature: MA Experiment ID: 20001905 Result: Down-regulated in Transcription
  misc_feature: MA Experiment 20001905 PARAMETER Experiment Name: At_Drought_Reproduction_P Parameter: Age (day) Value: 40
  misc_feature: MA Experiment 20001905 PARAMETER Experiment Name: At_Drought_Reproduction_P Parameter: Organism Value: A. thaliana
  misc_feature: MA Experiment 20001905 PARAMETER Experiment Name: At_Drought_Reproduction_P Parameter: Plant Line Value: WS
  misc_feature: MA Experiment 20001905 PARAMETER Experiment Name: At_Drought_Reproduction_P Parameter: Timepoint (day) Value: 10
  misc_feature: MA Experiment 20001905 PARAMETER Experiment Name: At_Drought_Reproduction_P Parameter: Tissue Value: Rosettes
  misc_feature: MA Experiment 20001905 PARAMETER Experiment Name: At_Drought_Reproduction_P Parameter: Treatment Value: Drought vs. No Drought
actcacagaagaagagagaatcaatcaaatcaaatcaccatggctttagcttggtgcgttgtacgcaggtcagcatctaagtttgcttccgtttatggtggccgagtccgatctatctccgccgttgcgaaccgcgcctctctagctcgcaacccatcttcaattcgtccattcgtctctcgcgccttaaattactcgacggctattgatcgaattagctccgagcaaacgcttatccgagttattgactccgaaatcaactctgctttgcaatccgataatatcgattcggatgaagagatgactccaggaagctttccttttagaattgaagacaaacctggaaatcagaatgttacattgactagagactacaatggggaacatattaaagttgttgtaagcatgcctagtcttgtttcagatgaaaatgatgatgatgatgatgatgatgaaggtcctagtaatgaatcgagtattccactagttgtgactgttactaagaagagtggactcactctagagtttagctgtatggcttttcctgatgagattgctatagatgctttatctgtgaaacatcctggggactctttggaggatcaactggctaatgaagggcctgattttgaagacttggacgagaatctgaagaagacgttctacaagtttttggagatcagaggagtgaaagctagcacgacgaatttcctgcacgagtacatgacgaggaaagtgaaccgagagtactttttatggttgaagaatgttaaggagttcatggaacagtgaaacgttaggttgatagctaagtacctaagaatgagattgtgaggttcttttcttgtgttcattgttagctttcaaatgtagcacaatctttgagaatttatggttaagagtttccagttctgattcaacttg

SEQ ID NO: 87022 - protein, 263 aa, Arabidopsis thaliana; identical to SEQ ID NO: 24864
  peptide (1)..(263): Ceres Seq. ID no. 12696316
  misc_feature (82)..(261): Pfam Name: Mitochondrial glycoprotein Pfam Description: Mitochondrial glycoprotein
  misc_feature (14)..(263): Homolog of NCBI NO: 18405164 NR Description: Expressed protein; protein id: At2g39795.1, by cDNA: 39203., supported by cDNA: gi_17065361 [Arabidopsis >gi|21542303|sp|Q8W487|YB95_ARATH Hypothetical protein At2g39795,
  misc_feature (14)..(263): Homolog of NCBI NO: 21593469 NR Description: unknown [Arabidopsis thaliana]
  misc_feature (23)..(263): Homolog of NCBI NO: 7487698 NR Description: hypothetical protein At2g39790 [imported] -
  misc_feature (14)..(263): Homolog of NCBI NO: 18410318 NR Description: Expressed protein; protein id: At3g55605.1, by cDNA: 250217. [Arabidopsis thaliana]
  misc_feature (25)..(263): Homolog of NCBI NO: 11357566 NR Description: hypothetical protein F1I16.10 - Arabidopsis >gi|7263548|emb|CAB81585.1| putative protein [Arabidopsis
  misc_feature (14)..(262): Homolog of NCBI NO: 18405162 NR Description: hypothetical protein; protein id: At2g39790.1 thaliana] >gi|21542466|sp|O22288|YB90_ARATH Hypothetical protein mitochondrial precursor >gi|20196980|gb|AAB87128.2| hypothetical
  misc_feature (20)..(262): Homolog of NCBI NO: 15239320 NR Description: putative protein; protein id: At5g05990.1, by cDNA: 18108., supported by cDNA: gi_14517390, supported by gi_15450540 [Arabidopsis thaliana] >gi|10177572|dbj|BAB10804.1|
  misc_feature (14)..(261): Homolog of NCBI NO: 34895730 NR Description: P0019D06.23 [Oryza sativa (japonica
  misc_feature (14)..(192): Homolog of NCBI NO: 7487698 NR Description: hypothetical protein At2g39790 [imported] -
  misc_feature (54)..(263): Homolog of NCBI NO: 15241669 NR Description: putative protein; protein id: At5g02050.1, by cDNA: 22324. [Arabidopsis thaliana] >gi|11358397|pir||T48226

SEQ ID NO: 87023 - protein, 250 aa, Arabidopsis thaliana; identical to SEQ ID NO: 24865
  peptide (1)..(250): Ceres Seq. ID no. 12696317
  misc_feature (69)..(248): Pfam Name: Mitochondrial glycoprotein Pfam Description: Mitochondrial glycoprotein
  misc_feature (1)..(250): Homolog of NCBI NO: 18405164 NR Description: Expressed protein; protein id: At2g39795.1, by cDNA: 39203., supported by cDNA: gi_17065361 [Arabidopsis >gi|21542303|sp|Q8W487|YB95_ARATH Hypothetical protein At2g39795,
  misc_feature (1)..(250): Homolog of NCBI NO: 21593469 NR Description: unknown [Arabidopsis thaliana]
  misc_feature (10)..(250): Homolog of NCBI NO: 7487698 NR Description: hypothetical protein At2g39790 [imported] -
  misc_feature (1)..(250): Homolog of NCBI NO: 18410318 NR Description: Expressed protein; protein id: At3g55605.1, by cDNA: 250217. [Arabidopsis thaliana]
  misc_feature (12)..(250): Homolog of NCBI NO: 11357566 NR Description: hypothetical protein F1I16.10 - Arabidopsis >gi|7263548|emb|CAB81585.1| putative protein [Arabidopsis
  misc_feature (1)..(249): Homolog of NCBI NO: 18405162 NR Description: hypothetical protein; protein id: At2g39790.1 thaliana] >gi|21542466|sp|O22288|YB90_ARATH Hypothetical protein mitochondrial precursor >gi|20196980|gb|AAB87128.2| hypothetical
  misc_feature (7)..(249): Homolog of NCBI NO: 15239320 NR Description: putative protein; protein id: At5g05990.1, by cDNA: 18108., supported by cDNA: gi_14517390, supported by gi_15450540 [Arabidopsis thaliana] >gi|10177572|dbj|BAB10804.1|
  misc_feature (1)..(248): Homolog of NCBI NO: 34895730 NR Description: P0019D06.23 [Oryza sativa (japonica
  misc_feature (1)..(179): Homolog of NCBI NO: 7487698 NR Description: hypothetical protein At2g39790 [imported] -
  misc_feature (41)..(250): Homolog of NCBI NO: 15241669 NR Description: putative protein; protein id: At5g02050.1, by cDNA: 22324. [Arabidopsis thaliana] >gi|11358397|pir||T48226

SEQ ID NO: 87024 - protein, 163 aa, Arabidopsis thaliana; identical to SEQ ID NO: 24866
  peptide (1)..(163): Ceres Seq. ID no. 12696318
  misc_feature (1)..(161): Pfam Name: Mitochondrial glycoprotein Pfam Description: Mitochondrial glycoprotein
  misc_feature (1)..(163): Homolog of NCBI NO: 18405164 NR Description: Expressed protein; protein id: At2g39795.1, by cDNA: 39203., supported by cDNA: gi_17065361 [Arabidopsis >gi|21542303|sp|Q8W487|YB95_ARATH Hypothetical protein At2g39795,
  misc_feature (1)..(163): Homolog of NCBI NO: 21593469 NR Description: unknown [Arabidopsis thaliana]
  misc_feature (1)..(163): Homolog of NCBI NO: 7487698 NR Description: hypothetical protein At2g39790 [imported] -
  misc_feature (1)..(163): Homolog of NCBI NO: 18410318 NR Description: Expressed protein; protein id: At3g55605.1, by cDNA: 250217. [Arabidopsis thaliana]
  misc_feature (1)..(163): Homolog of NCBI NO: 11357566 NR Description: hypothetical protein F1I16.10 - Arabidopsis >gi|7263548|emb|CAB81585.1| putative protein [Arabidopsis
  misc_feature (1)..(162): Homolog of NCBI NO: 18405162 NR Description: hypothetical protein; protein id: At2g39790.1 thaliana] >gi|21542466|sp|O22288|YB90_ARATH Hypothetical protein mitochondrial precursor >gi|20196980|gb|AAB87128.2| hypothetical
  misc_feature (1)..(162): Homolog of NCBI NO: 15239320 NR Description: putative protein; protein id: At5g05990.1, by cDNA: 18108., supported by cDNA: gi_14517390, supported by gi_15450540 [Arabidopsis thaliana] >gi|10177572|dbj|BAB10804.1|
  misc_feature (1)..(161): Homolog of NCBI NO: 34895730 NR Description: P0019D06.23 [Oryza sativa (japonica
  misc_feature (1)..(92): Homolog of NCBI NO: 7487698 NR Description: hypothetical protein At2g39790 [imported] -
  misc_feature (1)..(163): Homolog of NCBI NO: 15241669 NR Description: putative protein; protein id: At5g02050.1, by cDNA: 22324. [Arabidopsis thaliana] >gi|11358397|pir||T48226

SEQ ID NO: 87025 - DNA, 1464 bp, Arabidopsis thaliana
  misc_feature (1)..(1464): Ceres Seq. ID no. 12696422
  misc_feature: MA Experiment ID: 108434 Result: Down-regulated in Transcription
  misc_feature: MA Experiment 108434 PARAMETER Experiment Name: At_Root_Tips_cDNA_P Parameter: Tissue Value: Root Tips
  misc_feature: MA Experiment ID: 108461 Result: Up-regulated in Transcription
  misc_feature: MA Experiment 108461 PARAMETER Experiment Name: At_Germinating_Seeds_cDNA_P Parameter: Age (day) Value: 1 vs. 0
  misc_feature: MA Experiment 108461 PARAMETER Experiment Name: At_Germinating_Seeds_cDNA_P Parameter: Tissue Value: Germinating Seeds
  misc_feature: MA Experiment ID: 108561 Result: Up-regulated in Transcription
  misc_feature: MA Experiment 108561 PARAMETER Experiment Name: At_100uM_ABA_cDNA_P Parameter: Timepoint (hr) Value: 6
  misc_feature: MA Experiment 108561 PARAMETER Experiment Name: At_100uM_ABA_cDNA_P Parameter: Tissue Value: Aerial
  misc_feature: MA Experiment 108561 PARAMETER Experiment Name: At_100uM_ABA_cDNA_P Parameter: Treatment Value: 100uM ABA vs. No Treatment
  misc_feature: MA Experiment ID: 108573 Result: Up-regulated in Transcription
  misc_feature: MA Experiment 108573 PARAMETER Experiment Name: At_Drought_cDNA_P Parameter: Timepoint (hr) Value: 6
  misc_feature: MA Experiment 108573 PARAMETER Experiment Name: At_Drought_cDNA_P Parameter: Tissue Value: Aerial
  misc_feature: MA Experiment 108573 PARAMETER Experiment Name: At_Drought_cDNA_P Parameter: Treatment Value: Drought vs. No Drought
  misc_feature: MA Experiment ID: 108577 Result: Down-regulated in Transcription
  misc_feature: MA Experiment 108577 PARAMETER Experiment Name: At_42deg_Heat_cDNA_P Parameter: Temperature (deg C) Value: 42 vs. 22
  misc_feature: MA Experiment 108577 PARAMETER Experiment Name: At_42deg_Heat_cDNA_P Parameter: Timepoint (hr) Value: 6
  misc_feature: MA Experiment 108577 PARAMETER Experiment Name: At_42deg_Heat_cDNA_P Parameter: Tissue Value: Aerial
  misc_feature: MA Experiment ID: 108605 Result: Up-regulated in Transcription
  misc_feature: MA Experiment 108605 PARAMETER Experiment Name: At_100uM_ABA_cDNA_P Parameter: Timepoint (hr) Value: 6
  misc_feature: MA Experiment 108605 PARAMETER Experiment Name: At_100uM_ABA_cDNA_P Parameter: Tissue Value: Aerial
  misc_feature: MA Experiment 108605 PARAMETER Experiment Name: At_100uM_ABA_cDNA_P Parameter: Treatment Value: 100uM ABA vs. No Treatment
  misc_feature: MA Experiment ID: 20000071 Result: Up-regulated in Transcription
  misc_feature: MA Experiment 20000071 PARAMETER Experiment Name: At_100uM_ABA_Mutants_cDNA_P Parameter: Plant Line Value: CS8104
  misc_feature: MA Experiment 20000071 PARAMETER Experiment Name: At_100uM_ABA_Mutants_cDNA_P Parameter: Timepoint (hr) Value: 6
  misc_feature: MA Experiment 20000071 PARAMETER Experiment Name: At_100uM_ABA_Mutants_cDNA_P Parameter: Tissue Value: Aerial
  misc_feature: MA Experiment 20000071 PARAMETER Experiment Name: At_100uM_ABA_Mutants_cDNA_P Parameter: Treatment Value: 100uM ABA vs. No Treatment
  misc_feature: MA Experiment ID: 20000072 Result: Up-regulated in Transcription
  misc_feature: MA Experiment 20000072 PARAMETER Experiment Name: At_100uM_ABA_Mutants_cDNA_P Parameter: Plant Line Value: CS8105
  misc_feature: MA Experiment 20000072 PARAMETER Experiment Name: At_100uM_ABA_Mutants_cDNA_P Parameter: Timepoint (hr) Value: 6
  misc_feature: MA Experiment 20000072 PARAMETER Experiment Name: At_100uM_ABA_Mutants_cDNA_P Parameter: Tissue Value: Aerial
  misc_feature: MA Experiment 20000072 PARAMETER Experiment Name: At_100uM_ABA_Mutants_cDNA_P Parameter: Treatment Value: 100uM ABA vs. No Treatment
  misc_feature: MA Experiment ID: 20000086 Result: Up-regulated in Transcription
  misc_feature: MA Experiment 20000086 PARAMETER Experiment Name: At_100uM_ABA_Mutants_cDNA_P Parameter: Plant Line Value: CS22
  misc_feature: MA Experiment 20000086 PARAMETER Experiment Name: At_100uM_ABA_Mutants_cDNA_P Parameter: Timepoint (hr) Value: 6
  misc_feature: MA Experiment 20000086 PARAMETER Experiment Name: At_100uM_ABA_Mutants_cDNA_P Parameter: Tissue Value: Aerial
  misc_feature: MA Experiment 20000086 PARAMETER Experiment Name: At_100uM_ABA_Mutants_cDNA_P Parameter: Treatment Value: 100uM ABA vs. No Treatment
  misc_feature: MA Experiment ID: 20000111 Result: Down-regulated in Transcription
  misc_feature: MA Experiment 20000111 PARAMETER Experiment Name: At_42deg_Heat_cDNA_P Parameter: Temperature (deg C) Value: 42 vs. 22
  misc_feature: MA Experiment 20000111 PARAMETER Experiment Name: At_42deg_Heat_cDNA_P Parameter: Timepoint (hr) Value: 6
  misc_feature: MA Experiment 20000111 PARAMETER Experiment Name: At_42deg_Heat_cDNA_P Parameter: Tissue Value: Aerial
  misc_feature: MA Experiment ID: 20000113 Result: Down-regulated in Transcription
  misc_feature: MA Experiment 20000113 PARAMETER Experiment Name: At_42deg_Heat_cDNA_P Parameter: Temperature (deg C) Value: 42 vs. 22
  misc_feature: MA Experiment 20000113 PARAMETER Experiment Name: At_42deg_Heat_cDNA_P Parameter: Timepoint (hr) Value: 8
  misc_feature: MA Experiment 20000113 PARAMETER Experiment Name: At_42deg_Heat_cDNA_P Parameter: Tissue Value: Aerial
atggctgcgaagaaggtttttggatcggcggaagcgagtaatttggtgacggagcttcgtcggagttttgatgatggtgtgacacgtggttatgaatggagagtgactcagcttaagaaactgatgattatttgtgataatcatgagcctgagatcgtcgcggctcttcgcgatgatcttggtaagcctgagcttgaatcttctgtttatgagagagtactagtatctctactgagaaactctatcaagttggctcttaagcagctaaagaactggatggctccggagaaggcaaagacttctctaacaacgtttcctgcatccgcggagattgtgtctgagcctcttggtgttgtgctagtgatctcggcttggaactatccttttctgttgtctattgatcctgttattggtgcaatttctgctgggaatgctgttgttttaaagccatcagaattggctccagcttcgtcagctctgctcactaagttactggaacagtatcttgatccttctgcggtgcgagttgtcgaaggagctgttaccgaaacaagtgctctgctagagcagaagtgggacaagatattctacacaggtagttcaaaaatcggacgtgtcataatggcggcagctgcgaagcatctcacaccggttgttctagagcttggaggaaaatctcctgtcgttgtagactcggataccgatttgaaagttaccgtcaggcggataatcgtaggcaaatggggttgtaacaacggacaggcgtgcgtttcgccggactatatcttgacgacaaaagaatatgctcctaaattgattgatgccatgaagcttgaattggagaaattttatgggaagaaccctatagagtcgaaagatatgtcacgtatcgtaaactcgaatcactttgatcgcttgtctaagttgttagacgagaaggaagtttctgacaaaattgtctatggtggtgaaaaggacagagaaaacttgaaaattgctccgacaatcttgctcgatgtaccattagattctctgatcatgagtgaagaaatatttggccctctccttccaatcctcacgcttaacaacttggaagagagctttgacgtgattcgttctcgacctaagccacttgcggcatacttgtttacacataacaagaagttgaaagagagattcgcagcgacagtctccgctggaggcatagtagtcaatgacatagctgttcatcttgcacttcacacattgccattcggaggagttggtgaaagtggaatgggtgcttaccatggtaaattctcatttgatgcttttagtcacaagaaggcggttctctacagaagccttttcggtgattcagccgtcaggtatccgccatactcgagaggaaagcttagattgttaaaagcccttgtcgacagcaatatattcgatttattcaaagtccttctcggtttagcttaa

SEQ ID NO: 87026 - protein, 487 aa, Arabidopsis thaliana
  peptide (1)..(487): Ceres Seq. ID no. 12696423
  misc_feature (1)..(448): Pfam Name: Aldehyde dehydrogenase family Pfam Description: Aldehyde dehydrogenase family
  misc_feature (1)..(487): Homolog of NCBI NO: 15219358 NR Description: aldehyde dehydrogenase, putative; protein id: supported by cDNA: 1141., supported by cDNA: gi_18175878
  misc_feature (1)..(487): Homolog of NCBI NO: 21536879 NR Description: aldehyde dehydrogenase, putative [Arabidopsis
  misc_feature (11)..(485): Homolog of NCBI NO: 17065918 NR Description: aldehyde dehydrogenase [Craterostigma
  misc_feature (7)..(487): Homolog of NCBI NO: 18418408 NR Description: putative aldehyde dehydrogenase; protein id: supported by cDNA: gi_15451105, supported by cDNA: gi_20148406 thaliana] >gi|15451106|gb|AAK96824.1| putative aldehyde
  misc_feature (7)..(487): Homolog of NCBI NO: 17065876 NR Description: aldehyde dehydrogenase [Arabidopsis thaliana]
  misc_feature (8)..(486): Homolog of NCBI NO: 33317836 NR Description: aldehyde dehydrogenase [Oryza sativa (indica group)] >gi|38344982|emb|CAE02788.2| OSJNBa0011L07.12 [Oryza
  misc_feature (10)..(472): Homolog of NCBI NO: 23126018 NR Description: hypothetical protein [Nostoc punctiforme]
  misc_feature (1)..(486): Homolog of NCBI NO: 4973431 NR Description: putative aldehyde dehydrogenase OS-ALDH [Oryza
  misc_feature (130)..(487): Homolog of NCBI NO: 7484798 NR Description: aldehyde dehydrogenase (NAD+) homolog F10M10.10 - thaliana >gi|4455169|emb|CAB36701.1| putative aldehyde [Arabidopsis thaliana] >gi|7270374|emb|CAB80141.1| putative
  misc_feature (18)..(231): Homolog of NCBI NO: 15234364 NR Description: aldehyde dehydrogenase like protein; protein id: [Arabidopsis thaliana] >gi|7431493|pir||T04594 aldehyde
MAAKKVFGSAEASNLVTELRRSFDDGVTRGYEWRVTQLKKLMIICDNHEPEIVAALRDDLGKPELESSVYERVLVSLLRNSIKLALKQLKNWMAPEKAKTSLTTFPASAEIVSEPLGVVLVISAWNYPFLLSIDPVIGAISAGNAVVLKPSELAPASSALLTKLLEQYLDPSAVRVVEGAVTETSALLEQKWDKIFYTGSSKIGRVIMAAAAKHLTPVVLELGGKSPVVVDSDTDLKVTVRRIIVGKWGCNNGQACVSPDYILTTKEYAPKLIDAMKLELEKFYGKNPIESKDMSRIVNSNHFDRLSKLLDEKEVSDKIVYGGEKDRENLKIAPTILLDVPLDSLIMSEEIFGPLLPILTLNNLEESFDVIRSRPKPLAAYLFTHNKKLKERFAATVSAGGIVVNDIAVHLALHTLPFGGVGESGMGAYHGKFSFDAFSHKKAVLYRSLFGDSAVRYPPYSRGKLRLLKALVDSNIFDLFKVLLGLA

SEQ ID NO: 87027 - protein, 446 aa, Arabidopsis thaliana
  peptide (1)..(446): Ceres Seq. ID no. 12696424
  misc_feature (1)..(407): Pfam Name: Aldehyde dehydrogenase family Pfam Description: Aldehyde dehydrogenase family
  misc_feature (1)..(446): Homolog of NCBI NO: 15219358 NR Description: aldehyde dehydrogenase, putative; protein id: supported by cDNA: 1141., supported by cDNA: gi_18175878
  misc_feature (1)..(446): Homolog of NCBI NO: 21536879 NR Description: aldehyde dehydrogenase, putative [Arabidopsis
  misc_feature (1)..(444): Homolog of NCBI NO: 17065918 NR Description: aldehyde dehydrogenase [Craterostigma
  misc_feature (1)..(446): Homolog of NCBI NO: 18418408 NR Description: putative aldehyde dehydrogenase; protein id: supported by cDNA: gi_15451105, supported by cDNA: gi_20148406 thaliana] >gi|15451106|gb|AAK96824.1| putative aldehyde
  misc_feature (1)..(446): Homolog of NCBI NO: 17065876 NR Description: aldehyde dehydrogenase [Arabidopsis thaliana]
  misc_feature (1)..(445): Homolog of NCBI NO: 33317836 NR Description: aldehyde dehydrogenase [Oryza sativa (indica group)] >gi|38344982|emb|CAE02788.2| OSJNBa0011L07.12 [Oryza
  misc_feature (1)..(431): Homolog of NCBI NO: 23126018 NR Description: hypothetical protein [Nostoc punctiforme]
  misc_feature (1)..(445): Homolog of NCBI NO: 4973431 NR Description: putative aldehyde dehydrogenase OS-ALDH [Oryza
  misc_feature (89)..(446): Homolog of NCBI NO: 7484798 NR Description: aldehyde dehydrogenase (NAD+) homolog F10M10.10 - thaliana >gi|4455169|emb|CAB36701.1| putative aldehyde [Arabidopsis thaliana] >gi|7270374|emb|CAB80141.1| putative
  misc_feature (1)..(190): Homolog of NCBI NO: 15234364 NR Description: aldehyde dehydrogenase like protein; protein id: [Arabidopsis thaliana] >gi|7431493|pir||T04594 aldehyde
MIICDNHEPEIVAALRDDLGKPELESSVYERVLVSLLRNSIKLALKQLKNWMAPEKAKTSLTTFPASAEIVSEPLGVVLVISAWNYPFLLSIDPVIGAISAGNAVVLKPSELAPASSALLTKLLEQYLDPSAVRVVEGAVTETSALLEQKWDKIFYTGSSKIGRVIMAAAAKHLTPVVLELGGKSPVVVDSDTDLKVTVRRIIVGKWGCNNGQACVSPDYILTTKEYAPKLIDAMKLELEKFYGKNPIESKDMSRIVNSNHFDRLSKLLDEKEVSDKIVYGGEKDRENLKIAPTILLDVPLDSLIMSEEIFGPLLPILTLNNLEESFDVIRSRPKPLAAYLFTHNKKLKERFAATVSAGGIVVNDIAVHLALHTLPFGGVGESGMGAYHGKFSFDAFSHKKAVLYRSLFGDSAVRYPPYSRGKLRLLKALVDSNIFDLFKVLLGLA

SEQ ID NO: 87028 - protein, 395 aa, Arabidopsis thaliana; identical to SEQ ID NO: 74729
  peptide (1)..(395): Ceres Seq. ID no. 12696425
  misc_feature (1)..(356): Pfam Name: Aldehyde dehydrogenase family Pfam Description: Aldehyde dehydrogenase family
  misc_feature (1)..(395): Homolog of NCBI NO: 15219358 NR Description: aldehyde dehydrogenase, putative; protein id: supported by cDNA: 1141., supported by cDNA: gi_18175878
  misc_feature (1)..(395): Homolog of NCBI NO: 21536879 NR Description: aldehyde dehydrogenase, putative [Arabidopsis
  misc_feature (1)..(393): Homolog of NCBI NO: 17065918 NR Description: aldehyde dehydrogenase [Craterostigma
  misc_feature (1)..(395): Homolog of NCBI NO: 18418408 NR Description: putative aldehyde dehydrogenase; protein id: supported by cDNA: gi_15451105, supported by cDNA: gi_20148406 thaliana] >gi|15451106|gb|AAK96824.1| putative aldehyde
  misc_feature (1)..(395): Homolog of NCBI NO: 17065876 NR Description: aldehyde dehydrogenase [Arabidopsis thaliana]
  misc_feature (1)..(394): Homolog of NCBI NO: 33317836 NR Description: aldehyde dehydrogenase [Oryza sativa (indica group)] >gi|38344982|emb|CAE02788.2| OSJNBa0011L07.12 [Oryza
  misc_feature (1)..(380): Homolog of NCBI NO: 23126018 NR Description: hypothetical protein [Nostoc punctiforme]
  misc_feature (1)..(394): Homolog of NCBI NO: 4973431 NR Description: putative aldehyde dehydrogenase OS-ALDH [Oryza
  misc_feature (38)..(395): Homolog of NCBI NO: 7484798 NR Description: aldehyde dehydrogenase (NAD+) homolog F10M10.10 - thaliana >gi|4455169|emb|CAB36701.1| putative aldehyde [Arabidopsis thaliana] >gi|7270374|emb|CAB80141.1| putative
  misc_feature (1)..(139): Homolog of NCBI NO: 15234364 NR Description: aldehyde dehydrogenase like protein; protein id: [Arabidopsis thaliana] >gi|7431493|pir||T04594 aldehyde

SEQ ID NO: 87029 - DNA, 1863 bp, Arabidopsis thaliana
  misc_feature (1)..(1863): Ceres Seq. ID no. 12696488
  misc_feature: MA Experiment ID: 108462 Result: Up-regulated in Transcription
  misc_feature: MA Experiment 108462 PARAMETER Experiment Name: At_Germinating_Seeds_cDNA_P Parameter: Age (day) Value: 2 vs. 0
  misc_feature: MA Experiment 108462 PARAMETER Experiment Name: At_Germinating_Seeds_cDNA_P Parameter: Tissue Value: Germinating Seeds
  misc_feature: MA Experiment ID: 108463 Result: Up-regulated in Transcription
  misc_feature: MA Experiment 108463 PARAMETER Experiment Name: At_Germinating_Seeds_cDNA_P Parameter: Age (day) Value: 3 vs. 0
  misc_feature: MA Experiment 108463 PARAMETER Experiment Name: At_Germinating_Seeds_cDNA_P Parameter: Tissue Value: Germinating Seeds
  misc_feature: MA Experiment ID: 108464 Result: Up-regulated in Transcription
  misc_feature: MA Experiment 108464 PARAMETER Experiment Name: At_Germinating_Seeds_cDNA_P Parameter: Age (day) Value: 4 vs. 0
  misc_feature: MA Experiment 108464 PARAMETER Experiment Name: At_Germinating_Seeds_cDNA_P Parameter: Tissue Value: Germinating Seeds
  misc_feature: MA Experiment ID: 108474 Result: Up-regulated in Transcription
  misc_feature: MA Experiment 108474 PARAMETER Experiment Name: At_Drought_Flowers_cDNA_P Parameter: Timepoint (hr) Value: null
  misc_feature: MA Experiment 108474 PARAMETER Experiment Name: At_Drought_Flowers_cDNA_P Parameter: Treatment Value: Drought vs. No Drought
  misc_feature: MA Experiment ID: 108501 Result: Down-regulated in Transcription
  misc_feature: MA Experiment 108501 PARAMETER Experiment Name: At_ap2_floral_buds_cDNA_P Parameter: Plant Line Value: ap2 (Ler.)
  misc_feature: MA Experiment 108501 PARAMETER Experiment Name: At_ap2_floral_buds_cDNA_P Parameter: Tissue Value: Closed Flower
  misc_feature: MA Experiment ID: 108572 Result: Up-regulated in Transcription
  misc_feature: MA Experiment 108572 PARAMETER Experiment Name: At_Drought_cDNA_P Parameter: Timepoint (hr) Value: 1
  misc_feature: MA Experiment 108572 PARAMETER Experiment Name: At_Drought_cDNA_P Parameter: Tissue Value: Aerial
  misc_feature: MA Experiment 108572 PARAMETER Experiment Name: At_Drought_cDNA_P Parameter: Treatment Value: Drought vs. No Drought
  misc_feature: MA Experiment ID: 108576 Result: Up-regulated in Transcription
  misc_feature: MA Experiment 108576 PARAMETER Experiment Name: At_42deg_Heat_cDNA_P Parameter: Temperature (deg C) Value: 42 vs. 22
  misc_feature: MA Experiment 108576 PARAMETER Experiment Name: At_42deg_Heat_cDNA_P Parameter: Timepoint (hr) Value: 1
  misc_feature: MA Experiment 108576 PARAMETER Experiment Name: At_42deg_Heat_cDNA_P Parameter: Tissue Value: Aerial
  misc_feature: MA Experiment ID: 20000030 Result: Down-regulated in Transcription
  misc_feature: MA Experiment 20000030 PARAMETER Experiment Name: At_CS6630_Roots_cDNA_P Parameter: Plant Line Value: CS6630 vs. WS
  misc_feature: MA Experiment 20000030 PARAMETER Experiment Name: At_CS6630_Roots_cDNA_P Parameter: Tissue Value: Roots
  misc_feature: MA Experiment ID: 20000224 Result: Down-regulated in Transcription
atgaagaaatggttagcaatcgcagcgacggtggcgataattgcaataatcgttagacaaggcacgacacaatacggatggaacaaagaggcggcgttggaaaagctaaaggaatggtcagatcggctggggatttgggcgattccaacgtatgtagcggttcacacaataaccttagctctttgtctccctcacgccgtcttctttgaagctggtgcttctatgctctttggtttccttcctgctcttctctgtgttttctctgctaaagttctcgccgcttctttctccttctggatcggcaggtttgtttttaagagttccaccagagctacagggtgggcgcatagcaacaagtacttcaatattctctcaagaggagttgagcgcgatggttggaagtttgttcttcttgcaaggttctcgcccattccttcctatgtcataaactacgctttggcagctactgaagtccggtttgtagctgattttctgttccccacggttattggctgcctcccgatgatcctgcagaacgcatcagtcggtagcctcgctggtatggctgtggcttcagtagctggaaaacagaaaagtcaggtctggggttatgttttcccagtacttgggatactgtcaagtgttctgatttcattgaggatcaaaaagtactcagctggaattacagaggcatcatcagatacctctgctaacaactctagtttagcttcatctgaaactgcgaatcccgcttatggaaccgatggatccaagaaaagtgagcacatggattcgttcttggagttggtacaaggacttctaaaagacaacaatgagcttattcctactcttgtgctctttgttttgttctcttttgatgttagtgttgctcatccaggtctaggatttggatggggaagtaatagtcccattggaggatctttttactcaaatctttacccacaattttaccagttctcttgtccacaagctgatgagattgttatgacggtgctcgaaaaagccatagctaaagaaccaagaatggcagcatctttactcagacttcacttccacgactgcttcgttcagggctgtgatgcatcaatcttgttggatgatagtgcaaccataagaagtgaaaagaatgctggaccaaacaagaactccgttagagggtttcaagtaatcgacgagatcaaagccaaacttgagcaagcttgtcctcaaactgtctcctgcgccgacattctagctctagctgctcgtggctcaactatactgagtggtggaccatcatgggagcttccactagggaggagagactcgaggaccgctagccttaatggcgcaaacacgaacattcctgcacctaactcaactattcaaaatctcttaaccatgttccaacgtaaaggtttgaacgaagaagaccttgtttccctatcaggaggacatacgattggagtagcgaggtgcacaacgtttaaacaaagactatacaatcaaaacggtaataaccaaccagacgagacgctagagaggtcttactactatggtctcaggtcaatttgtccaccaacaggcggtgacaacaatatttcacctctagacttagcctctcctgcaagattcgacaacacatacttcaagctccttctatggggcaaaggcttattgacatcagatgaagtgcttctcactggcaatgtaggcaagactggtgcattagtgaaagcttatgccgaagacgagagacttttcttccaacaattcgcaaagtcgatggttaacatgggaaacattcagcctcttactggttttaatggtgagatcaggaagagttgtcatgtgattaactaa

SEQ ID NO: 87030 - protein, 620 aa, Arabidopsis thaliana
  peptide (1)..(620): Ceres Seq. ID no. 12696489
  misc_feature (335)..(584): Pfam Name: Peroxidase Pfam Description: Peroxidase
  misc_feature (278)..(620): Homolog of NCBI NO: 15219493 NR Description: peroxidase, putative; protein id: At1g44970.1, by cDNA: 26375. [Arabidopsis thaliana] Peroxidase 9 precursor (Atperox P9) (ATP18a)
  misc_feature (278)..(620): Homolog of NCBI NO: 21554765 NR Description: peroxidase, putative [Arabidopsis thaliana]
  misc_feature (1)..(280): Homolog of NCBI NO: 25405877 NR Description: protein F27F5.5 [imported] - Arabidopsis thaliana
  misc_feature (1)..(261): Homolog of NCBI NO: 22330026 NR Description: unknown protein; protein id: At1g44960.1, by cDNA: gi_18176197 [Arabidopsis thaliana] Contains similarity to unknown protein F27F5.5 gi|7767655 from
  misc_feature (291)..(618): Homolog of NCBI NO: 993004 NR Description: peroxidase [Mercurialis annua]
  misc_feature (314)..(620): Homolog of NCBI NO: 14031051 NR Description: peroxidase [Nicotiana tabacum]
  misc_feature (319)..(620): Homolog of NCBI NO: 34903038 NR Description: unnamed protein product [Oryza sativa (japonica group)] >gi|7228462|dbj|BAA92422.1| unnamed protein product
  misc_feature (309)..(620): Homolog of NCBI NO: 34903044 NR Description: unnamed protein product [Oryza sativa (japonica group)] >gi|7242902|dbj|BAA92500.1| unnamed protein product
  misc_feature (319)..(620): Homolog of NCBI NO: 7453855 NR Description: peroxidase prx15 precursor [Spinacia oleracea]
  misc_feature (309)..(620): Homolog of NCBI NO: 15224116 NR Description: peroxidase, putative; protein id: At2g18150.1, by cDNA: 126030., supported by cDNA: gi_19698902 [Arabidopsis >gi|25453215|sp|Q9SI16|PE15_ARATH Peroxidase 15 precursor
MKKWLAIAATVAIIAIIVRQGTTQYGWNKEAALEKLKEWSDRLGIWAIPTYVAVHTITLALCLPHAVFFEAGASMLFGFLPALLCVFSAKVLAASFSFWIGRFVFKSSTRATGWAHSNKYFNILSRGVERDGWKFVLLARFSPIPSYVINYALAATEVRFVADFLFPTVIGCLPMILQNASVGSLAGMAVASVAGKQKSQVWGYVFPVLGILSSVLISLRIKKYSAGITEASSDTSANNSSLASSETANPAYGTDGSKKSEHMDSFLELVQGLLKDNNELIPTLVLFVLFSFDVSVAHPGLGFGWGSNSPIGGSFYSNLYPQFYQFSCPQADEIVMTVLEKAIAKEPRMAASLLRLHFHDCFVQGCDASILLDDSATIRSEKNAGPNKNSVRGFQVIDEIKAKLEQACPQTVSCADILALAARGSTILSGGPSWELPLGRRDSRTASLNGANTNIPAPNSTIQNLLTMFQRKGLNEEDLVSLSGGHTIGVARCTTFKQRLYNQNGNNQPDETLERSYYYGLRSICPPTGGDNNISPLDLASPARFDNTYFKLLLWGKGLLTSDEVLLTGNVGKTGALVKAYAEDERLFFQQFAKSMVNMGNIQPLTGFNGEIRKSCHVIN

SEQ ID NO: 87031 - protein, 546 aa, Arabidopsis thaliana
  peptide (1)..(546): Ceres Seq. ID no. 12696490
  misc_feature (261)..(510): Pfam Name: Peroxidase Pfam Description: Peroxidase
  misc_feature (204)..(546): Homolog of NCBI NO: 15219493 NR Description: peroxidase, putative; protein id: At1g44970.1, by cDNA: 26375. [Arabidopsis thaliana] Peroxidase 9 precursor (Atperox P9) (ATP18a)
  misc_feature (204)..(546): Homolog of NCBI NO: 21554765 NR Description: peroxidase, putative [Arabidopsis thaliana]
  misc_feature (1)..(206): Homolog of NCBI NO: 25405877 NR Description: protein F27F5.5 [imported] - Arabidopsis thaliana
  misc_feature (1)..(187): Homolog of NCBI NO: 22330026 NR Description: unknown protein; protein id: At1g44960.1, by cDNA: gi_18176197 [Arabidopsis thaliana] Contains similarity to unknown protein F27F5.5 gi|7767655 from
  misc_feature (217)..(544): Homolog of NCBI NO: 993004 NR Description: peroxidase [Mercurialis annua]
  misc_feature (240)..(546): Homolog of NCBI NO: 14031051 NR Description: peroxidase [Nicotiana tabacum]
  misc_feature (245)..(546): Homolog of NCBI NO: 34903038 NR Description: unnamed protein product [Oryza sativa (japonica group)] >gi|7228462|dbj|BAA92422.1| unnamed protein product
  misc_feature (235)..(546): Homolog of NCBI NO: 34903044 NR Description: unnamed protein product [Oryza sativa (japonica group)] >gi|7242902|dbj|BAA92500.1| unnamed protein product
  misc_feature (245)..(546): Homolog of NCBI NO: 7453855 NR Description: peroxidase prx15 precursor [Spinacia oleracea]
  misc_feature (235)..(546): Homolog of NCBI NO: 15224116 NR Description: peroxidase, putative; protein id: At2g18150.1, by cDNA: 126030., supported by cDNA: gi_19698902 [Arabidopsis >gi|25453215|sp|Q9SI16|PE15_ARATH Peroxidase 15 precursor
MLFGFLPALLCVFSAKVLAASFSFWIGRFVFKSSTRATGWAHSNKYFNILSRGVERDGWKFVLLARFSPIPSYVINYALAATEVRFVADFLFPTVIGCLPMILQNASVGSLAGMAVASVAGKQKSQVWGYVFPVLGILSSVLISLRIKKYSAGITEASSDTSANNSSLASSETANPAYGTDGSKKSEHMDSFLELVQGLLKDNNELIPTLVLFVLFSFDVSVAHPGLGFGWGSNSPIGGSFYSNLYPQFYQFSCPQADEIVMTVLEKAIAKEPRMAASLLRLHFHDCFVQGCDASILLDDSATIRSEKNAGPNKNSVRGFQVIDEIKAKLEQACPQTVSCADILALAARGSTILSGGPSWELPLGRRDSRTASLNGANTNIPAPNSTIQNLLTMFQRKGLNEEDLVSLSGGHTIGVARCTTFKQRLYNQNGNNQPDETLERSYYYGLRSICPPTGGDNNISPLDLASPARFDNTYFKLLLWGKGLLTSDEVLLTGNVGKTGALVKAYAEDERLFFQQFAKSMVNMGNIQPLTGFNGEIRKSCHVIN

SEQ ID NO: 87032 - protein, 446 aa, Arabidopsis thaliana
  peptide (1)..(446): Ceres Seq. ID no. 12696491
  misc_feature (161)..(410): Pfam Name: Peroxidase Pfam Description: Peroxidase
  misc_feature (104)..(446): Homolog of NCBI NO: 15219493 NR Description: peroxidase, putative; protein id: At1g44970.1, by cDNA: 26375. [Arabidopsis thaliana] Peroxidase 9 precursor (Atperox P9) (ATP18a)
  misc_feature (104)..(446): Homolog of NCBI NO: 21554765 NR Description: peroxidase, putative [Arabidopsis thaliana]
  misc_feature (1)..(106): Homolog of NCBI NO: 25405877 NR Description: protein F27F5.5 [imported] - Arabidopsis thaliana
  misc_feature (1)..(87): Homolog of NCBI NO: 22330026 NR Description: unknown protein; protein id: At1g44960.1, by cDNA: gi_18176197 [Arabidopsis thaliana] Contains similarity to unknown protein F27F5.5 gi|7767655 from
  misc_feature (117)..(444): Homolog of NCBI NO: 993004 NR Description: peroxidase [Mercurialis annua]
  misc_feature (140)..(446): Homolog of NCBI NO: 14031051 NR Description: peroxidase [Nicotiana tabacum]
  misc_feature (145)..(446): Homolog of NCBI NO: 34903038 NR Description: unnamed protein product [Oryza sativa (japonica group)] >gi|7228462|dbj|BAA92422.1| unnamed protein product
  misc_feature (135)..(446): Homolog of NCBI NO: 34903044 NR Description: unnamed protein product [Oryza sativa (japonica group)] >gi|7242902|dbj|BAA92500.1| unnamed protein product
  misc_feature (145)..(446): Homolog of NCBI NO: 7453855 NR Description: peroxidase prx15 precursor [Spinacia oleracea]
  misc_feature (135)..(446): Homolog of NCBI NO: 15224116 NR Description: peroxidase, putative; protein id: At2g18150.1, by cDNA: 126030., supported by cDNA: gi_19698902 [Arabidopsis >gi|25453215|sp|Q9SI16|PE15_ARATH Peroxidase 15 precursor
MILQNASVGSLAGMAVASVAGKQKSQVWGYVFPVLGILSSVLISLRIKKYSAGITEASSDTSANNSSLASSETANPAYGTDGSKKSEHMDSFLELVQGLLKDNNELIPTLVLFVLFSFDVSVAHPGLGFGWGSNSPIGGSFYSNLYPQFYQFSCPQADEIVMTVLEKAIAKEPRMAASLLRLHFHDCFVQGCDASILLDDSATIRSEKNAGPNKNSVRGFQVIDEIKAKLEQACPQTVSCADILALAARGSTILSGGPSWELPLGRRDSRTASLNGANTNIPAPNSTIQNLLTMFQRKGLNEEDLVSLSGGHTIGVARCTTFKQRLYNQNGNNQPDETLERSYYYGLRSICPPTGGDNNISPLDLASPARFDNTYFKLLLWGKGLLTSDEVLLTGNVGKTGALVKAYAEDERLFFQQFAKSMVNMGNIQPLTGFNGEIRKSCHVIN

SEQ ID NO: 87033 - DNA, 1254 bp, Arabidopsis thaliana
  misc_feature (1)..(1254): Ceres Seq. ID no. 12696492
  misc_feature: MA Experiment ID: 108434 Result: Up-regulated in Transcription
  misc_feature: MA Experiment 108434 PARAMETER Experiment Name: At_Root_Tips_cDNA_P Parameter: Tissue Value: Root Tips
  misc_feature: MA Experiment ID: 108461 Result: Down-regulated in Transcription
  misc_feature: MA Experiment 108461 PARAMETER Experiment Name: At_Germinating_Seeds_cDNA_P Parameter: Age (day) Value: 1 vs. 0
  misc_feature: MA Experiment 108461 PARAMETER Experiment Name: At_Germinating_Seeds_cDNA_P Parameter: Tissue Value: Germinating Seeds
  misc_feature: MA Experiment ID: 108462 Result: Down-regulated in Transcription
  misc_feature: MA Experiment 108462 PARAMETER Experiment Name: At_Germinating_Seeds_cDNA_P Parameter: Age (day) Value: 2 vs. 0
  misc_feature: MA Experiment 108462 PARAMETER Experiment Name: At_Germinating_Seeds_cDNA_P Parameter: Tissue Value: Germinating Seeds
  misc_feature: MA Experiment ID: 108464 Result: Down-regulated in Transcription
  misc_feature: MA Experiment 108464 PARAMETER Experiment Name: At_Germinating_Seeds_cDNA_P Parameter: Age (day) Value: 4 vs. 0
  misc_feature: MA Experiment 108464 PARAMETER Experiment Name: At_Germinating_Seeds_cDNA_P Parameter: Tissue Value: Germinating Seeds
  misc_feature: MA Experiment ID: 108595 Result: Down-regulated in Transcription
  misc_feature: MA Experiment 108595 PARAMETER Experiment Name: At_Ler-pi_Ovule_cDNA_P Parameter: Plant Line Value: null
  misc_feature: MA Experiment ID: 20000113 Result: Down-regulated in Transcription
  misc_feature: MA Experiment 20000113 PARAMETER Experiment Name: At_42deg_Heat_cDNA_P Parameter: Temperature (deg C) Value: 42 vs. 22
  misc_feature: MA Experiment 20000113 PARAMETER Experiment Name: At_42deg_Heat_cDNA_P Parameter: Timepoint (hr) Value: 8
  misc_feature: MA Experiment 20000113 PARAMETER Experiment Name: At_42deg_Heat_cDNA_P Parameter: Tissue Value: Aerial
atgagcgacggagacgacgctgctagacgccgtaccgcggcggtgactgattaccggaagaagctccttcatcacaaggagctcgaatcccgtgtccgaacagctagggagaatttaagagcagctaagaaggaattcaacaaaactgaggatgatttgaagtctcttcaaagcgttggccagattattggagaagtactacgtcctcttgataacgagcgattgattgttaaggcaagtagtggccctcgttatgtggtgggttgtcgtagcaaggtggacaaggaaaagcttacttctggaactcgagttgtcctggatatgactacgctgacaattatgcgagcccttcctcgtgaagttgatcctgttgtttataacatgttgcatgaagatccaggcaacattagttactcagctgtgggtggtttaggtgatcagatcagagaacttagggaatctattgagctgcctctcatgaatcctgaacttttccttagagttgggattaaacctcctaagggtgtccttctgtatggacctccgggtactggaaaaactctactagctagggctattgccagcaatatcgacgccaacttcttgaaggttgtatctagtgcaatcatagacaaatacattggagaaagtgctaggttgattcgagaaatgtttaactatgctcgtgaacatcagccttgtatcattttcatggatgaaatcgatgctattggtggacgccgttttagtgaaggaactagtgctgatcgtgaaattcaaagaacacttatggagttacttaaccagcttgatgggtttgaccaacttggaaaggtgaaaatgataatggccaccaacaggccggatgttcttgatccagcacttctccgtccgggtaggttagatagaaagatcgagatcccgttgccaaatgaacaatcaagaatggaaatcctcaagatccacgcatctggcattgccaagcatggagaaatagactatgaggctatcgtgaaacttggagagggtttcaatggtgccgatctgcgtaacatatgcactgaagctggaatgttcgcaatcagagcagagcgtgactatgtaatacatgaagacttcatgaaggctgtgagaaagctgagcgaggccaagaagcttgagtcgagctctcactataacgcggattttgggaaagagtaagaaaagaataagctcagagaagaagagagggcctaaagggcagtgaaaaactct

SEQ ID NO: 87034 - protein, 399 aa, Arabidopsis thaliana; identical to SEQ ID NO: 23999
  peptide (1)..(399): Ceres Seq. ID no. 12696493
  misc_feature (175)..(362): Pfam Name: ATPase family associated with various cellular Pfam Description: ATPase family associated with various cellular
  misc_feature (1)..(399): Homolog of NCBI NO: 15219503 NR Description: 26S proteasome regulatory particle triple-A subunit4, putative; protein id: At1g45000.1, supported by cDNA:
  misc_feature (1)..(399): Homolog of NCBI NO: 15239140 NR Description: 26S proteasome AAA-ATPase subunit RPT4a; protein At5g43010.1, supported by cDNA: gi_13937182, supported by cDNA: supported by cDNA: gi_6652883 [Arabidopsis thaliana]
  misc_feature (1)..(399): Homolog of NCBI NO: 24745880 NR Description: 26S proteasome AAA-ATPase subunit RPT4a [Solanum
  misc_feature (1)..(399): Homolog of NCBI NO: 11094192 NR Description: 26S proteasome regulatory particle triple-A
  misc_feature (26)..(399): Homolog of NCBI NO: 17298147 NR Description: 26S proteasome regulatory particle triple-A
  misc_feature (11)..(392): Homolog of NCBI NO: 24640100 NR Description: CG3455-PA [Drosophila melanogaster]
  misc_feature (11)..(392): Homolog of NCBI NO: 17945503 NR Description: RE23388p [Drosophila melanogaster]
  misc_feature (11)..(392): Homolog of NCBI NO: 6434958 NR Description: 26S proteasome regulatory complex subunit p42D
  misc_feature (11)..(392): Homolog of NCBI NO: 2960216 NR Description: 26S proteasome regulatory ATPase subunit 10b
  misc_feature (17)..(392): Homolog of NCBI NO: 29825445 NR Description: 26S proteasome regulatory subunit [Dermacentor

SEQ ID NO: 87035 - protein, 292 aa, Arabidopsis thaliana; identical to SEQ ID NO: 24000
  peptide (1)..(292): Ceres Seq. ID no. 12696494
  misc_feature (68)..(255): Pfam Name: ATPase family associated with various cellular Pfam Description: ATPase family associated with various cellular
  misc_feature (1)..(292): Homolog of NCBI NO: 15219503 NR Description: 26S proteasome regulatory particle triple-A subunit4, putative; protein id: At1g45000.1, supported by cDNA:
  misc_feature (1)..(292): Homolog of NCBI NO: 15239140 NR Description: 26S proteasome AAA-ATPase subunit RPT4a; protein At5g43010.1, supported by cDNA: gi_13937182, supported by cDNA: supported by cDNA: gi_6652883 [Arabidopsis thaliana]
  misc_feature (1)..(292): Homolog of NCBI NO: 24745880 NR Description: 26S proteasome AAA-ATPase subunit RPT4a [Solanum
  misc_feature (1)..(292): Homolog of NCBI NO: 11094192 NR Description: 26S proteasome regulatory particle triple-A
  misc_feature (1)..(292): Homolog of NCBI NO: 17298147 NR Description: 26S proteasome regulatory particle triple-A
  misc_feature (1)..(285): Homolog of NCBI NO: 24640100 NR Description: CG3455-PA [Drosophila melanogaster]
  misc_feature (1)..(285): Homolog of NCBI NO: 17945503 NR Description: RE23388p [Drosophila melanogaster]
  misc_feature (1)..(285): Homolog of NCBI NO: 6434958 NR Description: 26S proteasome regulatory complex subunit p42D
  misc_feature (1)..(285): Homolog of NCBI NO: 2960216 NR Description: 26S proteasome regulatory ATPase subunit 10b
  misc_feature (1)..(285): Homolog of NCBI NO: 29825445 NR Description: 26S proteasome regulatory subunit [Dermacentor

SEQ ID NO: 87036 - protein, 286 aa, Arabidopsis thaliana; identical to SEQ ID NO: 24001
  peptide (1)..(286): Ceres Seq. ID no. 12696495
  misc_feature (62)..(249): Pfam Name: ATPase family associated with various cellular Pfam Description: ATPase family associated with various cellular
  misc_feature (1)..(286): Homolog of NCBI NO: 15219503 NR Description: 26S proteasome regulatory particle triple-A subunit4, putative; protein id: At1g45000.1, supported by cDNA:
  misc_feature (1)..(286): Homolog of NCBI NO: 15239140 NR Description: 26S proteasome AAA-ATPase subunit RPT4a; protein At5g43010.1, supported by cDNA: gi_13937182, supported by cDNA: supported by cDNA: gi_6652883 [Arabidopsis thaliana]
  misc_feature (1)..(286): Homolog of NCBI NO: 24745880 NR Description: 26S proteasome AAA-ATPase subunit RPT4a [Solanum
  misc_feature (1)..(286): Homolog of NCBI NO: 11094192 NR Description: 26S proteasome regulatory particle triple-A
  misc_feature (1)..(286): Homolog of NCBI NO: 17298147 NR Description: 26S proteasome regulatory particle triple-A
  misc_feature (1)..(279): Homolog of NCBI NO: 24640100 NR Description: CG3455-PA [Drosophila melanogaster]
  misc_feature (1)..(279): Homolog of NCBI NO: 17945503 NR Description: RE23388p [Drosophila melanogaster]
  misc_feature (1)..(279): Homolog of NCBI NO: 6434958 NR Description: 26S proteasome regulatory complex subunit p42D
  misc_feature (1)..(279): Homolog of NCBI NO: 2960216 NR Description: 26S proteasome regulatory ATPase subunit 10b
  misc_feature (1)..(279): Homolog of NCBI NO: 29825445 NR Description: 26S proteasome regulatory subunit [Dermacentor

SEQ ID NO: 87037 - DNA, 725 bp, Arabidopsis thaliana
  misc_feature (1)..(725): Ceres Seq. ID no. 12696498
  misc_feature: MA Experiment ID: 20000307 Result: Up-regulated in Transcription
  misc_feature: MA Experiment 20000307 PARAMETER Experiment Name: At_Germinating_Seeds_Sub_P Parameter: Age (hr) Value: 24 vs. 0
  misc_feature: MA Experiment 20000307 PARAMETER Experiment Name: At_Germinating_Seeds_Sub_P Parameter: Organism Value: A. thaliana
  misc_feature: MA Experiment 20000307 PARAMETER Experiment Name: At_Germinating_Seeds_Sub_P Parameter: Plant Line Value: WS
  misc_feature: MA Experiment 20000307 PARAMETER Experiment Name: At_Germinating_Seeds_Sub_P Parameter: Tissue Value: Germinating Seeds
  misc_feature: MA Experiment ID: 20000314 Result: Down-regulated in Transcription
  misc_feature: MA Experiment 20000314 PARAMETER Experiment Name: At_14day_Shoots-Roots_Sub_P Parameter: Age (day) Value: 14
  misc_feature: MA Experiment 20000314 PARAMETER Experiment Name: At_14day_Shoots-Roots_Sub_P Parameter: Organism Value: A. thaliana
  misc_feature: MA Experiment 20000314 PARAMETER Experiment Name: At_14day_Shoots-Roots_Sub_P Parameter: Plant Line Value: WS
  misc_feature: MA Experiment 20000314 PARAMETER Experiment Name: At_14day_Shoots-Roots_Sub_P Parameter: Tissue Value: Roots vs. Whole Plant
  misc_feature: MA Experiment ID: 20000327 Result: Down-regulated in Transcription
  misc_feature: MA Experiment 20000327 PARAMETER Experiment Name: At_42deg_Heat_Sub_P Parameter: Age (day) Value: 14
  misc_feature: MA Experiment 20000327 PARAMETER Experiment Name: At_42deg_Heat_Sub_P Parameter: Organism Value: A. thaliana
  misc_feature: MA Experiment 20000327 PARAMETER Experiment Name: At_42deg_Heat_Sub_P Parameter: Plant Line Value: WS
  misc_feature: MA Experiment 20000327 PARAMETER Experiment Name: At_42deg_Heat_Sub_P Parameter: Temperature (deg C) Value: 42 vs. 22
  misc_feature: MA Experiment 20000327 PARAMETER Experiment Name: At_42deg_Heat_Sub_P Parameter: Timepoint (hr) Value: 1
  misc_feature: MA Experiment 20000327 PARAMETER Experiment Name: At_42deg_Heat_Sub_P Parameter: Tissue Value: Aerial
  misc_feature: MA Experiment ID: 20000328 Result: Down-regulated in Transcription
  misc_feature: MA Experiment 20000328 PARAMETER Experiment Name: At_42deg_Heat_Sub_P Parameter: Age (day) Value: 14
  misc_feature: MA Experiment 20000328 PARAMETER Experiment Name: At_42deg_Heat_Sub_P Parameter: Organism Value: A. thaliana
  misc_feature: MA Experiment 20000328 PARAMETER Experiment Name: At_42deg_Heat_Sub_P Parameter: Plant Line Value: WS
  misc_feature: MA Experiment 20000328 PARAMETER Experiment Name: At_42deg_Heat_Sub_P Parameter: Temperature (deg C) Value: 42 vs. 22
  misc_feature: MA Experiment 20000328 PARAMETER Experiment Name: At_42deg_Heat_Sub_P Parameter: Timepoint (hr) Value: 6
  misc_feature: MA Experiment 20000328 PARAMETER Experiment Name: At_42deg_Heat_Sub_P Parameter: Tissue Value: Aerial
  misc_feature: MA Experiment ID: 20000355 Result: Up-regulated in Transcription
  misc_feature: MA Experiment 20000355 PARAMETER Experiment Name: At_Siliques_Sub_P Parameter: Age (day) Value: 21
  misc_feature: MA Experiment 20000355 PARAMETER Experiment Name: At_Siliques_Sub_P Parameter: Organism Value: A. thaliana
  misc_feature: MA Experiment 20000355 PARAMETER Experiment Name: At_Siliques_Sub_P Parameter: Plant Line Value: WS
  misc_feature: MA Experiment 20000355 PARAMETER Experiment Name: At_Siliques_Sub_P Parameter: Tissue Value: Less Than 5mm Siliques vs. Whole Plant
atggaggaagaacaagtaagagcaattaagataatagtatttggagtcatctcatggggtgtggccttcattctcacccggagaatcttctcaagctactcattcagcttcagcaaccgtcttctctccacggctcacgcgactatcgctgtcactttagcaacactctctgttcaagatttgtcttgccctgtttgtccccttgcttctaagccatctcataaacagatggacgtgatggcgttttcgttgtcgtacatgatctacgatctaatatgttgtcatttcgatcaagtgtttagcattgataacgcggttcatcatttcgttagcattcttggttttatagctggacttgcataccaaaagtctggatctgagatcgtggctacactgtgggtagcagagatatcaagtccttttttccaccttagggagattctcaaagagattggatacaaagacaccaaactcaatctagctgccgatgtgtgttttgccactatattcacattggcgagaattgtgtgtggacctttcctcgtttacgtcagtctatcagctgataatcccatcttcatcaaggcaatgggatcaggattacaactcgtgagcatcttttggttctataaaattttcgggatgatgagatataaactttttaagaagccaaagtcaaacaaaaagtctacttagcttagttagagatatacaaaagctgattc

SEQ ID NO: 87038 - protein, 231 aa, Arabidopsis thaliana; identical to SEQ ID NO: 34728
  peptide (1)..(231): Ceres Seq. ID no. 12696499
  misc_feature (1)..(231): Homolog of NCBI NO: 22330031 NR Description: hypothetical protein; protein id: At1g45010.1, by cDNA: gi_17380925 [Arabidopsis thaliana] unknown protein [Arabidopsis thaliana]
  misc_feature (1)..(230): Homolog of NCBI NO: 30693154 NR Description: expressed protein [Arabidopsis thaliana]
  misc_feature (1)..(195): Homolog of NCBI NO: 15219511 NR Description: hypothetical protein; protein id: At1g35170.1
  misc_feature (1)..(171): Homolog of NCBI NO: 25518603 NR Description: hypothetical protein T32G9.28 - Arabidopsis >gi|12320960|gb|AAG50605.1|AC079605_10 hypothetical protein
  misc_feature (12)..(228): Homolog of NCBI NO: 34903030 NR Description: unnamed protein product [Oryza sativa (japonica group)] >gi|7228458|dbj|BAA92418.1| unnamed protein product
  misc_feature (1)..(76): Homolog of NCBI NO: 25405881 NR Description: protein F27F5.9 [imported] - Arabidopsis thaliana
  misc_feature (120)..(164): Homolog of NCBI NO: 25405881 NR Description: protein F27F5.9 [imported] - Arabidopsis thaliana
  misc_feature (12)..(223): Homolog of NCBI NO: 34535216 NR Description: unnamed protein product [Homo sapiens]
  misc_feature (34)..(225): Homolog of NCBI NO: 27661880 NR Description: hypothetical protein XP_236191 [Rattus norvegicus]

SEQ ID NO: 87039 - protein, 155 aa, Arabidopsis thaliana; identical to SEQ ID NO: 34729
  peptide (1)..(155): Ceres Seq. ID no. 12696500
  misc_feature (1)..(155): Homolog of NCBI NO: 22330031 NR Description: hypothetical protein; protein id: At1g45010.1, by cDNA: gi_17380925 [Arabidopsis thaliana] unknown protein [Arabidopsis thaliana]
  misc_feature (1)..(154): Homolog of NCBI NO: 30693154 NR Description: expressed protein [Arabidopsis thaliana]
  misc_feature (1)..(119): Homolog of NCBI NO: 15219511 NR Description: hypothetical protein; protein id: At1g35170.1
  misc_feature (1)..(95): Homolog of NCBI NO: 25518603 NR Description: hypothetical protein T32G9.28 - Arabidopsis >gi|12320960|gb|AAG50605.1|AC079605_10 hypothetical protein
  misc_feature (1)..(152): Homolog of NCBI NO: 34903030 NR Description: unnamed protein product [Oryza sativa (japonica group)] >gi|7228458|dbj|BAA92418.1| unnamed protein product
  misc_feature (44)..(88): Homolog of NCBI NO: 25405881 NR Description: protein F27F5.9 [imported] - Arabidopsis thaliana
  misc_feature (1)..(147): Homolog of NCBI NO: 34535216 NR Description: unnamed protein product [Homo sapiens]
  misc_feature (1)..(149): Homolog of NCBI NO: 27661880 NR Description: hypothetical protein XP_236191 [Rattus norvegicus]

SEQ ID NO: 87040 - protein, 152 aa, Arabidopsis thaliana
  peptide (1)..(152): Ceres Seq. ID no. 12696501
  misc_feature (1)..(152): Homolog of NCBI NO: 22330031 NR Description: hypothetical protein; protein id: At1g45010.1, by cDNA: gi_17380925 [Arabidopsis thaliana] unknown protein [Arabidopsis thaliana]
  misc_feature (1)..(151): Homolog of NCBI NO: 30693154 NR Description: expressed protein [Arabidopsis thaliana]
  misc_feature (1)..(116): Homolog of NCBI NO: 15219511 NR Description: hypothetical protein; protein id: At1g35170.1
  misc_feature (1)..(92): Homolog of NCBI NO: 25518603 NR Description: hypothetical protein T32G9.28 - Arabidopsis >gi|12320960|gb|AAG50605.1|AC079605_10 hypothetical protein
  misc_feature (1)..(149): Homolog of NCBI NO: 34903030 NR Description: unnamed protein product [Oryza sativa (japonica group)] >gi|7228458|dbj|BAA92418.1| unnamed protein product
  misc_feature (41)..(85): Homolog of NCBI NO: 25405881 NR Description: protein F27F5.9 [imported] - Arabidopsis thaliana
  misc_feature (1)..(144): Homolog of NCBI NO: 34535216 NR Description: unnamed protein product [Homo sapiens]
  misc_feature (1)..(146): Homolog of NCBI NO: 27661880 NR Description: hypothetical protein XP_236191 [Rattus norvegicus]
MAFSLSYMIYDLICCHFDQVFSIDNAVHHFVSILGFIAGLAYQKSGSEIVATLWVAEISSPFFHLREILKEIGYKDTKLNLAADVCFATIFTLARIVCGPFLVYVSLSADNPIFIKAMGSGLQLVSIFWFYKIFGMMRYKLFKKPKSNKKST

SEQ ID NO: 87041 - DNA, 955 bp, Arabidopsis thaliana
  misc_feature (1)..(955): Ceres Seq. ID no. 12696530
  misc_feature: MA Experiment ID: 20000234 Result: Down-regulated in Transcription
  misc_feature: MA Experiment 20000234 PARAMETER Experiment Name: At_Siliques_P Parameter: Age (day) Value: 21
  misc_feature: MA Experiment 20000234 PARAMETER Experiment Name: At_Siliques_P Parameter: Organism Value: A. thaliana
  misc_feature: MA Experiment 20000234 PARAMETER Experiment Name: At_Siliques_P Parameter: Plant Line Value: WS
  misc_feature: MA Experiment 20000234 PARAMETER Experiment Name: At_Siliques_P Parameter: Tissue Value: Less Than 5mm Siliques vs. Whole Plant
  misc_feature: MA Experiment ID: 20000495 Result: Down-regulated in Transcription
  misc_feature: MA Experiment 20000495 PARAMETER Experiment Name: At_Guard_Cells_P Parameter: Harvest Date Value: 8/2/2002
  misc_feature: MA Experiment 20000495 PARAMETER Experiment Name: At_Guard_Cells_P Parameter: Organism Value: A. thaliana
  misc_feature: MA Experiment 20000495 PARAMETER Experiment Name: At_Guard_Cells_P Parameter: Tissue Value: Guard Cells vs. Leaves
  misc_feature: MA Experiment ID: 20001458 Result: Up-regulated in Transcription
  misc_feature: MA Experiment 20001458 PARAMETER Experiment Name: At_50mM_NH4NO3_L-to-H_P Parameter: Age (day) Value: Undefined
  misc_feature: MA Experiment 20001458 PARAMETER Experiment Name: At_50mM_NH4NO3_L-to-H_P Parameter: Organism Value: Undefined
  misc_feature: MA Experiment 20001458 PARAMETER Experiment Name: At_50mM_NH4NO3_L-to-H_P Parameter: Plant Line Value: Undefined
  misc_feature: MA Experiment 20001458 PARAMETER Experiment Name: At_50mM_NH4NO3_L-to-H_P Parameter: Timepoint (hr) Value: 2
  misc_feature: MA Experiment 20001458 PARAMETER Experiment Name: At_50mM_NH4NO3_L-to-H_P Parameter: Tissue Value: Siliques
  misc_feature: MA Experiment 20001458 PARAMETER Experiment Name: At_50mM_NH4NO3_L-to-H_P Parameter: Treatment Value: 50mM NH4NO3 vs. 100mM Manitol
  misc_feature: MA Experiment ID: 20001757 Result: Up-regulated in Transcription
  misc_feature: MA Experiment 20001757 PARAMETER Experiment Name: At_50mM_NH4NO3_L-to-H_P Parameter: Timepoint (hr) Value: 6
  misc_feature: MA Experiment 20001757 PARAMETER Experiment Name: At_50mM_NH4NO3_L-to-H_P Parameter: Tissue Value: Leaf
  misc_feature: MA Experiment 20001757 PARAMETER Experiment Name: At_50mM_NH4NO3_L-to-H_P Parameter: Treatment Value: 50mM NH4NO3 vs 100mM Mannitol
ttttttttaaagatttagagaaaaaagtgagttattaagagattccaatcaaaatgagcggagacaacggcggtggtgagaggcgcaaaggctccgtcaagtggtttgatacccagaagggtttcggcttcatcactcctgacgacggtggcgacgatctcttcgttcaccagtcctccatcagatctgagggtttccgtagcctcgctgccgaagaagccgtagagttcgaggttgagatcgacaacaacaaccgtcccaaggccatcgatgtttctggacccgacggcgctcccgtccaaggaaacagcggtggtggttcatctggcggacgcggcggtttcggtggaggaagaggaggtggacgcggatctggaggtggatacggcggtggcggtggtggatacggaggaagaggaggtggtggtcgaggaggcagcgactgctacaagtgtggtgagcccggtcacatggcgagagactgttctgaaggcggtggaggttacggaggaggcggcggtggctacggaggtggaggcggatacggcggaggaggtggtggttacggaggtggtggccgtggaggtggtggcggcgggggaagctgctacagctgtggcgagtcgggacatttcgccagggattgcaccagcggtggacgttaaaaccaacgccggttacgcggtggagaagagtgagttggttatctcacaagtgatcggttctttctcccgccgccttctatctctctattatccactttttgcttattatgatggatctctatctttgttagttggttttttcttgatggtttcggattaggactcttcttttggttttgctacttatggttggttttatttatggtacttgtgatatgggtgaaatgctctacttgttgctctgtttcaagtgttcataatatgcgaacaaatattctgggttttgtttc

SEQ ID NO: 87042 - protein, 203 aa, Arabidopsis thaliana; identical to SEQ ID NO: 26302
  peptide (1)..(203): Ceres Seq. ID no. 12696531
  misc_feature (10)..(77): Pfam Name: 'Cold-shock' DNA-binding domain Pfam Description: 'Cold-shock' DNA-binding domain
  misc_feature (1)..(203): Homolog of NCBI NO: 15234010 NR Description: glycine-rich protein 2 (GRP2); protein id: supported by cDNA: gi_14326486 [Arabidopsis thaliana]
  misc_feature (7)..(202): Homolog of NCBI NO: 15226451 NR Description: glycine-rich protein (AtGRP2); protein id: supported by cDNA: gi_1063683, supported by cDNA: gi_16323177
  misc_feature (8)..(203): Homolog of NCBI NO: 121631 NR Description: Glycine-rich protein 2 >gi|72323|pir||KNNT2S
  misc_feature (9)..(200): Homolog of NCBI NO: 29467522 NR Description: P0582D05.12 [Oryza sativa (japonica
  misc_feature (8)..(202): Homolog of NCBI NO: 21322752 NR Description: cold shock protein-1 [Triticum aestivum]
  misc_feature (8)..(198): Homolog of NCBI NO: 40363759 NR Description: putative glycine-rich protein [Triticum aestivum]
  misc_feature (1)..(202): Homolog of NCBI NO: 18398546 NR Description: putative glycine-rich, zinc-finger DNA-binding protein id: At2g17870.1, supported by cDNA: gi_14334919, by cDNA: gi_17104540 [Arabidopsis thaliana]
  misc_feature (10)..(202): Homolog of NCBI NO: 7442089 NR Description: glycine-rich protein T13L16.11 - Arabidopsis
  misc_feature (87)..(198): Homolog of NCBI NO: 21322752 NR Description: cold shock protein-1 [Triticum aestivum]
  misc_feature (1)..(199): Homolog of NCBI NO: 15233440 NR Description: glycine-rich protein; protein id: At4g36020.1, by cDNA: 122924., supported by cDNA: gi_13926192 [Arabidopsis

SEQ ID NO: 87043 - protein, 184 aa, Arabidopsis thaliana; identical to SEQ ID NO: 26303
  peptide (1)..(184): Ceres Seq. ID no. 12696532

SEQ ID NO: 87044 - DNA, 1579 bp, Arabidopsis thaliana
  misc_feature (1)..(1579): Ceres Seq. ID no. 12696537
  misc_feature: MA Experiment ID: 108434 Result: Up-regulated in Transcription
  misc_feature: MA Experiment 108434 PARAMETER Experiment Name: At_Root_Tips_cDNA_P Parameter: Tissue Value: Root Tips
  misc_feature: MA Experiment ID: 108462 Result: Up-regulated in Transcription
  misc_feature: MA Experiment 108462 PARAMETER Experiment Name: At_Germinating_Seeds_cDNA_P Parameter: Age (day) Value: 2 vs. 0
  misc_feature: MA Experiment 108462 PARAMETER Experiment Name: At_Germinating_Seeds_cDNA_P Parameter: Tissue Value: Germinating Seeds
  misc_feature: MA Experiment ID: 108463 Result: Up-regulated in Transcription
  misc_feature: MA Experiment 108463 PARAMETER Experiment Name: At_Germinating_Seeds_cDNA_P Parameter: Age (day) Value: 3 vs. 0
  misc_feature: MA Experiment 108463 PARAMETER Experiment Name: At_Germinating_Seeds_cDNA_P Parameter: Tissue Value: Germinating Seeds
  misc_feature: MA Experiment ID: 20000264 Result: Up-regulated in Transcription
  misc_feature: MA Experiment 20000264 PARAMETER Experiment Name: At_Open_Flower_P Parameter: Age (day) Value: 21
  misc_feature: MA Experiment 20000264 PARAMETER Experiment Name: At_Open_Flower_P Parameter: Plant Line Value: WS
  misc_feature: MA Experiment 20000264 PARAMETER Experiment Name: At_Open_Flower_P Parameter: Tissue Value: Open Flower vs. Whole Plant
  misc_feature: MA Experiment ID: 20000265 Result: Up-regulated in Transcription
  misc_feature: MA Experiment 20000265 PARAMETER Experiment Name: At_Open_Flower_P Parameter: Age (day) Value: 21
  misc_feature: MA Experiment 20000265 PARAMETER Experiment Name: At_Open_Flower_P Parameter: Plant Line Value: WS
  misc_feature: MA Experiment 20000265 PARAMETER Experiment Name: At_Open_Flower_P Parameter: Tissue Value: Closed Flower vs. Whole Plant
  misc_feature: MA Experiment ID: 20000286 Result: Up-regulated in Transcription
  misc_feature: MA Experiment 20000286 PARAMETER Experiment Name: At_Open_Flower_P Parameter: Age (day) Value: 21
  misc_feature: MA Experiment 20000286 PARAMETER Experiment Name: At_Open_Flower_P Parameter: Plant Line Value: WS
  misc_feature: MA Experiment 20000286 PARAMETER Experiment Name: At_Open_Flower_P Parameter: Tissue Value: Half Open vs. Whole Plant
  misc_feature: MA Experiment ID: 20000496 Result: Up-regulated in Transcription
  misc_feature: MA Experiment 20000496 PARAMETER Experiment Name: At_Guard_Cells_P Parameter: Harvest Date Value: 7/19/2002
  misc_feature: MA Experiment 20000496 PARAMETER Experiment Name: At_Guard_Cells_P Parameter: Organism Value: Canola
  misc_feature: MA Experiment 20000496 PARAMETER Experiment Name: At_Guard_Cells_P Parameter: Tissue Value: Guard Cells vs. Leaves
  misc_feature: MA Experiment ID: 20000794 Result: Up-regulated in Transcription
  misc_feature: MA Experiment 20000794 PARAMETER Experiment Name: At_Petals_P Parameter: Age (day) Value: 23-25 days
  misc_feature: MA Experiment 20000794 PARAMETER Experiment Name: At_Petals_P Parameter: Plant Line Value: WS
  misc_feature: MA Experiment 20000794 PARAMETER Experiment Name: At_Petals_P Parameter: Tissue Value: Petals vs. Whole plant
  misc_feature: MA Experiment ID: 20001248 Result: Up-regulated in Transcription
  misc_feature: MA Experiment 20001248 PARAMETER Experiment Name: At_Far-red-induction_P Parameter: Age (day) Value: 7
  misc_feature: MA Experiment 20001248 PARAMETER Experiment Name: At_Far-red-induction_P Parameter: Light Value: Far-red vs. White
  misc_feature: MA Experiment 20001248 PARAMETER Experiment Name: At_Far-red-induction_P Parameter: Organism Value: A. thaliana
  misc_feature: MA Experiment 20001248 PARAMETER Experiment Name: At_Far-red-induction_P Parameter: Plant Line Value: Columbia
  misc_feature: MA Experiment 20001248 PARAMETER Experiment Name: At_Far-red-induction_P Parameter: Timepoint (hr) Value: 4
  misc_feature: MA Experiment 20001248 PARAMETER Experiment Name: At_Far-red-induction_P Parameter: Tissue Value: Whole Plant
aataggttcagtgtttctgacatattgttccctctctgaatgaaactctcccaaatagagaatggcctaaccacctatccaaccgcatcaaggcacttggtttcatccccttgatttctctctttttttcttttcctatcgcaggattttgtgttcttgttttgaatatgaaatgttcgtcgatgtgttgtttgatcctcttggccctttctctcctcaccgccttcactcttgcttcttcgtcaaatggtatagatggacctttctacgactctactgcctacacagagtgtagagccgaagcagagaagccactatacaatggaggaatgctgaaggaccaaaagccttccgtcccaggcaaagactctctcacaggcattggtgctcattacacaccaacttacatattgcacaatctcacacagaacaccatctattgcttctccatatgggtgaagatagaggctggtgctgcatcagctcatgtaagagcaaggctgagagcagacaacgccacattaaactgcgtcggttctgtaactgccaaacatggttgctggtctttcctcaaaggaggattccttcttgattctccttgtaaacaatccatcctcttctttgagacatcagaggacgatggtaagatccaattacaagtgacgagtgcctctcttcagccattcacgcaggagcaatggaggaacaaccaagattacttcataaataccgcgagaaaacgagcagtgacaattcacgtgtcaaaagaaaacggagagagcgttgaaggagcagaggtgacagtagagcagatctctaaagacttctccattggatctgccatctccaaaactatccttggaaacattccttaccaagaatggttcgtcaagagattcgacgccacggtattcgagaacgagctgaaatggtacgcgacggagcccgatcaaggcaaactcaactacacattggctgataagatgatgaatttcgtcagagccaacagaatcatcgctcgcggtcacaacatattctgggaggatcccaaatacaatcccgattgggttcgtaatctaaccggcgaagatctccggtcggcggttaaccggcgaatcaagagtctgatgactcggtacagaggagagttcgtgcattgggacgtgagcaacgagatgcttcactttgacttctacgagactcgactggggaagaacgcgtcgtacggattcttcgccgcggctcgtgagattgactcattggcgactctgttcttcaatgatttcaacgtggtggagacttgcagcgacgagaagtcaacggttgacgaatacatcgcgagggtgagggaactccaacggtacgacggcgtaaggatggacggaataggtctcgagggtcacttcacgacgccaaacgtagcgctgatgagagccatcctcgataaactcgctacgctccagctcccaatctggctcaccgagattgatatcagcagcagcctcgaccaccgctctcaggcgatttatttggagcaagtgttacgtgaaggattctcgcacccatcggtaaacggtat

SEQ ID NO: 87045 - protein, 470 aa, Arabidopsis thaliana
  peptide (1)..(470): Ceres Seq. ID no. 12696538
  misc_feature (211)..(469): Pfam Name: Glycosyl hydrolase family 10 Pfam Description: Glycosyl hydrolase family 10
  misc_feature (1)..(469): Homolog of NCBI NO: 28416709 NR Description: At4g38650 [Arabidopsis thaliana]
  misc_feature (146)..(469): Homolog of NCBI NO: 15233983 NR Description: glycosyl hydrolase family 10; protein id:
  misc_feature (189)..(451): Homolog of NCBI NO: 15233783 NR Description: glycosyl hydrolase family 10; protein id:
  misc_feature (14)..(469): Homolog of NCBI NO: 30689830 NR Description: glycosyl hydrolase family 10 [Arabidopsis
  misc_feature (85)..(469): Homolog of NCBI NO: 15235134 NR Description: glycosyl hydrolase family 10; protein id:
  misc_feature (85)..(469): Homolog of NCBI NO: 15235131 NR Description: glycosyl hydrolase family 10; protein id:
  misc_feature (85)..(469): Homolog of NCBI NO: 7485619 NR Description: hypothetical protein F17I5.30 - Arabidopsis >gi|3297808|emb|CAA19866.1| putative protein [Arabidopsis >gi|7270333|emb|CAB80101.1| putative protein [Arabidopsis
  misc_feature (34)..(469): Homolog of NCBI NO: 23429644 NR Description: endoxylanase [Carica papaya]
  misc_feature (67)..(469): Homolog of NCBI NO: 37533262 NR Description: putative 1,4-beta-xylanase [Oryza sativa
  misc_feature (85)..(469): Homolog of NCBI NO: 15235098 NR Description: glycosyl hydrolase family 10; protein id:
MKCSSMCCLILLALSLLTAFTLASSSNGIDGPFYDSTAYTECRAEAEKPLYNGGMLKDQKPSVPGKDSLTGIGAHYTPTYILHNLTQNTIYCFSIWVKIEAGAASAHVRARLRADNATLNCVGSVTAKHGCWSFLKGGFLLDSPCKQSILFFETSEDDGKIQLQVTSASLQPFTQEQWRNNQDYFINTARKRAVTIHVSKENGESVEGAEVTVEQISKDFSIGSAISKTILGNIPYQEWFVKRFDATVFENELKWYATEPDQGKLNYTLADKMMNFVRANRIIARGHNIFWEDPKYNPDWVRNLTGEDLRSAVNRRIKSLMTRYRGEFVHWDVSNEMLHFDFYETRLGKNASYGFFAAAREIDSLATLFFNDFNVVETCSDEKSTVDEYIARVRELQRYDGVRMDGIGLEGHFTTPNVALMRAILDKLATLQLPIWLTEIDISSSLDHRSQAIYLEQVLREGFSHPSVNG

SEQ ID NO: 87046 - protein, 465 aa, Arabidopsis thaliana
  peptide (1)..(465): Ceres Seq. ID no. 12696539
  misc_feature (206)..(464): Pfam Name: Glycosyl hydrolase family 10 Pfam Description: Glycosyl hydrolase family 10
  misc_feature (1)..(464): Homolog of NCBI NO: 28416709 NR Description: At4g38650 [Arabidopsis thaliana]
  misc_feature (141)..(464): Homolog of NCBI NO: 15233983 NR Description: glycosyl hydrolase family 10; protein id:
  misc_feature (184)..(446): Homolog of NCBI NO: 15233783 NR Description: glycosyl hydrolase family 10; protein id:
  misc_feature (9)..(464): Homolog of NCBI NO: 30689830 NR Description: glycosyl hydrolase family 10 [Arabidopsis
  misc_feature (80)..(464): Homolog of NCBI NO: 15235134 NR Description: glycosyl hydrolase family 10; protein id:
  misc_feature (80)..(464): Homolog of NCBI NO: 15235131 NR Description: glycosyl hydrolase family 10; protein id:
  misc_feature (80)..(464): Homolog of NCBI NO: 7485619 NR Description: hypothetical protein F17I5.30 - Arabidopsis >gi|3297808|emb|CAA19866.1| putative protein [Arabidopsis >gi|7270333|emb|CAB80101.1| putative protein [Arabidopsis
  misc_feature (29)..(464): Homolog of NCBI NO: 23429644 NR Description: endoxylanase [Carica papaya]
  misc_feature (62)..(464): Homolog of NCBI NO: 37533262 NR Description: putative 1,4-beta-xylanase [Oryza sativa
  misc_feature (80)..(464): Homolog of NCBI NO: 15235098 NR Description: glycosyl hydrolase family 10; protein id:
MCCLILLALSLLTAFTLASSSNGIDGPFYDSTAYTECRAEAEKPLYNGGMLKDQKPSVPGKDSLTGIGAHYTPTYILHNLTQNTIYCFSIWVKIEAGAASAHVRARLRADNATLNCVGSVTAKHGCWSFLKGGFLLDSPCKQSILFFETSEDDGKIQLQVTSASLQPFTQEQWRNNQDYFINTARKRAVTIHVSKENGESVEGAEVTVEQISKDFSIGSAISKTILGNIPYQEWFVKRFDATVFENELKWYATEPDQGKLNYTLADKMMNFVRANRIIARGHNIFWEDPKYNPDWVRNLTGEDLRSAVNRRIKSLMTRYRGEFVHWDVSNEMLHFDFYETRLGKNASYGFFAAAREIDSLATLFFNDFNVVETCSDEKSTVDEYIARVRELQRYDGVRMDGIGLEGHFTTPNVALMRAILDKLATLQLPIWLTEIDISSSLDHRSQAIYLEQVLREGFSHPSVNG

SEQ ID NO: 87047 - protein, 416 aa, Arabidopsis thaliana
  peptide (1)..(416): Ceres Seq. ID no. 12696540
  misc_feature (157)..(415): Pfam Name: Glycosyl hydrolase family 10 Pfam Description: Glycosyl hydrolase family 10
  misc_feature (1)..(415): Homolog of NCBI NO: 28416709 NR Description: At4g38650 [Arabidopsis thaliana]
  misc_feature (92)..(415): Homolog of NCBI NO: 15233983 NR Description: glycosyl hydrolase family 10; protein id:
  misc_feature (135)..(397): Homolog of NCBI NO: 15233783 NR Description: glycosyl hydrolase family 10; protein id:
  misc_feature (1)..(415): Homolog of NCBI NO: 30689830 NR Description: glycosyl hydrolase family 10 [Arabidopsis
  misc_feature (31)..(415): Homolog of NCBI NO: 15235134 NR Description: glycosyl hydrolase family 10; protein id:
  misc_feature (31)..(415): Homolog of NCBI NO: 15235131 NR Description: glycosyl hydrolase family 10; protein id:
  misc_feature (31)..(415): Homolog of NCBI NO: 7485619 NR Description: hypothetical protein F17I5.30 - Arabidopsis >gi|3297808|emb|CAA19866.1| putative protein [Arabidopsis >gi|7270333|emb|CAB80101.1| putative protein [Arabidopsis
  misc_feature (1)..(415): Homolog of NCBI NO: 23429644 NR Description: endoxylanase [Carica papaya]
  misc_feature (13)..(415): Homolog of NCBI NO: 37533262 NR Description: putative 1,4-beta-xylanase [Oryza sativa
  misc_feature (31)..(415): Homolog of NCBI NO: 15235098 NR Description: glycosyl hydrolase family 10; protein id:
MLKDQKPSVPGKDSLTGIGAHYTPTYILHNLTQNTIYCFSIWVKIEAGAASAHVRARLRADNATLNCVGSVTAKHGCWSFLKGGFLLDSPCKQSILFFETSEDDGKIQLQVTSASLQPFTQEQWRNNQDYFINTARKRAVTIHVSKENGESVEGAEVTVEQISKDFSIGSAISKTILGNIPYQEWFVKRFDATVFENELKWYATEPDQGKLNYTLADKMMNFVRANRIIARGHNIFWEDPKYNPDWVRNLTGEDLRSAVNRRIKSLMTRYRGEFVHWDVSNEMLHFDFYETRLGKNASYGFFAAAREIDSLATLFFNDFNVVETCSDEKSTVDEYIARVRELQRYDGVRMDGIGLEGHFTTPNVALMRAILDKLATLQLPIWLTEIDISSSLDHRSQAIYLEQVLREGFSHPSVNG

SEQ ID NO: 87048 - DNA, 2684 bp, Arabidopsis thaliana
  misc_feature (1)..(2684): Ceres Seq. ID no. 12696549
  misc_feature: MA Experiment ID: 20000179 Result: Down-regulated in Transcription
  misc_feature: MA Experiment 20000179 PARAMETER Experiment Name: At_Germinating_Seeds_P Parameter: Age (hr) Value: 6 vs. 0
  misc_feature: MA Experiment 20000179 PARAMETER Experiment Name: At_Germinating_Seeds_P Parameter: Tissue Value: Germinating Seeds
  misc_feature: MA Experiment ID: 20000180 Result: Down-regulated in Transcription
  misc_feature: MA Experiment 20000180 PARAMETER Experiment Name: At_Germinating_Seeds_P Parameter: Age (hr) Value: 24 vs. 0
  misc_feature: MA Experiment 20000180 PARAMETER Experiment Name: At_Germinating_Seeds_P Parameter: Tissue Value: Germinating Seeds
atgagcaaatcaagtagaattaggatgaagtcgagaacacgatacttgatagcgattctacttgtaatttcgctctgttccaaggcaagcagccatgatgatgagaaaaagaagaaaggagtaacatacgacggttctgagcggaacttcattgatcataaatggaaaaagagagcttcttttctctggttctgttcattaccctcgaagcacacctcacatgtggcccagtatcattgacaaagctagaattgggggacttaacaccatccaaacttatgttttctggaatgtccatgagcctgaacaaggcaagtatgatttcaaggggagatttgacttggtgaaattcatcaaactaatccacgagaaaggtctctatgtcactctcagactcggaccctttatccaagccgaatggaaccacggagggttgccgtactggctacgcgaggtcccagatgtttacttccgtacaaataatgaaccttttaaggaacatacagagagatatgtgaggaaaatacttgggatgatgaaggaagagaagctgttcgcttcacaaggaggtcccatcatcttgggacagatagagaatgagtacaacgcggttcagctagcctacaaggagaatggagagaagtatataaaatgggcagcaaatttggtggagtcaatgaatctgggaatcccctgggttatgtgcaaacaaaacgatgctcctggcaatctgattaatgcttgtaatggaaggcattgcggagatactttcccaggaccaaacagacacgataagccctccttatggaccgagaattggactactcagtttcgagtttttggggatcctccaacacagagaacagtcgaagatattgcattctcagtcgctagatacttctctaagaacggatcccatgtcaactactacatgtaccatggcggaacaaacttcggacgcacgtctgctcatttcgttaccactcgttactatgacgatgcgccacttgacgaatttggtttggagaaagctccaaaatacggtcacctaaaacatgtgcacagagcacttagattgtgcaagaaggcacttttttggggtcaacttcgcgcccagacacttggtcccgataccgaggttaggtactacgagcagccagggacaaaagtgtgtgcggctttcttatcgaacaataacacaagagatactaatacgattaaattcaaaggtcaagattacgttttaccgtctcgttctatcagcatcttaccggattgtaaaacagtcgtttacaatactgcacagattgtagcccaacacagttggagagattttgtcaagtcagagaagacaagcaaaggtctcaaatttgagatgtttagtgaaaatattccttccttacttgacggtgattctttgattccgggggagctttattacttaactaaagacaaaacagattatgcttggtataccacaagcgtaaagattgacgaagatgactttccagaccaaaaaggtctgaagactatactgagagtagcgagtcttggtcacgcactgatcgtttacgttaacggagagtacgcagggaaagcacatggacgccatgaaatgaagagtttcgagtttgcaaaaccagtgaactttaaaaccggagataatcgcatttcaattttgggtgtactaaccggattaccagacagtggatcatacatggaacacaggtttgctggtccacgtgctatttcaatcatcggtttaaagtcaggaacgcgagatttgaccgagaacaatgaatggggacacttggccggtttggaaggtgaaaagaaagaggtgtacacagaggaaggatctaagaaggtgaaatgggagaaagatggtaaacgtaagcctcttacgtggtacaagacctactttgagacaccagagggagtgaacgcggtcgcgattaggatgaaagcaatggggaagggattgatttgggttaatggaattggcgtagggagatattggatgtctttcctttctccactgggagagccaactcaaacggagtaccatataccgagatctttcatgaagggggagaagaagaagaacatgctggtgattctcgaggaagaaccaggggtgaagttagagtctattgatttcgtgttggtgaatagagacacaatctgtagtaatgtcggggaggattacccagtatcggtgaaatcgtggaagagagaagggccaaagatagtttcgagaagcaaagatatgaggctaaaggcagtgatgaggtgtccaccggagaaacaaatggtggaagtacaatttgcaagcttcggagatccgacaggaacttgtggtaacttcacaatggggaagtgctctgcatctaagtcaaaggaggtggtcgagaaggagtgtttgggtaggaattattgttccatagtagtagcgagggagacttttggggacaaagggtgtccggagatagtgaagacattggcagtgcaagtcaagtgtgagaagaaagaaggaaaacaagatgagaagaagaagaaagaagataaagacgaagaggaagaggacgatgaagatgatgatgaagaagaagaagaagaagacaaagagaacaaagatacaaaggatatggagaacaaaaatcaagatatgtaaacaagactac

SEQ ID NO: 87049 - protein, 817 aa, Arabidopsis thaliana
  peptide (1)..(817): Ceres Seq. ID no. 12696550
  misc_feature (690)..(767): Pfam Name: Galactose binding lectin domain Pfam Description: Galactose binding lectin domain
  misc_feature (123)..(775): Homolog of NCBI NO: 7484826 NR Description: beta-galactosidase homolog M4E13.70 - Arabidopsis
  misc_feature (1)..(89): Homolog of NCBI NO: 7484826 NR Description: beta-galactosidase homolog M4E13.70 - Arabidopsis
  misc_feature (1)..(654): Homolog of NCBI NO: 10862896 NR Description: putative beta-galactosidase [Nicotiana tabacum]
  misc_feature (1)..(767): Homolog of NCBI NO: 30699255 NR Description: glycosyl hydrolase family 35 (beta-galactosidase)
  misc_feature (1)..(750): Homolog of NCBI NO: 26451843 NR Description: unknown protein [Arabidopsis thaliana]
  misc_feature (1)..(603): Homolog of NCBI NO: 15081596 NR Description: putative beta-galactosidase BG1 [Vitis vinifera]
  misc_feature (558)..(767): Homolog of NCBI NO: 15081596 NR Description: putative beta-galactosidase BG1 [Vitis vinifera]
  misc_feature (1)..(615): Homolog of NCBI NO: 30690633 NR Description: glycosyl hydrolase family 35 (beta-galactosidase)
  misc_feature (557)..(767): Homolog of NCBI NO: 30690633 NR Description: glycosyl hydrolase family 35 (beta-galactosidase)
  misc_feature (1)..(613): Homolog of NCBI NO: 30683905 NR Description: glycosyl hydrolase family 35 (beta-galactosidase)
MWPSIIDKARIGGLNTIQTYVFWNVHEPEQGKYDFKGRFDLVKFIKLIHEKGLYVTLRLGPFIQAEWNHGGLPYWLREVPDVYFRTNNEPFKEHTERYVRKILGMMKEEKLFASQGGPIILGQIENEYNAVQLAYKENGEKYIKWAANLVESMNLGIPWVMCKQNDAPGNLINACNGRHCGDTFPGPNRHDKPSLWTENWTTQFRVFGDPPTQRTVEDIAFSVARYFSKNGSHVNYYMYHGGTNFGRTSAHFVTTRYYDDAPLDEFGLEKAPKYGHLKHVHRALRLCKKALFWGQLRAQTLGPDTEVRYYEQPGTKVCAAFLSNNNTRDTNTIKFKGQDYVLPSRSISILPDCKTVVYNTAQIVAQHSWRDFVKSEKTSKGLKFEMFSENIPSLLDGDSLIPGELYYLTKDKTDYAWYTTSVKIDEDDFPDQKGLKTILRVASLGHALIVYVNGEYAGKAHGRHEMKSFEFAKPVNFKTGDNRISILGVLTGLPDSGSYMEHRFAGPRAISIIGLKSGTRDLTENNEWGHLAGLEGEKKEVYTEEGSKKVKWEKDGKRKPLTWYKTYFETPEGVNAVAIRMKAMGKGLIWVNGIGVGRYWMSFLSPLGEPTQTEYHIPRSFMKGEKKKNMLVILEEEPGVKLESIDFVLVNRDTICSNVGEDYPVSVKSWKREGPKIVSRSKDMRLKAVMRCPPEKQMVEVQFASFGDPTGTCGNFTMGKCSASKSKEVVEKECLGRNYCSIVVARETFGDKGCPEIVKTLAVQVKCEKKEGKQDEKKKKEDKDEEEEDDEDDDEEEEEEDKENKDTKDMENKNQDM

SEQ ID NO: 87050 - protein, 713 aa, Arabidopsis thaliana
  peptide (1)..(713): Ceres Seq. ID no. 12696551
  misc_feature (586)..(663): Pfam Name: Galactose binding lectin domain Pfam Description: Galactose binding lectin domain
  misc_feature (19)..(671): Homolog of NCBI NO: 7484826 NR Description: beta-galactosidase homolog M4E13.70 - Arabidopsis
  misc_feature (1)..(550): Homolog of NCBI NO: 10862896 NR Description: putative beta-galactosidase [Nicotiana tabacum]
  misc_feature (1)..(663): Homolog of NCBI NO: 30699255 NR Description: glycosyl hydrolase family 35 (beta-galactosidase)
  misc_feature (1)..(646): Homolog of NCBI NO: 26451843 NR Description: unknown protein [Arabidopsis thaliana]
  misc_feature (1)..(499): Homolog of NCBI NO: 15081596 NR Description: putative beta-galactosidase BG1 [Vitis vinifera]
  misc_feature (454)..(663): Homolog of NCBI NO: 15081596 NR Description: putative beta-galactosidase BG1 [Vitis vinifera]
  misc_feature (1)..(511): Homolog of NCBI NO: 30690633 NR Description: glycosyl hydrolase family 35 (beta-galactosidase)
  misc_feature (453)..(663): Homolog of NCBI NO: 30690633 NR Description: glycosyl hydrolase family 35 (beta-galactosidase)
  misc_feature (1)..(509): Homolog of NCBI NO: 30683905 NR Description: glycosyl hydrolase family 35 (beta-galactosidase)
  misc_feature (500)..(663): Homolog of NCBI NO: 30683905 NR Description: glycosyl hydrolase family 35 (beta-galactosidase)
MMKEEKLFASQGGPIILGQIENEYNAVQLAYKENGEKYIKWAANLVESMNLGIPWVMCKQNDAPGNLINACNGRHCGDTFPGPNRHDKPSLWTENWTTQFRVFGDPPTQRTVEDIAFSVARYFSKNGSHVNYYMYHGGTNFGRTSAHFVTTRYYDDAPLDEFGLEKAPKYGHLKHVHRALRLCKKALFWGQLRAQTLGPDTEVRYYEQPGTKVCAAFLSNNNTRDTNTIKFKGQDYVLPSRSISILPDCKTVVYNTAQIVAQHSWRDFVKSEKTSKGLKFEMFSENIPSLLDGDSLIPGELYYLTKDKTDYAWYTTSVKIDEDDFPDQKGLKTILRVASLGHALIVYVNGEYAGKAHGRHEMKSFEFAKPVNFKTGDNRISILGVLTGLPDSGSYMEHRFAGPRAISIIGLKSGTRDLTENNEWGHLAGLEGEKKEVYTEEGSKKVKWEKDGKRKPLTWYKTYFETPEGVNAVAIRMKAMGKGLIWVNGIGVGRYWMSFLSPLGEPTQTEYHIPRSFMKGEKKKNMLVILEEEPGVKLESIDFVLVNRDTICSNVGEDYPVSVKSWKREGPKIVSRSKDMRLKAVMRCPPEKQMVEVQFASFGDPTGTCGNFTMGKCSASKSKEVVEKECLGRNYCSIVVARETFGDKGCPEIVKTLAVQVKCEKKEGKQDEKKKKEDKDEEEEDDEDDDEEEEEEDKENKDTKDMENKNQDM

SEQ ID NO: 87051 - protein, 712 aa, Arabidopsis thaliana
  peptide (1)..(712): Ceres Seq. ID no. 12696552
  misc_feature (585)..(662): Pfam Name: Galactose binding lectin domain Pfam Description: Galactose binding lectin domain
  misc_feature (18)..(670): Homolog of NCBI NO: 7484826 NR Description: beta-galactosidase homolog M4E13.70 - Arabidopsis
  misc_feature (1)..(549): Homolog of NCBI NO: 10862896 NR Description: putative beta-galactosidase [Nicotiana tabacum]
  misc_feature (1)..(662): Homolog of NCBI NO: 30699255 NR Description: glycosyl hydrolase family 35 (beta-galactosidase)
  misc_feature (1)..(645): Homolog of NCBI NO: 26451843 NR Description: unknown protein [Arabidopsis thaliana]
  misc_feature (1)..(498): Homolog of NCBI NO: 15081596 NR Description: putative beta-galactosidase BG1 [Vitis vinifera]
  misc_feature (453)..(662): Homolog of NCBI NO: 15081596 NR Description: putative beta-galactosidase BG1 [Vitis vinifera]
  misc_feature (1)..(510): Homolog of NCBI NO: 30690633 NR Description: glycosyl hydrolase family 35 (beta-galactosidase)
  misc_feature (452)..(662): Homolog of NCBI NO: 30690633 NR Description: glycosyl hydrolase family 35 (beta-galactosidase)
  misc_feature (1)..(508): Homolog of NCBI NO: 30683905 NR Description: glycosyl hydrolase family 35 (beta-galactosidase)
  misc_feature (499)..(662): Homolog of NCBI NO: 30683905 NR Description: glycosyl hydrolase family 35 (beta-galactosidase)
MKEEKLFASQGGPIILGQIENEYNAVQLAYKENGEKYIKWAANLVESMNLGIPWVMCKQNDAPGNLINACNGRHCGDTFPGPNRHDKPSLWTENWTTQFRVFGDPPTQRTVEDIAFSVARYFSKNGSHVNYYMYHGGTNFGRTSAHFVTTRYYDDAPLDEFGLEKAPKYGHLKHVHRALRLCKKALFWGQLRAQTLGPDTEVRYYEQPGTKVCAAFLSNNNTRDTNTIKFKGQDYVLPSRSISILPDCKTVVYNTAQIVAQHSWRDFVKSEKTSKGLKFEMFSENIPSLLDGDSLIPGELYYLTKDKTDYAWYTTSVKIDEDDFPDQKGLKTILRVASLGHALIVYVNGEYAGKAHGRHEMKSFEFAKPVNFKTGDNRISILGVLTGLPDSGSYMEHRFAGPRAISIIGLKSGTRDLTENNEWGHLAGLEGEKKEVYTEEGSKKVKWEKDGKRKPLTWYKTYFETPEGVNAVAIRMKAMGKGLIWVNGIGVGRYWMSFLSPLGEPTQTEYHIPRSFMKGEKKKNMLVILEEEPGVKLESIDFVLVNRDTICSNVGEDYPVSVKSWKREGPKIVSRSKDMRLKAVMRCPPEKQMVEVQFASFGDPTGTCGNFTMGKCSASKSKEVVEKECLGRNYCSIVVARETFGDKGCPEIVKTLAVQVKCEKKEGKQDEKKKKEDKDEEEEDDEDDDEEEEEEDKENKDTKDMENKNQDM

SEQ ID NO: 87052 - DNA, 1090 bp, Arabidopsis thaliana
  misc_feature (1)..(1090): Ceres Seq. ID no. 12696553
  misc_feature: MA Experiment ID: 20000182 Result: Up-regulated in Transcription
  misc_feature: MA Experiment 20000182 PARAMETER Experiment Name: At_2mM_SA_P Parameter: Age (day) Value: 14
  misc_feature: MA Experiment 20000182 PARAMETER Experiment Name: At_2mM_SA_P Parameter: Organism Value: A. thaliana
  misc_feature: MA Experiment 20000182 PARAMETER Experiment Name: At_2mM_SA_P Parameter: Plant Line Value: WS
  misc_feature: MA Experiment 20000182 PARAMETER Experiment Name: At_2mM_SA_P Parameter: Timepoint (hr) Value: 6
  misc_feature: MA Experiment 20000182 PARAMETER Experiment Name: At_2mM_SA_P Parameter: Tissue Value: Aerial
  misc_feature: MA Experiment 20000182 PARAMETER Experiment Name: At_2mM_SA_P Parameter: Treatment Value: 2mM SA vs. No Treatment
  misc_feature: MA Experiment ID: 20000227 Result: Down-regulated in Transcription
  misc_feature: MA Experiment 20000227 PARAMETER Experiment Name: At_Root-Tips-vs-Tops_P Parameter: Tissue Value: Root Tips vs. Root Tops
acttttgccgagaaaatcagagacagaagaagaagaaaagcgaaaaaaagcaaaacatgaaggcgacgacgaagactccgatccacgtggtgtggtcatgggttaggagacaacctccgaaggtgaaggcttttctcgccgtggtcactggcatggcggctttggttcttctcagattcattgttcacgatcacgacaatctcttcgttgccgctgaggctgttcattccatcgggatctgtgtgctcatctacaaactcatgaaggagaagacctgtgccggattgtcactgaaatctcaggagcttacggcgatatttttagctgttaggctgtattgtagcattgtaatggaatatgatatacataccattcttgacttggctactttgggaacaactctctgggttatatttatgattcgtttcaagttaagagctagttacatggaggacaaagacaactttcctctctattatgtgcttgcgccctgtgttgcattagctgtgttcatccatccatcgacctctcataacataataaacagaatttcatgggctttatgtgtataccttgaagctgtttcagtactacctcagctacgagtgatgcagaacacaaagattgttgaaccgttcacggctcattatgtttttgcacttggagtagcaaggttcctcagctgtgcccactgggttttacaggttgtggacacgcggggacggttgcttgtagcattgggttatggattgtggccatcaatggttctgatctcagaaattgttcaaactttcatcttggcagatttctgttactactacgtcaaaagcgttttcggaggccagcttgttctccggctaccgtctggagtagtataagttcaaaagatagaaataccccaacgatgtcctgcgatgagcttgacggaaattctaattgggaaagatagctcaatttttctttacctctgatttcatcgtttatgtgtcttgaggtttcaccaagtgtctcggttacgaattaattttacagtgttgtatattttgcctatcaagggatttaacgtctttcaggtcgataagttatcttt

SEQ ID NO: 87053 - protein, 291 aa, Arabidopsis thaliana
  peptide (1)..(291): Ceres Seq. ID no. 12696554
  misc_feature (66)..(277): Pfam Name: ER lumen protein retaining receptor Pfam Description: ER lumen protein retaining receptor
  misc_feature (19)..(291): Homolog of NCBI NO: 18420309 NR Description: expressed protein; protein id: At4g38790.1, by cDNA: 21759. [Arabidopsis thaliana] putative ER lumen protein retaining receptor [Arabidopsis
  misc_feature (24)..(291): Homolog of NCBI NO: 18399619 NR Description: putative ER lumen protein retaining receptor; id: At2g21190.1, supported by cDNA: 126278., supported by cDNA:
  misc_feature (24)..(291): Homolog of NCBI NO: 21537286 NR Description: putative ER lumen protein retaining receptor
  misc_feature (24)..(291): Homolog of NCBI NO: 13430654 NR Description: putative ER lumen protein retaining receptor
  misc_feature (19)..(291): Homolog of NCBI NO: 15222871 NR Description: ER lumen protein retaining receptor, putative; id: At1g75760.1 [Arabidopsis thaliana]
  misc_feature (19)..(291): Homolog of NCBI NO: 9369358 NR Description: F10A5.5 [Arabidopsis thaliana]
  misc_feature (19)..(291): Homolog of NCBI NO: 15223724 NR Description: ER lumen protein-retaining receptor; protein id:
  misc_feature (24)..(278): Homolog of NCBI NO: 25412019 NR Description: probable ER lumen protein retaining receptor
  misc_feature (19)..(278): Homolog of NCBI NO: 25518365 NR Description: hypothetical protein T20H2.24 - Arabidopsis >gi|8779000|gb|AAF79915.1|AC022472_24 Contains similarity to ER protein retaining receptor from Caenorhabditis elegans gi|6686285
  misc_feature (27)..(287): Homolog of NCBI NO: 15230808 NR Description: ER lumen protein retaining receptor, putative;
FCRENQRQKKKKSEKKQNMKATTKTPIHVVWSWVRRQPPKVKAFLAVVTGMAALVLLRFIVHDHDNLFVAAEAVHSIGICVLIYKLMKEKTCAGLSLKSQELTAIFLAVRLYCSIVMEYDIHTILDLATLGTTLWVIFMIRFKLRASYMEDKDNFPLYYVLAPCVALAVFIHPSTSHNIINRISWALCVYLEAVSVLPQLRVMQNTKIVEPFTAHYVFALGVARFLSCAHWVLQVVDTRGRLLVALGYGLWPSMVLISEIVQTFILADFCYYYVKSVFGGQLVLRLPSGVV

SEQ ID NO: 87054 - protein, 273 aa, Arabidopsis thaliana; identical to SEQ ID NO: 24275
  peptide (1)..(273): Ceres Seq. ID no. 12696555
  misc_feature (48)..(259): Pfam Name: ER lumen protein retaining receptor Pfam Description: ER lumen protein retaining receptor
  misc_feature (1)..(273): Homolog of NCBI NO: 18420309 NR Description: expressed protein; protein id: At4g38790.1, by cDNA: 21759. [Arabidopsis thaliana] putative ER lumen protein retaining receptor [Arabidopsis
  misc_feature (6)..(273): Homolog of NCBI NO: 18399619 NR Description: putative ER lumen protein retaining receptor; id: At2g21190.1, supported by cDNA: 126278., supported by cDNA:
  misc_feature (6)..(273): Homolog of NCBI NO: 21537286 NR Description: putative ER lumen protein retaining receptor
  misc_feature (6)..(273): Homolog of NCBI NO: 13430654 NR Description: putative ER lumen protein retaining receptor
  misc_feature (1)..(273): Homolog of NCBI NO: 15222871 NR Description: ER lumen protein retaining receptor, putative; id: At1g75760.1 [Arabidopsis thaliana]
  misc_feature (1)..(273): Homolog of NCBI NO: 9369358 NR Description: F10A5.5 [Arabidopsis thaliana]
  misc_feature (1)..(273): Homolog of NCBI NO: 15223724 NR Description: ER lumen protein-retaining receptor; protein id:
  misc_feature (6)..(260): Homolog of NCBI NO: 25412019 NR Description: probable ER lumen protein retaining receptor
  misc_feature (1)..(260): Homolog of NCBI NO: 25518365 NR Description: hypothetical protein T20H2.24 - Arabidopsis >gi|8779000|gb|AAF79915.1|AC022472_24 Contains similarity to ER protein retaining receptor from Caenorhabditis elegans gi|6686285
  misc_feature (9)..(269): Homolog of NCBI NO: 15230808 NR Description: ER lumen protein retaining receptor, putative;

SEQ ID NO: 87055 - protein, 241 aa, Arabidopsis thaliana; identical to SEQ ID NO: 24276
  peptide (1)..(241): Ceres Seq. ID no. 12696556
  misc_feature (16)..(227): Pfam Name: ER lumen protein retaining receptor Pfam Description: ER lumen protein retaining receptor
  misc_feature (1)..(241): Homolog of NCBI NO: 18420309 NR Description: expressed protein; protein id: At4g38790.1, by cDNA: 21759. [Arabidopsis thaliana] putative ER lumen protein retaining receptor [Arabidopsis
  misc_feature (1)..(241): Homolog of NCBI NO: 18399619 NR Description: putative ER lumen protein retaining receptor; id: At2g21190.1, supported by cDNA: 126278., supported by cDNA:
  misc_feature (1)..(241): Homolog of NCBI NO: 21537286 NR Description: putative ER lumen protein retaining receptor
  misc_feature (1)..(241): Homolog of NCBI NO: 13430654 NR Description: putative ER lumen protein retaining receptor
  misc_feature (1)..(241): Homolog of NCBI NO: 15222871 NR Description: ER lumen protein retaining receptor, putative; id: At1g75760.1 [Arabidopsis thaliana]
  misc_feature (1)..(241): Homolog of NCBI NO: 9369358 NR Description: F10A5.5 [Arabidopsis thaliana]
  misc_feature (1)..(241): Homolog of NCBI NO: 15223724 NR Description: ER lumen protein-retaining receptor; protein id:
  misc_feature (1)..(228): Homolog of NCBI NO: 25412019 NR Description: probable ER lumen protein retaining receptor
  misc_feature (1)..(228): Homolog of NCBI NO: 25518365 NR Description: hypothetical protein T20H2.24 - Arabidopsis >gi|8779000|gb|AAF79915.1|AC022472_24 Contains similarity to ER protein retaining receptor from Caenorhabditis elegans gi|6686285
  misc_feature (1)..(237): Homolog of NCBI NO: 15230808 NR Description: ER lumen protein retaining receptor, putative;

SEQ ID NO: 87056 - DNA, 3693 bp, Arabidopsis thaliana
  misc_feature (1)..(3693): Ceres Seq. ID no. 12696575
  misc_feature: MA Experiment ID: 20000173 Result: Down-regulated in Transcription
  misc_feature: MA Experiment 20000173 PARAMETER Experiment Name: At_42deg_Heat_P Parameter: Age (day) Value: 14
  misc_feature: MA Experiment 20000173 PARAMETER Experiment Name: At_42deg_Heat_P Parameter: Organism Value: A. thaliana
  misc_feature: MA Experiment 20000173 PARAMETER Experiment Name: At_42deg_Heat_P Parameter: Plant Line Value: WS
  misc_feature: MA Experiment 20000173 PARAMETER Experiment Name: At_42deg_Heat_P Parameter: Temperature (deg C) Value: 42 vs. 22
  misc_feature: MA Experiment 20000173 PARAMETER Experiment Name: At_42deg_Heat_P Parameter: Timepoint (hr) Value: 6
  misc_feature: MA Experiment 20000173 PARAMETER Experiment Name: At_42deg_Heat_P Parameter: Tissue Value: Aerial
  misc_feature: MA Experiment ID: 20000180 Result: Up-regulated in Transcription
  misc_feature: MA Experiment 20000180 PARAMETER Experiment Name: At_Germinating_Seeds_P Parameter: Age (hr) Value: 24 vs. 0
  misc_feature: MA Experiment 20000180 PARAMETER Experiment Name: At_Germinating_Seeds_P Parameter: Tissue Value: Germinating Seeds
  misc_feature: MA Experiment ID: 20000184 Result: Down-regulated in Transcription
  misc_feature: MA Experiment 20000184 PARAMETER Experiment Name: At_Shoots__P Parameter: Age (day) Value: 7
  misc_feature: MA Experiment 20000184 PARAMETER Experiment Name: At_Shoots__P Parameter: Tissue Value: Shoots vs. Whole Plant
  misc_feature: MA Experiment ID: 20000234 Result: Up-regulated in Transcription
  misc_feature: MA Experiment 20000234 PARAMETER Experiment Name: At_Siliques_P Parameter: Age (day) Value: 21
  misc_feature: MA Experiment 20000234 PARAMETER Experiment Name: At_Siliques_P Parameter: Organism Value: A. thaliana
  misc_feature: MA Experiment 20000234 PARAMETER Experiment Name: At_Siliques_P Parameter: Plant Line Value: WS
  misc_feature: MA Experiment 20000234 PARAMETER Experiment Name: At_Siliques_P Parameter: Tissue Value: Less Than 5mm Siliques vs. Whole Plant
  misc_feature: MA Experiment ID: 20001555 Result: Down-regulated in Transcription
  misc_feature: MA Experiment 20001555 PARAMETER Experiment Name: At_Drought_Soil_Dry_P Parameter: Age (day) Value: 24
  misc_feature: MA Experiment 20001555 PARAMETER Experiment Name: At_Drought_Soil_Dry_P Parameter: Organism Value: A. thaliana
  misc_feature: MA Experiment 20001555 PARAMETER Experiment Name: At_Drought_Soil_Dry_P Parameter: Plant Line Value: WS
  misc_feature: MA Experiment 20001555 PARAMETER Experiment Name: At_Drought_Soil_Dry_P Parameter: Post Timepoint (hr) Value: None
  misc_feature: MA Experiment 20001555 PARAMETER Experiment Name: At_Drought_Soil_Dry_P Parameter: Post-Treatment Value: None
  misc_feature: MA Experiment 20001555 PARAMETER Experiment Name: At_Drought_Soil_Dry_P Parameter: Timepoint (day) Value: 10
  misc_feature: MA Experiment 20001555 PARAMETER Experiment Name: At_Drought_Soil_Dry_P Parameter: Treatment Value: Drought vs. No Drought
aaaatctgaaatttctcagcctcctcgtttcttcacccagaggagagagaaatctgaggaattcgatcttcgcttaaagaagacgaaacaatctctctctctttctctcttcaatggtctcaccatctctgtctaccatctcctagccaaagaagaagacgagaagaagaagagagggtcacaacaatgctttattcttcttatgtctccagccatgtgagctcccactgacacattctctgcatcttcggaagttttgttttggtttgattcttctcaccgattcctgcgaccgagtttgaccctcgagtttcgaggttagtggatggcttcatcctcatcgagaactagaagcagtagacctccaagtcccgcttcttccacttcttcttctcatctcagcaaccgtctcattcctcgttctaactctacctctgcttcctcattgattacctccgccgccggaatcgcctcccgatctatgacgcctagtcgcaccttctccgactcgggccttatcggctccggcagctttggaattggatcgcctgttccctacccgtcagaggagcttctcggtgaccctatggacgatactattagctctgagcgggatagtatctccgtcaccgttcgttttcgtccgttgagtgatagagagtatcaaagaggagatgaagttgcttggtaccctgatggtgatacattggttaggcacgagtataacccactcacagcttacgcatttgataaagtttttggaccacaggcaactactattgacgtttatgatgtagctgcgagaccagtagtcaaggcagcaatggaaggtgttaacggaaccgtttttgcttacggtgttactagcagtggaaagacacatacaatgcatggtgatcaagaatctcctgggatcataccgctagcaataaaagacgtgttcagtatcatccaggatactccaggaagggagttcctgctccgtgtttcatatcttgaaatatacaatgaggtgataaatgatttactggatccaacaggccaaaacttacgtgttagagaggattcccagggcacttatgttgagggtatcaaggaagaagttgttttgtctcctggccatgcactatcattcattgcagctggggaagaacatcgtcatgttggttcaaataatttcaatttgttgagcagcagaagtcacactatatttacactgatggttgaaagtagtgctactggagatgaatatgatggagttatcttttctcaactcaatttgattgacttagctggatctgagagttcgaaaactgaaacaactggattgaggaggaaggagggttcatacatcaacaagagtcttctaactcttggaactgtgattggaaaacttagtgagggtaaggcaactcacattccatatcgtgactctaagctaactcgtcttctgcaatcttcattaagtggtcatggacatgtgtcgctcatatgtacaattactcctgcgtccagcagtagtgaggaaactcataacacattgaagtttgccagcagggcaaagagtatagaaatatatgcttcacgcaatcagattatagatgagaagtcattaattaagaaatatcaaagagaaatctcaaccctcaaactagaacttgatcagcttagaaggggtatgcttgttggtgtcagtcatgaagagttaatgagcttaaagcaacagttagaagaagggcaagtgaaaatgcaatcaagattggaggaagaagaagaagccaaagcagctctaatgagcagaatccaaaagcttaccaagctcatactagtctctaccaagaattctattcctggatattcgggtgacatacctactcatcagcgcagtctctctgcgggtaaagatgataaattcgattctctactgttggaaagtgataatctgggatctccatcttcgaccttagctcttctatcagaaggttctttaggttttaaccacaggcgatcttctagcaagttgaatgacgaaaactcgccgggtgcagaatttactcaaggtgtcatgacgccggacgaaatcgaccttctggttgaacaagttaagatgcttgctggtgagatagctttcagtacgagcacactaaagcgtttggtggatcagtccgtaaatgatccggaaaactcacaaactcagatacagaatctggaacgcgagattcacgaaaagcaaaggcaaatgagaggcttggaacagctcataattgagagtggtgaagcttccattgccaacgcatcattagttgagatgcaacagaaagttatgagtctgatgacccagtgcaatgagaagagctttgagctggagatcaaatcagctgataattgcattctccaagaacaactacaggaaaagtgtaccgagaacaaagaactacatgaaaaggtgaatcttctagagcaacgcttgaatgcagtatctagtgagaaatcctctccatcttgttccaataaagcggtatctggagagtatgcagacgaactaaaaaagaaaatacaatcgcaggaaattgagaacgaagagttgaagctagaacacgtgcaaatcgtggaagagaacagtgggttacgagtacaaaatcaaaaactagctgaagaagcttcatatgctaaggagttagcctctgcggctgctgttgagctgaaaaatcttgctagcgaagtaacaaaactctcactacaaaacacaaagctagaaaaagaattagcagctgcaagagacttggctcaaacgcgtaaccccatgaacggagttaatcgcaagtataacgatggggcaaggtcaggaagaaagggaaggatttcctcaagtaggtcaagtggagatgagtttgacgcatggaatctagacccagaagatcttaaaatggagttgcaagtaaggaaacaacgagaagtggctcttgagtctgcattggcagagaaagagtttatagaagatgaatacaggaaaaaagcagaagaggcaaagcgaagagaggaagctttagaaaacgatttggcaaacatgtgggtacttgttgccaagttgaagaaagacaatggtgcattgcctgaacccaatggcactgaccctggaagagaattagagaagagtcaaagccatgcggttctgaaagagagacaagtctcgagtgcaccgagacaacctgaagtagtagtagtagctaaaaccgaagagacaccaaaagaggaaccactcgttgctcgtctcaaggcacgaatgcaagaaatgaaagagaaagagatgaaatcgcaagcgaatggagacgcaaactctcacatttgtaaagtatgtttcgaatctcccactgcggcaattctactcccttgccgtcatttctgcttatgtaaatcctgttcccttgcttgctctgaatgcccaatttgccgcacaaagatctctgatcggctctttgcgtttccgtcttaaccagttgaaaaggtctctaagaactgtgggtgaagcctgttgctaaatattttggggagagaacaggttgggatttttaaaggaattagttttgtatgtaattttatgtccatcagtctatgcttatattttgatatttatcattaaaaatgggggaatcggaaaaatcaaacatatacgtaataccaaacttttctgtt

SEQ ID NO: 87057 - protein, 1055 aa, Arabidopsis thaliana
  peptide (1)..(1055): Ceres Seq. ID no. 12696576
  misc_feature (397)..(999): Pfam Name: Myosin tail Pfam Description: Myosin tail
  misc_feature (210)..(1053): Homolog of NCBI NO: 37536000 NR Description: kinesin-like protein [Oryza sativa (japonica
  misc_feature (167)..(211): Homolog of NCBI NO: 37536000 NR Description: kinesin-like protein [Oryza sativa (japonica
  misc_feature (32)..(528): Homolog of NCBI NO: 30687506 NR Description: kinesin-related protein [Arabidopsis thaliana]
  misc_feature (469)..(842): Homolog of NCBI NO: 30687506 NR Description: kinesin-related protein [Arabidopsis thaliana]
  misc_feature (32)..(528): Homolog of NCBI NO: 25518765 NR Description: hypothetical protein F8K7.17 - Arabidopsis >gi|5263326|gb|AAD41428.1|AC007727_17 Similar to gb|U06698 kinesin heavy chain from Homo sapiens and contains a PF|00225
  misc_feature (469)..(842): Homolog of NCBI NO: 25518765 NR Description: hypothetical protein F8K7.17 - Arabidopsis >gi|5263326|gb|AAD41428.1|AC007727_17 Similar to gb|U06698 kinesin heavy chain from Homo sapiens and contains a PF|00225
  misc_feature (579)..(1009): Homolog of NCBI NO: 21741211 NR Description: OSJNBb0086G13.6 [Oryza sativa (japonica
  misc_feature (212)..(585): Homolog of NCBI NO: 21741211 NR Description: OSJNBb0086G13.6 [Oryza sativa (japonica
  misc_feature (32)..(996): Homolog of NCBI NO: 22331006 NR Description: kinesin-related protein; protein id: At3g12020.1
  misc_feature (578)..(833): Homolog of NCBI NO: 21741211 NR Description: OSJNBb0086G13.6 [Oryza sativa (japonica
MASSSSRTRSSRPPSPASSTSSSHLSNRLIPRSNSTSASSLITSAAGIASRSMTPSRTFSDSGLIGSGSFGIGSPVPYPSEELLGDPMDDTISSERDSISVTVRFRPLSDREYQRGDEVAWYPDGDTLVRHEYNPLTAYAFDKVFGPQATTIDVYDVAARPVVKAAMEGVNGTVFAYGVTSSGKTHTMHGDQESPGIIPLAIKDVFSIIQDTPGREFLLRVSYLEIYNEVINDLLDPTGQNLRVREDSQGTYVEGIKEEVVLSPGHALSFIAAGEEHRHVGSNNFNLLSSRSHTIFTLMVESSATGDEYDGVIFSQLNLIDLAGSESSKTETTGLRRKEGSYINKSLLTLGTVIGKLSEGKATHIPYRDSKLTRLLQSSLSGHGHVSLICTITPASSSSEETHNTLKFASRAKSIEIYASRNQIIDEKSLIKKYQREISTLKLELDQLRRGMLVGVSHEELMSLKQQLEEGQVKMQSRLEEEEEAKAALMSRIQKLTKLILVSTKNSIPGYSGDIPTHQRSLSAGKDDKFDSLLLESDNLGSPSSTLALLSEGSLGFNHRRSSSKLNDENSPGAEFTQGVMTPDEIDLLVEQVKMLAGEIAFSTSTLKRLVDQSVNDPENSQTQIQNLEREIHEKQRQMRGLEQLIIESGEASIANASLVEMQQKVMSLMTQCNEKSFELEIKSADNCILQEQLQEKCTENKELHEKVNLLEQRLNAVSSEKSSPSCSNKAVSGEYADELKKKIQSQEIENEELKLEHVQIVEENSGLRVQNQKLAEEASYAKELASAAAVELKNLASEVTKLSLQNTKLEKELAAARDLAQTRNPMNGVNRKYNDGARSGRKGRISSSRSSGDEFDAWNLDPEDLKMELQVRKQREVALESALAEKEFIEDEYRKKAEEAKRREEALENDLANMWVLVAKLKKDNGALPEPNGTDPGRELEKSQSHAVLKERQVSSAPRQPEVVVVAKTEETPKEEPLVARLKARMQEMKEKEMKSQANGDANSHICKVCFESPTAAILLPCRHFCLCKSCSLACSECPICRTKISDRLFAFPS

SEQ ID NO: 87058 - protein, 1003 aa, Arabidopsis thaliana
  peptide (1)..(1003): Ceres Seq. ID no. 12696577
  misc_feature (345)..(947): Pfam Name: Myosin tail Pfam Description: Myosin tail
  misc_feature (158)..(1001): Homolog of NCBI NO: 37536000 NR Description: kinesin-like protein [Oryza sativa (japonica
  misc_feature (115)..(159): Homolog of NCBI NO: 37536000 NR Description: kinesin-like protein [Oryza sativa (japonica
  misc_feature (1)..(476): Homolog of NCBI NO: 30687506 NR Description: kinesin-related protein [Arabidopsis thaliana]
  misc_feature (417)..(790): Homolog of NCBI NO: 30687506 NR Description: kinesin-related protein [Arabidopsis thaliana]
  misc_feature (1)..(476): Homolog of NCBI NO: 25518765 NR Description: hypothetical protein F8K7.17 - Arabidopsis >gi|5263326|gb|AAD41428.1|AC007727_17 Similar to gb|U06698 kinesin heavy chain from Homo sapiens and contains a PF|00225
  misc_feature (417)..(790): Homolog of NCBI NO: 25518765 NR Description: hypothetical protein F8K7.17 - Arabidopsis >gi|5263326|gb|AAD41428.1|AC007727_17 Similar to gb|U06698 kinesin heavy chain from Homo sapiens and contains a PF|00225
  misc_feature (527)..(957): Homolog of NCBI NO: 21741211 NR Description: OSJNBb0086G13.6 [Oryza sativa (japonica
  misc_feature (160)..(533): Homolog of NCBI NO: 21741211 NR Description: OSJNBb0086G13.6 [Oryza sativa (japonica
  misc_feature (1)..(944): Homolog of NCBI NO: 22331006 NR Description: kinesin-related protein; protein id: At3g12020.1
  misc_feature (526)..(781): Homolog of NCBI NO: 21741211 NR Description: OSJNBb0086G13.6 [Oryza sativa (japonica
MTPSRTFSDSGLIGSGSFGIGSPVPYPSEELLGDPMDDTISSERDSISVTVRFRPLSDREYQRGDEVAWYPDGDTLVRHEYNPLTAYAFDKVFGPQATTIDVYDVAARPVVKAAMEGVNGTVFAYGVTSSGKTHTMHGDQESPGIIPLAIKDVFSIIQDTPGREFLLRVSYLEIYNEVINDLLDPTGQNLRVREDSQGTYVEGIKEEVVLSPGHALSFIAAGEEHRHVGSNNFNLLSSRSHTIFTLMVESSATGDEYDGVIFSQLNLIDLAGSESSKTETTGLRRKEGSYINKSLLTLGTVIGKLSEGKATHIPYRDSKLTRLLQSSLSGHGHVSLICTITPASSSSEETHNTLKFASRAKSIEIYASRNQIIDEKSLIKKYQREISTLKLELDQLRRGMLVGVSHEELMSLKQQLEEGQVKMQSRLEEEEEAKAALMSRIQKLTKLILVSTKNSIPGYSGDIPTHQRSLSAGKDDKFDSLLLESDNLGSPSSTLALLSEGSLGFNHRRSSSKLNDENSPGAEFTQGVMTPDEIDLLVEQVKMLAGEIAFSTSTLKRLVDQSVNDPENSQTQIQNLEREIHEKQRQMRGLEQLIIESGEASIANASLVEMQQKVMSLMTQCNEKSFELEIKSADNCILQEQLQEKCTENKELHEKVNLLEQRLNAVSSEKSSPSCSNKAVSGEYADELKKKIQSQEIENEELKLEHVQIVEENSGLRVQNQKLAEEASYAKELASAAAVELKNLASEVTKLSLQNTKLEKELAAARDLAQTRNPMNGVNRKYNDGARSGRKGRISSSRSSGDEFDAWNLDPEDLKMELQVRKQREVALESALAEKEFIEDEYRKKAEEAKRREEALENDLANMWVLVAKLKKDNGALPEPNGTDPGRELEKSQSHAVLKERQVSSAPRQPEVVVVAKTEETPKEEPLVARLKARMQEMKEKEMKSQANGDANSHICKVCFESPTAAILLPCRHFCLCKSCSLACSECPICRTKISDRLFAFPS

SEQ ID NO: 87059 - protein, 968 aa, Arabidopsis thaliana
  peptide (1)..(968): Ceres Seq. ID no. 12696578
  misc_feature (310)..(912): Pfam Name: Myosin tail Pfam Description: Myosin tail
  misc_feature (123)..(966): Homolog of NCBI NO: 37536000 NR Description: kinesin-like protein [Oryza sativa (japonica
  misc_feature (80)..(124): Homolog of NCBI NO: 37536000 NR Description: kinesin-like protein [Oryza sativa (japonica
  misc_feature (1)..(441): Homolog of NCBI NO: 30687506 NR Description: kinesin-related protein [Arabidopsis thaliana]
  misc_feature (382)..(755): Homolog of NCBI NO: 30687506 NR Description: kinesin-related protein [Arabidopsis thaliana]
  misc_feature (1)..(441): Homolog of NCBI NO: 25518765 NR Description: hypothetical protein F8K7.17 - Arabidopsis >gi|5263326|gb|AAD41428.1|AC007727_17 Similar to gb|U06698 kinesin heavy chain from Homo sapiens and contains a PF|00225
  misc_feature (382)..(755): Homolog of NCBI NO: 25518765 NR Description: hypothetical protein F8K7.17 - Arabidopsis >gi|5263326|gb|AAD41428.1|AC007727_17 Similar to gb|U06698 kinesin heavy chain from Homo sapiens and contains a PF|00225
  misc_feature (492)..(922): Homolog of NCBI NO: 21741211 NR Description: OSJNBb0086G13.6 [Oryza sativa (japonica
  misc_feature (125)..(498): Homolog of NCBI NO: 21741211 NR Description: OSJNBb0086G13.6 [Oryza sativa (japonica
  misc_feature (1)..(909): Homolog of NCBI NO: 22331006 NR Description: kinesin-related protein; protein id: At3g12020.1
  misc_feature (491)..(746): Homolog of NCBI NO: 21741211 NR Description: OSJNBb0086G13.6 [Oryza sativa (japonica
MDDTISSERDSISVTVRFRPLSDREYQRGDEVAWYPDGDTLVRHEYNPLTAYAFDKVFGPQATTIDVYDVAARPVVKAAMEGVNGTVFAYGVTSSGKTHTMHGDQESPGIIPLAIKDVFSIIQDTPGREFLLRVSYLEIYNEVINDLLDPTGQNLRVREDSQGTYVEGIKEEVVLSPGHALSFIAAGEEHRHVGSNNFNLLSSRSHTIFTLMVESSATGDEYDGVIFSQLNLIDLAGSESSKTETTGLRRKEGSYINKSLLTLGTVIGKLSEGKATHIPYRDSKLTRLLQSSLSGHGHVSLICTITPASSSSEETHNTLKFASRAKSIEIYASRNQIIDEKSLIKKYQREISTLKLELDQLRRGMLVGVSHEELMSLKQQLEEGQVKMQSRLEEEEEAKAALMSRIQKLTKLILVSTKNSIPGYSGDIPTHQRSLSAGKDDKFDSLLLESDNLGSPSSTLALLSEGSLGFNHRRSSSKLNDENSPGAEFTQGVMTPDEIDLLVEQVKMLAGEIAFSTSTLKRLVDQSVNDPENSQTQIQNLEREIHEKQRQMRGLEQLIIESGEASIANASLVEMQQKVMSLMTQCNEKSFELEIKSADNCILQEQLQEKCTENKELHEKVNLLEQRLNAVSSEKSSPSCSNKAVSGEYADELKKKIQSQEIENEELKLEHVQIVEENSGLRVQNQKLAEEASYAKELASAAAVELKNLASEVTKLSLQNTKLEKELAAARDLAQTRNPMNGVNRKYNDGARSGRKGRISSSRSSGDEFDAWNLDPEDLKMELQVRKQREVALESALAEKEFIEDEYRKKAEEAKRREEALENDLANMWVLVAKLKKDNGALPEPNGTDPGRELEKSQSHAVLKERQVSSAPRQPEVVVVAKTEETPKEEPLVARLKARMQEMKEKEMKSQANGDANSHICKVCFESPTAAILLPCRHFCLCKSCSLACSECPICRTKISDRLFAFPS

SEQ ID NO: 87060 - DNA, 1145 bp, Arabidopsis thaliana
  misc_feature (1)..(1145): Ceres Seq. ID no. 12696579
  misc_feature: MA Experiment ID: 108434 Result: Down-regulated in Transcription
  misc_feature: MA Experiment 108434 PARAMETER Experiment Name: At_Root_Tips_cDNA_P Parameter: Tissue Value: Root Tips
  misc_feature: MA Experiment ID: 108435 Result: Down-regulated in Transcription
  misc_feature: MA Experiment 108435 PARAMETER Experiment Name: At_stm_Mutants_cDNA_P Parameter: Plant Line Value: wt Landsburg vs stm
  misc_feature: MA Experiment 108435 PARAMETER Experiment Name: At_stm_Mutants_cDNA_P Parameter: Tissue Value: Shoot Apical Meristem Region
  misc_feature: MA Experiment ID: 108572 Result: Up-regulated in Transcription
  misc_feature: MA Experiment 108572 PARAMETER Experiment Name: At_Drought_cDNA_P Parameter: Timepoint (hr) Value: 1
  misc_feature: MA Experiment 108572 PARAMETER Experiment Name: At_Drought_cDNA_P Parameter: Tissue Value: Aerial
  misc_feature: MA Experiment 108572 PARAMETER Experiment Name: At_Drought_cDNA_P Parameter: Treatment Value: Drought vs. No Drought
  misc_feature: MA Experiment ID: 108573 Result: Up-regulated in Transcription
  misc_feature: MA Experiment 108573 PARAMETER Experiment Name: At_Drought_cDNA_P Parameter: Timepoint (hr) Value: 6
  misc_feature: MA Experiment 108573 PARAMETER Experiment Name: At_Drought_cDNA_P Parameter: Tissue Value: Aerial
  misc_feature: MA Experiment 108573 PARAMETER Experiment Name: At_Drought_cDNA_P Parameter: Treatment Value: Drought vs. No Drought
  misc_feature: MA Experiment ID: 108574 Result: Down-regulated in Transcription
  misc_feature: MA Experiment 108574 PARAMETER Experiment Name: At_Wounding__cDNA_P Parameter: Timepoint (hr) Value: 1
  misc_feature: MA Experiment 108574 PARAMETER Experiment Name: At_Wounding__cDNA_P Parameter: Tissue Value: Aerial
  misc_feature: MA Experiment 108574 PARAMETER Experiment Name: At_Wounding__cDNA_P Parameter: Treatment Value: Wounding vs. No Wounding
  misc_feature: MA Experiment ID: 108577 Result: Down-regulated in Transcription
  misc_feature: MA Experiment 108577 PARAMETER Experiment Name: At_42deg_Heat_cDNA_P Parameter: Temperature (deg C) Value: 42 vs. 22
  misc_feature: MA Experiment 108577 PARAMETER Experiment Name: At_42deg_Heat_cDNA_P Parameter: Timepoint (hr) Value: 6
  misc_feature: MA Experiment 108577 PARAMETER Experiment Name: At_42deg_Heat_cDNA_P Parameter: Tissue Value: Aerial
  misc_feature: MA Experiment ID: 108579 Result: Down-regulated in Transcription
  misc_feature: MA Experiment 108579 PARAMETER Experiment Name: At_4deg_Cold_cDNA_P Parameter: Temperature (deg C) Value: 4 vs. 22
  misc_feature: MA Experiment 108579 PARAMETER Experiment Name: At_4deg_Cold_cDNA_P Parameter: Timepoint (hr) Value: 6
  misc_feature: MA Experiment 108579 PARAMETER Experiment Name: At_4deg_Cold_cDNA_P Parameter: Tissue Value: Aerial
  misc_feature: MA Experiment ID: 108594 Result: Down-regulated in Transcription
  misc_feature: MA Experiment 108594 PARAMETER Experiment Name: At_Ler-rhl_Root_cDNA_P Parameter: Plant Line Value: null
  misc_feature: MA Experiment ID: 108605 Result: Up-regulated in Transcription
  misc_feature: MA Experiment 108605 PARAMETER Experiment Name: At_100uM_ABA_cDNA_P Parameter: Timepoint (hr) Value: 6
  misc_feature: MA Experiment 108605 PARAMETER Experiment Name: At_100uM_ABA_cDNA_P Parameter: Tissue Value: Aerial
  misc_feature: MA Experiment 108605 PARAMETER Experiment Name: At_100uM_ABA_cDNA_P Parameter: Treatment Value: 100uM ABA vs. No Treatment
  misc_feature: MA Experiment ID: 20000069 Result: Up-regulated in Transcription
  misc_feature: MA Experiment 20000069 PARAMETER Experiment Name: At_100uM_ABA_Mutants_cDNA_P Parameter: Plant Line Value: CS23
  misc_feature: MA Experiment 20000069 PARAMETER Experiment Name: At_100uM_ABA_Mutants_cDNA_P Parameter: Timepoint (hr) Value: 6
  misc_feature: MA Experiment 20000069 PARAMETER Experiment Name: At_100uM_ABA_Mutants_cDNA_P Parameter: Tissue Value: Aerial
  misc_feature: MA Experiment 20000069 PARAMETER Experiment Name: At_100uM_ABA_Mutants_cDNA_P Parameter: Treatment Value: 100uM ABA vs. No Treatment
  misc_feature: MA Experiment ID: 20000070 Result: Up-regulated in Transcription
  misc_feature: MA Experiment 20000070 PARAMETER Experiment Name: At_100uM_ABA_Mutants_cDNA_P Parameter: Plant Line Value: CS24
  misc_feature: MA Experiment 20000070 PARAMETER Experiment Name: At_100uM_ABA_Mutants_cDNA_P Parameter: Timepoint (hr) Value: 6
  misc_feature: MA Experiment 20000070 PARAMETER Experiment Name: At_100uM_ABA_Mutants_cDNA_P Parameter: Tissue Value: Aerial
  misc_feature: MA Experiment 20000070 PARAMETER Experiment Name: At_100uM_ABA_Mutants_cDNA_P Parameter: Treatment Value: 100uM ABA vs. No Treatment
  misc_feature: MA Experiment ID: 20000071 Result: Up-regulated in Transcription
  misc_feature: MA Experiment 20000071 PARAMETER Experiment Name: At_100uM_ABA_Mutants_cDNA_P Parameter: Plant Line Value: CS8104
  misc_feature: MA Experiment 20000071 PARAMETER Experiment Name: At_100uM_ABA_Mutants_cDNA_P Parameter: Timepoint (hr) Value: 6
  misc_feature: MA Experiment 20000071 PARAMETER Experiment Name: At_100uM_ABA_Mutants_cDNA_P Parameter: Tissue Value: Aerial
  misc_feature: MA Experiment 20000071 PARAMETER Experiment Name: At_100uM_ABA_Mutants_cDNA_P Parameter: Treatment Value: 100uM ABA vs. No Treatment
  misc_feature: MA Experiment ID: 20000086 Result: Up-regulated in Transcription
  misc_feature: MA Experiment 20000086 PARAMETER Experiment Name: At_100uM_ABA_Mutants_cDNA_P Parameter: Plant Line Value: CS22
  misc_feature: MA Experiment 20000086 PARAMETER Experiment Name: At_100uM_ABA_Mutants_cDNA_P Parameter: Timepoint (hr) Value: 6
  misc_feature: MA Experiment 20000086 PARAMETER Experiment Name: At_100uM_ABA_Mutants_cDNA_P Parameter: Tissue Value: Aerial
  misc_feature: MA Experiment 20000086 PARAMETER Experiment Name: At_100uM_ABA_Mutants_cDNA_P Parameter: Treatment Value: 100uM ABA vs. No Treatment
  misc_feature: MA Experiment ID: 20000087 Result: Up-regulated in Transcription
  misc_feature: MA Experiment 20000087 PARAMETER Experiment Name: At_100uM_ABA_Mutants_cDNA_P Parameter: Plant Line Value: WS
  misc_feature: MA Experiment 20000087 PARAMETER Experiment Name: At_100uM_ABA_Mutants_cDNA_P Parameter: Timepoint (hr) Value: 6
  misc_feature: MA Experiment 20000087 PARAMETER Experiment Name: At_100uM_ABA_Mutants_cDNA_P Parameter: Tissue Value: Aerial
  misc_feature: MA Experiment 20000087 PARAMETER Experiment Name: At_100uM_ABA_Mutants_cDNA_P Parameter: Treatment Value: 100uM ABA vs. No Treatment
  misc_feature: MA Experiment ID: 20000088 Result: Up-regulated in Transcription
  misc_feature: MA Experiment 20000088 PARAMETER Experiment Name: At_100uM_ABA_Mutants_cDNA_P Parameter: Plant Line Value: Landsberg
  misc_feature: MA Experiment 20000088 PARAMETER Experiment Name: At_100uM_ABA_Mutants_cDNA_P Parameter: Timepoint (hr) Value: 6
  misc_feature: MA Experiment 20000088 PARAMETER Experiment Name: At_100uM_ABA_Mutants_cDNA_P Parameter: Tissue Value: Aerial
  misc_feature: MA Experiment 20000088 PARAMETER Experiment Name: At_100uM_ABA_Mutants_cDNA_P Parameter: Treatment Value: 100uM ABA vs. No Treatment
  misc_feature: MA Experiment ID: 20000089 Result: Up-regulated in Transcription
  misc_feature: MA Experiment ID: 20000090 Result: Up-regulated in Transcription
  misc_feature: MA Experiment ID: 20000117 Result: Up-regulated in Transcription
  misc_feature: MA Experiment 20000117 PARAMETER Experiment Name: At_100uM_ABA_Mutants_cDNA_P Parameter: Plant Line Value: Columbia
  misc_feature: MA Experiment 20000117 PARAMETER Experiment Name: At_100uM_ABA_Mutants_cDNA_P Parameter: Timepoint (hr) Value: 6
  misc_feature: MA Experiment 20000117 PARAMETER Experiment Name: At_100uM_ABA_Mutants_cDNA_P Parameter: Tissue Value: Aerial
  misc_feature: MA Experiment 20000117 PARAMETER Experiment Name: At_100uM_ABA_Mutants_cDNA_P Parameter: Treatment Value: 100uM ABA vs. No Treatment
  misc_feature: MA Experiment ID: 20000224 Result: Down-regulated in Transcription
aattgcaaatcaaatggatcgtcttaagctttatttctccgttttcgttttgtctttctttatcgtctcggtttcgtcgtctgatgtcaacgacggcgatgatctcgtgatccgtcaggtggttggtggagccgagcctcaggttttgacctcagaggatcacttttctctcttcaagcggaagttcgggaaggtctacgcttccaacgaggagcatgactatagattctcggtctgagttccgtaagaagcacttgggggttagaagtggctttaagcttcctaaagatgccaacaaggctccgattctccctaccgaaaatctccctgaggattttgattggagagatcatggcgccgttactcccgtcaaaaatcagggatcttgcggctcttgctggagtttcagcgccactggagctttggaaggtgctaacttcctcgctaccggcaaactcgtcagcctcagcgaacaacagctcgtcgactgtgatcacgagtgtgatcccgaggaggcagattcctgcgactctggttgcaatggtgggctaatgaacagcgcttttgaatacaccctcaaaaccggagggctcatgaaagaagaagactatccttacaccggaaaggacggcaagacctgcaagctagacaagtccaagatcgttgcctctgtctccaacttcagtgttatctccattgatgaagaacagattgctgcaaaccttgtcaagaacggacctcttgctgtagccatcaacgctggctatatgcagacttacattggaggagtctcatgcccttacatatgcaccaggaggctcaaccacggtgtcttattggttggctatggagcggcaggttacgctccggctaggttcaaggagaagccttactggatcatcaagaactcgtggggagagacttggggtgaaaatggtttctacaaaatctgcaaaggccgtaacatttgtggtgttgacagtatggtctccactgttgcagccaccgtctcaaccaccgcccattaagcatctcgtcaataagttttaattactttggtgatttgtatgagcgagctctctttgcgctgctgactctctctatttatctctgcttcttgcttgtaaataaaatgcgttctattg

SEQ ID NO: 87061 - protein, 270 aa, Arabidopsis thaliana
  peptide (1)..(270): Ceres Seq. ID no. 12696580
  misc_feature (37)..(262): Pfam Name: Papain family cysteine protease Pfam Description: Papain family cysteine protease
  misc_feature (5)..(270): Homolog of NCBI NO: 18420375 NR Description: cysteine proteinase RD19A; protein id: supported by cDNA: 37132., supported by cDNA: gi_19310551 thaliana] >gi|1172872|sp|P43296|RD19_ARATH Cysteine proteinase
  misc_feature (5)..(270): Homolog of NCBI NO: 21593213 NR Description: cysteine proteinase RD19A [Arabidopsis thaliana]
  misc_feature (5)..(270): Homolog of NCBI NO: 18141287 NR Description: senescence-associated cysteine protease [Brassica
  misc_feature (5)..(266): Homolog of NCBI NO: 18399697 NR Description: cysteine proteinase; protein id: At2g21430.1, by cDNA: 21453. [Arabidopsis thaliana] Probable cysteine proteinase A494 precursor
  misc_feature (7)..(269): Homolog of NCBI NO: 7211741 NR Description: papain-like cysteine proteinase isoform I
  misc_feature (7)..(269): Homolog of NCBI NO: 7381219 NR Description: papain-like cysteine proteinase isoform I
  misc_feature (5)..(266): Homolog of NCBI NO: 516865 NR Description: putative thiol protease [Arabidopsis thaliana]
  misc_feature (7)..(269): Homolog of NCBI NO: 7211745 NR Description: papain-like cysteine proteinase isoform III
  misc_feature (7)..(269): Homolog of NCBI NO: 7381221 NR Description: papain-like cysteine proteinase isoform II
  misc_feature (7)..(269): Homolog of NCBI NO: 7211743 NR Description: papain-like cysteine proteinase isoform II
MTIDSRSEFRKKHLGVRSGFKLPKDANKAPILPTENLPEDFDWRDHGAVTPVKNQGSCGSCWSFSATGALEGANFLATGKLVSLSEQQLVDCDHECDPEEADSCDSGCNGGLMNSAFEYTLKTGGLMKEEDYPYTGKDGKTCKLDKSKIVASVSNFSVISIDEEQIAANLVKNGPLAVAINAGYMQTYIGGVSCPYICTRRLNHGVLLVGYGAAGYAPARFKEKPYWIIKNSWGETWGENGFYKICKGRNICGVDSMVSTVAATVSTTAH

SEQ ID NO: 87062 - protein, 158 aa, Arabidopsis thaliana; identical to SEQ ID NO: 27260
  peptide (1)..(158): Ceres Seq. ID no. 12696581
  misc_feature (1)..(150): Pfam Name: Papain family cysteine protease Pfam Description: Papain family cysteine protease
  misc_feature (1)..(158): Homolog of NCBI NO: 18420375 NR Description: cysteine proteinase RD19A; protein id: supported by cDNA: 37132., supported by cDNA: gi_19310551 thaliana] >gi|1172872|sp|P43296|RD19_ARATH Cysteine proteinase
  misc_feature (1)..(158): Homolog of NCBI NO: 21593213 NR Description: cysteine proteinase RD19A [Arabidopsis thaliana]
  misc_feature (1)..(158): Homolog of NCBI NO: 18141287 NR Description: senescence-associated cysteine protease [Brassica
  misc_feature (1)..(154): Homolog of NCBI NO: 18399697 NR Description: cysteine proteinase; protein id: At2g21430.1, by cDNA: 21453. [Arabidopsis thaliana] Probable cysteine proteinase A494 precursor
  misc_feature (1)..(157): Homolog of NCBI NO: 7211741 NR Description: papain-like cysteine proteinase isoform I
  misc_feature (1)..(157): Homolog of NCBI NO: 7381219 NR Description: papain-like cysteine proteinase isoform I
  misc_feature (1)..(154): Homolog of NCBI NO: 516865 NR Description: putative thiol protease [Arabidopsis thaliana]
  misc_feature (1)..(157): Homolog of NCBI NO: 7211745 NR Description: papain-like cysteine proteinase isoform III
  misc_feature (1)..(157): Homolog of NCBI NO: 7381221 NR Description: papain-like cysteine proteinase isoform II
  misc_feature (1)..(157): Homolog of NCBI NO: 7211743 NR Description: papain-like cysteine proteinase isoform II

SEQ ID NO: 87063 - protein, 144 aa, Arabidopsis thaliana; identical to SEQ ID NO: 27261
  peptide (1)..(144): Ceres Seq. ID no. 12696582
  misc_feature (1)..(136): Pfam Name: Papain family cysteine protease Pfam Description: Papain family cysteine protease
  misc_feature (1)..(144): Homolog of NCBI NO: 18420375 NR Description: cysteine proteinase RD19A; protein id: supported by cDNA: 37132., supported by cDNA: gi_19310551 thaliana] >gi|1172872|sp|P43296|RD19_ARATH Cysteine proteinase
  misc_feature (1)..(144): Homolog of NCBI NO: 21593213 NR Description: cysteine proteinase RD19A [Arabidopsis thaliana]
  misc_feature (1)..(144): Homolog of NCBI NO: 18141287 NR Description: senescence-associated cysteine protease [Brassica
  misc_feature (1)..(140): Homolog of NCBI NO: 18399697 NR Description: cysteine proteinase; protein id: At2g21430.1, by cDNA: 21453. [Arabidopsis thaliana] Probable cysteine proteinase A494 precursor
  misc_feature (1)..(143): Homolog of NCBI NO: 7211741 NR Description: papain-like cysteine proteinase isoform I
  misc_feature (1)..(143): Homolog of NCBI NO: 7381219 NR Description: papain-like cysteine proteinase isoform I
  misc_feature (1)..(140): Homolog of NCBI NO: 516865 NR Description: putative thiol protease [Arabidopsis thaliana]
  misc_feature (1)..(143): Homolog of NCBI NO: 7211745 NR Description: papain-like cysteine proteinase isoform III
  misc_feature (1)..(143): Homolog of NCBI NO: 7381221 NR Description: papain-like cysteine proteinase isoform II
  misc_feature (1)..(143): Homolog of NCBI NO: 7211743 NR Description: papain-like cysteine proteinase isoform II

SEQ ID NO: 87064 - DNA, 916 bp, Arabidopsis thaliana
  misc_feature (1)..(916): Ceres Seq. ID no. 12696586
  misc_feature: MA Experiment ID: 20000173 Result: Down-regulated in Transcription
  misc_feature: MA Experiment 20000173 PARAMETER Experiment Name: At_42deg_Heat_P Parameter: Age (day) Value: 14
  misc_feature: MA Experiment 20000173 PARAMETER Experiment Name: At_42deg_Heat_P Parameter: Organism Value: A. thaliana
  misc_feature: MA Experiment 20000173 PARAMETER Experiment Name: At_42deg_Heat_P Parameter: Plant Line Value: WS
  misc_feature: MA Experiment 20000173 PARAMETER Experiment Name: At_42deg_Heat_P Parameter: Temperature (deg C) Value: 42 vs. 22
  misc_feature: MA Experiment 20000173 PARAMETER Experiment Name: At_42deg_Heat_P Parameter: Timepoint (hr) Value: 6
  misc_feature: MA Experiment 20000173 PARAMETER Experiment Name: At_42deg_Heat_P Parameter: Tissue Value: Aerial
  misc_feature: MA Experiment ID: 20000213 Result: Up-regulated in Transcription
  misc_feature: MA Experiment 20000213 PARAMETER Experiment Name: At_4deg_Cold_P Parameter: Timepoint (hr) Value: 2
  misc_feature: MA Experiment ID: 20000453 Result: Down-regulated in Transcription
  misc_feature: MA Experiment 20000453 PARAMETER Experiment Name: At_100uM_ABA_P Parameter: Age (day) Value: 15
  misc_feature: MA Experiment 20000453 PARAMETER Experiment Name: At_100uM_ABA_P Parameter: Organism Value: A. thaliana
  misc_feature: MA Experiment 20000453 PARAMETER Experiment Name: At_100uM_ABA_P Parameter: Plant Line Value: WS
  misc_feature: MA Experiment 20000453 PARAMETER Experiment Name: At_100uM_ABA_P Parameter: Timepoint (hr) Value: 24
  misc_feature: MA Experiment 20000453 PARAMETER Experiment Name: At_100uM_ABA_P Parameter: Tissue Value: Aerial
  misc_feature: MA Experiment 20000453 PARAMETER Experiment Name: At_100uM_ABA_P Parameter: Treatment Value: 100uM ABA vs. No Treatment
  misc_feature: MA Experiment ID: 20001247 Result: Down-regulated in Transcription
  misc_feature: MA Experiment 20001247 PARAMETER Experiment Name: At_Far-red-induction_P Parameter: Age (day) Value: 7
  misc_feature: MA Experiment 20001247 PARAMETER Experiment Name: At_Far-red-induction_P Parameter: Light Value: Far-red vs. White
  misc_feature: MA Experiment 20001247 PARAMETER Experiment Name: At_Far-red-induction_P Parameter: Organism Value: A. thaliana
  misc_feature: MA Experiment 20001247 PARAMETER Experiment Name: At_Far-red-induction_P Parameter: Plant Line Value: Columbia
  misc_feature: MA Experiment 20001247 PARAMETER Experiment Name: At_Far-red-induction_P Parameter: Timepoint (hr) Value: 1
  misc_feature: MA Experiment 20001247 PARAMETER Experiment Name: At_Far-red-induction_P Parameter: Tissue Value: Whole Plant
  misc_feature: MA Experiment ID: 20001248 Result: Up-regulated in Transcription
  misc_feature: MA Experiment 20001248 PARAMETER Experiment Name: At_Far-red-induction_P Parameter: Age (day) Value: 7
  misc_feature: MA Experiment 20001248 PARAMETER Experiment Name: At_Far-red-induction_P Parameter: Light Value: Far-red vs. White
  misc_feature: MA Experiment 20001248 PARAMETER Experiment Name: At_Far-red-induction_P Parameter: Organism Value: A. thaliana
  misc_feature: MA Experiment 20001248 PARAMETER Experiment Name: At_Far-red-induction_P Parameter: Plant Line Value: Columbia
  misc_feature: MA Experiment 20001248 PARAMETER Experiment Name: At_Far-red-induction_P Parameter: Timepoint (hr) Value: 4
  misc_feature: MA Experiment 20001248 PARAMETER Experiment Name: At_Far-red-induction_P Parameter: Tissue Value: Whole Plant
  misc_feature: MA Experiment ID: 20001557 Result: Up-regulated in Transcription
  misc_feature: MA Experiment 20001557 PARAMETER Experiment Name: At_Drought_Soil_Dry_P Parameter: Age (day) Value: 27
  misc_feature: MA Experiment 20001557 PARAMETER Experiment Name: At_Drought_Soil_Dry_P Parameter: Organism Value: A. thaliana
  misc_feature: MA Experiment 20001557 PARAMETER Experiment Name: At_Drought_Soil_Dry_P Parameter: Plant Line Value: WS
  misc_feature: MA Experiment 20001557 PARAMETER Experiment Name: At_Drought_Soil_Dry_P Parameter: Post Timepoint (hr) Value: 3
  misc_feature: MA Experiment 20001557 PARAMETER Experiment Name: At_Drought_Soil_Dry_P Parameter: Post-Treatment Value: Re-Water vs. No Drought
  misc_feature: MA Experiment 20001557 PARAMETER Experiment Name: At_Drought_Soil_Dry_P Parameter: Timepoint (day) Value: 13
  misc_feature: MA Experiment 20001557 PARAMETER Experiment Name: At_Drought_Soil_Dry_P Parameter: Treatment Value: Drought vs. No Drought
acataagtctctctcttacattttgaaaccctaatttctcttcttttccccaaaaaaaaatgtctgaagttgagtaccggtgctttgtcggcggccttgcctgggccaccaatgatgaagatcttcaaaggacgttctcacagttcggcgacgttatcgattctaaggtctgttacacgagagatcggtctcccggatcgagccgattccgatgattctgatcctcgacggatctgattccgatctgtttctctgttacttgattcgattactgttactatgttctctctcgttctttgttactgttacttaatttgtcccatcgatcattaacgaccgcgagagtggaagatcaaggggattcggattcgtcaccttcaaggacgagaaagccatgagggatgcgattgaagagatgaacggtaaagagctcgatggacgtgtcatcaccgtgaacgaggctcagtcgagaggtagcggcggtggcggaggaggccgtggtggaagcggtggtggttaccgcagcggaggcggtggtggatactcaggaggcggtggcggcggatactcaggaggaggcggtggtggttacgagagacgtagcggaggttacggatctggtggaggcggtggtggccgaggatacggtggtggtggacgccgtgagggaggtggctacggaggcggtgatggtggaagttacggaggcggtggtggcggctggtaatcaaagatagagttgtttgcgtgctgctgctctgtttttggtttagatttggttttgtgtcaccacttctggtttggttatcgttcgtttggtttacttttttgatgaaacagtttcgtttaagtcttctttgtctggaacgaaatgttaattcgcgtgttgtttactaaatttataacgtttcctttt

SEQ ID NO: 87065 - protein, 110 aa, Arabidopsis thaliana; identical to SEQ ID NO: 22060
  peptide (1)..(110): Ceres Seq. ID no. 12696587
  misc_feature (30)..(109): Pfam Name: Herpesvirus large structural phosphoprotein UL32 Pfam Description: Herpesvirus large structural phosphoprotein UL32
  misc_feature (1)..(110): Homolog of NCBI NO: 15235002 NR Description: glycine-rich RNA-binding protein 8 (GRP8); id: At4g39260.1, supported by cDNA: gi_166838 [Arabidopsis
  misc_feature (1)..(110): Homolog of NCBI NO: 15226605 NR Description: glycine-rich RNA binding protein AtGRP7; protein At2g21660.1, supported by cDNA: 13879., supported by cDNA: supported by cDNA: gi_16226371, supported by cDNA: gi_166836
  misc_feature (1)..(110): Homolog of NCBI NO: 544416 NR Description: Glycine-rich RNA-binding protein 10
  misc_feature (1)..(110): Homolog of NCBI NO: 1346181 NR Description: Glycine-rich RNA-binding protein GRP2A
  misc_feature (1)..(110): Homolog of NCBI NO: 21553354 NR Description: glycine-rich RNA binding protein 7 [Arabidopsis
  misc_feature (1)..(110): Homolog of NCBI NO: 1346180 NR Description: Glycine-rich RNA-binding protein GRP1A
  misc_feature (1)..(65): Homolog of NCBI NO: 30692254 NR Description: glycine-rich RNA-binding protein 8 (GRP8) (CCR1)
  misc_feature (1)..(102): Homolog of NCBI NO: 544426 NR Description: Glycine-rich RNA-binding protein
  misc_feature (1)..(109): Homolog of NCBI NO: 34851124 NR Description: putative glycine-rich RNA-binding protein [Prunus
  misc_feature (1)..(110): Homolog of NCBI NO: 14334648 NR Description: putative glycine-rich protein [Arabidopsis

SEQ ID NO: 87066 - protein, 103 aa, Arabidopsis thaliana; identical to SEQ ID NO: 22061
  peptide (1)..(103): Ceres Seq. ID no. 12696588
  misc_feature (23)..(102): Pfam Name: Herpesvirus large structural phosphoprotein UL32 Pfam Description: Herpesvirus large structural phosphoprotein UL32
  misc_feature (1)..(103): Homolog of NCBI NO: 15235002 NR Description: glycine-rich RNA-binding protein 8 (GRP8); id: At4g39260.1, supported by cDNA: gi_166838 [Arabidopsis
  misc_feature (1)..(103): Homolog of NCBI NO: 15226605 NR Description: glycine-rich RNA binding protein AtGRP7; protein At2g21660.1, supported by cDNA: 13879., supported by cDNA: supported by cDNA: gi_16226371, supported by cDNA: gi_166836
  misc_feature (1)..(103): Homolog of NCBI NO: 544416 NR Description: Glycine-rich RNA-binding protein 10
  misc_feature (1)..(103): Homolog of NCBI NO: 1346181 NR Description: Glycine-rich RNA-binding protein GRP2A
  misc_feature (1)..(103): Homolog of NCBI NO: 21553354 NR Description: glycine-rich RNA binding protein 7 [Arabidopsis
  misc_feature (1)..(103): Homolog of NCBI NO: 1346180 NR Description: Glycine-rich RNA-binding protein GRP1A
  misc_feature (1)..(58): Homolog of NCBI NO: 30692254 NR Description: glycine-rich RNA-binding protein 8 (GRP8) (CCR1)
  misc_feature (1)..(95): Homolog of NCBI NO: 544426 NR Description: Glycine-rich RNA-binding protein
  misc_feature (1)..(102): Homolog of NCBI NO: 34851124 NR Description: putative glycine-rich RNA-binding protein [Prunus
  misc_feature (1)..(103): Homolog of NCBI NO: 14334648 NR Description: putative glycine-rich protein [Arabidopsis

SEQ ID NO: 87067 - DNA, 1278 bp, Arabidopsis thaliana
  misc_feature (1)..(1278): Ceres Seq. ID no. 12696613
  misc_feature: MA Experiment ID: 108434 Result: Up-regulated in Transcription
  misc_feature: MA Experiment 108434 PARAMETER Experiment Name: At_Root_Tips_cDNA_P Parameter: Tissue Value: Root Tips
  misc_feature: MA Experiment ID: 20000111 Result: Down-regulated in Transcription
  misc_feature: MA Experiment 20000111 PARAMETER Experiment Name: At_42deg_Heat_cDNA_P Parameter: Temperature (deg C) Value: 42 vs. 22
  misc_feature: MA Experiment 20000111 PARAMETER Experiment Name: At_42deg_Heat_cDNA_P Parameter: Timepoint (hr) Value: 6
  misc_feature: MA Experiment 20000111 PARAMETER Experiment Name: At_42deg_Heat_cDNA_P Parameter: Tissue Value: Aerial
  misc_feature: MA Experiment ID: 20000113 Result: Down-regulated in Transcription
  misc_feature: MA Experiment 20000113 PARAMETER Experiment Name: At_42deg_Heat_cDNA_P Parameter: Temperature (deg C) Value: 42 vs. 22
  misc_feature: MA Experiment 20000113 PARAMETER Experiment Name: At_42deg_Heat_cDNA_P Parameter: Timepoint (hr) Value: 8
  misc_feature: MA Experiment 20000113 PARAMETER Experiment Name: At_42deg_Heat_cDNA_P Parameter: Tissue Value: Aerial
  misc_feature: MA Experiment ID: 20000173 Result: Down-regulated in Transcription
  misc_feature: MA Experiment 20000173 PARAMETER Experiment Name: At_42deg_Heat_P Parameter: Age (day) Value: 14
  misc_feature: MA Experiment 20000173 PARAMETER Experiment Name: At_42deg_Heat_P Parameter: Organism Value: A. thaliana
  misc_feature: MA Experiment 20000173 PARAMETER Experiment Name: At_42deg_Heat_P Parameter: Plant Line Value: WS
  misc_feature: MA Experiment 20000173 PARAMETER Experiment Name: At_42deg_Heat_P Parameter: Temperature (deg C) Value: 42 vs. 22
  misc_feature: MA Experiment 20000173 PARAMETER Experiment Name: At_42deg_Heat_P Parameter: Timepoint (hr) Value: 6
  misc_feature: MA Experiment 20000173 PARAMETER Experiment Name: At_42deg_Heat_P Parameter: Tissue Value: Aerial
  misc_feature: MA Experiment ID: 20000184 Result: Down-regulated in Transcription
  misc_feature: MA Experiment 20000184 PARAMETER Experiment Name: At_Shoots__P Parameter: Age (day) Value: 7
  misc_feature: MA Experiment 20000184 PARAMETER Experiment Name: At_Shoots__P Parameter: Tissue Value: Shoots vs. Whole Plant
  misc_feature: MA Experiment ID: 20001451 Result: Down-regulated in Transcription
  misc_feature: MA Experiment 20001451 PARAMETER Experiment Name: At_Far-red-induction_P Parameter: Age (day) Value: 7
  misc_feature: MA Experiment 20001451 PARAMETER Experiment Name: At_Far-red-induction_P Parameter: Light Value: Far-red vs. White
  misc_feature: MA Experiment 20001451 PARAMETER Experiment Name: At_Far-red-induction_P Parameter: Organism Value: A. thaliana
  misc_feature: MA Experiment 20001451 PARAMETER Experiment Name: At_Far-red-induction_P Parameter: Plant Line Value: Columbia
  misc_feature: MA Experiment 20001451 PARAMETER Experiment Name: At_Far-red-induction_P Parameter: Timepoint (hr) Value: 24
  misc_feature: MA Experiment 20001451 PARAMETER Experiment Name: At_Far-red-induction_P Parameter: Tissue Value: Whole Plant
aaagatccctctcgcctctcggtgtccttgtatacagtacttcagttttccgatctctttcagattctgttgccaaacttcatataaacttagtgagcggaactggatttggggagaatggcttcttctttagctcaatctagaatctcgaatctccagaatcatctttcacctcttgaagcaaacaacaagctcaggagtctggtcaagatttctccccaagtatctgaagccttgtctaatggacgtgctgttgtcgctcttgagtcaaccattatctcccatgggatgccttaccctcaaaatctgcaaacagcaaaagaggtggagtcaattgtgagagaaaatggagcaatccctgcaacaattgctatccttaatggagtaccttgcataggtctgagcgaggaagaactagaacgtcttgcatctctcggaaaaagtgtccaaaagacagcgggaagggacatagcaaatgttgtggctacaagaggaaacggtgcaactacagtctctgcaacgttgtttttcgcttcaatggttggcatccaagtttttgtgacgggcgggataggtggtgtccatagacatgccaaccattcgatggacatatcatctgatcttactgcacttgggaggactccaatagcagtgatatcagcaggcgttaaatcaatacttgatattccaaagactcttgaatatttggaaactcaagaagtgtatgttgctgcatacaagagcgatgagtttccagcatttttcacagaaaaaagtggctgtaaggcaccttcccgtgtaaatagccctgaagactgtgctagagtaatagatgcaaacatgaagctaaaccgtcaggcggggattctatttgccattccaattccgaaacaccattcagccgctggaaatcttatcgaatcagcaacacagcgtgctcttacagaagcaagggaacaaaacgttactggaaatgcagaaactccattcttacttgcacgggtaaatgagttaaccggaggcacatcacttgcagcaaacattgcgcttgtgaaaaacaatgcccttatcggttctcagattgcagtagccctttctcagctgatgtgagcttccttatcaatcccagactcaagctcaagcgcaagttattcaggttcatgattcaggacagatcaaagatgttttggattggtagttatcaatttatattggttatcaaagatttttctttagctaaagaaactcgttaacttattatcacatgttatatattag

SEQ ID NO: 87068 - protein, 330 aa, Arabidopsis thaliana; identical to SEQ ID NO: 40372
  peptide (1)..(330): Ceres Seq. ID no. 12696614
  misc_feature (34)..(326): Pfam Name: Indigoidine synthase A like protein Pfam Description: Indigoidine synthase A like protein
  misc_feature (1)..(330): Homolog of NCBI NO: 30694792 NR Description: expressed protein [Arabidopsis thaliana] unknown protein [Arabidopsis thaliana]
  misc_feature (1)..(259): Homolog of NCBI NO: 25351902 NR Description: unknown protein [imported] - Arabidopsis thaliana
  misc_feature (239)..(330): Homolog of NCBI NO: 25351902 NR Description: unknown protein [imported] - Arabidopsis thaliana
  misc_feature (25)..(330): Homolog of NCBI NO: 9454556 NR Description: Unknown protein [Arabidopsis thaliana]
  misc_feature (26)..(330): Homolog of NCBI NO: 21282018 NR Description: conserved hypothetical protein [Staphylococcus subsp. aureus MW2] >gi|21203454|dbj|BAB94154.1| conserved
  misc_feature (26)..(330): Homolog of NCBI NO: 15923302 NR Description: conserved hypothetical protein [Staphylococcus subsp. aureus Mu50] >gi|15926014|ref|NP_373547.1| conserved protein [Staphylococcus aureus subsp. aureus N315]
  misc_feature (26)..(329): Homolog of NCBI NO: 20806844 NR Description: uncharacterized enzyme involved in pigment [Thermoanaerobacter tengcongensis] >gi|20515312|gb|AAM23619.1| enzyme involved in pigment biosynthesis [Thermoanaerobacter
  misc_feature (22)..(329): Homolog of NCBI NO: 15807302 NR Description: conserved hypothetical protein [Deinococcus
  misc_feature (26)..(329): Homolog of NCBI NO: 16801496 NR Description: similar to Erwinia chrysanthemi IndA protein innocua] >gi|25351907|pir||AE1736 Erwinia chrysanthemi IndA
  misc_feature (26)..(329): Homolog of NCBI NO: 16804378 NR Description: similar to Erwinia chrysanthemi IndA protein

SEQ ID NO: 87069 - protein, 273 aa, Arabidopsis thaliana; identical to SEQ ID NO: 40373
  peptide (1)..(273): Ceres Seq. ID no. 12696615
  misc_feature (1)..(269): Pfam Name: Indigoidine synthase A like protein Pfam Description: Indigoidine synthase A like protein
  misc_feature (1)..(273): Homolog of NCBI NO: 30694792 NR Description: expressed protein [Arabidopsis thaliana] unknown protein [Arabidopsis thaliana]
  misc_feature (1)..(202): Homolog of NCBI NO: 25351902 NR Description: unknown protein [imported] - Arabidopsis thaliana
  misc_feature (182)..(273): Homolog of NCBI NO: 25351902 NR Description: unknown protein [imported] - Arabidopsis thaliana
  misc_feature (1)..(273): Homolog of NCBI NO: 9454556 NR Description: Unknown protein [Arabidopsis thaliana]
  misc_feature (1)..(273): Homolog of NCBI NO: 21282018 NR Description: conserved hypothetical protein [Staphylococcus subsp. aureus MW2] >gi|21203454|dbj|BAB94154.1| conserved
  misc_feature (1)..(273): Homolog of NCBI NO: 15923302 NR Description: conserved hypothetical protein [Staphylococcus subsp. aureus Mu50] >gi|15926014|ref|NP_373547.1| conserved protein [Staphylococcus aureus subsp. aureus N315]
  misc_feature (1)..(272): Homolog of NCBI NO: 20806844 NR Description: uncharacterized enzyme involved in pigment [Thermoanaerobacter tengcongensis] >gi|20515312|gb|AAM23619.1| enzyme involved in pigment biosynthesis [Thermoanaerobacter
  misc_feature (1)..(272): Homolog of NCBI NO: 15807302 NR Description: conserved hypothetical protein [Deinococcus
  misc_feature (1)..(272): Homolog of NCBI NO: 16801496 NR Description: similar to Erwinia chrysanthemi IndA protein innocua] >gi|25351907|pir||AE1736 Erwinia chrysanthemi IndA
  misc_feature (1)..(272): Homolog of NCBI NO: 16804378 NR Description: similar to Erwinia chrysanthemi IndA protein

SEQ ID NO: 87070 - protein, 190 aa, Arabidopsis thaliana; identical to SEQ ID NO: 40374
  peptide (1)..(190): Ceres Seq. ID no. 12696616
  misc_feature (1)..(186): Pfam Name: Indigoidine synthase A like protein Pfam Description: Indigoidine synthase A like protein
  misc_feature (1)..(190): Homolog of NCBI NO: 30694792 NR Description: expressed protein [Arabidopsis thaliana] unknown protein [Arabidopsis thaliana]
  misc_feature (1)..(119): Homolog of NCBI NO: 25351902 NR Description: unknown protein [imported] - Arabidopsis thaliana
  misc_feature (99)..(190): Homolog of NCBI NO: 25351902 NR Description: unknown protein [imported] - Arabidopsis thaliana
  misc_feature (1)..(190): Homolog of NCBI NO: 9454556 NR Description: Unknown protein [Arabidopsis thaliana]
  misc_feature (1)..(190): Homolog of NCBI NO: 21282018 NR Description: conserved hypothetical protein [Staphylococcus subsp. aureus MW2] >gi|21203454|dbj|BAB94154.1| conserved
  misc_feature (1)..(190): Homolog of NCBI NO: 15923302 NR Description: conserved hypothetical protein [Staphylococcus subsp. aureus Mu50] >gi|15926014|ref|NP_373547.1| conserved protein [Staphylococcus aureus subsp. aureus N315]
  misc_feature (1)..(189): Homolog of NCBI NO: 20806844 NR Description: uncharacterized enzyme involved in pigment [Thermoanaerobacter tengcongensis] >gi|20515312|gb|AAM23619.1| enzyme involved in pigment biosynthesis [Thermoanaerobacter
  misc_feature (1)..(189): Homolog of NCBI NO: 15807302 NR Description: conserved hypothetical protein [Deinococcus
  misc_feature (1)..(189): Homolog of NCBI NO: 16801496 NR Description: similar to Erwinia chrysanthemi IndA protein innocua] >gi|25351907|pir||AE1736 Erwinia chrysanthemi IndA
  misc_feature (1)..(189): Homolog of NCBI NO: 16804378 NR Description: similar to Erwinia chrysanthemi IndA protein

SEQ ID NO: 87071 - DNA, 1524 bp, Arabidopsis thaliana
  misc_feature (1)..(1524): Ceres Seq. ID no. 12696692
  misc_feature: MA Experiment ID: 20000171 Result: Up-regulated in Transcription
  misc_feature: MA Experiment 20000171 PARAMETER Experiment Name: At_42deg_Heat_P Parameter: Age (day) Value: 14
  misc_feature: MA Experiment 20000171 PARAMETER Experiment Name: At_42deg_Heat_P Parameter: Organism Value: A. thaliana
  misc_feature: MA Experiment 20000171 PARAMETER Experiment Name: At_42deg_Heat_P Parameter: Plant Line Value: WS
  misc_feature: MA Experiment 20000171 PARAMETER Experiment Name: At_42deg_Heat_P Parameter: Temperature (deg C) Value: 42 vs. 22
  misc_feature: MA Experiment 20000171 PARAMETER Experiment Name: At_42deg_Heat_P Parameter: Timepoint (hr) Value: 1
  misc_feature: MA Experiment 20000171 PARAMETER Experiment Name: At_42deg_Heat_P Parameter: Tissue Value: Aerial
  misc_feature: MA Experiment ID: 20000173 Result: Up-regulated in Transcription
  misc_feature: MA Experiment 20000173 PARAMETER Experiment Name: At_42deg_Heat_P Parameter: Age (day) Value: 14
  misc_feature: MA Experiment 20000173 PARAMETER Experiment Name: At_42deg_Heat_P Parameter: Organism Value: A. thaliana
  misc_feature: MA Experiment 20000173 PARAMETER Experiment Name: At_42deg_Heat_P Parameter: Plant Line Value: WS
  misc_feature: MA Experiment 20000173 PARAMETER Experiment Name: At_42deg_Heat_P Parameter: Temperature (deg C) Value: 42 vs. 22
  misc_feature: MA Experiment 20000173 PARAMETER Experiment Name: At_42deg_Heat_P Parameter: Timepoint (hr) Value: 6
  misc_feature: MA Experiment 20000173 PARAMETER Experiment Name: At_42deg_Heat_P Parameter: Tissue Value: Aerial
  misc_feature: MA Experiment ID: 20001910 Result: Up-regulated in Transcription
  misc_feature: MA Experiment 20001910 PARAMETER Experiment Name: At_Drought_Reproduction_P Parameter: Age (day) Value: 37
  misc_feature: MA Experiment 20001910 PARAMETER Experiment Name: At_Drought_Reproduction_P Parameter: Organism Value: A. thaliana
  misc_feature: MA Experiment 20001910 PARAMETER Experiment Name: At_Drought_Reproduction_P Parameter: Plant Line Value: WS
  misc_feature: MA Experiment 20001910 PARAMETER Experiment Name: At_Drought_Reproduction_P Parameter: Timepoint (day) Value: 7
  misc_feature: MA Experiment 20001910 PARAMETER Experiment Name: At_Drought_Reproduction_P Parameter: Tissue Value: Flowers
  misc_feature: MA Experiment 20001910 PARAMETER Experiment Name: At_Drought_Reproduction_P Parameter: Treatment Value: Drought vs. No Drought
atgggttgttgtcaatcgtcattcttgaaaccgtcgtcattgcatgacaagaaaatcacctccgacgatttatccggccgccgtggaaaaggagccaaacgtggtaatcgccaccgtcatgctaacattaatgaaggcaggggatggcatttttccgacgtgccagacttctccgagttctcggcatcggttcttcgtgacgctacaaataatttcaacaaaaacgctgtcgtatcagtttgttctgatcaagaaccaaaccttgtttaccaaggctgcattaggagcgacaaagataaacgtcttattgccgttaaaaaattctccaaaacaacatggcctgatcctaaacaattcgctacagaagctcgggctatcggcagtttgaggcatgtaagactagtgaatttgataggttattgttgtgaaggagatgaaaggttgcttgtatcggagtacatgcctaatgaaagcctaaccaaacatctatttcattgggagaaacaaaccatggaatgggctatgcgattgagagttgcactttatgtagctgaagctttagaatattgtaggcagagtggactcaaattgtaccatgatctcaatacttgtcgggttctctttgatgagaatggaagtcctcggctttcatgttttggatggatgaaaaatagcaaagatggcaagaacttcagcacaaatcttgcttatacaccgcccgaatatcttagaagtggtacgttaattccagagagtgttgtcttcagctttgggacgtttcttttggatcttcttagtgggaaacacattcctccaagtcatgcggttggtacaattcaaaagcaaaacttaaatgtcttgatggattcacatttagaaggaaactatcctgaggaagacgcagccatggtgtttgatttggcttccaaatgccttcacaataaccctaatgaacggccagaaattggagatatcatctcagttatcactacacttcaacaaaaactagatgttccgtcctatactatgcttggaatttcaaaacttgaaaagcttgaaatggaacacccgaaatctttaatttacgatgcatgtcaccaaatggaccttgcagctcttcatcaaattcttgaagcaatggagtacaaagaagatgaagttacttgtgagctctctttccagcaatgggctcaacagataaaagatgtgtgcaacactagacaacaaggcgattcggcttttcggaacaaacatttcgaatctgctattgataaatatactcagttcatagaaataggaatcatgatctctcccactgtttatgcacgaagaagcatgtgctatctcttctgcgaccaaccagatgcagcacttcgagacgcgatgcaagcacaatgtgtctattcggactggccaactgcattttaccttcaggccgtggctctttccaaactgaatatggtcgaagattcagctaccatgctaaaagaagccttgatcttggaagataagagaggctcataa

SEQ ID NO: 87072 - protein, 507 aa, Arabidopsis thaliana
  peptide (1)..(507): Ceres Seq. ID no. 12696693
  misc_feature (1)..(402): Homolog of NCBI NO: 15223700 NR Description: protein kinase, putative; protein id: At1g50990.1
  misc_feature (419)..(507): Homolog of NCBI NO: 15223700 NR Description: protein kinase, putative; protein id: At1g50990.1
  misc_feature (1)..(505): Homolog of NCBI NO: 18418600 NR Description: putative protein; protein id: At4g35230.1, by cDNA: gi_16612248 [Arabidopsis thaliana] AT4g35230/F23E12_210 [Arabidopsis thaliana]
  misc_feature (1)..(505): Homolog of NCBI NO: 7486022 NR Description: hypothetical protein F23E12.210 - Arabidopsis >gi|3080427|emb|CAA18746.1| putative protein [Arabidopsis >gi|7270475|emb|CAB80240.1| putative protein [Arabidopsis
  misc_feature (55)..(505): Homolog of NCBI NO: 37536550 NR Description: protein kinase-like protein [Oryza sativa
  misc_feature (53)..(505): Homolog of NCBI NO: 22327962 NR Description: protein kinase - like; protein id: At5g59010.1, by cDNA: gi_19715585 [Arabidopsis thaliana]
  misc_feature (44)..(507): Homolog of NCBI NO: 15232406 NR Description: protein kinase -like protein; protein id: supported by cDNA: 150889., supported by cDNA: gi_15450845
  misc_feature (45)..(505): Homolog of NCBI NO: 15237604 NR Description: protein kinase-like; protein id: At5g41260.1
  misc_feature (44)..(507): Homolog of NCBI NO: 21553556 NR Description: protein kinase-like protein [Arabidopsis thaliana]
  misc_feature (54)..(505): Homolog of NCBI NO: 37537032 NR Description: putative protein kinase [Oryza sativa (japonica group)] >gi|19225015|gb|AAL86491.1| putative protein kinase
MGCCQSSFLKPSSLHDKKITSDDLSGRRGKGAKRGNRHRHANINEGRGWHFSDVPDFSEFSASVLRDATNNFNKNAVVSVCSDQEPNLVYQGCIRSDKDKRLIAVKKFSKTTWPDPKQFATEARAIGSLRHVRLVNLIGYCCEGDERLLVSEYMPNESLTKHLFHWEKQTMEWAMRLRVALYVAEALEYCRQSGLKLYHDLNTCRVLFDENGSPRLSCFGWMKNSKDGKNFSTNLAYTPPEYLRSGTLIPESVVFSFGTFLLDLLSGKHIPPSHAVGTIQKQNLNVLMDSHLEGNYPEEDAAMVFDLASKCLHNNPNERPEIGDIISVITTLQQKLDVPSYTMLGISKLEKLEMEHPKSLIYDACHQMDLAALHQILEAMEYKEDEVTCELSFQQWAQQIKDVCNTRQQGDSAFRNKHFESAIDKYTQFIEIGIMISPTVYARRSMCYLFCDQPDAALRDAMQAQCVYSDWPTAFYLQAVALSKLNMVEDSATMLKEALILEDKRGS

SEQ ID NO: 87073 - protein, 354 aa, Arabidopsis thaliana
  peptide (1)..(354): Ceres Seq. ID no. 12696694
  misc_feature (1)..(249): Homolog of NCBI NO: 15223700 NR Description: protein kinase, putative; protein id: At1g50990.1
  misc_feature (266)..(354): Homolog of NCBI NO: 15223700 NR Description: protein kinase, putative; protein id: At1g50990.1
  misc_feature (1)..(352): Homolog of NCBI NO: 18418600 NR Description: putative protein; protein id: At4g35230.1, by cDNA: gi_16612248 [Arabidopsis thaliana] AT4g35230/F23E12_210 [Arabidopsis thaliana]
  misc_feature (1)..(352): Homolog of NCBI NO: 7486022 NR Description: hypothetical protein F23E12.210 - Arabidopsis >gi|3080427|emb|CAA18746.1| putative protein [Arabidopsis >gi|7270475|emb|CAB80240.1| putative protein [Arabidopsis
  misc_feature (1)..(352): Homolog of NCBI NO: 37536550 NR Description: protein kinase-like protein [Oryza sativa
  misc_feature (1)..(352): Homolog of NCBI NO: 22327962 NR Description: protein kinase - like; protein id: At5g59010.1, by cDNA: gi_19715585 [Arabidopsis thaliana]
  misc_feature (1)..(354): Homolog of NCBI NO: 15232406 NR Description: protein kinase -like protein; protein id: supported by cDNA: 150889., supported by cDNA: gi_15450845
  misc_feature (1)..(352): Homolog of NCBI NO: 15237604 NR Description: protein kinase-like; protein id: At5g41260.1
  misc_feature (1)..(354): Homolog of NCBI NO: 21553556 NR Description: protein kinase-like protein [Arabidopsis thaliana]
  misc_feature (1)..(352): Homolog of NCBI NO: 37537032 NR Description: putative protein kinase [Oryza sativa (japonica group)] >gi|19225015|gb|AAL86491.1| putative protein kinase
MPNESLTKHLFHWEKQTMEWAMRLRVALYVAEALEYCRQSGLKLYHDLNTCRVLFDENGSPRLSCFGWMKNSKDGKNFSTNLAYTPPEYLRSGTLIPESVVFSFGTFLLDLLSGKHIPPSHAVGTIQKQNLNVLMDSHLEGNYPEEDAAMVFDLASKCLHNNPNERPEIGDIISVITTLQQKLDVPSYTMLGISKLEKLEMEHPKSLIYDACHQMDLAALHQILEAMEYKEDEVTCELSFQQWAQQIKDVCNTRQQGDSAFRNKHFESAIDKYTQFIEIGIMISPTVYARRSMCYLFCDQPDAALRDAMQAQCVYSDWPTAFYLQAVALSKLNMVEDSATMLKEALILEDKRGS

SEQ ID NO: 87074 - protein, 337 aa, Arabidopsis thaliana
  peptide (1)..(337): Ceres Seq. ID no. 12696695
  misc_feature (1)..(232): Homolog of NCBI NO: 15223700 NR Description: protein kinase, putative; protein id: At1g50990.1
  misc_feature (249)..(337): Homolog of NCBI NO: 15223700 NR Description: protein kinase, putative; protein id: At1g50990.1
  misc_feature (1)..(335): Homolog of NCBI NO: 18418600 NR Description: putative protein; protein id: At4g35230.1, by cDNA: gi_16612248 [Arabidopsis thaliana] AT4g35230/F23E12_210 [Arabidopsis thaliana]
  misc_feature (1)..(335): Homolog of NCBI NO: 7486022 NR Description: hypothetical protein F23E12.210 - Arabidopsis >gi|3080427|emb|CAA18746.1| putative protein [Arabidopsis >gi|7270475|emb|CAB80240.1| putative protein [Arabidopsis
  misc_feature (1)..(335): Homolog of NCBI NO: 37536550 NR Description: protein kinase-like protein [Oryza sativa
  misc_feature (1)..(335): Homolog of NCBI NO: 22327962 NR Description: protein kinase - like; protein id: At5g59010.1, by cDNA: gi_19715585 [Arabidopsis thaliana]
  misc_feature (1)..(337): Homolog of NCBI NO: 15232406 NR Description: protein kinase -like protein; protein id: supported by cDNA: 150889., supported by cDNA: gi_15450845
  misc_feature (1)..(335): Homolog of NCBI NO: 15237604 NR Description: protein kinase-like; protein id: At5g41260.1
  misc_feature (1)..(337): Homolog of NCBI NO: 21553556 NR Description: protein kinase-like protein [Arabidopsis thaliana]
  misc_feature (1)..(335): Homolog of NCBI NO: 37537032 NR Description: putative protein kinase [Oryza sativa (japonica group)] >gi|19225015|gb|AAL86491.1| putative protein kinase
MEWAMRLRVALYVAEALEYCRQSGLKLYHDLNTCRVLFDENGSPRLSCFGWMKNSKDGKNFSTNLAYTPPEYLRSGTLIPESVVFSFGTFLLDLLSGKHIPPSHAVGTIQKQNLNVLMDSHLEGNYPEEDAAMVFDLASKCLHNNPNERPEIGDIISVITTLQQKLDVPSYTMLGISKLEKLEMEHPKSLIYDACHQMDLAALHQILEAMEYKEDEVTCELSFQQWAQQIKDVCNTRQQGDSAFRNKHFESAIDKYTQFIEIGIMISPTVYARRSMCYLFCDQPDAALRDAMQAQCVYSDWPTAFYLQAVALSKLNMVEDSATMLKEALILEDKRGS

SEQ ID NO: 87075 - DNA, 558 bp, Arabidopsis thaliana
  misc_feature (1)..(558): Ceres Seq. ID no. 12697144
  misc_feature: MA Experiment ID: 20000184 Result: Up-regulated in Transcription
  misc_feature: MA Experiment 20000184 PARAMETER Experiment Name: At_Shoots__P Parameter: Age (day) Value: 7
  misc_feature: MA Experiment 20000184 PARAMETER Experiment Name: At_Shoots__P Parameter: Tissue Value: Shoots vs. Whole Plant
  misc_feature: MA Experiment ID: 20000185 Result: Down-regulated in Transcription
  misc_feature: MA Experiment 20000185 PARAMETER Experiment Name: At_Roots__P Parameter: Age (day) Value: 7 vs. 21
  misc_feature: MA Experiment 20000185 PARAMETER Experiment Name: At_Roots__P Parameter: Organism Value: A. thaliana
  misc_feature: MA Experiment 20000185 PARAMETER Experiment Name: At_Roots__P Parameter: Tissue Value: Roots vs. Whole Plant
  misc_feature: MA Experiment ID: 20000437 Result: Down-regulated in Transcription
  misc_feature: MA Experiment 20000437 PARAMETER Experiment Name: At_Drought_P Parameter: Age (day) Value: 8
  misc_feature: MA Experiment 20000437 PARAMETER Experiment Name: At_Drought_P Parameter: Organism Value: A. thaliana
  misc_feature: MA Experiment 20000437 PARAMETER Experiment Name: At_Drought_P Parameter: Plant Line Value: WS
  misc_feature: MA Experiment 20000437 PARAMETER Experiment Name: At_Drought_P Parameter: Timepoint (hr) Value: 24
  misc_feature: MA Experiment 20000437 PARAMETER Experiment Name: At_Drought_P Parameter: Tissue Value: Whole Plant
  misc_feature: MA Experiment 20000437 PARAMETER Experiment Name: At_Drought_P Parameter: Treatment Value: Drought vs. No Drought
  misc_feature: MA Experiment ID: 20000438 Result: Up-regulated in Transcription
  misc_feature: MA Experiment 20000438 PARAMETER Experiment Name: At_Shoots__P Parameter: Age (day) Value: 14
  misc_feature: MA Experiment 20000438 PARAMETER Experiment Name: At_Shoots__P Parameter: Tissue Value: Shoots vs. Whole Plant
  misc_feature: MA Experiment ID: 20000439 Result: Down-regulated in Transcription
  misc_feature: MA Experiment 20000439 PARAMETER Experiment Name: At_Roots__P Parameter: Age (day) Value: 14 vs. 21
  misc_feature: MA Experiment 20000439 PARAMETER Experiment Name: At_Roots__P Parameter: Organism Value: A. thaliana
  misc_feature: MA Experiment 20000439 PARAMETER Experiment Name: At_Roots__P Parameter: Tissue Value: Roots vs. Whole Plant
  misc_feature: MA Experiment ID: 20001451 Result: Up-regulated in Transcription
  misc_feature: MA Experiment 20001451 PARAMETER Experiment Name: At_Far-red-induction_P Parameter: Age (day) Value: 7
  misc_feature: MA Experiment 20001451 PARAMETER Experiment Name: At_Far-red-induction_P Parameter: Light Value: Far-red vs. White
  misc_feature: MA Experiment 20001451 PARAMETER Experiment Name: At_Far-red-induction_P Parameter: Organism Value: A. thaliana
  misc_feature: MA Experiment 20001451 PARAMETER Experiment Name: At_Far-red-induction_P Parameter: Plant Line Value: Columbia
  misc_feature: MA Experiment 20001451 PARAMETER Experiment Name: At_Far-red-induction_P Parameter: Timepoint (hr) Value: 24
  misc_feature: MA Experiment 20001451 PARAMETER Experiment Name: At_Far-red-induction_P Parameter: Tissue Value: Whole Plant
  misc_feature: MA Experiment ID: 20001557 Result: Down-regulated in Transcription
  misc_feature: MA Experiment 20001557 PARAMETER Experiment Name: At_Drought_Soil_Dry_P Parameter: Age (day) Value: 27
  misc_feature: MA Experiment 20001557 PARAMETER Experiment Name: At_Drought_Soil_Dry_P Parameter: Organism Value: A. thaliana
  misc_feature: MA Experiment 20001557 PARAMETER Experiment Name: At_Drought_Soil_Dry_P Parameter: Plant Line Value: WS
  misc_feature: MA Experiment 20001557 PARAMETER Experiment Name: At_Drought_Soil_Dry_P Parameter: Post Timepoint (hr) Value: 3
  misc_feature: MA Experiment 20001557 PARAMETER Experiment Name: At_Drought_Soil_Dry_P Parameter: Post-Treatment Value: Re-Water vs. No Drought
  misc_feature: MA Experiment 20001557 PARAMETER Experiment Name: At_Drought_Soil_Dry_P Parameter: Timepoint (day) Value: 13
  misc_feature: MA Experiment 20001557 PARAMETER Experiment Name: At_Drought_Soil_Dry_P Parameter: Treatment Value: Drought vs. No Drought
atgactagccttacctacacactcgatgaaatcgaaggccctttcgaagttgattacgcagcagtgacagtacacaacttcctggtggggagcgtgtaccgttcttgttcacgatcaagcagctcgtggcatcgcagaggatactttggtcccaagtcgatcccttcagcattcacccaaggccacgttggaaataaatctgatcgtaaaacacaacatctgcagattattatcaataaaaattcagaaatcaataaaattcactctgaaaacgcagaaaatctaagcccatctgctcaaatccgaggagtattacaaggtacctctatagaatatcaaggctatgacaatgcggttgcattacctgctagaggaaacaatgaggagctagctaaggagaacaacaagatcacacttagtgtaacaaagagtaatcccgagagcggtgaagtgattggtgctttcgagagtattcaaccttcagacactgatttgggtgctacgactcctaaggatgtcaagattcaaggaatctggtattgccaacttgatgaataa

SEQ ID NO: 87076 - protein, 185 aa, Arabidopsis thaliana
  peptide (1)..(185): Ceres Seq. ID no. 12697145
  misc_feature (114)..(184): Pfam Name: Manganese-stabilising protein / photosystem II Pfam Description: Manganese-stabilising protein / photosystem II
  misc_feature (114)..(184): Homolog of NCBI NO: 100454 NR Description: photosystem II oxygen-evolving complex protein 1
  misc_feature (114)..(184): Homolog of NCBI NO: 131385 NR Description: OXYGEN-EVOLVING ENHANCER PROTEIN 1, CHLOROPLAST (OEE1) (33 KDA SUBUNIT OF OXYGEN EVOLVING SYSTEM OF PHOTOSYSTEM
  misc_feature (1)..(17): Homolog of NCBI NO: 100454 NR Description: photosystem II oxygen-evolving complex protein 1
  misc_feature (1)..(17): Homolog of NCBI NO: 131385 NR Description: OXYGEN-EVOLVING ENHANCER PROTEIN 1, CHLOROPLAST (OEE1) (33 KDA SUBUNIT OF OXYGEN EVOLVING SYSTEM OF PHOTOSYSTEM
  misc_feature (114)..(184): Homolog of NCBI NO: 131384 NR Description: Oxygen-evolving enhancer protein 1, chloroplast (OEE1) (33 kDa subunit of oxygen evolving system of photosystem (OEC 33 kDa subunit) (33 kDa thylakoid membrane protein)
  misc_feature (1)..(17): Homolog of NCBI NO: 131384 NR Description: Oxygen-evolving enhancer protein 1, chloroplast (OEE1) (33 kDa subunit of oxygen evolving system of photosystem (OEC 33 kDa subunit) (33 kDa thylakoid membrane protein)
  misc_feature (114)..(184): Homolog of NCBI NO: 11134054 NR Description: Oxygen-evolving enhancer protein 1, chloroplast (OEE1) (33 kDa subunit of oxygen evolving system of photosystem
  misc_feature (114)..(184): Homolog of NCBI NO: 12644171 NR Description: Oxygen-evolving enhancer protein 1, chloroplast (OEE1) (33 kDa subunit of oxygen evolving system of photosystem
  misc_feature (1)..(17): Homolog of NCBI NO: 11134054 NR Description: Oxygen-evolving enhancer protein 1, chloroplast (OEE1) (33 kDa subunit of oxygen evolving system of photosystem
  misc_feature (1)..(17): Homolog of NCBI NO: 12644171 NR Description: Oxygen-evolving enhancer protein 1, chloroplast (OEE1) (33 kDa subunit of oxygen evolving system of photosystem
MTSLTYTLDEIEGPFEVDYAAVTVHNFLVGSVYRSCSRSSSSWHRRGYFGPKSIPSAFTQGHVGNKSDRKTQHLQIIINKNSEINKIHSENAENLSPSAQIRGVLQGTSIEYQGYDNAVALPARGNNEELAKENNKITLSVTKSNPESGEVIGAFESIQPSDTDLGATTPKDVKIQGIWYCQLDE

SEQ ID NO: 87077 - DNA, 1620 bp, Arabidopsis thaliana
  misc_feature (1)..(1620): Ceres Seq. ID no. 12697162
  misc_feature: MA Experiment ID: 108434 Result: Down-regulated in Transcription
  misc_feature: MA Experiment 108434 PARAMETER Experiment Name: At_Root_Tips_cDNA_P Parameter: Tissue Value: Root Tips
  misc_feature: MA Experiment ID: 108461 Result: Down-regulated in Transcription
  misc_feature: MA Experiment 108461 PARAMETER Experiment Name: At_Germinating_Seeds_cDNA_P Parameter: Age (day) Value: 1 vs. 0
  misc_feature: MA Experiment 108461 PARAMETER Experiment Name: At_Germinating_Seeds_cDNA_P Parameter: Tissue Value: Germinating Seeds
  misc_feature: MA Experiment ID: 108464 Result: Up-regulated in Transcription
  misc_feature: MA Experiment 108464 PARAMETER Experiment Name: At_Germinating_Seeds_cDNA_P Parameter: Age (day) Value: 4 vs. 0
  misc_feature: MA Experiment 108464 PARAMETER Experiment Name: At_Germinating_Seeds_cDNA_P Parameter: Tissue Value: Germinating Seeds
  misc_feature: MA Experiment ID: 108489 Result: Up-regulated in Transcription
  misc_feature: MA Experiment ID: 108501 Result: Down-regulated in Transcription
  misc_feature: MA Experiment 108501 PARAMETER Experiment Name: At_ap2_floral_buds_cDNA_P Parameter: Plant Line Value: ap2 (Ler.)
  misc_feature: MA Experiment 108501 PARAMETER Experiment Name: At_ap2_floral_buds_cDNA_P Parameter: Tissue Value: Closed Flower
  misc_feature: MA Experiment ID: 108573 Result: Up-regulated in Transcription
  misc_feature: MA Experiment 108573 PARAMETER Experiment Name: At_Drought_cDNA_P Parameter: Timepoint (hr) Value: 6
  misc_feature: MA Experiment 108573 PARAMETER Experiment Name: At_Drought_cDNA_P Parameter: Tissue Value: Aerial
  misc_feature: MA Experiment 108573 PARAMETER Experiment Name: At_Drought_cDNA_P Parameter: Treatment Value: Drought vs. No Drought
  misc_feature: MA Experiment ID: 108585 Result: Up-regulated in Transcription
  misc_feature: MA Experiment 108585 PARAMETER Experiment Name: At_5mM_NaNP_cDNA_P Parameter: Timepoint (hr) Value: 6
  misc_feature: MA Experiment 108585 PARAMETER Experiment Name: At_5mM_NaNP_cDNA_P Parameter: Tissue Value: Aerial
  misc_feature: MA Experiment 108585 PARAMETER Experiment Name: At_5mM_NaNP_cDNA_P Parameter: Treatment Value: null
  misc_feature: MA Experiment ID: 108594 Result: Down-regulated in Transcription
  misc_feature: MA Experiment 108594 PARAMETER Experiment Name: At_Ler-rhl_Root_cDNA_P Parameter: Plant Line Value: null
  misc_feature: MA Experiment ID: 108595 Result: Up-regulated in Transcription
  misc_feature: MA Experiment 108595 PARAMETER Experiment Name: At_Ler-pi_Ovule_cDNA_P Parameter: Plant Line Value: null
  misc_feature: MA Experiment ID: 108608 Result: Up-regulated in Transcription
  misc_feature: MA Experiment 108608 PARAMETER Experiment Name: At_100uM_ABA_cDNA_P Parameter: Timepoint (hr) Value: 1
  misc_feature: MA Experiment 108608 PARAMETER Experiment Name: At_100uM_ABA_cDNA_P Parameter: Tissue Value: Aerial
  misc_feature: MA Experiment 108608 PARAMETER Experiment Name: At_100uM_ABA_cDNA_P Parameter: Treatment Value: 100uM ABA vs. No Treatment
  misc_feature: MA Experiment ID: 108609 Result: Up-regulated in Transcription
  misc_feature: MA Experiment 108609 PARAMETER Experiment Name: At_100uM_ABA_cDNA_P Parameter: Timepoint (hr) Value: 24
  misc_feature: MA Experiment 108609 PARAMETER Experiment Name: At_100uM_ABA_cDNA_P Parameter: Tissue Value: Aerial
  misc_feature: MA Experiment 108609 PARAMETER Experiment Name: At_100uM_ABA_cDNA_P Parameter: Treatment Value: 100uM ABA vs. No Treatment
  misc_feature: MA Experiment ID: 108668 Result: Up-regulated in Transcription
  misc_feature: MA Experiment 108668 PARAMETER Experiment Name: At_2mM_SA_cDNA_P Parameter: Plant Line Value: WS
  misc_feature: MA Experiment 108668 PARAMETER Experiment Name: At_2mM_SA_cDNA_P Parameter: Timepoint (hr) Value: 6
  misc_feature: MA Experiment 108668 PARAMETER Experiment Name: At_2mM_SA_cDNA_P Parameter: Treatment Value: 2mM SA vs. No Treatment
  misc_feature: MA Experiment ID: 20000069 Result: Up-regulated in Transcription
  misc_feature: MA Experiment 20000069 PARAMETER Experiment Name: At_100uM_ABA_Mutants_cDNA_P Parameter: Plant Line Value: CS23
  misc_feature: MA Experiment 20000069 PARAMETER Experiment Name: At_100uM_ABA_Mutants_cDNA_P Parameter: Timepoint (hr) Value: 6
  misc_feature: MA Experiment 20000069 PARAMETER Experiment Name: At_100uM_ABA_Mutants_cDNA_P Parameter: Tissue Value: Aerial
  misc_feature: MA Experiment 20000069 PARAMETER Experiment Name: At_100uM_ABA_Mutants_cDNA_P Parameter: Treatment Value: 100uM ABA vs. No Treatment
  misc_feature: MA Experiment ID: 20000071 Result: Up-regulated in Transcription
  misc_feature: MA Experiment 20000071 PARAMETER Experiment Name: At_100uM_ABA_Mutants_cDNA_P Parameter: Plant Line Value: CS8104
  misc_feature: MA Experiment 20000071 PARAMETER Experiment Name: At_100uM_ABA_Mutants_cDNA_P Parameter: Timepoint (hr) Value: 6
  misc_feature: MA Experiment 20000071 PARAMETER Experiment Name: At_100uM_ABA_Mutants_cDNA_P Parameter: Tissue Value: Aerial
  misc_feature: MA Experiment 20000071 PARAMETER Experiment Name: At_100uM_ABA_Mutants_cDNA_P Parameter: Treatment Value: 100uM ABA vs. No Treatment
  misc_feature: MA Experiment ID: 20000072 Result: Up-regulated in Transcription
  misc_feature: MA Experiment 20000072 PARAMETER Experiment Name: At_100uM_ABA_Mutants_cDNA_P Parameter: Plant Line Value: CS8105
  misc_feature: MA Experiment 20000072 PARAMETER Experiment Name: At_100uM_ABA_Mutants_cDNA_P Parameter: Timepoint (hr) Value: 6
  misc_feature: MA Experiment 20000072 PARAMETER Experiment Name: At_100uM_ABA_Mutants_cDNA_P Parameter: Tissue Value: Aerial
  misc_feature: MA Experiment 20000072 PARAMETER Experiment Name: At_100uM_ABA_Mutants_cDNA_P Parameter: Treatment Value: 100uM ABA vs. No Treatment
  misc_feature: MA Experiment ID: 20000086 Result: Up-regulated in Transcription
  misc_feature: MA Experiment 20000086 PARAMETER Experiment Name: At_100uM_ABA_Mutants_cDNA_P Parameter: Plant Line Value: CS22
  misc_feature: MA Experiment 20000086 PARAMETER Experiment Name: At_100uM_ABA_Mutants_cDNA_P Parameter: Timepoint (hr) Value: 6
  misc_feature: MA Experiment 20000086 PARAMETER Experiment Name: At_100uM_ABA_Mutants_cDNA_P Parameter: Tissue Value: Aerial
  misc_feature: MA Experiment 20000086 PARAMETER Experiment Name: At_100uM_ABA_Mutants_cDNA_P Parameter: Treatment Value: 100uM ABA vs. No Treatment
  misc_feature: MA Experiment ID: 20000087 Result: Up-regulated in Transcription
  misc_feature: MA Experiment 20000087 PARAMETER Experiment Name: At_100uM_ABA_Mutants_cDNA_P Parameter: Plant Line Value: WS
  misc_feature: MA Experiment 20000087 PARAMETER Experiment Name: At_100uM_ABA_Mutants_cDNA_P Parameter: Timepoint (hr) Value: 6
  misc_feature: MA Experiment 20000087 PARAMETER Experiment Name: At_100uM_ABA_Mutants_cDNA_P Parameter: Tissue Value: Aerial
  misc_feature: MA Experiment 20000087 PARAMETER Experiment Name: At_100uM_ABA_Mutants_cDNA_P Parameter: Treatment Value: 100uM ABA vs. No Treatment
  misc_feature: MA Experiment ID: 20000088 Result: Up-regulated in Transcription
  misc_feature: MA Experiment 20000088 PARAMETER Experiment Name: At_100uM_ABA_Mutants_cDNA_P Parameter: Plant Line Value: Landsberg
  misc_feature: MA Experiment 20000088 PARAMETER Experiment Name: At_100uM_ABA_Mutants_cDNA_P Parameter: Timepoint (hr) Value: 6
  misc_feature: MA Experiment 20000088 PARAMETER Experiment Name: At_100uM_ABA_Mutants_cDNA_P Parameter: Tissue Value: Aerial
  misc_feature: MA Experiment 20000088 PARAMETER Experiment Name: At_100uM_ABA_Mutants_cDNA_P Parameter: Treatment Value: 100uM ABA vs. No Treatment
  misc_feature: MA Experiment ID: 20000117 Result: Up-regulated in Transcription
  misc_feature: MA Experiment 20000117 PARAMETER Experiment Name: At_100uM_ABA_Mutants_cDNA_P Parameter: Plant Line Value: Columbia
  misc_feature: MA Experiment 20000117 PARAMETER Experiment Name: At_100uM_ABA_Mutants_cDNA_P Parameter: Timepoint (hr) Value: 6
  misc_feature: MA Experiment 20000117 PARAMETER Experiment Name: At_100uM_ABA_Mutants_cDNA_P Parameter: Tissue Value: Aerial
  misc_feature: MA Experiment 20000117 PARAMETER Experiment Name: At_100uM_ABA_Mutants_cDNA_P Parameter: Treatment Value: 100uM ABA vs. No Treatment
  misc_feature: MA Experiment ID: 20000166 Result: Up-regulated in Transcription
  misc_feature: MA Experiment 20000166 PARAMETER Experiment Name: At_100uM_ABA_P Parameter: Age (day) Value: 14
  misc_feature: MA Experiment 20000166 PARAMETER Experiment Name: At_100uM_ABA_P Parameter: Organism Value: A. thaliana
  misc_feature: MA Experiment 20000166 PARAMETER Experiment Name: At_100uM_ABA_P Parameter: Plant Line Value: WS
  misc_feature: MA Experiment 20000166 PARAMETER Experiment Name: At_100uM_ABA_P Parameter: Timepoint (hr) Value: 1
  misc_feature: MA Experiment 20000166 PARAMETER Experiment Name: At_100uM_ABA_P Parameter: Tissue Value: Aerial
  misc_feature: MA Experiment 20000166 PARAMETER Experiment Name: At_100uM_ABA_P Parameter: Treatment Value: 100uM ABA vs. No Treatment
  misc_feature: MA Experiment ID: 20000180 Result: Down-regulated in Transcription
  misc_feature: MA Experiment 20000180 PARAMETER Experiment Name: At_Germinating_Seeds_P Parameter: Age (hr) Value: 24 vs. 0
  misc_feature: MA Experiment 20000180 PARAMETER Experiment Name: At_Germinating_Seeds_P Parameter: Tissue Value: Germinating Seeds
  misc_feature: MA Experiment ID: 20000182 Result: Up-regulated in Transcription
  misc_feature: MA Experiment 20000182 PARAMETER Experiment Name: At_2mM_SA_P Parameter: Age (day) Value: 14
  misc_feature: MA Experiment 20000182 PARAMETER Experiment Name: At_2mM_SA_P Parameter: Organism Value: A. thaliana
  misc_feature: MA Experiment 20000182 PARAMETER Experiment Name: At_2mM_SA_P Parameter: Plant Line Value: WS
  misc_feature: MA Experiment 20000182 PARAMETER Experiment Name: At_2mM_SA_P Parameter: Timepoint (hr) Value: 6
  misc_feature: MA Experiment 20000182 PARAMETER Experiment Name: At_2mM_SA_P Parameter: Tissue Value: Aerial
  misc_feature: MA Experiment 20000182 PARAMETER Experiment Name: At_2mM_SA_P Parameter: Treatment Value: 2mM SA vs. No Treatment
  misc_feature: MA Experiment ID: 20000184 Result: Down-regulated in Transcription
  misc_feature: MA Experiment 20000184 PARAMETER Experiment Name: At_Shoots__P Parameter: Age (day) Value: 7
  misc_feature: MA Experiment 20000184 PARAMETER Experiment Name: At_Shoots__P Parameter: Tissue Value: Shoots vs. Whole Plant
  misc_feature: MA Experiment ID: 20000185 Result: Down-regulated in Transcription
  misc_feature: MA Experiment 20000185 PARAMETER Experiment Name: At_Roots__P Parameter: Age (day) Value: 7 vs. 21
  misc_feature: MA Experiment 20000185 PARAMETER Experiment Name: At_Roots__P Parameter: Organism Value: A. thaliana
  misc_feature: MA Experiment 20000185 PARAMETER Experiment Name: At_Roots__P Parameter: Tissue Value: Roots vs. Whole Plant
  misc_feature: MA Experiment ID: 20000234 Result: Down-regulated in Transcription
  misc_feature: MA Experiment 20000234 PARAMETER Experiment Name: At_Siliques_P Parameter: Age (day) Value: 21
  misc_feature: MA Experiment 20000234 PARAMETER Experiment Name: At_Siliques_P Parameter: Organism Value: A. thaliana
  misc_feature: MA Experiment 20000234 PARAMETER Experiment Name: At_Siliques_P Parameter: Plant Line Value: WS
  misc_feature: MA Experiment 20000234 PARAMETER Experiment Name: At_Siliques_P Parameter: Tissue Value: Less Than 5mm Siliques vs. Whole Plant
  misc_feature: MA Experiment ID: 20000235 Result: Down-regulated in Transcription
  misc_feature: MA Experiment 20000235 PARAMETER Experiment Name: At_Siliques_P Parameter: Age (day) Value: 21
  misc_feature: MA Experiment 20000235 PARAMETER Experiment Name: At_Siliques_P Parameter: Organism Value: A. thaliana
  misc_feature: MA Experiment 20000235 PARAMETER Experiment Name: At_Siliques_P Parameter: Plant Line Value: WS
  misc_feature: MA Experiment 20000235 PARAMETER Experiment Name: At_Siliques_P Parameter: Tissue Value: 5-10mm Siliques vs. Whole Plant
  misc_feature: MA Experiment ID: 20000264 Result: Down-regulated in Transcription
  misc_feature: MA Experiment 20000264 PARAMETER Experiment Name: At_Open_Flower_P Parameter: Age (day) Value: 21
  misc_feature: MA Experiment 20000264 PARAMETER Experiment Name: At_Open_Flower_P Parameter: Plant Line Value: WS
  misc_feature: MA Experiment 20000264 PARAMETER Experiment Name: At_Open_Flower_P Parameter: Tissue Value: Open Flower vs. Whole Plant
  misc_feature: MA Experiment ID: 20000265 Result: Down-regulated in Transcription
  misc_feature: MA Experiment 20000265 PARAMETER Experiment Name: At_Open_Flower_P Parameter: Age (day) Value: 21
  misc_feature: MA Experiment 20000265 PARAMETER Experiment Name: At_Open_Flower_P Parameter: Plant Line Value: WS
  misc_feature: MA Experiment 20000265 PARAMETER Experiment Name: At_Open_Flower_P Parameter: Tissue Value: Closed Flower vs. Whole Plant
  misc_feature: MA Experiment ID: 20000286 Result: Down-regulated in Transcription
  misc_feature: MA Experiment 20000286 PARAMETER Experiment Name: At_Open_Flower_P Parameter: Age (day) Value: 21
  misc_feature: MA Experiment 20000286 PARAMETER Experiment Name: At_Open_Flower_P Parameter: Plant Line Value: WS
  misc_feature: MA Experiment 20000286 PARAMETER Experiment Name: At_Open_Flower_P Parameter: Tissue Value: Half Open vs. Whole Plant
  misc_feature: MA Experiment ID: 20000288 Result: Up-regulated in Transcription
  misc_feature: MA Experiment 20000288 PARAMETER Experiment Name: At_Drought_P Parameter: Age (day) Value: 7
  misc_feature: MA Experiment 20000288 PARAMETER Experiment Name: At_Drought_P Parameter: Organism Value: A. thaliana
  misc_feature: MA Experiment 20000288 PARAMETER Experiment Name: At_Drought_P Parameter: Plant Line Value: WS
  misc_feature: MA Experiment 20000288 PARAMETER Experiment Name: At_Drought_P Parameter: Timepoint (hr) Value: 1
  misc_feature: MA Experiment 20000288 PARAMETER Experiment Name: At_Drought_P Parameter: Tissue Value: Whole Plant
  misc_feature: MA Experiment 20000288 PARAMETER Experiment Name: At_Drought_P Parameter: Treatment Value: Drought vs. No Drought
  misc_feature: MA Experiment ID: 20000308 Result: Up-regulated in Transcription
  misc_feature: MA Experiment 20000308 PARAMETER Experiment Name: At_100mM_NaCl__P Parameter: Age (day) Value: 17
  misc_feature: MA Experiment 20000308 PARAMETER Experiment Name: At_100mM_NaCl__P Parameter: Organism Value: A. thaliana
  misc_feature: MA Experiment 20000308 PARAMETER Experiment Name: At_100mM_NaCl__P Parameter: Plant Line Value: WS
  misc_feature: MA Experiment 20000308 PARAMETER Experiment Name: At_100mM_NaCl__P Parameter: Timepoint (hr) Value: 72
  misc_feature: MA Experiment 20000308 PARAMETER Experiment Name: At_100mM_NaCl__P Parameter: Tissue Value: Whole Plant
  misc_feature: MA Experiment 20000308 PARAMETER Experiment Name: At_100mM_NaCl__P Parameter: Treatment Value: 100mM NaCl vs. No Treatment
  misc_feature: MA Experiment ID: 20000436 Result: Up-regulated in Transcription
  misc_feature: MA Experiment 20000436 PARAMETER Experiment Name: At_Drought_P Parameter: Age (day) Value: 7
  misc_feature: MA Experiment 20000436 PARAMETER Experiment Name: At_Drought_P Parameter: Organism Value: A. thaliana
  misc_feature: MA Experiment 20000436 PARAMETER Experiment Name: At_Drought_P Parameter: Plant Line Value: WS
  misc_feature: MA Experiment 20000436 PARAMETER Experiment Name: At_Drought_P Parameter: Timepoint (hr) Value: 12
  misc_feature: MA Experiment 20000436 PARAMETER Experiment Name: At_Drought_P Parameter: Tissue Value: Whole Plant
  misc_feature: MA Experiment 20000436 PARAMETER Experiment Name: At_Drought_P Parameter: Treatment Value: Drought vs. No Drought
  misc_feature: MA Experiment ID: 20000437 Result: Up-regulated in Transcription
  misc_feature: MA Experiment 20000437 PARAMETER Experiment Name: At_Drought_P Parameter: Age (day) Value: 8
  misc_feature: MA Experiment 20000437 PARAMETER Experiment Name: At_Drought_P Parameter: Organism Value: A. thaliana
  misc_feature: MA Experiment 20000437 PARAMETER Experiment Name: At_Drought_P Parameter: Plant Line Value: WS
  misc_feature: MA Experiment 20000437 PARAMETER Experiment Name: At_Drought_P Parameter: Timepoint (hr) Value: 24
  misc_feature: MA Experiment 20000437 PARAMETER Experiment Name: At_Drought_P Parameter: Tissue Value: Whole Plant
  misc_feature: MA Experiment 20000437 PARAMETER Experiment Name: At_Drought_P Parameter: Treatment Value: Drought vs. No Drought
  misc_feature: MA Experiment ID: 20000438 Result: Down-regulated in Transcription
  misc_feature: MA Experiment 20000438 PARAMETER Experiment Name: At_Shoots__P Parameter: Age (day) Value: 14
  misc_feature: MA Experiment 20000438 PARAMETER Experiment Name: At_Shoots__P Parameter: Tissue Value: Shoots vs. Whole Plant
  misc_feature: MA Experiment ID: 20000439 Result: Down-regulated in Transcription
  misc_feature: MA Experiment 20000439 PARAMETER Experiment Name: At_Roots__P Parameter: Age (day) Value: 14 vs. 21
  misc_feature: MA Experiment 20000439 PARAMETER Experiment Name: At_Roots__P Parameter: Organism Value: A. thaliana
  misc_feature: MA Experiment 20000439 PARAMETER Experiment Name: At_Roots__P Parameter: Tissue Value: Roots vs. Whole Plant
  misc_feature: MA Experiment ID: 20000445 Result: Up-regulated in Transcription
  misc_feature: MA Experiment 20000445 PARAMETER Experiment Name: At_100uM_NAA__P Parameter: Age (day) Value: 14
  misc_feature: MA Experiment 20000445 PARAMETER Experiment Name: At_100uM_NAA__P Parameter: Organism Value: A. thaliana
  misc_feature: MA Experiment 20000445 PARAMETER Experiment Name: At_100uM_NAA__P Parameter: Plant Line Value: WS
  misc_feature: MA Experiment 20000445 PARAMETER Experiment Name: At_100uM_NAA__P Parameter: Timepoint (hr) Value: 6
  misc_feature: MA Experiment 20000445 PARAMETER Experiment Name: At_100uM_NAA__P Parameter: Tissue Value: Aerial
  misc_feature: MA Experiment 20000445 PARAMETER Experiment Name: At_100uM_NAA__P Parameter: Treatment Value: 100uM NAA vs. No Treatment
  misc_feature: MA Experiment ID: 20000451 Result: Up-regulated in Transcription
  misc_feature: MA Experiment 20000451 PARAMETER Experiment Name: At_CS6879_Shoots-Roots_P Parameter: Age (day) Value: 14
  misc_feature: MA Experiment 20000451 PARAMETER Experiment Name: At_CS6879_Shoots-Roots_P Parameter: Organism Value: A. thaliana
  misc_feature: MA Experiment 20000451 PARAMETER Experiment Name: At_CS6879_Shoots-Roots_P Parameter: Plant Line Value: CS6879 vs. WS
  misc_feature: MA Experiment 20000451 PARAMETER Experiment Name: At_CS6879_Shoots-Roots_P Parameter: Tissue Value: Roots
  misc_feature: MA Experiment ID: 20000453 Result: Up-regulated in Transcription
  misc_feature: MA Experiment 20000453 PARAMETER Experiment Name: At_100uM_ABA_P Parameter: Age (day) Value: 15
  misc_feature: MA Experiment 20000453 PARAMETER Experiment Name: At_100uM_ABA_P Parameter: Organism Value: A. thaliana
  misc_feature: MA Experiment 20000453 PARAMETER Experiment Name: At_100uM_ABA_P Parameter: Plant Line Value: WS
  misc_feature: MA Experiment 20000453 PARAMETER Experiment Name: At_100uM_ABA_P Parameter: Timepoint (hr) Value: 24
  misc_feature: MA Experiment 20000453 PARAMETER Experiment Name: At_100uM_ABA_P Parameter: Tissue Value: Aerial
  misc_feature: MA Experiment 20000453 PARAMETER Experiment Name: At_100uM_ABA_P Parameter: Treatment Value: 100uM ABA vs. No Treatment
  misc_feature: MA Experiment ID: 20000456 Result: Up-regulated in Transcription
  misc_feature: MA Experiment 20000456 PARAMETER Experiment Name: At_100uM_BA_P Parameter: Age (day) Value: 14
  misc_feature: MA Experiment 20000456 PARAMETER Experiment Name: At_100uM_BA_P Parameter: Organism Value: A. thaliana
  misc_feature: MA Experiment 20000456 PARAMETER Experiment Name: At_100uM_BA_P Parameter: Plant Line Value: WS
  misc_feature: MA Experiment 20000456 PARAMETER Experiment Name: At_100uM_BA_P Parameter: Timepoint (hr) Value: 6
  misc_feature: MA Experiment 20000456 PARAMETER Experiment Name: At_100uM_BA_P Parameter: Tissue Value: Aerial
  misc_feature: MA Experiment 20000456 PARAMETER Experiment Name: At_100uM_BA_P Parameter: Treatment Value: 100uM BA vs. No Treatment
  misc_feature: MA Experiment ID: 20000573 Result: Up-regulated in Transcription
  misc_feature: MA Experiment 20000573 PARAMETER Experiment Name: At_100uM_ABA_Mutants__P Parameter: Organism Value: A. thaliana
  misc_feature: MA Experiment 20000573 PARAMETER Experiment Name: At_100uM_ABA_Mutants__P Parameter: Plant Line Value: CS22 vs. Ler wt
  misc_feature: MA Experiment 20000573 PARAMETER Experiment Name: At_100uM_ABA_Mutants__P Parameter: Timepoint (hr) Value: N/A
  misc_feature: MA Experiment 20000573 PARAMETER Experiment Name: At_100uM_ABA_Mutants__P Parameter: Tissue Value: Whole Plant
  misc_feature: MA Experiment 20000573 PARAMETER Experiment Name: At_100uM_ABA_Mutants__P Parameter: Treatment Value: None
  misc_feature: MA Experiment ID: 20000574 Result: Up-regulated in Transcription
  misc_feature: MA Experiment 20000574 PARAMETER Experiment Name: At_100uM_ABA_Mutants__P Parameter: Organism Value: A. thaliana
  misc_feature: MA Experiment 20000574 PARAMETER Experiment Name: At_100uM_ABA_Mutants__P Parameter: Plant Line Value: CS23 vs. Ler wt
  misc_feature: MA Experiment 20000574 PARAMETER Experiment Name: At_100uM_ABA_Mutants__P Parameter: Timepoint (hr) Value: N/A
  misc_feature: MA Experiment 20000574 PARAMETER Experiment Name: At_100uM_ABA_Mutants__P Parameter: Tissue Value: Whole Plant
  misc_feature: MA Experiment 20000574 PARAMETER Experiment Name: At_100uM_ABA_Mutants__P Parameter: Treatment Value: None
  misc_feature: MA Experiment ID: 20000709 Result: Up-regulated in Transcription
  misc_feature: MA Experiment 20000709 PARAMETER Experiment Name: At_15mM_NH4NO3_L-to-H_P Parameter: Age (hr) Value: 14
  misc_feature: MA Experiment 20000709 PARAMETER Experiment Name: At_15mM_NH4NO3_L-to-H_P Parameter: Organism Value: A. thaliana
  misc_feature: MA Experiment 20000709 PARAMETER Experiment Name: At_15mM_NH4NO3_L-to-H_P Parameter: Plant Line Value: WS
  misc_feature: MA Experiment 20000709 PARAMETER Experiment Name: At_15mM_NH4NO3_L-to-H_P Parameter: Timepoint (hr) Value: 4
  misc_feature: MA Experiment 20000709 PARAMETER Experiment Name: At_15mM_NH4NO3_L-to-H_P Parameter: Tissue Value: Aerial
  misc_feature: MA Experiment 20000709 PARAMETER Experiment Name: At_15mM_NH4NO3_L-to-H_P Parameter: Treatment Value: 15mM NH4NO3 vs. 30mM Mannitol
  misc_feature: MA Experiment ID: 20000794 Result: Down-regulated in Transcription
  misc_feature: MA Experiment 20000794 PARAMETER Experiment Name: At_Petals_P Parameter: Age (day) Value: 23-25 days
  misc_feature: MA Experiment 20000794 PARAMETER Experiment Name: At_Petals_P Parameter: Plant Line Value: WS
  misc_feature: MA Experiment 20000794 PARAMETER Experiment Name: At_Petals_P Parameter: Tissue Value: Petals vs. Whole plant
  misc_feature: MA Experiment ID: 20001248 Result: Up-regulated in Transcription
  misc_feature: MA Experiment 20001248 PARAMETER Experiment Name: At_Far-red-induction_P Parameter: Age (day) Value: 7
  misc_feature: MA Experiment 20001248 PARAMETER Experiment Name: At_Far-red-induction_P Parameter: Light Value: Far-red vs. White
  misc_feature: MA Experiment 20001248 PARAMETER Experiment Name: At_Far-red-induction_P Parameter: Organism Value: A. thaliana
  misc_feature: MA Experiment 20001248 PARAMETER Experiment Name: At_Far-red-induction_P Parameter: Plant Line Value: Columbia
  misc_feature: MA Experiment 20001248 PARAMETER Experiment Name: At_Far-red-induction_P Parameter: Timepoint (hr) Value: 4
  misc_feature: MA Experiment 20001248 PARAMETER Experiment Name: At_Far-red-induction_P Parameter: Tissue Value: Whole Plant
  misc_feature: MA Experiment ID: 20001557 Result: Up-regulated in Transcription
  misc_feature: MA Experiment 20001557 PARAMETER Experiment Name: At_Drought_Soil_Dry_P Parameter: Age (day) Value: 27
  misc_feature: MA Experiment 20001557 PARAMETER Experiment Name: At_Drought_Soil_Dry_P Parameter: Organism Value: A. thaliana
  misc_feature: MA Experiment 20001557 PARAMETER Experiment Name: At_Drought_Soil_Dry_P Parameter: Plant Line Value: WS
  misc_feature: MA Experiment 20001557 PARAMETER Experiment Name: At_Drought_Soil_Dry_P Parameter: Post Timepoint (hr) Value: 3
  misc_feature: MA Experiment 20001557 PARAMETER Experiment Name: At_Drought_Soil_Dry_P Parameter: Post-Treatment Value: Re-Water vs. No Drought
  misc_feature: MA Experiment 20001557 PARAMETER Experiment Name: At_Drought_Soil_Dry_P Parameter: Timepoint (day) Value: 13
  misc_feature: MA Experiment 20001557 PARAMETER Experiment Name: At_Drought_Soil_Dry_P Parameter: Treatment Value: Drought vs. No Drought
  misc_feature: MA Experiment ID: 20001772 Result: Down-regulated in Transcription
  misc_feature: MA Experiment 20001772 PARAMETER Experiment Name: At_Far-red-enriched-adult_P Parameter: Age (day) Value: 29
  misc_feature: MA Experiment 20001772 PARAMETER Experiment Name: At_Far-red-enriched-adult_P Parameter: Light Value: Far-red enriched vs. White
  misc_feature: MA Experiment 20001772 PARAMETER Experiment Name: At_Far-red-enriched-adult_P Parameter: Organism Value: A. thaliana
  misc_feature: MA Experiment 20001772 PARAMETER Experiment Name: At_Far-red-enriched-adult_P Parameter: Plant Line Value: Columbia
  misc_feature: MA Experiment 20001772 PARAMETER Experiment Name: At_Far-red-enriched-adult_P Parameter: Timepoint (hr) Value: 24
  misc_feature: MA Experiment 20001772 PARAMETER Experiment Name: At_Far-red-enriched-adult_P Parameter: Tissue Value: Aerial
  misc_feature: MA Experiment ID: 20001773 Result: Down-regulated in Transcription
  misc_feature: MA Experiment 20001773 PARAMETER Experiment Name: At_Far-red-enriched-adult_P Parameter: Age (day) Value: 30
  misc_feature: MA Experiment 20001773 PARAMETER Experiment Name: At_Far-red-enriched-adult_P Parameter: Light Value: Far-red enriched vs. White
  misc_feature: MA Experiment 20001773 PARAMETER Experiment Name: At_Far-red-enriched-adult_P Parameter: Organism Value: A. thaliana
  misc_feature: MA Experiment 20001773 PARAMETER Experiment Name: At_Far-red-enriched-adult_P Parameter: Plant Line Value: Columbia
  misc_feature: MA Experiment 20001773 PARAMETER Experiment Name: At_Far-red-enriched-adult_P Parameter: Timepoint (hr) Value: 48
  misc_feature: MA Experiment 20001773 PARAMETER Experiment Name: At_Far-red-enriched-adult_P Parameter: Tissue Value: Aerial
ttcactcaccaaaatagatctaaaacatggaaaccaaaaccctaattttctcaattctcttcgttgttctctctctcatttacttaattggaaaactcaagcgaaagccaaatctacctccgagtccggcatggtcattaccggtgattggtcatctccgccttctcaaaccaccgattcatcgcacattcctctccctctctcaatccctaaacaatgctccgatcttctccctccgactcggtaaccgactcgttttcgtgaactcgtcacactcgatcgccgaggaatgtttcaccaaaaacgacgtcgtactggcgaacagaccaaacttcatcctcgctaaacacgttgcgtacgattacacaaccatgatcgcagcttcctacggtgaccactggcgtaacctccgccgcatcggctccgtcgagatattctccaatcaccgtctcaatagctttttgtctattcgtaaagacgagatccgacgacttgtgtttcgtctttctcggaacttttcacaagagtttgtgaaagtggatatgaaatcaatgttatctgacttaacattcaacaacattttaagaatggtggccggaaaacgttactacggagacggtgttgaggatgatccggaggctaaacgtgtccggcagcttatagcggatgtggtggcttgtgctggtgctggaaacgctgttgattacttaccggttttgcggttggtttcagattacgagacacgggttaagaagttggcgggtaggctcgacgagttcttgcaaggattggttgatgagaaacgagaagctaaggagaaaggaaacactatgatcgatcacttgcttactctgcaagaatcccaaccggattacttcacggatcgtatcattaaaggaaacatgctcgctttgatactagcagggaccgacacatcagcggttacgttagaatgggcattgtcgaacgtgttgaaccatccggatgtattgaacaaggcgagagatgaaatcgatagaaagataggtttagacaggcttatggatgaatcagatatctcaaacctgccttatctccaaaacattgtgtctgaaacgttgcgcctttatcctgcggctcccatgcttcttcctcacgttgcctcggaagattgtaaagttgcaggatacgatatgccgcgtggcacgatactattgaccaatgtgtgggctatacacagagatcctcagctatgggatgatccaatgagcttcaagccagagaggtttgagaaagaaggagaagctcagaagctaatgccgtttgggttaggaagaagggcgtgtcctggttctggactggctcatcggcttataaacctgactcttggatcattgattcagtgtttggaatgggagaagattggagaagaagtggatatgagtgaaggcaaaggtgttacaatgcctaaagccaagcctttggaagccatgtgcagagcacgtccctctgttgttaaaatcttcaacgagtccgtttgacgtttagacttttggtaatggctatgtatacattagataactagttatgtttgtatgttttctttttttttggtgaaaatattatgtttgtatgttaatg

SEQ ID NO: 87078 - protein, 497 aa, Arabidopsis thaliana; identical to SEQ ID NO: 36691
  peptide (1)..(497): Ceres Seq. ID no. 12697163
  misc_feature (1)..(497): Homolog of NCBI NO: 15235536 NR Description: cytochrome p450 family; protein id: At4g37370.1, by cDNA: 253698., supported by cDNA: gi_17473897 [Arabidopsis
  misc_feature (1)..(494): Homolog of NCBI NO: 21554381 NR Description: cytochrome P450-like protein [Arabidopsis
  misc_feature (1)..(496): Homolog of NCBI NO: 15235535 NR Description: cytochrome p450 family; protein id: At4g37360.1
  misc_feature (1)..(496): Homolog of NCBI NO: 15235534 NR Description: cytochrome P450 monooxygenase, putative; protein
  misc_feature (97)..(496): Homolog of NCBI NO: 25282574 NR Description: probable cytochrome P450 F28G11.4 [imported] - thaliana >gi|12322266|gb|AAG51161.1|AC074025_11 cytochrome P450,
  misc_feature (2)..(101): Homolog of NCBI NO: 25282574 NR Description: probable cytochrome P450 F28G11.4 [imported] - thaliana >gi|12322266|gb|AAG51161.1|AC074025_11 cytochrome P450,
  misc_feature (3)..(491): Homolog of NCBI NO: 15235517 NR Description: cytochrome p450 family; protein id: At4g37320.1
  misc_feature (1)..(496): Homolog of NCBI NO: 15228472 NR Description: cytochrome p450 family; protein id: At3g28740.1, by cDNA: gi_15292830, supported by cDNA: gi_21280798 [Arabidopsis >gi|11994781|dbj|BAB03171.1| cytochrome P450 [Arabidopsis
  misc_feature (6)..(492): Homolog of NCBI NO: 15235533 NR Description: cytochrome p450 family; protein id: At4g37330.1
  misc_feature (7)..(494): Homolog of NCBI NO: 25282604 NR Description: cytochrome P450 monooxygenase [imported] - thaliana (fragment) >gi|3164142|dbj|BAA28538.1| cytochrome P450

SEQ ID NO: 87079 - protein, 382 aa, Arabidopsis thaliana; identical to SEQ ID NO: 36692
  peptide (1)..(382): Ceres Seq. ID no. 12697164
  misc_feature (1)..(382): Homolog of NCBI NO: 15235536 NR Description: cytochrome p450 family; protein id: At4g37370.1, by cDNA: 253698., supported by cDNA: gi_17473897 [Arabidopsis
  misc_feature (1)..(379): Homolog of NCBI NO: 21554381 NR Description: cytochrome P450-like protein [Arabidopsis
  misc_feature (1)..(381): Homolog of NCBI NO: 15235535 NR Description: cytochrome p450 family; protein id: At4g37360.1
  misc_feature (1)..(381): Homolog of NCBI NO: 15235534 NR Description: cytochrome P450 monooxygenase, putative; protein
  misc_feature (1)..(381): Homolog of NCBI NO: 25282574 NR Description: probable cytochrome P450 F28G11.4 [imported] - thaliana >gi|12322266|gb|AAG51161.1|AC074025_11 cytochrome P450,
  misc_feature (1)..(376): Homolog of NCBI NO: 15235517 NR Description: cytochrome p450 family; protein id: At4g37320.1
  misc_feature (1)..(381): Homolog of NCBI NO: 15228472 NR Description: cytochrome p450 family; protein id: At3g28740.1, by cDNA: gi_15292830, supported by cDNA: gi_21280798 [Arabidopsis >gi|11994781|dbj|BAB03171.1| cytochrome P450 [Arabidopsis
  misc_feature (1)..(377): Homolog of NCBI NO: 15235533 NR Description: cytochrome p450 family; protein id: At4g37330.1
  misc_feature (1)..(379): Homolog of NCBI NO: 25282604 NR Description: cytochrome P450 monooxygenase [imported] - thaliana (fragment) >gi|3164142|dbj|BAA28538.1| cytochrome P450
  misc_feature (1)..(379): Homolog of NCBI NO: 15227792 NR Description: cytochrome p450, putative; protein id: [Arabidopsis thaliana] >gi|7430669|pir||T00510 probable

SEQ ID NO: 87080 - protein, 325 aa, Arabidopsis thaliana; identical to SEQ ID NO: 36693
  peptide (1)..(325): Ceres Seq. ID no. 12697165
  misc_feature (1)..(325): Homolog of NCBI NO: 15235536 NR Description: cytochrome p450 family; protein id: At4g37370.1, by cDNA: 253698., supported by cDNA: gi_17473897 [Arabidopsis
  misc_feature (1)..(322): Homolog of NCBI NO: 21554381 NR Description: cytochrome P450-like protein [Arabidopsis
  misc_feature (1)..(324): Homolog of NCBI NO: 15235535 NR Description: cytochrome p450 family; protein id: At4g37360.1
  misc_feature (1)..(324): Homolog of NCBI NO: 15235534 NR Description: cytochrome P450 monooxygenase, putative; protein
  misc_feature (1)..(324): Homolog of NCBI NO: 25282574 NR Description: probable cytochrome P450 F28G11.4 [imported] - thaliana >gi|12322266|gb|AAG51161.1|AC074025_11 cytochrome P450,
  misc_feature (1)..(319): Homolog of NCBI NO: 15235517 NR Description: cytochrome p450 family; protein id: At4g37320.1
  misc_feature (1)..(324): Homolog of NCBI NO: 15228472 NR Description: cytochrome p450 family; protein id: At3g28740.1, by cDNA: gi_15292830, supported by cDNA: gi_21280798 [Arabidopsis >gi|11994781|dbj|BAB03171.1| cytochrome P450 [Arabidopsis
  misc_feature (1)..(320): Homolog of NCBI NO: 15235533 NR Description: cytochrome p450 family; protein id: At4g37330.1
  misc_feature (1)..(322): Homolog of NCBI NO: 25282604 NR Description: cytochrome P450 monooxygenase [imported] - thaliana (fragment) >gi|3164142|dbj|BAA28538.1| cytochrome P450
  misc_feature (1)..(322): Homolog of NCBI NO: 15227792 NR Description: cytochrome p450, putative; protein id: [Arabidopsis thaliana] >gi|7430669|pir||T00510 probable

SEQ ID NO: 87081 - DNA, 1506 bp, Arabidopsis thaliana
  misc_feature (1)..(1506): Ceres Seq. ID no. 12697166
  misc_feature: MA Experiment ID: 108463 Result: Up-regulated in Transcription
  misc_feature: MA Experiment 108463 PARAMETER Experiment Name: At_Germinating_Seeds_cDNA_P Parameter: Age (day) Value: 3 vs. 0
  misc_feature: MA Experiment 108463 PARAMETER Experiment Name: At_Germinating_Seeds_cDNA_P Parameter: Tissue Value: Germinating Seeds
  misc_feature: MA Experiment ID: 108488 Result: Down-regulated in Transcription
  misc_feature: MA Experiment ID: 108595 Result: Up-regulated in Transcription
  misc_feature: MA Experiment 108595 PARAMETER Experiment Name: At_Ler-pi_Ovule_cDNA_P Parameter: Plant Line Value: null
atgttttactatgtgattgtccttcctttagctctctttctcttggcttacaaattattcttcacctccaaaacgaagcgtttcaacctccctccctctccaccttactctctcccaatcctaggccaccacaacctcctcaagccgccggtccaccgtctcttccaccgcctctccaaaacacacggcccaatcttctccctccaatttggctcccgccgtgccgtcgtaatctcctcctcctcactcgcaacacaatgcttcacaggccaaaacgacatcattctctcaaaccggccttgtttcctaaccgctaaatacgtcgcttacaactacacaaccgtaggaaccgcgccttatggcgaccactggcgtaacctccgccgcatttgctccctggaaatcctctcctcgaaccgtctcacaaacttcctccacatccgtaaagacgaaatccaccgcatgctcacgagactctcacgcgacgtcaacaaagagatcgagctcgagccgctcttgtccgatctaacgttcaacaacatagtaagaatggttacagggaagagatactacggcgacgaagtccataacgaagaagaggcaaatgttttcaagaaactcgtcgccgatatcaacgactgtagcggcgcgagacatcccggagattacttgcccttcatgaagatgttcggagggagctttgagaagaaagtgaaagctcttgcggaagccatggatgagatcttgcagcgtttgcttgaagaatgcaagagagataaagatggtaacactatggttaatcatttgctctctctgcaacaaaatgaaccagagtattacactgacgtcactatcaaaggcctaatgctgggcatgatgatcgccggaacagacacttccgctgtgacgctggagtgggcgatgtcgagcttgctaaatcatcccgaggctttggaaaaagcaaaactagagattgacgagaaaatcggacaagaacgtttgatcgatgaaccagacatcgcaaacttgccttaccttcaaaacatagtgtcggaaacattccgattatatccagcggcaccgcttctagtaccaagatcaccaacagaggatattaaagtcggaggatacgatgtgccacgtggcacaatggtgatggttaatgcgtgggctatacacagagatccagagctctggaacgaaccggagaagtttaaaccagagaggtttaatggcggagaaggtggaggaagaggagaagacgttcataagctgatgccgtttgggaatggacggagatcgtgtcccggcgccggactagggcagaagatcgtgacattagcgttaggttcgttgatccaatgctttgactggcaaaaagtcaacggcgaagcaatcgatatgacggagactccggggatggcaatgcgtaagaaaatacctctatctgctttgtgtcaatctcggcccattatgagtaagcttcaggcccatttaaaaggttag

SEQ ID NO: 87082 - protein, 501 aa, Arabidopsis thaliana; identical to SEQ ID NO: 74347
  peptide (1)..(501): Ceres Seq. ID no. 12697167
  misc_feature (1)..(501): Homolog of NCBI NO: 18420031 NR Description: cytochrome p450 family; protein id: At4g37400.1,
  misc_feature (1)..(501): Homolog of NCBI NO: 21618287 NR Description: cytochrome P450 monooxygenase-like protein
  misc_feature (1)..(500): Homolog of NCBI NO: 15235541 NR Description: cytochrome p450, putative; protein id: supported by cDNA: 102007. [Arabidopsis thaliana]
  misc_feature (1)..(497): Homolog of NCBI NO: 15242068 NR Description: cytochrome p450 family; protein id: At5g57220.1, by cDNA: gi_17528949, supported by cDNA: gi_20465950 [Arabidopsis >gi|8777355|dbj|BAA96945.1| cytochrome P450 [Arabidopsis
  misc_feature (1)..(457): Homolog of NCBI NO: 18252165 NR Description: cytochrome P450 monooxygenase - like protein
  misc_feature (4)..(495): Homolog of NCBI NO: 15235559 NR Description: cytochrome p450 family; protein id: At4g37430.1, by cDNA: 33365., supported by cDNA: gi_14532439, supported by gi_3164143 [Arabidopsis thaliana]
  misc_feature (4)..(495): Homolog of NCBI NO: 21618274 NR Description: cytochrome P450 monooxygenase CYP91A2
  misc_feature (4)..(495): Homolog of NCBI NO: 18491105 NR Description: AT4g37430/F6G17_80 [Arabidopsis thaliana]
  misc_feature (4)..(495): Homolog of NCBI NO: 25282605 NR Description: cytochrome P450 monooxygenase [imported] - thaliana >gi|3164144|dbj|BAA28539.1| cytochrome P450
  misc_feature (4)..(481): Homolog of NCBI NO: 23397303 NR Description: putative cytochrome P450 monooxygenase (CYP91A2)

SEQ ID NO: 87083 - protein, 347 aa, Arabidopsis thaliana; identical to SEQ ID NO: 74348
  peptide (1)..(347): Ceres Seq. ID no. 12697168
  misc_feature (1)..(347): Homolog of NCBI NO: 18420031 NR Description: cytochrome p450 family; protein id: At4g37400.1,
  misc_feature (1)..(347): Homolog of NCBI NO: 21618287 NR Description: cytochrome P450 monooxygenase-like protein
  misc_feature (1)..(346): Homolog of NCBI NO: 15235541 NR Description: cytochrome p450, putative; protein id: supported by cDNA: 102007. [Arabidopsis thaliana]
  misc_feature (1)..(343): Homolog of NCBI NO: 15242068 NR Description: cytochrome p450 family; protein id: At5g57220.1, by cDNA: gi_17528949, supported by cDNA: gi_20465950 [Arabidopsis >gi|8777355|dbj|BAA96945.1| cytochrome P450 [Arabidopsis
  misc_feature (1)..(303): Homolog of NCBI NO: 18252165 NR Description: cytochrome P450 monooxygenase - like protein
  misc_feature (1)..(341): Homolog of NCBI NO: 15235559 NR Description: cytochrome p450 family; protein id: At4g37430.1, by cDNA: 33365., supported by cDNA: gi_14532439, supported by gi_3164143 [Arabidopsis thaliana]
  misc_feature (1)..(341): Homolog of NCBI NO: 21618274 NR Description: cytochrome P450 monooxygenase CYP91A2
  misc_feature (1)..(341): Homolog of NCBI NO: 18491105 NR Description: AT4g37430/F6G17_80 [Arabidopsis thaliana]
  misc_feature (1)..(341): Homolog of NCBI NO: 25282605 NR Description: cytochrome P450 monooxygenase [imported] - thaliana >gi|3164144|dbj|BAA28539.1| cytochrome P450
  misc_feature (1)..(327): Homolog of NCBI NO: 23397303 NR Description: putative cytochrome P450 monooxygenase (CYP91A2)

SEQ ID NO: 87084 - protein, 318 aa, Arabidopsis thaliana
  peptide (1)..(318): Ceres Seq. ID no. 12697169
  misc_feature (1)..(318): Homolog of NCBI NO: 18420031 NR Description: cytochrome p450 family; protein id: At4g37400.1,
  misc_feature (1)..(318): Homolog of NCBI NO: 21618287 NR Description: cytochrome P450 monooxygenase-like protein
  misc_feature (1)..(317): Homolog of NCBI NO: 15235541 NR Description: cytochrome p450, putative; protein id: supported by cDNA: 102007. [Arabidopsis thaliana]
  misc_feature (1)..(314): Homolog of NCBI NO: 15242068 NR Description: cytochrome p450 family; protein id: At5g57220.1, by cDNA: gi_17528949, supported by cDNA: gi_20465950 [Arabidopsis >gi|8777355|dbj|BAA96945.1| cytochrome P450 [Arabidopsis
  misc_feature (1)..(274): Homolog of NCBI NO: 18252165 NR Description: cytochrome P450 monooxygenase - like protein
  misc_feature (1)..(312): Homolog of NCBI NO: 15235559 NR Description: cytochrome p450 family; protein id: At4g37430.1, by cDNA: 33365., supported by cDNA: gi_14532439, supported by gi_3164143 [Arabidopsis thaliana]
  misc_feature (1)..(312): Homolog of NCBI NO: 21618274 NR Description: cytochrome P450 monooxygenase CYP91A2
  misc_feature (1)..(312): Homolog of NCBI NO: 18491105 NR Description: AT4g37430/F6G17_80 [Arabidopsis thaliana]
  misc_feature (1)..(312): Homolog of NCBI NO: 25282605 NR Description: cytochrome P450 monooxygenase [imported] - thaliana >gi|3164144|dbj|BAA28539.1| cytochrome P450
  misc_feature (1)..(298): Homolog of NCBI NO: 23397303 NR Description: putative cytochrome P450 monooxygenase (CYP91A2)
MVTGKRYYGDEVHNEEEANVFKKLVADINDCSGARHPGDYLPFMKMFGGSFEKKVKALAEAMDEILQRLLEECKRDKDGNTMVNHLLSLQQNEPEYYTDVTIKGLMLGMMIAGTDTSAVTLEWAMSSLLNHPEALEKAKLEIDEKIGQERLIDEPDIANLPYLQNIVSETFRLYPAAPLLVPRSPTEDIKVGGYDVPRGTMVMVNAWAIHRDPELWNEPEKFKPERFNGGEGGGRGEDVHKLMPFGNGRRSCPGAGLGQKIVTLALGSLIQCFDWQKVNGEAIDMTETPGMAMRKKIPLSALCQSRPIMSKLQAHLKG

SEQ ID NO: 87085 - DNA, 600 bp, Arabidopsis thaliana
  misc_feature (1)..(600): Ceres Seq. ID no. 12697178
  misc_feature: MA Experiment ID: 20000180 Result: Down-regulated in Transcription
  misc_feature: MA Experiment 20000180 PARAMETER Experiment Name: At_Germinating_Seeds_P Parameter: Age (hr) Value: 24 vs. 0
  misc_feature: MA Experiment 20000180 PARAMETER Experiment Name: At_Germinating_Seeds_P Parameter: Tissue Value: Germinating Seeds
  misc_feature: MA Experiment ID: 20000265 Result: Up-regulated in Transcription
  misc_feature: MA Experiment 20000265 PARAMETER Experiment Name: At_Open_Flower_P Parameter: Age (day) Value: 21
  misc_feature: MA Experiment 20000265 PARAMETER Experiment Name: At_Open_Flower_P Parameter: Plant Line Value: WS
  misc_feature: MA Experiment 20000265 PARAMETER Experiment Name: At_Open_Flower_P Parameter: Tissue Value: Closed Flower vs. Whole Plant
atgttgagtcgacgtttgacgacggtaccaactgtatttcgaagactgaggacaccggaggaatcgaaagcaagaggttttacttggctcgcacgacagcttttgagatgcttcgcgatagaggctacgaagttaatgaagctgagctctctctcactctttctgagtttcgttctgtttttgatccttgttgtgttcatgggaactgaaccaatcaccgtgaagtcagttcgtgctcttcatattcagatttccaacaatgtaggcttgcatgctatgattctggttttacagagcaaaatgaaccactttgcccagaaggcattgactaccttcccttttacagttgaaactttcccgattgaagatttgttggtcaacatcacaaagcacattcagcagccaaagattgagattttaaacaaagaggagaaagaacaactgctgaggaagcatgcacttgaggacaaacagcttccttatttgcaggagaaggacagctttgtgaggtactatgggttaaagaaaaaacaggtggtgaagattacatacagtaaagagcctgttggggattttgtgacataccgatgcatcatctga

SEQ ID NO: 87086 - protein, 199 aa, Arabidopsis thaliana
  peptide (1)..(199): Ceres Seq. ID no. 12697179
  misc_feature (126)..(199): Pfam Name: RNA polymerase Rpb5, C-terminal domain Pfam Description: RNA polymerase Rpb5, C-terminal domain
  misc_feature (62)..(199): Homolog of NCBI NO: 15232524 NR Description: RNA polymerase 24kDa subunit -like protein; id: At3g54490.1 [Arabidopsis thaliana] >gi|11261042|pir||T47608
  misc_feature (62)..(198): Homolog of NCBI NO: 15230206 NR Description: putative protein; protein id: At3g57080.1, by cDNA: 8751. [Arabidopsis thaliana] >gi|11261045|pir||T47768
  misc_feature (62)..(198): Homolog of NCBI NO: 21617912 NR Description: putative DNA-directed RNA polymerase 23kD subunit
  misc_feature (62)..(198): Homolog of NCBI NO: 15227327 NR Description: putative DNA-directed RNA polymerase 23kD protein id: At2g41340.1, supported by cDNA: gi_19310384 thaliana] >gi|25288347|pir||E84840 hypothetical protein At2g41340
  misc_feature (62)..(197): Homolog of NCBI NO: 8896071 NR Description: RPB5d [Brassica napus]
  misc_feature (63)..(199): Homolog of NCBI NO: 15228724 NR Description: RNA polymerase I, II and III 24.3 kDa subunit; id: At3g22320.1, supported by cDNA: 21828., supported by cDNA: supported by cDNA: gi_15724321, supported by cDNA: gi_3372232
  misc_feature (74)..(199): Homolog of NCBI NO: 38344231 NR Description: OJ991113_30.8 [Oryza sativa (japonica
  misc_feature (72)..(199): Homolog of NCBI NO: 40746238 NR Description: hypothetical protein AN0752.2 [Aspergillus
  misc_feature (63)..(198): Homolog of NCBI NO: 28497750 NR Description: polymerase (RNA) II (DNA directed) polypeptide E musculus] >gi|28374319|gb|AAH45521.1| similar to DNA directed RNA
  misc_feature (63)..(198): Homolog of NCBI NO: 1173134 NR Description: DNA-directed RNA polymerase II 23 kDa polypeptide
MLSRRLTTVPTVFRRLRTPEESKARGFTWLARQLLRCFAIEATKLMKLSSLSLFLSFVLFLILVVFMGTEPITVKSVRALHIQISNNVGLHAMILVLQSKMNHFAQKALTTFPFTVETFPIEDLLVNITKHIQQPKIEILNKEEKEQLLRKHALEDKQLPYLQEKDSFVRYYGLKKKQVVKITYSKEPVGDFVTYRCII

SEQ ID NO: 87087 - protein, 154 aa, Arabidopsis thaliana
  peptide (1)..(154): Ceres Seq. ID no. 12697180
  misc_feature (81)..(154): Pfam Name: RNA polymerase Rpb5, C-terminal domain Pfam Description: RNA polymerase Rpb5, C-terminal domain
  misc_feature (17)..(154): Homolog of NCBI NO: 15232524 NR Description: RNA polymerase 24kDa subunit -like protein; id: At3g54490.1 [Arabidopsis thaliana] >gi|11261042|pir||T47608
  misc_feature (17)..(153): Homolog of NCBI NO: 15230206 NR Description: putative protein; protein id: At3g57080.1, by cDNA: 8751. [Arabidopsis thaliana] >gi|11261045|pir||T47768
  misc_feature (17)..(153): Homolog of NCBI NO: 21617912 NR Description: putative DNA-directed RNA polymerase 23kD subunit
  misc_feature (17)..(153): Homolog of NCBI NO: 15227327 NR Description: putative DNA-directed RNA polymerase 23kD protein id: At2g41340.1, supported by cDNA: gi_19310384 thaliana] >gi|25288347|pir||E84840 hypothetical protein At2g41340
  misc_feature (17)..(152): Homolog of NCBI NO: 8896071 NR Description: RPB5d [Brassica napus]
  misc_feature (18)..(154): Homolog of NCBI NO: 15228724 NR Description: RNA polymerase I, II and III 24.3 kDa subunit; id: At3g22320.1, supported by cDNA: 21828., supported by cDNA: supported by cDNA: gi_15724321, supported by cDNA: gi_3372232
  misc_feature (29)..(154): Homolog of NCBI NO: 38344231 NR Description: OJ991113_30.8 [Oryza sativa (japonica
  misc_feature (27)..(154): Homolog of NCBI NO: 40746238 NR Description: hypothetical protein AN0752.2 [Aspergillus
  misc_feature (18)..(153): Homolog of NCBI NO: 28497750 NR Description: polymerase (RNA) II (DNA directed) polypeptide E musculus] >gi|28374319|gb|AAH45521.1| similar to DNA directed RNA
  misc_feature (18)..(153): Homolog of NCBI NO: 1173134 NR Description: DNA-directed RNA polymerase II 23 kDa polypeptide
MKLSSLSLFLSFVLFLILVVFMGTEPITVKSVRALHIQISNNVGLHAMILVLQSKMNHFAQKALTTFPFTVETFPIEDLLVNITKHIQQPKIEILNKEEKEQLLRKHALEDKQLPYLQEKDSFVRYYGLKKKQVVKITYSKEPVGDFVTYRCII

SEQ ID NO: 87088 - protein, 133 aa, Arabidopsis thaliana
  peptide (1)..(133): Ceres Seq. ID no. 12697181
  misc_feature (60)..(133): Pfam Name: RNA polymerase Rpb5, C-terminal domain Pfam Description: RNA polymerase Rpb5, C-terminal domain
  misc_feature (1)..(133): Homolog of NCBI NO: 15232524 NR Description: RNA polymerase 24kDa subunit -like protein; id: At3g54490.1 [Arabidopsis thaliana] >gi|11261042|pir||T47608
  misc_feature (1)..(132): Homolog of NCBI NO: 15230206 NR Description: putative protein; protein id: At3g57080.1, by cDNA: 8751. [Arabidopsis thaliana] >gi|11261045|pir||T47768
  misc_feature (1)..(132): Homolog of NCBI NO: 21617912 NR Description: putative DNA-directed RNA polymerase 23kD subunit
  misc_feature (1)..(132): Homolog of NCBI NO: 15227327 NR Description: putative DNA-directed RNA polymerase 23kD protein id: At2g41340.1, supported by cDNA: gi_19310384 thaliana] >gi|25288347|pir||E84840 hypothetical protein At2g41340
  misc_feature (1)..(131): Homolog of NCBI NO: 8896071 NR Description: RPB5d [Brassica napus]
  misc_feature (1)..(133): Homolog of NCBI NO: 15228724 NR Description: RNA polymerase I, II and III 24.3 kDa subunit; id: At3g22320.1, supported by cDNA: 21828., supported by cDNA: supported by cDNA: gi_15724321, supported by cDNA: gi_3372232
  misc_feature (8)..(133): Homolog of NCBI NO: 38344231 NR Description: OJ991113_30.8 [Oryza sativa (japonica
  misc_feature (6)..(133): Homolog of NCBI NO: 40746238 NR Description: hypothetical protein AN0752.2 [Aspergillus
  misc_feature (1)..(132): Homolog of NCBI NO: 28497750 NR Description: polymerase (RNA) II (DNA directed) polypeptide E musculus] >gi|28374319|gb|AAH45521.1| similar to DNA directed RNA
  misc_feature (1)..(132): Homolog of NCBI NO: 1173134 NR Description: DNA-directed RNA polymerase II 23 kDa polypeptide
MGTEPITVKSVRALHIQISNNVGLHAMILVLQSKMNHFAQKALTTFPFTVETFPIEDLLVNITKHIQQPKIEILNKEEKEQLLRKHALEDKQLPYLQEKDSFVRYYGLKKKQVVKITYSKEPVGDFVTYRCII

SEQ ID NO: 87089 - DNA, 1758 bp, Arabidopsis thaliana
  misc_feature (1)..(1758): Ceres Seq. ID no. 12697208
  misc_feature: MA Experiment ID: 108434 Result: Up-regulated in Transcription
  misc_feature: MA Experiment 108434 PARAMETER Experiment Name: At_Root_Tips_cDNA_P Parameter: Tissue Value: Root Tips
  misc_feature: MA Experiment ID: 108579 Result: Down-regulated in Transcription
  misc_feature: MA Experiment 108579 PARAMETER Experiment Name: At_4deg_Cold_cDNA_P Parameter: Temperature (deg C) Value: 4 vs. 22
  misc_feature: MA Experiment 108579 PARAMETER Experiment Name: At_4deg_Cold_cDNA_P Parameter: Timepoint (hr) Value: 6
  misc_feature: MA Experiment 108579 PARAMETER Experiment Name: At_4deg_Cold_cDNA_P Parameter: Tissue Value: Aerial
  misc_feature: MA Experiment ID: 20000117 Result: Down-regulated in Transcription
  misc_feature: MA Experiment 20000117 PARAMETER Experiment Name: At_100uM_ABA_Mutants_cDNA_P Parameter: Plant Line Value: Columbia
  misc_feature: MA Experiment 20000117 PARAMETER Experiment Name: At_100uM_ABA_Mutants_cDNA_P Parameter: Timepoint (hr) Value: 6
  misc_feature: MA Experiment 20000117 PARAMETER Experiment Name: At_100uM_ABA_Mutants_cDNA_P Parameter: Tissue Value: Aerial
  misc_feature: MA Experiment 20000117 PARAMETER Experiment Name: At_100uM_ABA_Mutants_cDNA_P Parameter: Treatment Value: 100uM ABA vs. No Treatment
atgcaacctcagccgcatatttctccgaacaccgcaactgccgcgatctcagccgcgcttgaatctcagcgcagtagaaaaaaccgaggaagttacaattgcggtagatgtggtcaacctaagaaaggccatgtctgtcttttaactgctccacctgatattcccactactccgatcgcttctgagccagtgagctgcatctccgccgccgcatcttcttcccgttctactgtcttatctttaacagcggcgccgtcatcgcgacagaccttcactcacttacgccgagctttatcgttcgatgacgtcgatgcgcgtaattcactcgatgaatccgatctggatgctgcatcgatggatctggatctacaattggatacggatattgttcagcctgggaggtttcatgcggtgggtttatgggaggtgcttaagcggctacctccgtctagtttactgatggcggctagggtttgcaaaggatggagagagacatcgaggaagatgtggaaagcggctgaggagcttcggattagggttccggagagagctcagattggatacattggatccttattacaaaaatgtcctcgacttattagactctcacttaaaatcgagagtgattttgacgcgacgactctggcttgcattgcattttcttgtcctaacctggaggttttggagattacaacttcgggtgcagctgtcaataggatttctggggatgagctgagtcggtttgttgctaataaacgaggactaacaagccttaagatggaaggatgttccaatttgggaggattttccctctcttcatcaagcctctccactctttggctctcggatcttcattctctctcaaagatgatcttcaactgtccaaatcttacggaaatatcacttgaattttctcgccaagaagatgattcaactgatcttgtaacaatggttgatggtttgggaaggacttgcactagattgcagaacatccatatagcctctttgaagctttcacatactgttgtactttctcttactgctgtgaatttcaggtatttgagaatgctctcgctagttcttggaataaatatcactgatgcatctgtagctgccatttcctcaggttacaaaaaccttgaactgcttgatctgagtggttccagcattactgatactggcctcgggatgatctgcgatgtcttacctgatacactctcaaaattacttgttgctctttgtcccaacattacatcaagtggcattcaatttgctactgctcaattgccccttcttgagctgatggattgtggcatgactgtctctgatcccaactcagataatccgacctttgtagagaatccaagtccacataaaacaccaggctacaatcaaaagatgtttatcaaacataaacggctgaagaaacttagtttgtggggatgctccagtttggacgctttgttcctaaactgcccagagctcatggacttgaacttgaacttatgcagtaatttgcatccggagagtctggtgctacaatgtccaaagttacaacttgtgtacgcatcaggatgtcaaggcctattgaccggagctatccgaaaacaggtttctgaaaacttctcggctggtgagaaccatatgccacggaaacgcttggctgatgcatctaaaaggattcaaacaagggaagatggtatttatgcagggaagagaaggaagttggagaaagaaatgtgtaccattatacattaa

SEQ ID NO: 87090 - protein, 585 aa, Arabidopsis thaliana
  peptide (1)..(585): Ceres Seq. ID no. 12697209
  misc_feature (379)..(410): Pfam Name: Leucine Rich Repeat Pfam Description: Leucine Rich Repeat
  misc_feature (1)..(585): Homolog of NCBI NO: 18087570 NR Description: AT3g54650/T5N23_10 [Arabidopsis thaliana]
  misc_feature (1)..(538): Homolog of NCBI NO: 18410106 NR Description: F-box protein family, AtFBL17; protein id:
MQPQPHISPNTATAAISAALESQRSRKNRGSYNCGRCGQPKKGHVCLLTAPPDIPTTPIASEPVSCISAAASSSRSTVLSLTAAPSSRQTFTHLRRALSFDDVDARNSLDESDLDAASMDLDLQLDTDIVQPGRFHAVGLWEVLKRLPPSSLLMAARVCKGWRETSRKMWKAAEELRIRVPERAQIGYIGSLLQKCPRLIRLSLKIESDFDATTLACIAFSCPNLEVLEITTSGAAVNRISGDELSRFVANKRGLTSLKMEGCSNLGGFSLSSSSLSTLWLSDLHSLSKMIFNCPNLTEISLEFSRQEDDSTDLVTMVDGLGRTCTRLQNIHIASLKLSHTVVLSLTAVNFRYLRMLSLVLGINITDASVAAISSGYKNLELLDLSGSSITDTGLGMICDVLPDTLSKLLVALCPNITSSGIQFATAQLPLLELMDCGMTVSDPNSDNPTFVENPSPHKTPGYNQKMFIKHKRLKKLSLWGCSSLDALFLNCPELMDLNLNLCSNLHPESLVLQCPKLQLVYASGCQGLLTGAIRKQVSENFSAGENHMPRKRLADASKRIQTREDGIYAGKRRKLEKEMCTIIH

SEQ ID NO: 87091 - protein, 467 aa, Arabidopsis thaliana
  peptide (1)..(467): Ceres Seq. ID no. 12697210
  misc_feature (261)..(292): Pfam Name: Leucine Rich Repeat Pfam Description: Leucine Rich Repeat
  misc_feature (1)..(467): Homolog of NCBI NO: 18087570 NR Description: AT3g54650/T5N23_10 [Arabidopsis thaliana]
  misc_feature (1)..(420): Homolog of NCBI NO: 18410106 NR Description: F-box protein family, AtFBL17; protein id:
MDLDLQLDTDIVQPGRFHAVGLWEVLKRLPPSSLLMAARVCKGWRETSRKMWKAAEELRIRVPERAQIGYIGSLLQKCPRLIRLSLKIESDFDATTLACIAFSCPNLEVLEITTSGAAVNRISGDELSRFVANKRGLTSLKMEGCSNLGGFSLSSSSLSTLWLSDLHSLSKMIFNCPNLTEISLEFSRQEDDSTDLVTMVDGLGRTCTRLQNIHIASLKLSHTVVLSLTAVNFRYLRMLSLVLGINITDASVAAISSGYKNLELLDLSGSSITDTGLGMICDVLPDTLSKLLVALCPNITSSGIQFATAQLPLLELMDCGMTVSDPNSDNPTFVENPSPHKTPGYNQKMFIKHKRLKKLSLWGCSSLDALFLNCPELMDLNLNLCSNLHPESLVLQCPKLQLVYASGCQGLLTGAIRKQVSENFSAGENHMPRKRLADASKRIQTREDGIYAGKRRKLEKEMCTIIH

SEQ ID NO: 87092 - protein, 432 aa, Arabidopsis thaliana
  peptide (1)..(432): Ceres Seq. ID no. 12697211
  misc_feature (226)..(257): Pfam Name: Leucine Rich Repeat Pfam Description: Leucine Rich Repeat
  misc_feature (1)..(432): Homolog of NCBI NO: 18087570 NR Description: AT3g54650/T5N23_10 [Arabidopsis thaliana]
  misc_feature (1)..(385): Homolog of NCBI NO: 18410106 NR Description: F-box protein family, AtFBL17; protein id:
MAARVCKGWRETSRKMWKAAEELRIRVPERAQIGYIGSLLQKCPRLIRLSLKIESDFDATTLACIAFSCPNLEVLEITTSGAAVNRISGDELSRFVANKRGLTSLKMEGCSNLGGFSLSSSSLSTLWLSDLHSLSKMIFNCPNLTEISLEFSRQEDDSTDLVTMVDGLGRTCTRLQNIHIASLKLSHTVVLSLTAVNFRYLRMLSLVLGINITDASVAAISSGYKNLELLDLSGSSITDTGLGMICDVLPDTLSKLLVALCPNITSSGIQFATAQLPLLELMDCGMTVSDPNSDNPTFVENPSPHKTPGYNQKMFIKHKRLKKLSLWGCSSLDALFLNCPELMDLNLNLCSNLHPESLVLQCPKLQLVYASGCQGLLTGAIRKQVSENFSAGENHMPRKRLADASKRIQTREDGIYAGKRRKLEKEMCTIIH

SEQ ID NO: 87093 - DNA, 1107 bp, Arabidopsis thaliana
  misc_feature (1)..(1107): Ceres Seq. ID no. 12697266
  misc_feature: MA Experiment ID: 20000184 Result: Up-regulated in Transcription
  misc_feature: MA Experiment 20000184 PARAMETER Experiment Name: At_Shoots__P Parameter: Age (day) Value: 7
  misc_feature: MA Experiment 20000184 PARAMETER Experiment Name: At_Shoots__P Parameter: Tissue Value: Shoots vs. Whole Plant
  misc_feature: MA Experiment ID: 20000234 Result: Down-regulated in Transcription
  misc_feature: MA Experiment 20000234 PARAMETER Experiment Name: At_Siliques_P Parameter: Age (day) Value: 21
  misc_feature: MA Experiment 20000234 PARAMETER Experiment Name: At_Siliques_P Parameter: Organism Value: A. thaliana
  misc_feature: MA Experiment 20000234 PARAMETER Experiment Name: At_Siliques_P Parameter: Plant Line Value: WS
  misc_feature: MA Experiment 20000234 PARAMETER Experiment Name: At_Siliques_P Parameter: Tissue Value: Less Than 5mm Siliques vs. Whole Plant
  misc_feature: MA Experiment ID: 20000235 Result: Down-regulated in Transcription
  misc_feature: MA Experiment 20000235 PARAMETER Experiment Name: At_Siliques_P Parameter: Age (day) Value: 21
  misc_feature: MA Experiment 20000235 PARAMETER Experiment Name: At_Siliques_P Parameter: Organism Value: A. thaliana
  misc_feature: MA Experiment 20000235 PARAMETER Experiment Name: At_Siliques_P Parameter: Plant Line Value: WS
  misc_feature: MA Experiment 20000235 PARAMETER Experiment Name: At_Siliques_P Parameter: Tissue Value: 5-10mm Siliques vs. Whole Plant
  misc_feature: MA Experiment ID: 20000264 Result: Down-regulated in Transcription
  misc_feature: MA Experiment 20000264 PARAMETER Experiment Name: At_Open_Flower_P Parameter: Age (day) Value: 21
  misc_feature: MA Experiment 20000264 PARAMETER Experiment Name: At_Open_Flower_P Parameter: Plant Line Value: WS
  misc_feature: MA Experiment 20000264 PARAMETER Experiment Name: At_Open_Flower_P Parameter: Tissue Value: Open Flower vs. Whole Plant
  misc_feature: MA Experiment ID: 20000265 Result: Down-regulated in Transcription
  misc_feature: MA Experiment 20000265 PARAMETER Experiment Name: At_Open_Flower_P Parameter: Age (day) Value: 21
  misc_feature: MA Experiment 20000265 PARAMETER Experiment Name: At_Open_Flower_P Parameter: Plant Line Value: WS
  misc_feature: MA Experiment 20000265 PARAMETER Experiment Name: At_Open_Flower_P Parameter: Tissue Value: Closed Flower vs. Whole Plant
  misc_feature: MA Experiment ID: 20000437 Result: Up-regulated in Transcription
  misc_feature: MA Experiment 20000437 PARAMETER Experiment Name: At_Drought_P Parameter: Age (day) Value: 8
  misc_feature: MA Experiment 20000437 PARAMETER Experiment Name: At_Drought_P Parameter: Organism Value: A. thaliana
  misc_feature: MA Experiment 20000437 PARAMETER Experiment Name: At_Drought_P Parameter: Plant Line Value: WS
  misc_feature: MA Experiment 20000437 PARAMETER Experiment Name: At_Drought_P Parameter: Timepoint (hr) Value: 24
  misc_feature: MA Experiment 20000437 PARAMETER Experiment Name: At_Drought_P Parameter: Tissue Value: Whole Plant
  misc_feature: MA Experiment 20000437 PARAMETER Experiment Name: At_Drought_P Parameter: Treatment Value: Drought vs. No Drought
  misc_feature: MA Experiment ID: 20001248 Result: Down-regulated in Transcription
  misc_feature: MA Experiment 20001248 PARAMETER Experiment Name: At_Far-red-induction_P Parameter: Age (day) Value: 7
  misc_feature: MA Experiment 20001248 PARAMETER Experiment Name: At_Far-red-induction_P Parameter: Light Value: Far-red vs. White
  misc_feature: MA Experiment 20001248 PARAMETER Experiment Name: At_Far-red-induction_P Parameter: Organism Value: A. thaliana
  misc_feature: MA Experiment 20001248 PARAMETER Experiment Name: At_Far-red-induction_P Parameter: Plant Line Value: Columbia
  misc_feature: MA Experiment 20001248 PARAMETER Experiment Name: At_Far-red-induction_P Parameter: Timepoint (hr) Value: 4
  misc_feature: MA Experiment 20001248 PARAMETER Experiment Name: At_Far-red-induction_P Parameter: Tissue Value: Whole Plant
  misc_feature: MA Experiment ID: 20001451 Result: Up-regulated in Transcription
  misc_feature: MA Experiment 20001451 PARAMETER Experiment Name: At_Far-red-induction_P Parameter: Age (day) Value: 7
  misc_feature: MA Experiment 20001451 PARAMETER Experiment Name: At_Far-red-induction_P Parameter: Light Value: Far-red vs. White
  misc_feature: MA Experiment 20001451 PARAMETER Experiment Name: At_Far-red-induction_P Parameter: Organism Value: A. thaliana
  misc_feature: MA Experiment 20001451 PARAMETER Experiment Name: At_Far-red-induction_P Parameter: Plant Line Value: Columbia
  misc_feature: MA Experiment 20001451 PARAMETER Experiment Name: At_Far-red-induction_P Parameter: Timepoint (hr) Value: 24
  misc_feature: MA Experiment 20001451 PARAMETER Experiment Name: At_Far-red-induction_P Parameter: Tissue Value: Whole Plant
  misc_feature: MA Experiment ID: 20001906 Result: Up-regulated in Transcription
  misc_feature: MA Experiment 20001906 PARAMETER Experiment Name: At_Drought_Reproduction_P Parameter: Age (day) Value: 35
  misc_feature: MA Experiment 20001906 PARAMETER Experiment Name: At_Drought_Reproduction_P Parameter: Organism Value: A. thaliana
  misc_feature: MA Experiment 20001906 PARAMETER Experiment Name: At_Drought_Reproduction_P Parameter: Plant Line Value: WS
  misc_feature: MA Experiment 20001906 PARAMETER Experiment Name: At_Drought_Reproduction_P Parameter: Timepoint (day) Value: 5
  misc_feature: MA Experiment 20001906 PARAMETER Experiment Name: At_Drought_Reproduction_P Parameter: Tissue Value: Siliques
  misc_feature: MA Experiment 20001906 PARAMETER Experiment Name: At_Drought_Reproduction_P Parameter: Treatment Value: Drought vs. No Drought
atggtggctaaagccttagcacagctgataacatgcatcatcttattctgccacgttgtagcttccgtagaagacctcaccatacgccaagtcacggccgacaatcggcgaattcgcccgaatcttctcgggactcacacagagagtaaattccggcttttcatgtccgattacggcaagaactactccacgagggaggagtacatccaccgcctcggaatatttgccaaaaacgtccttaaggccgcagagcaccagatgatggacccctccgccgtccacggagtcacacagttctctgacctcacggaagaggagttcaagcggatgtacactggagtagccgatgttggcggcagccgtggcggtacggttggagcggaggcacctatggttgaggttgatggattgcctgaagattttgactggagggagaagggtggagttactgaggttaagaatcaaggtgcatgtggatcgtgctgggcttttagcacaacgggagcagctgaaggagcccatttcgtctccaccgggaagctcctcagtcttagcgaacaacaacttgtcgattgtgatcaagcggtcttcgatccaaaggacaagaaagcatgcgacaatggatgtggcgggggactgatgacaaatgcctacgagtatttgatggaggcaggaggattagaagaagaaagatcatatccttacactggtaaacgaggccattgcaagtttgatcctgagaaggttgcggtaagagtactgaacttcacgactataccactggatgagaaccaaatcgcagcaaacttagttcggcatggtcccttagcagtgggattaaacgccgtgttcatgcaaacatatataggaggagtgtcatgtccgcttatatgcagcaagcgaaacgttaaccacggagtacttcttgttgggtacggatcaaaagggttttcgatcttgcggcttagtaataaaccttattggattatcaaaaactcgtgggggaaaaagtggggagagaatggatactacaagctgtgtcgtgggcacgatatatgtgggattaactcgatggtatctgcagtagccacccaagtttcctcgtag

SEQ ID NO: 87094 - protein, 368 aa, Arabidopsis thaliana
  peptide (1)..(368): Ceres Seq. ID no. 12697267
  misc_feature (137)..(363): Pfam Name: Papain family cysteine protease Pfam Description: Papain family cysteine protease
  misc_feature (1)..(368): Homolog of NCBI NO: 17979125 NR Description: putative cysteine proteinase [Arabidopsis
  misc_feature (1)..(368): Homolog of NCBI NO: 7435812 NR Description: cysteine proteinase (EC 3.4.22.-) F28P10.80 -
MVAKALAQLITCIILFCHVVASVEDLTIRQVTADNRRIRPNLLGTHTESKFRLFMSDYGKNYSTREEYIHRLGIFAKNVLKAAEHQMMDPSAVHGVTQFSDLTEEEFKRMYTGVADVGGSRGGTVGAEAPMVEVDGLPEDFDWREKGGVTEVKNQGACGSCWAFSTTGAAEGAHFVSTGKLLSLSEQQLVDCDQAVFDPKDKKACDNGCGGGLMTNAYEYLMEAGGLEEERSYPYTGKRGHCKFDPEKVAVRVLNFTTIPLDENQIAANLVRHGPLAVGLNAVFMQTYIGGVSCPLICSKRNVNHGVLLVGYGSKGFSILRLSNKPYWIIKNSWGKKWGENGYYKLCRGHDICGINSMVSAVATQVSS

SEQ ID NO: 87095 - protein, 314 aa, Arabidopsis thaliana
  peptide (1)..(314): Ceres Seq. ID no. 12697268
  misc_feature (83)..(309): Pfam Name: Papain family cysteine protease Pfam Description: Papain family cysteine protease
  misc_feature (1)..(314): Homolog of NCBI NO: 17979125 NR Description: putative cysteine proteinase [Arabidopsis
  misc_feature (1)..(314): Homolog of NCBI NO: 7435812 NR Description: cysteine proteinase (EC 3.4.22.-) F28P10.80 -
MSDYGKNYSTREEYIHRLGIFAKNVLKAAEHQMMDPSAVHGVTQFSDLTEEEFKRMYTGVADVGGSRGGTVGAEAPMVEVDGLPEDFDWREKGGVTEVKNQGACGSCWAFSTTGAAEGAHFVSTGKLLSLSEQQLVDCDQAVFDPKDKKACDNGCGGGLMTNAYEYLMEAGGLEEERSYPYTGKRGHCKFDPEKVAVRVLNFTTIPLDENQIAANLVRHGPLAVGLNAVFMQTYIGGVSCPLICSKRNVNHGVLLVGYGSKGFSILRLSNKPYWIIKNSWGKKWGENGYYKLCRGHDICGINSMVSAVATQVSS

SEQ ID NO: 87096 - protein, 282 aa, Arabidopsis thaliana
  peptide (1)..(282): Ceres Seq. ID no. 12697269
  misc_feature (51)..(277): Pfam Name: Papain family cysteine protease Pfam Description: Papain family cysteine protease
  misc_feature (1)..(282): Homolog of NCBI NO: 17979125 NR Description: putative cysteine proteinase [Arabidopsis
  misc_feature (1)..(282): Homolog of NCBI NO: 7435812 NR Description: cysteine proteinase (EC 3.4.22.-) F28P10.80 -
MMDPSAVHGVTQFSDLTEEEFKRMYTGVADVGGSRGGTVGAEAPMVEVDGLPEDFDWREKGGVTEVKNQGACGSCWAFSTTGAAEGAHFVSTGKLLSLSEQQLVDCDQAVFDPKDKKACDNGCGGGLMTNAYEYLMEAGGLEEERSYPYTGKRGHCKFDPEKVAVRVLNFTTIPLDENQIAANLVRHGPLAVGLNAVFMQTYIGGVSCPLICSKRNVNHGVLLVGYGSKGFSILRLSNKPYWIIKNSWGKKWGENGYYKLCRGHDICGINSMVSAVATQVSS

SEQ ID NO: 87097 - DNA, 1788 bp, Arabidopsis thaliana
  misc_feature (1)..(1788): Ceres Seq. ID no. 12697302
  misc_feature: MA Experiment ID: 20000185 Result: Up-regulated in Transcription
  misc_feature: MA Experiment 20000185 PARAMETER Experiment Name: At_Roots__P Parameter: Age (day) Value: 7 vs. 21
  misc_feature: MA Experiment 20000185 PARAMETER Experiment Name: At_Roots__P Parameter: Organism Value: A. thaliana
  misc_feature: MA Experiment 20000185 PARAMETER Experiment Name: At_Roots__P Parameter: Tissue Value: Roots vs. Whole Plant
  misc_feature: MA Experiment ID: 20000437 Result: Down-regulated in Transcription
  misc_feature: MA Experiment 20000437 PARAMETER Experiment Name: At_Drought_P Parameter: Age (day) Value: 8
  misc_feature: MA Experiment 20000437 PARAMETER Experiment Name: At_Drought_P Parameter: Organism Value: A. thaliana
  misc_feature: MA Experiment 20000437 PARAMETER Experiment Name: At_Drought_P Parameter: Plant Line Value: WS
  misc_feature: MA Experiment 20000437 PARAMETER Experiment Name: At_Drought_P Parameter: Timepoint (hr) Value: 24
  misc_feature: MA Experiment 20000437 PARAMETER Experiment Name: At_Drought_P Parameter: Tissue Value: Whole Plant
  misc_feature: MA Experiment 20000437 PARAMETER Experiment Name: At_Drought_P Parameter: Treatment Value: Drought vs. No Drought
  misc_feature: MA Experiment ID: 20000439 Result: Up-regulated in Transcription
  misc_feature: MA Experiment 20000439 PARAMETER Experiment Name: At_Roots__P Parameter: Age (day) Value: 14 vs. 21
  misc_feature: MA Experiment 20000439 PARAMETER Experiment Name: At_Roots__P Parameter: Organism Value: A. thaliana
  misc_feature: MA Experiment 20000439 PARAMETER Experiment Name: At_Roots__P Parameter: Tissue Value: Roots vs. Whole Plant
atggaggaaaccgtggagacagcggactccgtcatcagaaaatgggacccgaacacgccttccttcaccaagattgtctctctgttcaaccatagcaggaaggaggctaaagagttcatcagatgtgtccgtgatttgcgcagagcgatgcactttcttgtctctcaagactctcaatctccaaagcttgctctagctcagaccctgatgcagatcgccatggcaaggctcgaaaaagagttcttccagatattatcttcaaacagagacaagcttgatcctgaatcagtttccggtcaatcctcaatctccagcaattctgaatttgaagatgttatgggatctgacgacgacgatgaaagtgacaatgagatgaggaaagctggcgaatcgatcactcaggttgagaaagcttcagctatggtgatgtctgaccttaaggcgatagcagagagtatgataagttgcggatatggtaaggagtgcgtaaagatttataagcgggtcagaaaatctattgtagatgaagggctgagcttgctcgggattgaaatctacaaaggctccagatttcacagaacggactgggtcacgctcgagcatatgatcaagaactggataaaagctgcaaagattggcattgccacgctcttccgtggagagaaacttctttgtgatcatgtcttttctgcttccaattcaacaagggagtcatgcttctacgagattgcaaacgaagcagccactaaccttttcaagttccctgaatttgttgccaaggagaagaaatcgcacgagaggatcttcccgctaatggatctgcaggctgcaatctctgatctctggcaagacatagagatgatattccactttgatgcagtagctggtgtgaaatctcaggcgctcacatcgctgcaaaaactaaaggtctcaatccacagtgctctcacggattttgaatcaatcattcagaaagatacgacgaaagctctaacacctggaggagggattcataaactgacacgatcaacaatgaacttcatctcttccctttctaagtacagcggagtcttgtcggaaatcctagcagaccatccactcccgagaaacactcgcctgctggaatcctatgtcagagctccaatttcggaagatgaacaacacaatcacgcactctctgtccattttgcttggctaatcctggttttgctatgcaaactagacaccaaagcagagcattacaaggatgtttctttgtcttaccttttccttgcaaacaaccttcagatcatcattgaaacggttggttcaactcccctaaggaatctccttggagatgattggctcaataagcacgaagataaactctgcgcttatgctgggaattatgagatagcagcatggtccaatgttttcatgtctttaccagaagaacccacagacctatcaccagaggaagctaaaatatatttcagaagatttcacacggcatttgaggaagcatatatgaaacaatcatcacgagttgtaccaaatgcgaaacttagggacgaactaaaggtttcaatagcaaagaaacttgtaccagaatacagagagttttacaggaagtacttaccaatgctcggccaggagagaaacattgagatcttggtgagattcaagccagataatttggagaattacatctctgatcttttccacggtacaccaattcatgcatcctcttctttttcttcatcttcttcctcttcatcctggaaatcacttgggtgtgtttcaggctga

SEQ ID NO: 87098 - protein, 595 aa, Arabidopsis thaliana
  peptide (1)..(595): Ceres Seq. ID no. 12697303
  misc_feature (1)..(568): Pfam Name: Exo70 exocyst complex subunit Pfam Description: Exo70 exocyst complex subunit
  misc_feature (1)..(595): Homolog of NCBI NO: 11278980 NR Description: hypothetical protein T26I12.30 - Arabidopsis >gi|7019648|emb|CAB75749.1| putative protein [Arabidopsis
  misc_feature (1)..(595): Homolog of NCBI NO: 22331801 NR Description: putative protein; protein id: At3g55150.1, by cDNA: gi_18377617, supported by cDNA: gi_20465378 [Arabidopsis >gi|18377618|gb|AAL66959.1| unknown protein [Arabidopsis
  misc_feature (1)..(593): Homolog of NCBI NO: 15225082 NR Description: hypothetical protein; protein id: At2g39380.1
  misc_feature (5)..(590): Homolog of NCBI NO: 15232697 NR Description: hypothetical protein; protein id: At3g09520.1 thaliana] >gi|6682261|gb|AAF23313.1|AC016661_38 hypothetical
  misc_feature (1)..(594): Homolog of NCBI NO: 23397263 NR Description: unknown protein [Arabidopsis thaliana]
  misc_feature (1)..(594): Homolog of NCBI NO: 15238510 NR Description: putative protein; protein id: At5g59730.1, by cDNA: gi_13430533, supported by cDNA: gi_14334437, supported cDNA: gi_15010739, supported by cDNA: gi_16974428, supported by
  misc_feature (1)..(572): Homolog of NCBI NO: 15232699 NR Description: hypothetical protein; protein id: At3g09530.1 thaliana] >gi|6682232|gb|AAF23284.1|AC016661_9 hypothetical
  misc_feature (1)..(528): Homolog of NCBI NO: 23397289 NR Description: unknown protein [Arabidopsis thaliana]
  misc_feature (3)..(586): Homolog of NCBI NO: 25308573 NR Description: hypothetical protein [imported] - Arabidopsis >gi|8439895|gb|AAF75081.1|AC007583_17 It contains a interferon domain PF|00143. EST gb|N96176 comes from this gene. [Arabidopsis
  misc_feature (133)..(590): Homolog of NCBI NO: 15226917 NR Description: unknown protein; protein id: At2g28640.1
MEETVETADSVIRKWDPNTPSFTKIVSLFNHSRKEAKEFIRCVRDLRRAMHFLVSQDSQSPKLALAQTLMQIAMARLEKEFFQILSSNRDKLDPESVSGQSSISSNSEFEDVMGSDDDDESDNEMRKAGESITQVEKASAMVMSDLKAIAESMISCGYGKECVKIYKRVRKSIVDEGLSLLGIEIYKGSRFHRTDWVTLEHMIKNWIKAAKIGIATLFRGEKLLCDHVFSASNSTRESCFYEIANEAATNLFKFPEFVAKEKKSHERIFPLMDLQAAISDLWQDIEMIFHFDAVAGVKSQALTSLQKLKVSIHSALTDFESIIQKDTTKALTPGGGIHKLTRSTMNFISSLSKYSGVLSEILADHPLPRNTRLLESYVRAPISEDEQHNHALSVHFAWLILVLLCKLDTKAEHYKDVSLSYLFLANNLQIIIETVGSTPLRNLLGDDWLNKHEDKLCAYAGNYEIAAWSNVFMSLPEEPTDLSPEEAKIYFRRFHTAFEEAYMKQSSRVVPNAKLRDELKVSIAKKLVPEYREFYRKYLPMLGQERNIEILVRFKPDNLENYISDLFHGTPIHASSSFSSSSSSSSWKSLGCVSG

SEQ ID NO: 87099 - protein, 546 aa, Arabidopsis thaliana
  peptide (1)..(546): Ceres Seq. ID no. 12697304
  misc_feature (1)..(519): Pfam Name: Exo70 exocyst complex subunit Pfam Description: Exo70 exocyst complex subunit
  misc_feature (1)..(546): Homolog of NCBI NO: 11278980 NR Description: hypothetical protein T26I12.30 - Arabidopsis >gi|7019648|emb|CAB75749.1| putative protein [Arabidopsis
  misc_feature (1)..(546): Homolog of NCBI NO: 22331801 NR Description: putative protein; protein id: At3g55150.1, by cDNA: gi_18377617, supported by cDNA: gi_20465378 [Arabidopsis >gi|18377618|gb|AAL66959.1| unknown protein [Arabidopsis
  misc_feature (1)..(544): Homolog of NCBI NO: 15225082 NR Description: hypothetical protein; protein id: At2g39380.1
  misc_feature (1)..(541): Homolog of NCBI NO: 15232697 NR Description: hypothetical protein; protein id: At3g09520.1 thaliana] >gi|6682261|gb|AAF23313.1|AC016661_38 hypothetical
  misc_feature (1)..(545): Homolog of NCBI NO: 23397263 NR Description: unknown protein [Arabidopsis thaliana]
  misc_feature (1)..(545): Homolog of NCBI NO: 15238510 NR Description: putative protein; protein id: At5g59730.1, by cDNA: gi_13430533, supported by cDNA: gi_14334437, supported cDNA: gi_15010739, supported by cDNA: gi_16974428, supported by
  misc_feature (1)..(523): Homolog of NCBI NO: 15232699 NR Description: hypothetical protein; protein id: At3g09530.1 thaliana] >gi|6682232|gb|AAF23284.1|AC016661_9 hypothetical
  misc_feature (1)..(479): Homolog of NCBI NO: 23397289 NR Description: unknown protein [Arabidopsis thaliana]
  misc_feature (1)..(537): Homolog of NCBI NO: 25308573 NR Description: hypothetical protein [imported] - Arabidopsis >gi|8439895|gb|AAF75081.1|AC007583_17 It contains a interferon domain PF|00143. EST gb|N96176 comes from this gene. [Arabidopsis
  misc_feature (84)..(541): Homolog of NCBI NO: 15226917 NR Description: unknown protein; protein id: At2g28640.1
MHFLVSQDSQSPKLALAQTLMQIAMARLEKEFFQILSSNRDKLDPESVSGQSSISSNSEFEDVMGSDDDDESDNEMRKAGESITQVEKASAMVMSDLKAIAESMISCGYGKECVKIYKRVRKSIVDEGLSLLGIEIYKGSRFHRTDWVTLEHMIKNWIKAAKIGIATLFRGEKLLCDHVFSASNSTRESCFYEIANEAATNLFKFPEFVAKEKKSHERIFPLMDLQAAISDLWQDIEMIFHFDAVAGVKSQALTSLQKLKVSIHSALTDFESIIQKDTTKALTPGGGIHKLTRSTMNFISSLSKYSGVLSEILADHPLPRNTRLLESYVRAPISEDEQHNHALSVHFAWLILVLLCKLDTKAEHYKDVSLSYLFLANNLQIIIETVGSTPLRNLLGDDWLNKHEDKLCAYAGNYEIAAWSNVFMSLPEEPTDLSPEEAKIYFRRFHTAFEEAYMKQSSRVVPNAKLRDELKVSIAKKLVPEYREFYRKYLPMLGQERNIEILVRFKPDNLENYISDLFHGTPIHASSSFSSSSSSSSWKSLGCVSG

SEQ ID NO: 87100 - protein, 526 aa, Arabidopsis thaliana
  peptide (1)..(526): Ceres Seq. ID no. 12697305
  misc_feature (1)..(499): Pfam Name: Exo70 exocyst complex subunit Pfam Description: Exo70 exocyst complex subunit
  misc_feature (1)..(526): Homolog of NCBI NO: 11278980 NR Description: hypothetical protein T26I12.30 - Arabidopsis >gi|7019648|emb|CAB75749.1| putative protein [Arabidopsis
  misc_feature (1)..(526): Homolog of NCBI NO: 22331801 NR Description: putative protein; protein id: At3g55150.1, by cDNA: gi_18377617, supported by cDNA: gi_20465378 [Arabidopsis >gi|18377618|gb|AAL66959.1| unknown protein [Arabidopsis
  misc_feature (1)..(524): Homolog of NCBI NO: 15225082 NR Description: hypothetical protein; protein id: At2g39380.1
  misc_feature (1)..(521): Homolog of NCBI NO: 15232697 NR Description: hypothetical protein; protein id: At3g09520.1 thaliana] >gi|6682261|gb|AAF23313.1|AC016661_38 hypothetical
  misc_feature (1)..(525): Homolog of NCBI NO: 23397263 NR Description: unknown protein [Arabidopsis thaliana]
  misc_feature (1)..(525): Homolog of NCBI NO: 15238510 NR Description: putative protein; protein id: At5g59730.1, by cDNA: gi_13430533, supported by cDNA: gi_14334437, supported cDNA: gi_15010739, supported by cDNA: gi_16974428, supported by
  misc_feature (1)..(503): Homolog of NCBI NO: 15232699 NR Description: hypothetical protein; protein id: At3g09530.1 thaliana] >gi|6682232|gb|AAF23284.1|AC016661_9 hypothetical
  misc_feature (1)..(459): Homolog of NCBI NO: 23397289 NR Description: unknown protein [Arabidopsis thaliana]
  misc_feature (1)..(517): Homolog of NCBI NO: 25308573 NR Description: hypothetical protein [imported] - Arabidopsis >gi|8439895|gb|AAF75081.1|AC007583_17 It contains a interferon domain PF|00143. EST gb|N96176 comes from this gene. [Arabidopsis
  misc_feature (64)..(521): Homolog of NCBI NO: 15226917 NR Description: unknown protein; protein id: At2g28640.1
MQIAMARLEKEFFQILSSNRDKLDPESVSGQSSISSNSEFEDVMGSDDDDESDNEMRKAGESITQVEKASAMVMSDLKAIAESMISCGYGKECVKIYKRVRKSIVDEGLSLLGIEIYKGSRFHRTDWVTLEHMIKNWIKAAKIGIATLFRGEKLLCDHVFSASNSTRESCFYEIANEAATNLFKFPEFVAKEKKSHERIFPLMDLQAAISDLWQDIEMIFHFDAVAGVKSQALTSLQKLKVSIHSALTDFESIIQKDTTKALTPGGGIHKLTRSTMNFISSLSKYSGVLSEILADHPLPRNTRLLESYVRAPISEDEQHNHALSVHFAWLILVLLCKLDTKAEHYKDVSLSYLFLANNLQIIIETVGSTPLRNLLGDDWLNKHEDKLCAYAGNYEIAAWSNVFMSLPEEPTDLSPEEAKIYFRRFHTAFEEAYMKQSSRVVPNAKLRDELKVSIAKKLVPEYREFYRKYLPMLGQERNIEILVRFKPDNLENYISDLFHGTPIHASSSFSSSSSSSSWKSLGCVSG

SEQ ID NO: 87101 - DNA, 933 bp, Arabidopsis thaliana
  misc_feature (1)..(933): Ceres Seq. ID no. 12697331
  misc_feature: MA Experiment ID: 108461 Result: Up-regulated in Transcription
  misc_feature: MA Experiment 108461 PARAMETER Experiment Name: At_Germinating_Seeds_cDNA_P Parameter: Age (day) Value: 1 vs. 0
  misc_feature: MA Experiment 108461 PARAMETER Experiment Name: At_Germinating_Seeds_cDNA_P Parameter: Tissue Value: Germinating Seeds
  misc_feature: MA Experiment ID: 108462 Result: Up-regulated in Transcription
  misc_feature: MA Experiment 108462 PARAMETER Experiment Name: At_Germinating_Seeds_cDNA_P Parameter: Age (day) Value: 2 vs. 0
  misc_feature: MA Experiment 108462 PARAMETER Experiment Name: At_Germinating_Seeds_cDNA_P Parameter: Tissue Value: Germinating Seeds
  misc_feature: MA Experiment ID: 108463 Result: Up-regulated in Transcription
  misc_feature: MA Experiment 108463 PARAMETER Experiment Name: At_Germinating_Seeds_cDNA_P Parameter: Age (day) Value: 3 vs. 0
  misc_feature: MA Experiment 108463 PARAMETER Experiment Name: At_Germinating_Seeds_cDNA_P Parameter: Tissue Value: Germinating Seeds
  misc_feature: MA Experiment ID: 108464 Result: Up-regulated in Transcription
  misc_feature: MA Experiment 108464 PARAMETER Experiment Name: At_Germinating_Seeds_cDNA_P Parameter: Age (day) Value: 4 vs. 0
  misc_feature: MA Experiment 108464 PARAMETER Experiment Name: At_Germinating_Seeds_cDNA_P Parameter: Tissue Value: Germinating Seeds
  misc_feature: MA Experiment ID: 108569 Result: Up-regulated in Transcription
  misc_feature: MA Experiment 108569 PARAMETER Experiment Name: At_0.001%_MeJA__cDNA_P Parameter: Timepoint (hr) Value: 6
  misc_feature: MA Experiment 108569 PARAMETER Experiment Name: At_0.001%_MeJA__cDNA_P Parameter: Tissue Value: Aerial
  misc_feature: MA Experiment 108569 PARAMETER Experiment Name: At_0.001%_MeJA__cDNA_P Parameter: Treatment Value: 0.001% MeJA vs. No Treatment
  misc_feature: MA Experiment ID: 108572 Result: Up-regulated in Transcription
  misc_feature: MA Experiment 108572 PARAMETER Experiment Name: At_Drought_cDNA_P Parameter: Timepoint (hr) Value: 1
  misc_feature: MA Experiment 108572 PARAMETER Experiment Name: At_Drought_cDNA_P Parameter: Tissue Value: Aerial
  misc_feature: MA Experiment 108572 PARAMETER Experiment Name: At_Drought_cDNA_P Parameter: Treatment Value: Drought vs. No Drought
  misc_feature: MA Experiment ID: 108605 Result: Up-regulated in Transcription
  misc_feature: MA Experiment 108605 PARAMETER Experiment Name: At_100uM_ABA_cDNA_P Parameter: Timepoint (hr) Value: 6
  misc_feature: MA Experiment 108605 PARAMETER Experiment Name: At_100uM_ABA_cDNA_P Parameter: Tissue Value: Aerial
  misc_feature: MA Experiment 108605 PARAMETER Experiment Name: At_100uM_ABA_cDNA_P Parameter: Treatment Value: 100uM ABA vs. No Treatment
  misc_feature: MA Experiment ID: 108607 Result: Up-regulated in Transcription
  misc_feature: MA Experiment 108607 PARAMETER Experiment Name: At_100uM_ABA_cDNA_P Parameter: Timepoint (hr) Value: 4
  misc_feature: MA Experiment 108607 PARAMETER Experiment Name: At_100uM_ABA_cDNA_P Parameter: Tissue Value: Aerial
  misc_feature: MA Experiment 108607 PARAMETER Experiment Name: At_100uM_ABA_cDNA_P Parameter: Treatment Value: 100uM ABA vs. No Treatment
  misc_feature: MA Experiment ID: 108609 Result: Up-regulated in Transcription
  misc_feature: MA Experiment 108609 PARAMETER Experiment Name: At_100uM_ABA_cDNA_P Parameter: Timepoint (hr) Value: 24
  misc_feature: MA Experiment 108609 PARAMETER Experiment Name: At_100uM_ABA_cDNA_P Parameter: Tissue Value: Aerial
  misc_feature: MA Experiment 108609 PARAMETER Experiment Name: At_100uM_ABA_cDNA_P Parameter: Treatment Value: 100uM ABA vs. No Treatment
  misc_feature: MA Experiment ID: 20000069 Result: Up-regulated in Transcription
  misc_feature: MA Experiment 20000069 PARAMETER Experiment Name: At_100uM_ABA_Mutants_cDNA_P Parameter: Plant Line Value: CS23
  misc_feature: MA Experiment 20000069 PARAMETER Experiment Name: At_100uM_ABA_Mutants_cDNA_P Parameter: Timepoint (hr) Value: 6
  misc_feature: MA Experiment 20000069 PARAMETER Experiment Name: At_100uM_ABA_Mutants_cDNA_P Parameter: Tissue Value: Aerial
  misc_feature: MA Experiment 20000069 PARAMETER Experiment Name: At_100uM_ABA_Mutants_cDNA_P Parameter: Treatment Value: 100uM ABA vs. No Treatment
  misc_feature: MA Experiment ID: 20000070 Result: Up-regulated in Transcription
  misc_feature: MA Experiment 20000070 PARAMETER Experiment Name: At_100uM_ABA_Mutants_cDNA_P Parameter: Plant Line Value: CS24
  misc_feature: MA Experiment 20000070 PARAMETER Experiment Name: At_100uM_ABA_Mutants_cDNA_P Parameter: Timepoint (hr) Value: 6
  misc_feature: MA Experiment 20000070 PARAMETER Experiment Name: At_100uM_ABA_Mutants_cDNA_P Parameter: Tissue Value: Aerial
  misc_feature: MA Experiment 20000070 PARAMETER Experiment Name: At_100uM_ABA_Mutants_cDNA_P Parameter: Treatment Value: 100uM ABA vs. No Treatment
  misc_feature: MA Experiment ID: 20000071 Result: Up-regulated in Transcription
  misc_feature: MA Experiment 20000071 PARAMETER Experiment Name: At_100uM_ABA_Mutants_cDNA_P Parameter: Plant Line Value: CS8104
  misc_feature: MA Experiment 20000071 PARAMETER Experiment Name: At_100uM_ABA_Mutants_cDNA_P Parameter: Timepoint (hr) Value: 6
  misc_feature: MA Experiment 20000071 PARAMETER Experiment Name: At_100uM_ABA_Mutants_cDNA_P Parameter: Tissue Value: Aerial
  misc_feature: MA Experiment 20000071 PARAMETER Experiment Name: At_100uM_ABA_Mutants_cDNA_P Parameter: Treatment Value: 100uM ABA vs. No Treatment
  misc_feature: MA Experiment ID: 20000072 Result: Up-regulated in Transcription
  misc_feature: MA Experiment 20000072 PARAMETER Experiment Name: At_100uM_ABA_Mutants_cDNA_P Parameter: Plant Line Value: CS8105
  misc_feature: MA Experiment 20000072 PARAMETER Experiment Name: At_100uM_ABA_Mutants_cDNA_P Parameter: Timepoint (hr) Value: 6
  misc_feature: MA Experiment 20000072 PARAMETER Experiment Name: At_100uM_ABA_Mutants_cDNA_P Parameter: Tissue Value: Aerial
  misc_feature: MA Experiment 20000072 PARAMETER Experiment Name: At_100uM_ABA_Mutants_cDNA_P Parameter: Treatment Value: 100uM ABA vs. No Treatment
  misc_feature: MA Experiment ID: 20000087 Result: Up-regulated in Transcription
  misc_feature: MA Experiment 20000087 PARAMETER Experiment Name: At_100uM_ABA_Mutants_cDNA_P Parameter: Plant Line Value: WS
  misc_feature: MA Experiment 20000087 PARAMETER Experiment Name: At_100uM_ABA_Mutants_cDNA_P Parameter: Timepoint (hr) Value: 6
  misc_feature: MA Experiment 20000087 PARAMETER Experiment Name: At_100uM_ABA_Mutants_cDNA_P Parameter: Tissue Value: Aerial
  misc_feature: MA Experiment 20000087 PARAMETER Experiment Name: At_100uM_ABA_Mutants_cDNA_P Parameter: Treatment Value: 100uM ABA vs. No Treatment
  misc_feature: MA Experiment ID: 20000088 Result: Up-regulated in Transcription
  misc_feature: MA Experiment 20000088 PARAMETER Experiment Name: At_100uM_ABA_Mutants_cDNA_P Parameter: Plant Line Value: Landsberg
  misc_feature: MA Experiment 20000088 PARAMETER Experiment Name: At_100uM_ABA_Mutants_cDNA_P Parameter: Timepoint (hr) Value: 6
  misc_feature: MA Experiment 20000088 PARAMETER Experiment Name: At_100uM_ABA_Mutants_cDNA_P Parameter: Tissue Value: Aerial
  misc_feature: MA Experiment 20000088 PARAMETER Experiment Name: At_100uM_ABA_Mutants_cDNA_P Parameter: Treatment Value: 100uM ABA vs. No Treatment
  misc_feature: MA Experiment ID: 20000227 Result: Down-regulated in Transcription
  misc_feature: MA Experiment 20000227 PARAMETER Experiment Name: At_Root-Tips-vs-Tops_P Parameter: Tissue Value: Root Tips vs. Root Tops
  misc_feature: MA Experiment ID: 20000265 Result: Up-regulated in Transcription
  misc_feature: MA Experiment 20000265 PARAMETER Experiment Name: At_Open_Flower_P Parameter: Age (day) Value: 21
  misc_feature: MA Experiment 20000265 PARAMETER Experiment Name: At_Open_Flower_P Parameter: Plant Line Value: WS
  misc_feature: MA Experiment 20000265 PARAMETER Experiment Name: At_Open_Flower_P Parameter: Tissue Value: Closed Flower vs. Whole Plant
  misc_feature: MA Experiment ID: 20000286 Result: Up-regulated in Transcription
  misc_feature: MA Experiment 20000286 PARAMETER Experiment Name: At_Open_Flower_P Parameter: Age (day) Value: 21
  misc_feature: MA Experiment 20000286 PARAMETER Experiment Name: At_Open_Flower_P Parameter: Plant Line Value: WS
  misc_feature: MA Experiment 20000286 PARAMETER Experiment Name: At_Open_Flower_P Parameter: Tissue Value: Half Open vs. Whole Plant
  misc_feature: MA Experiment ID: 20000794 Result: Up-regulated in Transcription
  misc_feature: MA Experiment 20000794 PARAMETER Experiment Name: At_Petals_P Parameter: Age (day) Value: 23-25 days
  misc_feature: MA Experiment 20000794 PARAMETER Experiment Name: At_Petals_P Parameter: Plant Line Value: WS
  misc_feature: MA Experiment 20000794 PARAMETER Experiment Name: At_Petals_P Parameter: Tissue Value: Petals vs. Whole plant
  misc_feature: MA Experiment ID: 20001554 Result: Up-regulated in Transcription
  misc_feature: MA Experiment 20001554 PARAMETER Experiment Name: At_Drought_Soil_Dry_P Parameter: Age (day) Value: 21
  misc_feature: MA Experiment 20001554 PARAMETER Experiment Name: At_Drought_Soil_Dry_P Parameter: Organism Value: A. thaliana
  misc_feature: MA Experiment 20001554 PARAMETER Experiment Name: At_Drought_Soil_Dry_P Parameter: Plant Line Value: WS
  misc_feature: MA Experiment 20001554 PARAMETER Experiment Name: At_Drought_Soil_Dry_P Parameter: Post Timepoint (hr) Value: None
  misc_feature: MA Experiment 20001554 PARAMETER Experiment Name: At_Drought_Soil_Dry_P Parameter: Post-Treatment Value: None
  misc_feature: MA Experiment 20001554 PARAMETER Experiment Name: At_Drought_Soil_Dry_P Parameter: Timepoint (day) Value: 7
  misc_feature: MA Experiment 20001554 PARAMETER Experiment Name: At_Drought_Soil_Dry_P Parameter: Treatment Value: Drought vs. No Drought
  misc_feature: MA Experiment ID: 20001555 Result: Up-regulated in Transcription
  misc_feature: MA Experiment 20001555 PARAMETER Experiment Name: At_Drought_Soil_Dry_P Parameter: Age (day) Value: 24
  misc_feature: MA Experiment 20001555 PARAMETER Experiment Name: At_Drought_Soil_Dry_P Parameter: Organism Value: A. thaliana
  misc_feature: MA Experiment 20001555 PARAMETER Experiment Name: At_Drought_Soil_Dry_P Parameter: Plant Line Value: WS
  misc_feature: MA Experiment 20001555 PARAMETER Experiment Name: At_Drought_Soil_Dry_P Parameter: Post Timepoint (hr) Value: None
  misc_feature: MA Experiment 20001555 PARAMETER Experiment Name: At_Drought_Soil_Dry_P Parameter: Post-Treatment Value: None
  misc_feature: MA Experiment 20001555 PARAMETER Experiment Name: At_Drought_Soil_Dry_P Parameter: Timepoint (day) Value: 10
  misc_feature: MA Experiment 20001555 PARAMETER Experiment Name: At_Drought_Soil_Dry_P Parameter: Treatment Value: Drought vs. No Drought
attggccatcgaacacaccacacagagaaaacaatatgagcaatcatcaaactcaggtgttgaagctattggagccatggtgtgaacttaaagacaaagtggttcttgtgacaggagcttcctctggtattggaagagagatctgtcttgatcttgccaaagctggttgccaggttattgcagcagctcgtcgtgttgatcgactcaactctctctgctctgaaatcaacagcttcagttcaactggaatccaagccgcagctcttgagttagacgtttcatcagacgcagccaccattcaaaaagcggtcagggaagcttgggacatctttggaaagatcgatgcattgatcaacaatgctggaatcagaggcaatgtcaagtcgagtttggatttgtcagaggacgaatgggacaacgtcttcaagaccaacttaaagggtccttggttagtatccaaacatgtttgtatgttaatgcgtgacgctaaacgaggtggctcggtgataaacatctcatcgatcgccgggatccggggtatgttgcccggtggacttgcttatgcttgttccaaaggcggtgttgacaccatgtcaaggatgatggcacttgagttaggtgttcataagatcagagtgaactcgatcgcaccggggcttttcaagtcagagatcacacaaggtcttatgcaaaaggagtggctcaagaatgttaccgagaggactgtgccgttaaaggtgcaacagaccgttgatccagggcttacttctctggttcgctatctcattcatgactcttctcaatatatatccgggaatacatacattgttgattccggtgctacattgcccggtgtgcctatcttttcatctctctgaaaatcgaaccttataatatcttatcttgtgcaataataagtgaatacatttactc

SEQ ID NO: 87102 - protein, 291 aa, Arabidopsis thaliana; identical to SEQ ID NO: 21598
  peptide (1)..(291): Ceres Seq. ID no. 12697332
  misc_feature (12)..(291): Homolog of NCBI NO: 18410245 NR Description: oxidoreductase -like protein; protein id: supported by cDNA: gi_15028304, supported by cDNA: gi_19310684 thaliana] >gi|15028305|gb|AAK76629.1| putative oxidoreductase
  misc_feature (19)..(291): Homolog of NCBI NO: 11250516 NR Description: oxidoreductase-like protein - Arabidopsis thaliana
  misc_feature (19)..(291): Homolog of NCBI NO: 15233243 NR Description: beta-ketoacyl-ACP reductase - like protein;
  misc_feature (12)..(291): Homolog of NCBI NO: 15231362 NR Description: dehydrogenase -like protein; protein id:
  misc_feature (16)..(291): Homolog of NCBI NO: 15221517 NR Description: similar to glucose 1-dehydrogenase (AB000617);
  misc_feature (16)..(291): Homolog of NCBI NO: 15222406 NR Description: reductase, putative; protein id: At1g63380.1
  misc_feature (3)..(291): Homolog of NCBI NO: 18398539 NR Description: similar to oxidoreductase -like protein; protein
  misc_feature (12)..(291): Homolog of NCBI NO: 13549123 NR Description: putative short-chain type alcohol dehydrogenase
  misc_feature (12)..(291): Homolog of NCBI NO: 23451057 NR Description: putative short-chain type alcohol dehydrogenase
  misc_feature (25)..(291): Homolog of NCBI NO: 28411870 NR Description: putative 3-ketoacyl-acyl carrier protein

SEQ ID NO: 87103 - protein, 280 aa, Arabidopsis thaliana; identical to SEQ ID NO: 21599
  peptide (1)..(280): Ceres Seq. ID no. 12697333
  misc_feature (1)..(280): Homolog of NCBI NO: 18410245 NR Description: oxidoreductase -like protein; protein id: supported by cDNA: gi_15028304, supported by cDNA: gi_19310684 thaliana] >gi|15028305|gb|AAK76629.1| putative oxidoreductase
  misc_feature (8)..(280): Homolog of NCBI NO: 11250516 NR Description: oxidoreductase-like protein - Arabidopsis thaliana
  misc_feature (8)..(280): Homolog of NCBI NO: 15233243 NR Description: beta-ketoacyl-ACP reductase - like protein;
  misc_feature (1)..(280): Homolog of NCBI NO: 15231362 NR Description: dehydrogenase -like protein; protein id:
  misc_feature (5)..(280): Homolog of NCBI NO: 15221517 NR Description: similar to glucose 1-dehydrogenase (AB000617);
  misc_feature (5)..(280): Homolog of NCBI NO: 15222406 NR Description: reductase, putative; protein id: At1g63380.1
  misc_feature (1)..(280): Homolog of NCBI NO: 18398539 NR Description: similar to oxidoreductase -like protein; protein
  misc_feature (1)..(280): Homolog of NCBI NO: 13549123 NR Description: putative short-chain type alcohol dehydrogenase
  misc_feature (1)..(280): Homolog of NCBI NO: 23451057 NR Description: putative short-chain type alcohol dehydrogenase
  misc_feature (14)..(280): Homolog of NCBI NO: 28411870 NR Description: putative 3-ketoacyl-acyl carrier protein

SEQ ID NO: 87104 - DNA, 1791 bp, Arabidopsis thaliana
  misc_feature (1)..(1791): Ceres Seq. ID no. 12697337
  misc_feature: MA Experiment ID: 20000180 Result: Down-regulated in Transcription
  misc_feature: MA Experiment 20000180 PARAMETER Experiment Name: At_Germinating_Seeds_P Parameter: Age (hr) Value: 24 vs. 0
  misc_feature: MA Experiment 20000180 PARAMETER Experiment Name: At_Germinating_Seeds_P Parameter: Tissue Value: Germinating Seeds
  misc_feature: MA Experiment ID: 20001557 Result: Up-regulated in Transcription
  misc_feature: MA Experiment 20001557 PARAMETER Experiment Name: At_Drought_Soil_Dry_P Parameter: Age (day) Value: 27
  misc_feature: MA Experiment 20001557 PARAMETER Experiment Name: At_Drought_Soil_Dry_P Parameter: Organism Value: A. thaliana
  misc_feature: MA Experiment 20001557 PARAMETER Experiment Name: At_Drought_Soil_Dry_P Parameter: Plant Line Value: WS
  misc_feature: MA Experiment 20001557 PARAMETER Experiment Name: At_Drought_Soil_Dry_P Parameter: Post Timepoint (hr) Value: 3
  misc_feature: MA Experiment 20001557 PARAMETER Experiment Name: At_Drought_Soil_Dry_P Parameter: Post-Treatment Value: Re-Water vs. No Drought
  misc_feature: MA Experiment 20001557 PARAMETER Experiment Name: At_Drought_Soil_Dry_P Parameter: Timepoint (day) Value: 13
  misc_feature: MA Experiment 20001557 PARAMETER Experiment Name: At_Drought_Soil_Dry_P Parameter: Treatment Value: Drought vs. No Drought
atggtgctgtcgaacaagaagctgaagcagaggattcgacaagatttggctgaatcactatctgtctctgtatccgaaacaaatccacaatctcagtctctgaaattgctccttgattcatctagccacaaacccagattgtcgaagagagagaaacgaagaaattgcgaaactttcgctagagaagacgacgaaatcagagagaatgaagttgggaatggtgggtcaagcgagaagactgatacgaagattaaaaagaagagaaagagagacgatgctgtggaagtcgacgagttagaaggagatgaaggaactaaggaagagcaaaaaccccagaagaagaaaaataagaagaagaagaagaagagaaaggtaaacaaaacgccaaagaaggctgaggaaggcaatgtagaagagaaggtgaaggtagaagagattgaagttaatacagacaataaagaagaagatggggttgttcctaacaagttatatgttgggggtattccttatcagagtacagaagatgagattcgtagctactttagaagctgtggagtcatcattaaagttgattgcaagatgcgtcctgaagatggggctttcagtggtattgccttcatcacttttgacactgaagatggcgcaaaacgtgctttggcttttgatagagctctgggtgatcgatatttgacaatccagcaatacgtgaaaaccaccaccccttccattccaagaaggaaaacatcttctggtttcgctccagaaatggtggatggctataacagggtatacattgggaatttagcctgggacacaacagagcgtgacatacggaagctcttctctgactgcgtaataaactctgtgcggttgggtaaaaacaaagaaacaggagagtttaaagggtatgcgcatgtggatttcaaggatagtgtgtctgtggcgattgcgctgaagctggatcagcaggttatttgcggaagacctgtcaagatatgttgtgcacttaaagacagaccagctactgatcatacacctggtgaaacgaacaatgctggttcgtacaacatggaagatacttatgctgctgctgatccagtaccggctttagctgggcgtagcgaagttgatgacggaaactactttgcaactacggttagcagcagtaaggtcaaaaggagggtctgttatgagtgtggagaaaagggtcatctttctacagcctgtcccataaagcttcaaaaggctgatgatcaggcaaactcaaagctgggtcaagagactgttgatggtagaccggctatgcaaagctatggtcttccaaagaatagtggtgattcttactacatgaatgagacatacgcttctacaaatgaaacttataatggaggatactcagcatctgctgttggcactggtaaggtcaaaaggaggaactgttatgagtgtggagaaaagggtcatctttctacagcctgtcccataaagcttcaaaacacttctcacacaaactcaacgctggatcaccaaactgttgaggcaggaccgactcaggtaacaagctatagtcttcaaaagaaaacaagagacactgaaaacaatggtggttcgttcatggatgagagctatgctactgttccgatatccattgatgtgacaaatggagctaatgatgcaagcttaacatctgcggttagcactggtaagatcaaaaagagaaactgttacgagtgcggagaaaaaggtcatctttcttcagcttgccctaacaagctgcaaaaacaaggctga

SEQ ID NO: 87105 - protein, 596 aa, Arabidopsis thaliana
  peptide (1)..(596): Ceres Seq. ID no. 12697338
  misc_feature (263)..(332): Pfam Name: RNA recognition motif. (a.k.a. RRM, RBD, or RNP domain) Pfam Description: RNA recognition motif. (a.k.a. RRM, RBD, or RNP
  misc_feature (1)..(596): Homolog of NCBI NO: 18026763 NR Description: phragmoplastin-interacting protein PHIP1
  misc_feature (107)..(339): Homolog of NCBI NO: 25446691 NR Description: Unknown protein [Oryza sativa (japonica
  misc_feature (39)..(332): Homolog of NCBI NO: 19114443 NR Description: gar2 protein [Schizosaccharomyces pombe] Protein gar2 >gi|7523472|emb|CAB86413.1| gar2 protein
  misc_feature (39)..(332): Homolog of NCBI NO: 2130461 NR Description: nucleolar protein gar2 - fission yeast pombe) >gi|663262|emb|CAA88179.1| gar2 [Schizosaccharomyces
  misc_feature (17)..(342): Homolog of NCBI NO: 7440062 NR Description: nucleolin homolog - garden pea
  misc_feature (162)..(340): Homolog of NCBI NO: 21309 NR Description: 28kD RNA binding protein [Spinacia oleracea]
  misc_feature (162)..(340): Homolog of NCBI NO: 99565 NR Description: RNA-binding protein, 28K - spinach
  misc_feature (162)..(340): Homolog of NCBI NO: 133247 NR Description: 28 KDA RIBONUCLEOPROTEIN, CHLOROPLAST (28RNP)
  misc_feature (144)..(350): Homolog of NCBI NO: 7446342 NR Description: RNA-binding protein precursor, 33K - wood tobacco
  misc_feature (21)..(320): Homolog of NCBI NO: 40253662 NR Description: putative nucleolin [Oryza sativa (japonica
MVLSNKKLKQRIRQDLAESLSVSVSETNPQSQSLKLLLDSSSHKPRLSKREKRRNCETFAREDDEIRENEVGNGGSSEKTDTKIKKKRKRDDAVEVDELEGDEGTKEEQKPQKKKNKKKKKKRKVNKTPKKAEEGNVEEKVKVEEIEVNTDNKEEDGVVPNKLYVGGIPYQSTEDEIRSYFRSCGVIIKVDCKMRPEDGAFSGIAFITFDTEDGAKRALAFDRALGDRYLTIQQYVKTTTPSIPRRKTSSGFAPEMVDGYNRVYIGNLAWDTTERDIRKLFSDCVINSVRLGKNKETGEFKGYAHVDFKDSVSVAIALKLDQQVICGRPVKICCALKDRPATDHTPGETNNAGSYNMEDTYAAADPVPALAGRSEVDDGNYFATTVSSSKVKRRVCYECGEKGHLSTACPIKLQKADDQANSKLGQETVDGRPAMQSYGLPKNSGDSYYMNETYASTNETYNGGYSASAVGTGKVKRRNCYECGEKGHLSTACPIKLQNTSHTNSTLDHQTVEAGPTQVTSYSLQKKTRDTENNGGSFMDESYATVPISIDVTNGANDASLTSAVSTGKIKKRNCYECGEKGHLSSACPNKLQKQG

SEQ ID NO: 87106 - protein, 403 aa, Arabidopsis thaliana
  peptide (1)..(403): Ceres Seq. ID no. 12697339
  misc_feature (70)..(139): Pfam Name: RNA recognition motif. (a.k.a. RRM, RBD, or RNP domain) Pfam Description: RNA recognition motif. (a.k.a. RRM, RBD, or RNP
  misc_feature (1)..(403): Homolog of NCBI NO: 18026763 NR Description: phragmoplastin-interacting protein PHIP1
  misc_feature (1)..(146): Homolog of NCBI NO: 25446691 NR Description: Unknown protein [Oryza sativa (japonica
  misc_feature (1)..(139): Homolog of NCBI NO: 19114443 NR Description: gar2 protein [Schizosaccharomyces pombe] Protein gar2 >gi|7523472|emb|CAB86413.1| gar2 protein
  misc_feature (1)..(139): Homolog of NCBI NO: 2130461 NR Description: nucleolar protein gar2 - fission yeast pombe) >gi|663262|emb|CAA88179.1| gar2 [Schizosaccharomyces
  misc_feature (1)..(149): Homolog of NCBI NO: 7440062 NR Description: nucleolin homolog - garden pea
  misc_feature (1)..(147): Homolog of NCBI NO: 21309 NR Description: 28kD RNA binding protein [Spinacia oleracea]
  misc_feature (1)..(147): Homolog of NCBI NO: 99565 NR Description: RNA-binding protein, 28K - spinach
  misc_feature (1)..(147): Homolog of NCBI NO: 133247 NR Description: 28 KDA RIBONUCLEOPROTEIN, CHLOROPLAST (28RNP)
  misc_feature (1)..(157): Homolog of NCBI NO: 7446342 NR Description: RNA-binding protein precursor, 33K - wood tobacco
  misc_feature (1)..(127): Homolog of NCBI NO: 40253662 NR Description: putative nucleolin [Oryza sativa (japonica
MRPEDGAFSGIAFITFDTEDGAKRALAFDRALGDRYLTIQQYVKTTTPSIPRRKTSSGFAPEMVDGYNRVYIGNLAWDTTERDIRKLFSDCVINSVRLGKNKETGEFKGYAHVDFKDSVSVAIALKLDQQVICGRPVKICCALKDRPATDHTPGETNNAGSYNMEDTYAAADPVPALAGRSEVDDGNYFATTVSSSKVKRRVCYECGEKGHLSTACPIKLQKADDQANSKLGQETVDGRPAMQSYGLPKNSGDSYYMNETYASTNETYNGGYSASAVGTGKVKRRNCYECGEKGHLSTACPIKLQNTSHTNSTLDHQTVEAGPTQVTSYSLQKKTRDTENNGGSFMDESYATVPISIDVTNGANDASLTSAVSTGKIKKRNCYECGEKGHLSSACPNKLQKQG

SEQ ID NO: 87107 - protein, 341 aa, Arabidopsis thaliana
  peptide (1)..(341): Ceres Seq. ID no. 12697340
  misc_feature (8)..(77): Pfam Name: RNA recognition motif. (a.k.a. RRM, RBD, or RNP domain) Pfam Description: RNA recognition motif. (a.k.a. RRM, RBD, or RNP
  misc_feature (1)..(341): Homolog of NCBI NO: 18026763 NR Description: phragmoplastin-interacting protein PHIP1
  misc_feature (1)..(84): Homolog of NCBI NO: 25446691 NR Description: Unknown protein [Oryza sativa (japonica
  misc_feature (1)..(77): Homolog of NCBI NO: 19114443 NR Description: gar2 protein [Schizosaccharomyces pombe] Protein gar2 >gi|7523472|emb|CAB86413.1| gar2 protein
  misc_feature (1)..(77): Homolog of NCBI NO: 2130461 NR Description: nucleolar protein gar2 - fission yeast pombe) >gi|663262|emb|CAA88179.1| gar2 [Schizosaccharomyces
  misc_feature (1)..(87): Homolog of NCBI NO: 7440062 NR Description: nucleolin homolog - garden pea
  misc_feature (1)..(85): Homolog of NCBI NO: 21309 NR Description: 28kD RNA binding protein [Spinacia oleracea]
  misc_feature (1)..(85): Homolog of NCBI NO: 133247 NR Description: 28 KDA RIBONUCLEOPROTEIN, CHLOROPLAST (28RNP)
  misc_feature (1)..(85): Homolog of NCBI NO: 99565 NR Description: RNA-binding protein, 28K - spinach
  misc_feature (1)..(95): Homolog of NCBI NO: 7446342 NR Description: RNA-binding protein precursor, 33K - wood tobacco
  misc_feature (1)..(65): Homolog of NCBI NO: 40253662 NR Description: putative nucleolin [Oryza sativa (japonica
MVDGYNRVYIGNLAWDTTERDIRKLFSDCVINSVRLGKNKETGEFKGYAHVDFKDSVSVAIALKLDQQVICGRPVKICCALKDRPATDHTPGETNNAGSYNMEDTYAAADPVPALAGRSEVDDGNYFATTVSSSKVKRRVCYECGEKGHLSTACPIKLQKADDQANSKLGQETVDGRPAMQSYGLPKNSGDSYYMNETYASTNETYNGGYSASAVGTGKVKRRNCYECGEKGHLSTACPIKLQNTSHTNSTLDHQTVEAGPTQVTSYSLQKKTRDTENNGGSFMDESYATVPISIDVTNGANDASLTSAVSTGKIKKRNCYECGEKGHLSSACPNKLQKQG

SEQ ID NO: 87108 - DNA, 1192 bp, Arabidopsis thaliana
  misc_feature (1)..(1192): Ceres Seq. ID no. 12697376
  misc_feature: MA Experiment ID: 108434 Result: Down-regulated in Transcription
  misc_feature: MA Experiment 108434 PARAMETER Experiment Name: At_Root_Tips_cDNA_P Parameter: Tissue Value: Root Tips
  misc_feature: MA Experiment ID: 108595 Result: Down-regulated in Transcription
  misc_feature: MA Experiment 108595 PARAMETER Experiment Name: At_Ler-pi_Ovule_cDNA_P Parameter: Plant Line Value: null
  misc_feature: MA Experiment ID: 108608 Result: Down-regulated in Transcription
  misc_feature: MA Experiment 108608 PARAMETER Experiment Name: At_100uM_ABA_cDNA_P Parameter: Timepoint (hr) Value: 1
  misc_feature: MA Experiment 108608 PARAMETER Experiment Name: At_100uM_ABA_cDNA_P Parameter: Tissue Value: Aerial
  misc_feature: MA Experiment 108608 PARAMETER Experiment Name: At_100uM_ABA_cDNA_P Parameter: Treatment Value: 100uM ABA vs. No Treatment
  misc_feature: MA Experiment ID: 20000070 Result: Down-regulated in Transcription
  misc_feature: MA Experiment 20000070 PARAMETER Experiment Name: At_100uM_ABA_Mutants_cDNA_P Parameter: Plant Line Value: CS24
  misc_feature: MA Experiment 20000070 PARAMETER Experiment Name: At_100uM_ABA_Mutants_cDNA_P Parameter: Timepoint (hr) Value: 6
  misc_feature: MA Experiment 20000070 PARAMETER Experiment Name: At_100uM_ABA_Mutants_cDNA_P Parameter: Tissue Value: Aerial
  misc_feature: MA Experiment 20000070 PARAMETER Experiment Name: At_100uM_ABA_Mutants_cDNA_P Parameter: Treatment Value: 100uM ABA vs. No Treatment
  misc_feature: MA Experiment ID: 20000087 Result: Down-regulated in Transcription
  misc_feature: MA Experiment 20000087 PARAMETER Experiment Name: At_100uM_ABA_Mutants_cDNA_P Parameter: Plant Line Value: WS
  misc_feature: MA Experiment 20000087 PARAMETER Experiment Name: At_100uM_ABA_Mutants_cDNA_P Parameter: Timepoint (hr) Value: 6
  misc_feature: MA Experiment 20000087 PARAMETER Experiment Name: At_100uM_ABA_Mutants_cDNA_P Parameter: Tissue Value: Aerial
  misc_feature: MA Experiment 20000087 PARAMETER Experiment Name: At_100uM_ABA_Mutants_cDNA_P Parameter: Treatment Value: 100uM ABA vs. No Treatment
  misc_feature: MA Experiment ID: 20000117 Result: Down-regulated in Transcription
  misc_feature: MA Experiment 20000117 PARAMETER Experiment Name: At_100uM_ABA_Mutants_cDNA_P Parameter: Plant Line Value: Columbia
  misc_feature: MA Experiment 20000117 PARAMETER Experiment Name: At_100uM_ABA_Mutants_cDNA_P Parameter: Timepoint (hr) Value: 6
  misc_feature: MA Experiment 20000117 PARAMETER Experiment Name: At_100uM_ABA_Mutants_cDNA_P Parameter: Tissue Value: Aerial
  misc_feature: MA Experiment 20000117 PARAMETER Experiment Name: At_100uM_ABA_Mutants_cDNA_P Parameter: Treatment Value: 100uM ABA vs. No Treatment
  misc_feature: MA Experiment ID: 20000264 Result: Down-regulated in Transcription
  misc_feature: MA Experiment 20000264 PARAMETER Experiment Name: At_Open_Flower_P Parameter: Age (day) Value: 21
  misc_feature: MA Experiment 20000264 PARAMETER Experiment Name: At_Open_Flower_P Parameter: Plant Line Value: WS
  misc_feature: MA Experiment 20000264 PARAMETER Experiment Name: At_Open_Flower_P Parameter: Tissue Value: Open Flower vs. Whole Plant
  misc_feature: MA Experiment ID: 20000265 Result: Down-regulated in Transcription
  misc_feature: MA Experiment 20000265 PARAMETER Experiment Name: At_Open_Flower_P Parameter: Age (day) Value: 21
  misc_feature: MA Experiment 20000265 PARAMETER Experiment Name: At_Open_Flower_P Parameter: Plant Line Value: WS
  misc_feature: MA Experiment 20000265 PARAMETER Experiment Name: At_Open_Flower_P Parameter: Tissue Value: Closed Flower vs. Whole Plant
  misc_feature: MA Experiment ID: 20000794 Result: Down-regulated in Transcription
  misc_feature: MA Experiment 20000794 PARAMETER Experiment Name: At_Petals_P Parameter: Age (day) Value: 23-25 days
  misc_feature: MA Experiment 20000794 PARAMETER Experiment Name: At_Petals_P Parameter: Plant Line Value: WS
  misc_feature: MA Experiment 20000794 PARAMETER Experiment Name: At_Petals_P Parameter: Tissue Value: Petals vs. Whole plant
  misc_feature: MA Experiment ID: 20001911 Result: Up-regulated in Transcription
  misc_feature: MA Experiment 20001911 PARAMETER Experiment Name: At_Drought_Reproduction_P Parameter: Age (day) Value: 40
  misc_feature: MA Experiment 20001911 PARAMETER Experiment Name: At_Drought_Reproduction_P Parameter: Organism Value: A. thaliana
  misc_feature: MA Experiment 20001911 PARAMETER Experiment Name: At_Drought_Reproduction_P Parameter: Plant Line Value: WS
  misc_feature: MA Experiment 20001911 PARAMETER Experiment Name: At_Drought_Reproduction_P Parameter: Timepoint (day) Value: 10
  misc_feature: MA Experiment 20001911 PARAMETER Experiment Name: At_Drought_Reproduction_P Parameter: Tissue Value: Flowers
  misc_feature: MA Experiment 20001911 PARAMETER Experiment Name: At_Drought_Reproduction_P Parameter: Treatment Value: Drought vs. No Drought
attagagaagaaaaaaagaatggcgaatccttggtgggtagggaatgttgcgatcggtggagttgagagtccagtgacgtcatcagctccttctttgcaccacagaaacagtaacaacaacaacccaccgactatgactcgttcggatccaagattggaccatgacttcaccaccaacaacagtggaagccctaatacccagactcagagccaagaagaacagaacagcagagacgagcaaccagctgttgaacccggatccggatccgggtctacgggtcgtcgtcctagaggtagacctcctggttccaagaacaaaccaaagagtccagttgttgttaccaaagaaagccctaactctctccagagccatgttcttgagattgctacgggagctgacgtggcggaaagcttaaacgcctttgctcgtagacgcggccggggcgtttcggtgctgagcggtagtggtttggttactaatgttactctgcgtcagcctgctgcatccggtggagttgttagtttacgtggtcagtttgagatcttgtctatgtgtggggcttttcttcctacgtctggctctcctgctgcagccgctggtttaaccatttacttagctggagctcaaggtcaagttgtgggaggtggagttgctggcccgcttattgcctctggacccgttattgtgatagctgctacgttttgcaatgccacttatgagaggttaccgattgaggaagaacaacagcaagagcagccgcttcaactagaagatgggaagaagcagaaagaagagaatgatgataacgagagtgggaataacggaaacgaaggatcgatgcagccgccgatgtataatatgcctcctaattttatcccaaatggtcatcaaatggctcaacacgacgtgtattggggtggtcctccgcctcgtgctcctccttcgtattgattagttagataggcggtggttggtgcgttctttttactggaatgattatattttccattaggatggttaggcttttgtttattaaagctatcaagtttcttttttttttacggataattcggatgacaattagctagtgtttgtttgtttgttttgtggcggcttttctgacttgactattttgatcgcggatagctttgtatgaaagtgaattgattgtagaatcgtcttttgaatttt

SEQ ID NO: 87109 - protein, 316 aa, Arabidopsis thaliana; identical to SEQ ID NO: 43621
  peptide (1)..(316): Ceres Seq. ID no. 12697377
  misc_feature (7)..(316): Homolog of NCBI NO: 15233302 NR Description: putative protein; protein id: At3g55560.1, by cDNA: 207314. [Arabidopsis thaliana] >gi|11281679|pir||T47695
  misc_feature (70)..(309): Homolog of NCBI NO: 18414224 NR Description: Expressed protein; protein id: At4g14465.1, by cDNA: 36844. [Arabidopsis thaliana]
  misc_feature (70)..(309): Homolog of NCBI NO: 21593180 NR Description: putative DNA-binding protein [Arabidopsis
  misc_feature (75)..(314): Homolog of NCBI NO: 34902080 NR Description: unknown protein [Oryza sativa (japonica >gi|34902088|ref|NP_912390.1| hypothetical protein [Oryza sativa
  misc_feature (7)..(295): Homolog of NCBI NO: 18396925 NR Description: expressed protein; protein id: At3g04570.1, by cDNA: 15781. [Arabidopsis thaliana] hypothetical protein [Arabidopsis thaliana]
  misc_feature (50)..(308): Homolog of NCBI NO: 15223074 NR Description: unknown protein; protein id: At1g76500.1
  misc_feature (64)..(310): Homolog of NCBI NO: 15225475 NR Description: putative AT-hook DNA-binding protein; protein id:
  misc_feature (32)..(295): Homolog of NCBI NO: 38346718 NR Description: OSJNBa0086O06.16 [Oryza sativa (japonica
  misc_feature (32)..(294): Homolog of NCBI NO: 15236657 NR Description: hypothetical protein; protein id: At4g17800.1, by cDNA: gi_17933298, supported by cDNA: gi_20453386 [Arabidopsis
  misc_feature (69)..(304): Homolog of NCBI NO: 7486025 NR Description: hypothetical protein F23E12.50 - Arabidopsis >gi|3080411|emb|CAA18730.1| putative protein [Arabidopsis >gi|7270491|emb|CAB80256.1| putative protein [Arabidopsis

SEQ ID NO: 87110 - protein, 310 aa, Arabidopsis thaliana; identical to SEQ ID NO: 43622
  peptide (1)..(310): Ceres Seq. ID no. 12697378
  misc_feature (1)..(310): Homolog of NCBI NO: 15233302 NR Description: putative protein; protein id: At3g55560.1, by cDNA: 207314. [Arabidopsis thaliana] >gi|11281679|pir||T47695
  misc_feature (64)..(303): Homolog of NCBI NO: 18414224 NR Description: Expressed protein; protein id: At4g14465.1, by cDNA: 36844. [Arabidopsis thaliana]
  misc_feature (64)..(303): Homolog of NCBI NO: 21593180 NR Description: putative DNA-binding protein [Arabidopsis
  misc_feature (69)..(308): Homolog of NCBI NO: 34902080 NR Description: unknown protein [Oryza sativa (japonica >gi|34902088|ref|NP_912390.1| hypothetical protein [Oryza sativa
  misc_feature (1)..(289): Homolog of NCBI NO: 18396925 NR Description: expressed protein; protein id: At3g04570.1, by cDNA: 15781. [Arabidopsis thaliana] hypothetical protein [Arabidopsis thaliana]
  misc_feature (44)..(302): Homolog of NCBI NO: 15223074 NR Description: unknown protein; protein id: At1g76500.1
  misc_feature (58)..(304): Homolog of NCBI NO: 15225475 NR Description: putative AT-hook DNA-binding protein; protein id:
  misc_feature (26)..(289): Homolog of NCBI NO: 38346718 NR Description: OSJNBa0086O06.16 [Oryza sativa (japonica
  misc_feature (26)..(288): Homolog of NCBI NO: 15236657 NR Description: hypothetical protein; protein id: At4g17800.1, by cDNA: gi_17933298, supported by cDNA: gi_20453386 [Arabidopsis
  misc_feature (63)..(298): Homolog of NCBI NO: 7486025 NR Description: hypothetical protein F23E12.50 - Arabidopsis >gi|3080411|emb|CAA18730.1| putative protein [Arabidopsis >gi|7270491|emb|CAB80256.1| putative protein [Arabidopsis

SEQ ID NO: 87111 - protein, 272 aa, Arabidopsis thaliana; identical to SEQ ID NO: 43623
  peptide (1)..(272): Ceres Seq. ID no. 12697379
  misc_feature (1)..(272): Homolog of NCBI NO: 15233302 NR Description: putative protein; protein id: At3g55560.1, by cDNA: 207314. [Arabidopsis thaliana] >gi|11281679|pir||T47695
  misc_feature (26)..(265): Homolog of NCBI NO: 18414224 NR Description: Expressed protein; protein id: At4g14465.1, by cDNA: 36844. [Arabidopsis thaliana]
  misc_feature (26)..(265): Homolog of NCBI NO: 21593180 NR Description: putative DNA-binding protein [Arabidopsis
  misc_feature (31)..(270): Homolog of NCBI NO: 34902080 NR Description: unknown protein [Oryza sativa (japonica >gi|34902088|ref|NP_912390.1| hypothetical protein [Oryza sativa
  misc_feature (1)..(251): Homolog of NCBI NO: 18396925 NR Description: expressed protein; protein id: At3g04570.1, by cDNA: 15781. [Arabidopsis thaliana] hypothetical protein [Arabidopsis thaliana]
  misc_feature (6)..(264): Homolog of NCBI NO: 15223074 NR Description: unknown protein; protein id: At1g76500.1
  misc_feature (20)..(266): Homolog of NCBI NO: 15225475 NR Description: putative AT-hook DNA-binding protein; protein id:
  misc_feature (1)..(251): Homolog of NCBI NO: 38346718 NR Description: OSJNBa0086O06.16 [Oryza sativa (japonica
  misc_feature (1)..(250): Homolog of NCBI NO: 15236657 NR Description: hypothetical protein; protein id: At4g17800.1, by cDNA: gi_17933298, supported by cDNA: gi_20453386 [Arabidopsis
  misc_feature (25)..(260): Homolog of NCBI NO: 7486025 NR Description: hypothetical protein F23E12.50 - Arabidopsis >gi|3080411|emb|CAA18730.1| putative protein [Arabidopsis >gi|7270491|emb|CAB80256.1| putative protein [Arabidopsis

SEQ ID NO: 87112 - DNA, 1644 bp, Arabidopsis thaliana
  misc_feature (1)..(1644): Ceres Seq. ID no. 12697392
  misc_feature: MA Experiment ID: 20000179 Result: Up-regulated in Transcription
  misc_feature: MA Experiment 20000179 PARAMETER Experiment Name: At_Germinating_Seeds_P Parameter: Age (hr) Value: 6 vs. 0
  misc_feature: MA Experiment 20000179 PARAMETER Experiment Name: At_Germinating_Seeds_P Parameter: Tissue Value: Germinating Seeds
  misc_feature: MA Experiment ID: 20000180 Result: Up-regulated in Transcription
  misc_feature: MA Experiment 20000180 PARAMETER Experiment Name: At_Germinating_Seeds_P Parameter: Age (hr) Value: 24 vs. 0
  misc_feature: MA Experiment 20000180 PARAMETER Experiment Name: At_Germinating_Seeds_P Parameter: Tissue Value: Germinating Seeds
  misc_feature: MA Experiment ID: 20000265 Result: Up-regulated in Transcription
  misc_feature: MA Experiment 20000265 PARAMETER Experiment Name: At_Open_Flower_P Parameter: Age (day) Value: 21
  misc_feature: MA Experiment 20000265 PARAMETER Experiment Name: At_Open_Flower_P Parameter: Plant Line Value: WS
  misc_feature: MA Experiment 20000265 PARAMETER Experiment Name: At_Open_Flower_P Parameter: Tissue Value: Closed Flower vs. Whole Plant
  misc_feature: MA Experiment ID: 20000794 Result: Up-regulated in Transcription
  misc_feature: MA Experiment 20000794 PARAMETER Experiment Name: At_Petals_P Parameter: Age (day) Value: 23-25 days
  misc_feature: MA Experiment 20000794 PARAMETER Experiment Name: At_Petals_P Parameter: Plant Line Value: WS
  misc_feature: MA Experiment 20000794 PARAMETER Experiment Name: At_Petals_P Parameter: Tissue Value: Petals vs. Whole plant
atggattcttcttcctcttcctcttcttcttctccttcttcttcctacggtgttgctcgtgtcagccatatctccaatccttgcatcttcggggaagttgggtcgtcatcttcgtcaacgtatagagataagaaatggaagttgatgaaatgggtgagtaaacttttcaagagtggctcgaatggtggtggtagtggtgctcacactaatcatcatcctcctcagtttcaagaagacgagaatatggtctttcctctacctccttcttctttggatgatcggtcaagaggtgcacgggacaaagaagaactcgaccgttcaatttcactttctctagctgacaacacgaagcgcccacatgggtatggttggtctatggataacaaccgagattttccaaggccttttcacggtggcttgaatccatcatctttcattccaccttatgagccttcctatcaatatagacgaagacaaagccatttccaagtgcacattggtaacgtggtttacgtgatttttagcagaatatgtggcggttgcaatagcgatattggatcggggaactatctaggatgcatgggcacattctttcatcctgaatgcttccgttgccattcttgtggttatgctatcactgagcatgagttctctctgtcaggaaccaaaccctatcataagctttgtttcaaagagcttactcatcccaaatgcgaagtttgtcaccattttataccaactaatgatgctggcttgatcgagtatcgatgccatccgttttggaaccaaaagtattgcccgtctcacgaatatgataaaactgctcgttgttgtagctgcgaacgtttggagtcatgggatgtgagatattacacgttagaggatgggagaagtttgtgtttagaatgtatggaaaccgcgataaccgatactggagaatgtcaaccgctttaccacgctataagagactattacgaaggaatgtacatgaaacttgatcaacagattcctatgcttcttgttcaaagagaagctctcaatgatgctatcgtaggagagaaaaacggataccatcacatgcctgagacaagaggtttatgcttgtctgaagaacaaacagttacaagtgttcttagaagaccgagacttggtgctcaccgtcttgttggtatgagaactcagcctcaaaggcttacacgcaaatgtgaagtcacagcgattctagttctttacgggctcccgcgattactgaccggagcaattctcgcccatgagctcatgcatggatggctaaggcttaatggtacatactggtttaggaaccttaaccctgaggtagaggaaggaatctgccaagtcctctcttacatgtggcttgaatctgaagttctctcagatccttcaacaagaaacttgccttcaacatcatcggtggccacatcatcatcatcatccttctcgaacaagaaaggaggaaaatcaaacgtggagaagaaacttggagagttctttaaacatcagatagctcatgatgcgtctccagcttatggaggaggtttcagggcagcaaatgcagcggcttgtaagtacggtcttcgtcgaacactcgatcatatccgcttaactggaacttttcctttgtga

SEQ ID NO: 87113 - protein, 547 aa, Arabidopsis thaliana
  peptide (1)..(547): Ceres Seq. ID no. 12697393
  misc_feature (1)..(216): Homolog of NCBI NO: 15225574 NR Description: hypothetical protein; protein id: At2g39830.1
  misc_feature (229)..(378): Homolog of NCBI NO: 15225574 NR Description: hypothetical protein; protein id: At2g39830.1
  misc_feature (439)..(547): Homolog of NCBI NO: 15225574 NR Description: hypothetical protein; protein id: At2g39830.1
  misc_feature (49)..(547): Homolog of NCBI NO: 29893641 NR Description: hypothetical protein [Oryza sativa (japonica
  misc_feature (176)..(546): Homolog of NCBI NO: 17065046 NR Description: Unknown protein [Arabidopsis thaliana]
  misc_feature (100)..(547): Homolog of NCBI NO: 15221983 NR Description: unknown protein; protein id: At1g19270.1
  misc_feature (100)..(544): Homolog of NCBI NO: 25518496 NR Description: hypothetical protein T29M8.14 - Arabidopsis
  misc_feature (194)..(546): Homolog of NCBI NO: 22329212 NR Description: putative protein; protein id: At4g36860.1,
  misc_feature (376)..(410): Homolog of NCBI NO: 15225574 NR Description: hypothetical protein; protein id: At2g39830.1
  misc_feature (240)..(546): Homolog of NCBI NO: 25407769 NR Description: hypothetical protein AT4g36860 [imported] - thaliana >gi|4006886|emb|CAB16816.1| putative protein thaliana] >gi|7270635|emb|CAB80352.1| putative protein
MDSSSSSSSSSPSSSYGVARVSHISNPCIFGEVGSSSSSTYRDKKWKLMKWVSKLFKSGSNGGGSGAHTNHHPPQFQEDENMVFPLPPSSLDDRSRGARDKEELDRSISLSLADNTKRPHGYGWSMDNNRDFPRPFHGGLNPSSFIPPYEPSYQYRRRQSHFQVHIGNVVYVIFSRICGGCNSDIGSGNYLGCMGTFFHPECFRCHSCGYAITEHEFSLSGTKPYHKLCFKELTHPKCEVCHHFIPTNDAGLIEYRCHPFWNQKYCPSHEYDKTARCCSCERLESWDVRYYTLEDGRSLCLECMETAITDTGECQPLYHAIRDYYEGMYMKLDQQIPMLLVQREALNDAIVGEKNGYHHMPETRGLCLSEEQTVTSVLRRPRLGAHRLVGMRTQPQRLTRKCEVTAILVLYGLPRLLTGAILAHELMHGWLRLNGTYWFRNLNPEVEEGICQVLSYMWLESEVLSDPSTRNLPSTSSVATSSSSSFSNKKGGKSNVEKKLGEFFKHQIAHDASPAYGGGFRAANAAACKYGLRRTLDHIRLTGTFPL

SEQ ID NO: 87114 - protein, 499 aa, Arabidopsis thaliana
  peptide (1)..(499): Ceres Seq. ID no. 12697394
  misc_feature (1)..(168): Homolog of NCBI NO: 15225574 NR Description: hypothetical protein; protein id: At2g39830.1
  misc_feature (181)..(330): Homolog of NCBI NO: 15225574 NR Description: hypothetical protein; protein id: At2g39830.1
  misc_feature (391)..(499): Homolog of NCBI NO: 15225574 NR Description: hypothetical protein; protein id: At2g39830.1
  misc_feature (1)..(499): Homolog of NCBI NO: 29893641 NR Description: hypothetical protein [Oryza sativa (japonica
  misc_feature (128)..(498): Homolog of NCBI NO: 17065046 NR Description: Unknown protein [Arabidopsis thaliana]
  misc_feature (52)..(499): Homolog of NCBI NO: 15221983 NR Description: unknown protein; protein id: At1g19270.1
  misc_feature (52)..(496): Homolog of NCBI NO: 25518496 NR Description: hypothetical protein T29M8.14 - Arabidopsis
  misc_feature (146)..(498): Homolog of NCBI NO: 22329212 NR Description: putative protein; protein id: At4g36860.1,
  misc_feature (328)..(362): Homolog of NCBI NO: 15225574 NR Description: hypothetical protein; protein id: At2g39830.1
  misc_feature (192)..(498): Homolog of NCBI NO: 25407769 NR Description: hypothetical protein AT4g36860 [imported] - thaliana >gi|4006886|emb|CAB16816.1| putative protein thaliana] >gi|7270635|emb|CAB80352.1| putative protein
MKWVSKLFKSGSNGGGSGAHTNHHPPQFQEDENMVFPLPPSSLDDRSRGARDKEELDRSISLSLADNTKRPHGYGWSMDNNRDFPRPFHGGLNPSSFIPPYEPSYQYRRRQSHFQVHIGNVVYVIFSRICGGCNSDIGSGNYLGCMGTFFHPECFRCHSCGYAITEHEFSLSGTKPYHKLCFKELTHPKCEVCHHFIPTNDAGLIEYRCHPFWNQKYCPSHEYDKTARCCSCERLESWDVRYYTLEDGRSLCLECMETAITDTGECQPLYHAIRDYYEGMYMKLDQQIPMLLVQREALNDAIVGEKNGYHHMPETRGLCLSEEQTVTSVLRRPRLGAHRLVGMRTQPQRLTRKCEVTAILVLYGLPRLLTGAILAHELMHGWLRLNGTYWFRNLNPEVEEGICQVLSYMWLESEVLSDPSTRNLPSTSSVATSSSSSFSNKKGGKSNVEKKLGEFFKHQIAHDASPAYGGGFRAANAAACKYGLRRTLDHIRLTGTFPL

SEQ ID NO: 87115 - protein, 466 aa, Arabidopsis thaliana
  peptide (1)..(466): Ceres Seq. ID no. 12697395
  misc_feature (1)..(135): Homolog of NCBI NO: 15225574 NR Description: hypothetical protein; protein id: At2g39830.1
  misc_feature (148)..(297): Homolog of NCBI NO: 15225574 NR Description: hypothetical protein; protein id: At2g39830.1
  misc_feature (358)..(466): Homolog of NCBI NO: 15225574 NR Description: hypothetical protein; protein id: At2g39830.1
  misc_feature (1)..(466): Homolog of NCBI NO: 29893641 NR Description: hypothetical protein [Oryza sativa (japonica
  misc_feature (95)..(465): Homolog of NCBI NO: 17065046 NR Description: Unknown protein [Arabidopsis thaliana]
  misc_feature (19)..(466): Homolog of NCBI NO: 15221983 NR Description: unknown protein; protein id: At1g19270.1
  misc_feature (19)..(463): Homolog of NCBI NO: 25518496 NR Description: hypothetical protein T29M8.14 - Arabidopsis
  misc_feature (113)..(465): Homolog of NCBI NO: 22329212 NR Description: putative protein; protein id: At4g36860.1,
  misc_feature (295)..(329): Homolog of NCBI NO: 15225574 NR Description: hypothetical protein; protein id: At2g39830.1
  misc_feature (159)..(465): Homolog of NCBI NO: 25407769 NR Description: hypothetical protein AT4g36860 [imported] - thaliana >gi|4006886|emb|CAB16816.1| putative protein thaliana] >gi|7270635|emb|CAB80352.1| putative protein
MVFPLPPSSLDDRSRGARDKEELDRSISLSLADNTKRPHGYGWSMDNNRDFPRPFHGGLNPSSFIPPYEPSYQYRRRQSHFQVHIGNVVYVIFSRICGGCNSDIGSGNYLGCMGTFFHPECFRCHSCGYAITEHEFSLSGTKPYHKLCFKELTHPKCEVCHHFIPTNDAGLIEYRCHPFWNQKYCPSHEYDKTARCCSCERLESWDVRYYTLEDGRSLCLECMETAITDTGECQPLYHAIRDYYEGMYMKLDQQIPMLLVQREALNDAIVGEKNGYHHMPETRGLCLSEEQTVTSVLRRPRLGAHRLVGMRTQPQRLTRKCEVTAILVLYGLPRLLTGAILAHELMHGWLRLNGTYWFRNLNPEVEEGICQVLSYMWLESEVLSDPSTRNLPSTSSVATSSSSSFSNKKGGKSNVEKKLGEFFKHQIAHDASPAYGGGFRAANAAACKYGLRRTLDHIRLTGTFPL

SEQ ID NO: 87116 - DNA, 1361 bp, Arabidopsis thaliana
  misc_feature (1)..(1361): Ceres Seq. ID no. 12697417
  misc_feature: MA Experiment ID: 108462 Result: Down-regulated in Transcription
  misc_feature: MA Experiment 108462 PARAMETER Experiment Name: At_Germinating_Seeds_cDNA_P Parameter: Age (day) Value: 2 vs. 0
  misc_feature: MA Experiment 108462 PARAMETER Experiment Name: At_Germinating_Seeds_cDNA_P Parameter: Tissue Value: Germinating Seeds
  misc_feature: MA Experiment ID: 108463 Result: Down-regulated in Transcription
  misc_feature: MA Experiment 108463 PARAMETER Experiment Name: At_Germinating_Seeds_cDNA_P Parameter: Age (day) Value: 3 vs. 0
  misc_feature: MA Experiment 108463 PARAMETER Experiment Name: At_Germinating_Seeds_cDNA_P Parameter: Tissue Value: Germinating Seeds
  misc_feature: MA Experiment ID: 108464 Result: Down-regulated in Transcription
  misc_feature: MA Experiment 108464 PARAMETER Experiment Name: At_Germinating_Seeds_cDNA_P Parameter: Age (day) Value: 4 vs. 0
  misc_feature: MA Experiment 108464 PARAMETER Experiment Name: At_Germinating_Seeds_cDNA_P Parameter: Tissue Value: Germinating Seeds
  misc_feature: MA Experiment ID: 108488 Result: Down-regulated in Transcription
  misc_feature: MA Experiment ID: 108573 Result: Up-regulated in Transcription
  misc_feature: MA Experiment 108573 PARAMETER Experiment Name: At_Drought_cDNA_P Parameter: Timepoint (hr) Value: 6
  misc_feature: MA Experiment 108573 PARAMETER Experiment Name: At_Drought_cDNA_P Parameter: Tissue Value: Aerial
  misc_feature: MA Experiment 108573 PARAMETER Experiment Name: At_Drought_cDNA_P Parameter: Treatment Value: Drought vs. No Drought
  misc_feature: MA Experiment ID: 108595 Result: Down-regulated in Transcription
  misc_feature: MA Experiment 108595 PARAMETER Experiment Name: At_Ler-pi_Ovule_cDNA_P Parameter: Plant Line Value: null
  misc_feature: MA Experiment ID: 20000111 Result: Down-regulated in Transcription
  misc_feature: MA Experiment 20000111 PARAMETER Experiment Name: At_42deg_Heat_cDNA_P Parameter: Temperature (deg C) Value: 42 vs. 22
  misc_feature: MA Experiment 20000111 PARAMETER Experiment Name: At_42deg_Heat_cDNA_P Parameter: Timepoint (hr) Value: 6
  misc_feature: MA Experiment 20000111 PARAMETER Experiment Name: At_42deg_Heat_cDNA_P Parameter: Tissue Value: Aerial
  misc_feature: MA Experiment ID: 20000173 Result: Down-regulated in Transcription
  misc_feature: MA Experiment 20000173 PARAMETER Experiment Name: At_42deg_Heat_P Parameter: Age (day) Value: 14
  misc_feature: MA Experiment 20000173 PARAMETER Experiment Name: At_42deg_Heat_P Parameter: Organism Value: A. thaliana
  misc_feature: MA Experiment 20000173 PARAMETER Experiment Name: At_42deg_Heat_P Parameter: Plant Line Value: WS
  misc_feature: MA Experiment 20000173 PARAMETER Experiment Name: At_42deg_Heat_P Parameter: Temperature (deg C) Value: 42 vs. 22
  misc_feature: MA Experiment 20000173 PARAMETER Experiment Name: At_42deg_Heat_P Parameter: Timepoint (hr) Value: 6
  misc_feature: MA Experiment 20000173 PARAMETER Experiment Name: At_42deg_Heat_P Parameter: Tissue Value: Aerial
  misc_feature: MA Experiment ID: 20000184 Result: Down-regulated in Transcription
  misc_feature: MA Experiment 20000184 PARAMETER Experiment Name: At_Shoots__P Parameter: Age (day) Value: 7
  misc_feature: MA Experiment 20000184 PARAMETER Experiment Name: At_Shoots__P Parameter: Tissue Value: Shoots vs. Whole Plant
  misc_feature: MA Experiment ID: 20000794 Result: Up-regulated in Transcription
  misc_feature: MA Experiment 20000794 PARAMETER Experiment Name: At_Petals_P Parameter: Age (day) Value: 23-25 days
  misc_feature: MA Experiment 20000794 PARAMETER Experiment Name: At_Petals_P Parameter: Plant Line Value: WS
  misc_feature: MA Experiment 20000794 PARAMETER Experiment Name: At_Petals_P Parameter: Tissue Value: Petals vs. Whole plant
gaacttctgaagcgaaaaaaagagagaattaaagtcattcattatttggggaatggagaagaagctcctttcctacagacgccatcattaacaacatcctcttaagcttctgcgattctctccgtttgtcggaagatttcacgacgattcttcaatccttatccgaaccggagaaatcatgtcggacgctttgatcaatggattggctggagctggtggtgggatcattgctcagcttctcacttatcctcttcaaactgtaaatacgcgccaacagacggagcgggatctgaagagggagaagaggaaacttggaactatcgaacacatgtgtcaggttgtcaaacaagaaggatgggagaggttatatggtggattggcgccgtctcttgctggaacggctgcatcacagggtgtgtactactacttctaccaagtgtttcggaatcgagctgaagccacagctcttgcacggaagaagaaaggtttgggtgacggatcagttgggatgtttgcttcacttttagtggctgcctttgccggatcggttaatgttcttatgacgaatccgatttgggtgattgttacgcgtatgcagacccacagaaaaatgacaaaagatcaaacagcggcccccgagtcaccttcttctaatgcagaagctctggttgctgttgagccgcgtccatatgggacctttaatacgattcgagaggtttacgatgaagctggaataactggcttctggaaaggtgtaattccaacattgatcatggtaagtaatccgtcaatgcaatttatgttgtacgagacaatgctaaccaagctgaagaaaaagcgtgccttgaagggtagcaacaacgttaccgctttggagacatttcttctcggagctgtggcgaaactcggagctacagtcacaacttaccctctcttggttgtaaagtcgcgacttcaagccaaacaggtcacaacaggggacaaaagacaacaatacaaaggaacattggacgcgattctgaaaatgattcgatatgaagggctttacgggttttataaagggatgagcacaaagattgtgcagagcgttttagctgctgcggttctgttcatgatcaaggaagagcttgtcaagggagctaagctgttgctctcaaacgctacctctagctaagtcaagtccaagccttcttgaatgaacgctagtagttagaaataaataaaaatagattaaatttccaatagttttcttgattaattattacactattgggattgttgttcatttcctgatgattgcaattgattattgtaatttctgcaagattctttagtaatgaaatctgaataaagtttggcag

SEQ ID NO: 87117 - protein, 331 aa, Arabidopsis thaliana; identical to SEQ ID NO: 27131
  peptide (1)..(331): Ceres Seq. ID no. 12697418
  misc_feature (1)..(331): Homolog of NCBI NO: 15225602 NR Description: 36kDa-peroxisomal membrane protein (PMP36); id: At2g39970.1, supported by cDNA: 5504., supported by cDNA: supported by cDNA: gi_15146341 [Arabidopsis thaliana]
  misc_feature (1)..(330): Homolog of NCBI NO: 21593883 NR Description: putative peroxisomal membrane carrier protein
  misc_feature (1)..(331): Homolog of NCBI NO: 34901996 NR Description: unknown protein [Oryza sativa (japonica
  misc_feature (172)..(325): Homolog of NCBI NO: 28828484 NR Description: hypothetical protein [Dictyostelium discoideum]
  misc_feature (3)..(140): Homolog of NCBI NO: 28828484 NR Description: hypothetical protein [Dictyostelium discoideum]
  misc_feature (2)..(317): Homolog of NCBI NO: 38105196 NR Description: hypothetical protein MG03247.4 [Magnaporthe
  misc_feature (34)..(317): Homolog of NCBI NO: 40739628 NR Description: hypothetical protein AN4280.2 [Aspergillus
  misc_feature (115)..(317): Homolog of NCBI NO: 14042724 NR Description: unnamed protein product [Homo sapiens]
  misc_feature (115)..(317): Homolog of NCBI NO: 21314739 NR Description: mitochondrial folate transporter/carrier [Homo >gi|14042275|dbj|BAB55180.1| unnamed protein product [Homo >gi|18256909|gb|AAH21893.1|AAH21893 folate transporter/carrier
  misc_feature (7)..(139): Homolog of NCBI NO: 14042724 NR Description: unnamed protein product [Homo sapiens]

SEQ ID NO: 87118 - protein, 281 aa, Arabidopsis thaliana; identical to SEQ ID NO: 27132
  peptide (1)..(281): Ceres Seq. ID no. 12697419
  misc_feature (1)..(281): Homolog of NCBI NO: 15225602 NR Description: 36kDa-peroxisomal membrane protein (PMP36); id: At2g39970.1, supported by cDNA: 5504., supported by cDNA: supported by cDNA: gi_15146341 [Arabidopsis thaliana]
  misc_feature (1)..(280): Homolog of NCBI NO: 21593883 NR Description: putative peroxisomal membrane carrier protein
  misc_feature (1)..(281): Homolog of NCBI NO: 34901996 NR Description: unknown protein [Oryza sativa (japonica
  misc_feature (122)..(275): Homolog of NCBI NO: 28828484 NR Description: hypothetical protein [Dictyostelium discoideum]
  misc_feature (1)..(90): Homolog of NCBI NO: 28828484 NR Description: hypothetical protein [Dictyostelium discoideum]
  misc_feature (1)..(267): Homolog of NCBI NO: 38105196 NR Description: hypothetical protein MG03247.4 [Magnaporthe
  misc_feature (1)..(267): Homolog of NCBI NO: 40739628 NR Description: hypothetical protein AN4280.2 [Aspergillus
  misc_feature (65)..(267): Homolog of NCBI NO: 14042724 NR Description: unnamed protein product [Homo sapiens]
  misc_feature (65)..(267): Homolog of NCBI NO: 21314739 NR Description: mitochondrial folate transporter/carrier [Homo >gi|14042275|dbj|BAB55180.1| unnamed protein product [Homo >gi|18256909|gb|AAH21893.1|AAH21893 folate transporter/carrier
  misc_feature (1)..(89): Homolog of NCBI NO: 14042724 NR Description: unnamed protein product [Homo sapiens]

SEQ ID NO: 87119 - protein, 221 aa, Arabidopsis thaliana; identical to SEQ ID NO: 27133
  peptide (1)..(221): Ceres Seq. ID no. 12697420
  misc_feature (1)..(221): Homolog of NCBI NO: 15225602 NR Description: 36kDa-peroxisomal membrane protein (PMP36); id: At2g39970.1, supported by cDNA: 5504., supported by cDNA: supported by cDNA: gi_15146341 [Arabidopsis thaliana]
  misc_feature (1)..(220): Homolog of NCBI NO: 21593883 NR Description: putative peroxisomal membrane carrier protein
  misc_feature (1)..(221): Homolog of NCBI NO: 34901996 NR Description: unknown protein [Oryza sativa (japonica
  misc_feature (62)..(215): Homolog of NCBI NO: 28828484 NR Description: hypothetical protein [Dictyostelium discoideum]
  misc_feature (1)..(30): Homolog of NCBI NO: 28828484 NR Description: hypothetical protein [Dictyostelium discoideum]
  misc_feature (1)..(207): Homolog of NCBI NO: 38105196 NR Description: hypothetical protein MG03247.4 [Magnaporthe
  misc_feature (1)..(207): Homolog of NCBI NO: 40739628 NR Description: hypothetical protein AN4280.2 [Aspergillus
  misc_feature (5)..(207): Homolog of NCBI NO: 14042724 NR Description: unnamed protein product [Homo sapiens]
  misc_feature (5)..(207): Homolog of NCBI NO: 21314739 NR Description: mitochondrial folate transporter/carrier [Homo >gi|14042275|dbj|BAB55180.1| unnamed protein product [Homo >gi|18256909|gb|AAH21893.1|AAH21893 folate transporter/carrier
  misc_feature (1)..(29): Homolog of NCBI NO: 14042724 NR Description: unnamed protein product [Homo sapiens]

SEQ ID NO: 87120 - DNA, 1513 bp, Arabidopsis thaliana
  misc_feature (1)..(1513): Ceres Seq. ID no. 12697421
  misc_feature: MA Experiment ID: 20000071 Result: Down-regulated in Transcription
  misc_feature: MA Experiment 20000071 PARAMETER Experiment Name: At_100uM_ABA_Mutants_cDNA_P Parameter: Plant Line Value: CS8104
  misc_feature: MA Experiment 20000071 PARAMETER Experiment Name: At_100uM_ABA_Mutants_cDNA_P Parameter: Timepoint (hr) Value: 6
  misc_feature: MA Experiment 20000071 PARAMETER Experiment Name: At_100uM_ABA_Mutants_cDNA_P Parameter: Tissue Value: Aerial
  misc_feature: MA Experiment 20000071 PARAMETER Experiment Name: At_100uM_ABA_Mutants_cDNA_P Parameter: Treatment Value: 100uM ABA vs. No Treatment
  misc_feature: MA Experiment ID: 20000306 Result: Down-regulated in Transcription
  misc_feature: MA Experiment 20000306 PARAMETER Experiment Name: At_Germinating_Seeds_Sub_P Parameter: Age (hr) Value: 6 vs. 0
  misc_feature: MA Experiment 20000306 PARAMETER Experiment Name: At_Germinating_Seeds_Sub_P Parameter: Organism Value: A. thaliana
  misc_feature: MA Experiment 20000306 PARAMETER Experiment Name: At_Germinating_Seeds_Sub_P Parameter: Plant Line Value: WS
  misc_feature: MA Experiment 20000306 PARAMETER Experiment Name: At_Germinating_Seeds_Sub_P Parameter: Tissue Value: Germinating Seeds
  misc_feature: MA Experiment ID: 20000307 Result: Down-regulated in Transcription
  misc_feature: MA Experiment 20000307 PARAMETER Experiment Name: At_Germinating_Seeds_Sub_P Parameter: Age (hr) Value: 24 vs. 0
  misc_feature: MA Experiment 20000307 PARAMETER Experiment Name: At_Germinating_Seeds_Sub_P Parameter: Organism Value: A. thaliana
  misc_feature: MA Experiment 20000307 PARAMETER Experiment Name: At_Germinating_Seeds_Sub_P Parameter: Plant Line Value: WS
  misc_feature: MA Experiment 20000307 PARAMETER Experiment Name: At_Germinating_Seeds_Sub_P Parameter: Tissue Value: Germinating Seeds
  misc_feature: MA Experiment ID: 20000314 Result: Down-regulated in Transcription
  misc_feature: MA Experiment 20000314 PARAMETER Experiment Name: At_14day_Shoots-Roots_Sub_P Parameter: Age (day) Value: 14
  misc_feature: MA Experiment 20000314 PARAMETER Experiment Name: At_14day_Shoots-Roots_Sub_P Parameter: Organism Value: A. thaliana
  misc_feature: MA Experiment 20000314 PARAMETER Experiment Name: At_14day_Shoots-Roots_Sub_P Parameter: Plant Line Value: WS
  misc_feature: MA Experiment 20000314 PARAMETER Experiment Name: At_14day_Shoots-Roots_Sub_P Parameter: Tissue Value: Roots vs. Whole Plant
  misc_feature: MA Experiment ID: 20000315 Result: Down-regulated in Transcription
  misc_feature: MA Experiment 20000315 PARAMETER Experiment Name: At_14day_Shoots-Roots_Sub_P Parameter: Age (day) Value: 14
  misc_feature: MA Experiment 20000315 PARAMETER Experiment Name: At_14day_Shoots-Roots_Sub_P Parameter: Organism Value: A. thaliana
  misc_feature: MA Experiment 20000315 PARAMETER Experiment Name: At_14day_Shoots-Roots_Sub_P Parameter: Plant Line Value: WS
  misc_feature: MA Experiment 20000315 PARAMETER Experiment Name: At_14day_Shoots-Roots_Sub_P Parameter: Tissue Value: Shoots vs. Whole Plant
  misc_feature: MA Experiment ID: 20000328 Result: Up-regulated in Transcription
  misc_feature: MA Experiment 20000328 PARAMETER Experiment Name: At_42deg_Heat_Sub_P Parameter: Age (day) Value: 14
  misc_feature: MA Experiment 20000328 PARAMETER Experiment Name: At_42deg_Heat_Sub_P Parameter: Organism Value: A. thaliana
  misc_feature: MA Experiment 20000328 PARAMETER Experiment Name: At_42deg_Heat_Sub_P Parameter: Plant Line Value: WS
  misc_feature: MA Experiment 20000328 PARAMETER Experiment Name: At_42deg_Heat_Sub_P Parameter: Temperature (deg C) Value: 42 vs. 22
  misc_feature: MA Experiment 20000328 PARAMETER Experiment Name: At_42deg_Heat_Sub_P Parameter: Timepoint (hr) Value: 6
  misc_feature: MA Experiment 20000328 PARAMETER Experiment Name: At_42deg_Heat_Sub_P Parameter: Tissue Value: Aerial
  misc_feature: MA Experiment ID: 20000346 Result: Up-regulated in Transcription
  misc_feature: MA Experiment 20000346 PARAMETER Experiment Name: At_2mM_SA_Sub_P Parameter: Age (day) Value: 14
  misc_feature: MA Experiment 20000346 PARAMETER Experiment Name: At_2mM_SA_Sub_P Parameter: Organism Value: A. thaliana
  misc_feature: MA Experiment 20000346 PARAMETER Experiment Name: At_2mM_SA_Sub_P Parameter: Plant Line Value: WS
  misc_feature: MA Experiment 20000346 PARAMETER Experiment Name: At_2mM_SA_Sub_P Parameter: Timepoint (hr) Value: 1
  misc_feature: MA Experiment 20000346 PARAMETER Experiment Name: At_2mM_SA_Sub_P Parameter: Tissue Value: Aerial
  misc_feature: MA Experiment 20000346 PARAMETER Experiment Name: At_2mM_SA_Sub_P Parameter: Treatment Value: 2mM SA vs. No Treatment
  misc_feature: MA Experiment ID: 20000347 Result: Up-regulated in Transcription
  misc_feature: MA Experiment 20000347 PARAMETER Experiment Name: At_2mM_SA_Sub_P Parameter: Age (day) Value: 14
  misc_feature: MA Experiment 20000347 PARAMETER Experiment Name: At_2mM_SA_Sub_P Parameter: Organism Value: A. thaliana
  misc_feature: MA Experiment 20000347 PARAMETER Experiment Name: At_2mM_SA_Sub_P Parameter: Plant Line Value: WS
  misc_feature: MA Experiment 20000347 PARAMETER Experiment Name: At_2mM_SA_Sub_P Parameter: Timepoint (hr) Value: 6
  misc_feature: MA Experiment 20000347 PARAMETER Experiment Name: At_2mM_SA_Sub_P Parameter: Tissue Value: Aerial
  misc_feature: MA Experiment 20000347 PARAMETER Experiment Name: At_2mM_SA_Sub_P Parameter: Treatment Value: 2mM SA vs. No Treatment
  misc_feature: MA Experiment ID: 20000355 Result: Down-regulated in Transcription
  misc_feature: MA Experiment 20000355 PARAMETER Experiment Name: At_Siliques_Sub_P Parameter: Age (day) Value: 21
  misc_feature: MA Experiment 20000355 PARAMETER Experiment Name: At_Siliques_Sub_P Parameter: Organism Value: A. thaliana
  misc_feature: MA Experiment 20000355 PARAMETER Experiment Name: At_Siliques_Sub_P Parameter: Plant Line Value: WS
  misc_feature: MA Experiment 20000355 PARAMETER Experiment Name: At_Siliques_Sub_P Parameter: Tissue Value: Less Than 5mm Siliques vs. Whole Plant
  misc_feature: MA Experiment ID: 20000440 Result: Down-regulated in Transcription
  misc_feature: MA Experiment 20000440 PARAMETER Experiment Name: At_Closed-Flower__Sub_P Parameter: Tissue Value: Closed Flower vs. Whole Plant
  misc_feature: MA Experiment ID: 20000634 Result: Up-regulated in Transcription
  misc_feature: MA Experiment 20000634 PARAMETER Experiment Name: At_10percent_PEG_Sub_P Parameter: Age (day) Value: 12
  misc_feature: MA Experiment 20000634 PARAMETER Experiment Name: At_10percent_PEG_Sub_P Parameter: Organism Value: A. thaliana
  misc_feature: MA Experiment 20000634 PARAMETER Experiment Name: At_10percent_PEG_Sub_P Parameter: Plant Line Value: WS
  misc_feature: MA Experiment 20000634 PARAMETER Experiment Name: At_10percent_PEG_Sub_P Parameter: Timepoint (day) Value: 12
  misc_feature: MA Experiment 20000634 PARAMETER Experiment Name: At_10percent_PEG_Sub_P Parameter: Tissue Value: Whole Plant
  misc_feature: MA Experiment 20000634 PARAMETER Experiment Name: At_10percent_PEG_Sub_P Parameter: Treatment Value: 10% PEG vs. No Treatment
aaattcaaaatttaacacacaaacacaaacacacacaccaaaaaaaacacagaccttaaaaaaataaaaatggttgatatggattggaagaggaagatggtatcatcagatttaccaaactcacctaagctttcttcaaagcttcacgtaactattccatcaccgttcaaaatcgtccctgtttcatctccgatctcatgttcagcacctgctctttgctctgcttacgagctttaccttcgtctccctgagctaagaaagctctggtcatctcgtgattttcctcaatggacatcagagccgattctcaaaccagctcttcaagctttggagatcagtttcagattagttttcgccgtttgttctgatactagaccgtacatcaaccaccgtgaatggaaccggaggctagattctctcatcacgaagcagatccagcttgtagcagcgatctgcgaagatgaagaagaagaaggtatatcagcggaggctccggtcggcggtggacggagttcgttgagtttgttaccgcagctagctacgtggaggagatcagaggctttggggaagaagatcttatatacgatcgataacgagatgagtcggtgtaagtacacgctcggactcggtgaacaaaacatcgccggaaaaccaaatctccggtacgatgcgatttgccgaccaaacgagatctatagcctcaaggataatccatacgcagatcatatcgataatcacgagaatcaaactctctatatcattcaccagatcctcgaatcgtggatctacgcatctggaaatcttctgaatcgaatcgtctcaagtatcgaagaagagaaattcggaaaagcttcaaacgatgtttacttgctggagaagatctggaaaattttagcggagattgaagatcttcatatgttgatggatccggaagattttttgaaattgaagaaacagttacagatcaaatcgacgggtaaaaacgatgcgttttgtttcagatctaaaggattagtggagatgatgaagatgtcgaaagatctgagacagaaagtaccggcggtcttggcggttgaggtagatccaaccggaggaccaagattacaagaggcggcgatgaagctttacgcgaggaagacagagtgcgataagattcatttgcttcaggggatgcaagcggtggaagcggcggcgaagagtttcttctttgggtataggcagttagtggcggctatgatgggaagtgcggagatgaacgcgacggcgagtcaagagtcgtgtgactcactgagtcagatatttatggagccgacgtatttcccgagccttgacgcggcaaagacgtttctgggagagttttggagtcatttgggatgattaaattttaatttctgctggtataattatttaatataaatttaaattggtggtttggtttaatttagtttgtaagatagtgaaatttttggaacatttgacgatccatatttgaatacaaattcatttttatatg

SEQ ID NO: 87121 - protein, 435 aa, Arabidopsis thaliana; identical to SEQ ID NO: 22980
  peptide (1)..(435): Ceres Seq. ID no. 12697422
  misc_feature (1)..(435): Homolog of NCBI NO: 15225612 NR Description: putative nematode-resistance protein; protein id:
  misc_feature (1)..(435): Homolog of NCBI NO: 21593007 NR Description: putative nematode-resistance protein [Arabidopsis
  misc_feature (1)..(435): Homolog of NCBI NO: 27311581 NR Description: Unknown protein [Arabidopsis thaliana]
  misc_feature (1)..(434): Homolog of NCBI NO: 15228750 NR Description: nematode resistance protein-like protein; protein At3g55840.1, supported by cDNA: 149697., supported by cDNA: supported by cDNA: gi_17979106 [Arabidopsis thaliana]
  misc_feature (1)..(434): Homolog of NCBI NO: 21553529 NR Description: nematode resistance protein-like protein

SEQ ID NO: 87122 - protein, 432 aa, Arabidopsis thaliana; identical to SEQ ID NO: 22981
  peptide (1)..(432): Ceres Seq. ID no. 12697423
  misc_feature (1)..(432): Homolog of NCBI NO: 15225612 NR Description: putative nematode-resistance protein; protein id:
  misc_feature (1)..(432): Homolog of NCBI NO: 21593007 NR Description: putative nematode-resistance protein [Arabidopsis
  misc_feature (1)..(432): Homolog of NCBI NO: 27311581 NR Description: Unknown protein [Arabidopsis thaliana]
  misc_feature (1)..(431): Homolog of NCBI NO: 15228750 NR Description: nematode resistance protein-like protein; protein At3g55840.1, supported by cDNA: 149697., supported by cDNA: supported by cDNA: gi_17979106 [Arabidopsis thaliana]
  misc_feature (1)..(431): Homolog of NCBI NO: 21553529 NR Description: nematode resistance protein-like protein

SEQ ID NO: 87123 - protein, 426 aa, Arabidopsis thaliana; identical to SEQ ID NO: 22982
  peptide (1)..(426): Ceres Seq. ID no. 12697424
  misc_feature (1)..(426): Homolog of NCBI NO: 15225612 NR Description: putative nematode-resistance protein; protein id:
  misc_feature (1)..(426): Homolog of NCBI NO: 21593007 NR Description: putative nematode-resistance protein [Arabidopsis
  misc_feature (1)..(426): Homolog of NCBI NO: 27311581 NR Description: Unknown protein [Arabidopsis thaliana]
  misc_feature (1)..(425): Homolog of NCBI NO: 15228750 NR Description: nematode resistance protein-like protein; protein At3g55840.1, supported by cDNA: 149697., supported by cDNA: supported by cDNA: gi_17979106 [Arabidopsis thaliana]
  misc_feature (1)..(425): Homolog of NCBI NO: 21553529 NR Description: nematode resistance protein-like protein

SEQ ID NO: 87124 - DNA, 1778 bp, Arabidopsis thaliana
  misc_feature (1)..(1778): Ceres Seq. ID no. 12697459
  misc_feature: MA Experiment ID: 108434 Result: Down-regulated in Transcription
  misc_feature: MA Experiment 108434 PARAMETER Experiment Name: At_Root_Tips_cDNA_P Parameter: Tissue Value: Root Tips
  misc_feature: MA Experiment ID: 108463 Result: Up-regulated in Transcription
  misc_feature: MA Experiment 108463 PARAMETER Experiment Name: At_Germinating_Seeds_cDNA_P Parameter: Age (day) Value: 3 vs. 0
  misc_feature: MA Experiment 108463 PARAMETER Experiment Name: At_Germinating_Seeds_cDNA_P Parameter: Tissue Value: Germinating Seeds
  misc_feature: MA Experiment ID: 108464 Result: Up-regulated in Transcription
  misc_feature: MA Experiment 108464 PARAMETER Experiment Name: At_Germinating_Seeds_cDNA_P Parameter: Age (day) Value: 4 vs. 0
  misc_feature: MA Experiment 108464 PARAMETER Experiment Name: At_Germinating_Seeds_cDNA_P Parameter: Tissue Value: Germinating Seeds
  misc_feature: MA Experiment ID: 108569 Result: Up-regulated in Transcription
  misc_feature: MA Experiment 108569 PARAMETER Experiment Name: At_0.001%_MeJA__cDNA_P Parameter: Timepoint (hr) Value: 6
  misc_feature: MA Experiment 108569 PARAMETER Experiment Name: At_0.001%_MeJA__cDNA_P Parameter: Tissue Value: Aerial
  misc_feature: MA Experiment 108569 PARAMETER Experiment Name: At_0.001%_MeJA__cDNA_P Parameter: Treatment Value: 0.001% MeJA vs. No Treatment
  misc_feature: MA Experiment ID: 108579 Result: Up-regulated in Transcription
  misc_feature: MA Experiment 108579 PARAMETER Experiment Name: At_4deg_Cold_cDNA_P Parameter: Temperature (deg C) Value: 4 vs. 22
  misc_feature: MA Experiment 108579 PARAMETER Experiment Name: At_4deg_Cold_cDNA_P Parameter: Timepoint (hr) Value: 6
  misc_feature: MA Experiment 108579 PARAMETER Experiment Name: At_4deg_Cold_cDNA_P Parameter: Tissue Value: Aerial
  misc_feature: MA Experiment ID: 108668 Result: Up-regulated in Transcription
  misc_feature: MA Experiment 108668 PARAMETER Experiment Name: At_2mM_SA_cDNA_P Parameter: Plant Line Value: WS
  misc_feature: MA Experiment 108668 PARAMETER Experiment Name: At_2mM_SA_cDNA_P Parameter: Timepoint (hr) Value: 6
  misc_feature: MA Experiment 108668 PARAMETER Experiment Name: At_2mM_SA_cDNA_P Parameter: Treatment Value: 2mM SA vs. No Treatment
  misc_feature: MA Experiment ID: 20000113 Result: Down-regulated in Transcription
  misc_feature: MA Experiment 20000113 PARAMETER Experiment Name: At_42deg_Heat_cDNA_P Parameter: Temperature (deg C) Value: 42 vs. 22
  misc_feature: MA Experiment 20000113 PARAMETER Experiment Name: At_42deg_Heat_cDNA_P Parameter: Timepoint (hr) Value: 8
  misc_feature: MA Experiment 20000113 PARAMETER Experiment Name: At_42deg_Heat_cDNA_P Parameter: Tissue Value: Aerial
  misc_feature: MA Experiment ID: 20000144 Result: Down-regulated in Transcription
  misc_feature: MA Experiment 20000144 PARAMETER Experiment Name: At_42deg_Heat_cDNA_P Parameter: Temperature (deg C) Value: 42 vs. 22
  misc_feature: MA Experiment 20000144 PARAMETER Experiment Name: At_42deg_Heat_cDNA_P Parameter: Timepoint (hr) Value: 1
  misc_feature: MA Experiment 20000144 PARAMETER Experiment Name: At_42deg_Heat_cDNA_P Parameter: Tissue Value: Aerial
  misc_feature: MA Experiment ID: 20000171 Result: Down-regulated in Transcription
  misc_feature: MA Experiment 20000171 PARAMETER Experiment Name: At_42deg_Heat_P Parameter: Age (day) Value: 14
  misc_feature: MA Experiment 20000171 PARAMETER Experiment Name: At_42deg_Heat_P Parameter: Organism Value: A. thaliana
  misc_feature: MA Experiment 20000171 PARAMETER Experiment Name: At_42deg_Heat_P Parameter: Plant Line Value: WS
  misc_feature: MA Experiment 20000171 PARAMETER Experiment Name: At_42deg_Heat_P Parameter: Temperature (deg C) Value: 42 vs. 22
  misc_feature: MA Experiment 20000171 PARAMETER Experiment Name: At_42deg_Heat_P Parameter: Timepoint (hr) Value: 1
  misc_feature: MA Experiment 20000171 PARAMETER Experiment Name: At_42deg_Heat_P Parameter: Tissue Value: Aerial
  misc_feature: MA Experiment ID: 20000173 Result: Down-regulated in Transcription
  misc_feature: MA Experiment 20000173 PARAMETER Experiment Name: At_42deg_Heat_P Parameter: Age (day) Value: 14
  misc_feature: MA Experiment 20000173 PARAMETER Experiment Name: At_42deg_Heat_P Parameter: Organism Value: A. thaliana
  misc_feature: MA Experiment 20000173 PARAMETER Experiment Name: At_42deg_Heat_P Parameter: Plant Line Value: WS
  misc_feature: MA Experiment 20000173 PARAMETER Experiment Name: At_42deg_Heat_P Parameter: Temperature (deg C) Value: 42 vs. 22
  misc_feature: MA Experiment 20000173 PARAMETER Experiment Name: At_42deg_Heat_P Parameter: Timepoint (hr) Value: 6
  misc_feature: MA Experiment 20000173 PARAMETER Experiment Name: At_42deg_Heat_P Parameter: Tissue Value: Aerial
  misc_feature: MA Experiment ID: 20000182 Result: Up-regulated in Transcription
  misc_feature: MA Experiment 20000182 PARAMETER Experiment Name: At_2mM_SA_P Parameter: Age (day) Value: 14
  misc_feature: MA Experiment 20000182 PARAMETER Experiment Name: At_2mM_SA_P Parameter: Organism Value: A. thaliana
  misc_feature: MA Experiment 20000182 PARAMETER Experiment Name: At_2mM_SA_P Parameter: Plant Line Value: WS
  misc_feature: MA Experiment 20000182 PARAMETER Experiment Name: At_2mM_SA_P Parameter: Timepoint (hr) Value: 6
  misc_feature: MA Experiment 20000182 PARAMETER Experiment Name: At_2mM_SA_P Parameter: Tissue Value: Aerial
  misc_feature: MA Experiment 20000182 PARAMETER Experiment Name: At_2mM_SA_P Parameter: Treatment Value: 2mM SA vs. No Treatment
  misc_feature: MA Experiment ID: 20000184 Result: Down-regulated in Transcription
  misc_feature: MA Experiment 20000184 PARAMETER Experiment Name: At_Shoots__P Parameter: Age (day) Value: 7
  misc_feature: MA Experiment 20000184 PARAMETER Experiment Name: At_Shoots__P Parameter: Tissue Value: Shoots vs. Whole Plant
  misc_feature: MA Experiment ID: 20000185 Result: Down-regulated in Transcription
  misc_feature: MA Experiment 20000185 PARAMETER Experiment Name: At_Roots__P Parameter: Age (day) Value: 7 vs. 21
  misc_feature: MA Experiment 20000185 PARAMETER Experiment Name: At_Roots__P Parameter: Organism Value: A. thaliana
  misc_feature: MA Experiment 20000185 PARAMETER Experiment Name: At_Roots__P Parameter: Tissue Value: Roots vs. Whole Plant
  misc_feature: MA Experiment ID: 20000227 Result: Down-regulated in Transcription
  misc_feature: MA Experiment 20000227 PARAMETER Experiment Name: At_Root-Tips-vs-Tops_P Parameter: Tissue Value: Root Tips vs. Root Tops
  misc_feature: MA Experiment ID: 20000234 Result: Down-regulated in Transcription
  misc_feature: MA Experiment 20000234 PARAMETER Experiment Name: At_Siliques_P Parameter: Age (day) Value: 21
  misc_feature: MA Experiment 20000234 PARAMETER Experiment Name: At_Siliques_P Parameter: Organism Value: A. thaliana
  misc_feature: MA Experiment 20000234 PARAMETER Experiment Name: At_Siliques_P Parameter: Plant Line Value: WS
  misc_feature: MA Experiment 20000234 PARAMETER Experiment Name: At_Siliques_P Parameter: Tissue Value: Less Than 5mm Siliques vs. Whole Plant
  misc_feature: MA Experiment ID: 20000264 Result: Down-regulated in Transcription
  misc_feature: MA Experiment 20000264 PARAMETER Experiment Name: At_Open_Flower_P Parameter: Age (day) Value: 21
  misc_feature: MA Experiment 20000264 PARAMETER Experiment Name: At_Open_Flower_P Parameter: Plant Line Value: WS
  misc_feature: MA Experiment 20000264 PARAMETER Experiment Name: At_Open_Flower_P Parameter: Tissue Value: Open Flower vs. Whole Plant
  misc_feature: MA Experiment ID: 20000265 Result: Down-regulated in Transcription
  misc_feature: MA Experiment 20000265 PARAMETER Experiment Name: At_Open_Flower_P Parameter: Age (day) Value: 21
  misc_feature: MA Experiment 20000265 PARAMETER Experiment Name: At_Open_Flower_P Parameter: Plant Line Value: WS
  misc_feature: MA Experiment 20000265 PARAMETER Experiment Name: At_Open_Flower_P Parameter: Tissue Value: Closed Flower vs. Whole Plant
  misc_feature: MA Experiment ID: 20000286 Result: Down-regulated in Transcription
  misc_feature: MA Experiment 20000286 PARAMETER Experiment Name: At_Open_Flower_P Parameter: Age (day) Value: 21
  misc_feature: MA Experiment 20000286 PARAMETER Experiment Name: At_Open_Flower_P Parameter: Plant Line Value: WS
  misc_feature: MA Experiment 20000286 PARAMETER Experiment Name: At_Open_Flower_P Parameter: Tissue Value: Half Open vs. Whole Plant
  misc_feature: MA Experiment ID: 20000437 Result: Down-regulated in Transcription
  misc_feature: MA Experiment 20000437 PARAMETER Experiment Name: At_Drought_P Parameter: Age (day) Value: 8
  misc_feature: MA Experiment 20000437 PARAMETER Experiment Name: At_Drought_P Parameter: Organism Value: A. thaliana
  misc_feature: MA Experiment 20000437 PARAMETER Experiment Name: At_Drought_P Parameter: Plant Line Value: WS
  misc_feature: MA Experiment 20000437 PARAMETER Experiment Name: At_Drought_P Parameter: Timepoint (hr) Value: 24
  misc_feature: MA Experiment 20000437 PARAMETER Experiment Name: At_Drought_P Parameter: Tissue Value: Whole Plant
  misc_feature: MA Experiment 20000437 PARAMETER Experiment Name: At_Drought_P Parameter: Treatment Value: Drought vs. No Drought
  misc_feature: MA Experiment ID: 20000438 Result: Down-regulated in Transcription
  misc_feature: MA Experiment 20000438 PARAMETER Experiment Name: At_Shoots__P Parameter: Age (day) Value: 14
  misc_feature: MA Experiment 20000438 PARAMETER Experiment Name: At_Shoots__P Parameter: Tissue Value: Shoots vs. Whole Plant
  misc_feature: MA Experiment ID: 20000439 Result: Down-regulated in Transcription
  misc_feature: MA Experiment 20000439 PARAMETER Experiment Name: At_Roots__P Parameter: Age (day) Value: 14 vs. 21
  misc_feature: MA Experiment 20000439 PARAMETER Experiment Name: At_Roots__P Parameter: Organism Value: A. thaliana
  misc_feature: MA Experiment 20000439 PARAMETER Experiment Name: At_Roots__P Parameter: Tissue Value: Roots vs. Whole Plant
  misc_feature: MA Experiment ID: 20000794 Result: Down-regulated in Transcription
  misc_feature: MA Experiment 20000794 PARAMETER Experiment Name: At_Petals_P Parameter: Age (day) Value: 23-25 days
  misc_feature: MA Experiment 20000794 PARAMETER Experiment Name: At_Petals_P Parameter: Plant Line Value: WS
  misc_feature: MA Experiment 20000794 PARAMETER Experiment Name: At_Petals_P Parameter: Tissue Value: Petals vs. Whole plant
  misc_feature: MA Experiment ID: 20001555 Result: Down-regulated in Transcription
  misc_feature: MA Experiment 20001555 PARAMETER Experiment Name: At_Drought_Soil_Dry_P Parameter: Age (day) Value: 24
  misc_feature: MA Experiment 20001555 PARAMETER Experiment Name: At_Drought_Soil_Dry_P Parameter: Organism Value: A. thaliana
  misc_feature: MA Experiment 20001555 PARAMETER Experiment Name: At_Drought_Soil_Dry_P Parameter: Plant Line Value: WS
  misc_feature: MA Experiment 20001555 PARAMETER Experiment Name: At_Drought_Soil_Dry_P Parameter: Post Timepoint (hr) Value: None
  misc_feature: MA Experiment 20001555 PARAMETER Experiment Name: At_Drought_Soil_Dry_P Parameter: Post-Treatment Value: None
  misc_feature: MA Experiment 20001555 PARAMETER Experiment Name: At_Drought_Soil_Dry_P Parameter: Timepoint (day) Value: 10
  misc_feature: MA Experiment 20001555 PARAMETER Experiment Name: At_Drought_Soil_Dry_P Parameter: Treatment Value: Drought vs. No Drought
  misc_feature: MA Experiment ID: 20001556 Result: Down-regulated in Transcription
  misc_feature: MA Experiment 20001556 PARAMETER Experiment Name: At_Drought_Soil_Dry_P Parameter: Age (day) Value: 26
  misc_feature: MA Experiment 20001556 PARAMETER Experiment Name: At_Drought_Soil_Dry_P Parameter: Organism Value: A. thaliana
  misc_feature: MA Experiment 20001556 PARAMETER Experiment Name: At_Drought_Soil_Dry_P Parameter: Plant Line Value: WS
  misc_feature: MA Experiment 20001556 PARAMETER Experiment Name: At_Drought_Soil_Dry_P Parameter: Post Timepoint (hr) Value: None
  misc_feature: MA Experiment 20001556 PARAMETER Experiment Name: At_Drought_Soil_Dry_P Parameter: Post-Treatment Value: None
  misc_feature: MA Experiment 20001556 PARAMETER Experiment Name: At_Drought_Soil_Dry_P Parameter: Timepoint (day) Value: 12
  misc_feature: MA Experiment 20001556 PARAMETER Experiment Name: At_Drought_Soil_Dry_P Parameter: Treatment Value: Drought vs. No Drought
  misc_feature: MA Experiment ID: 20001557 Result: Down-regulated in Transcription
  misc_feature: MA Experiment 20001557 PARAMETER Experiment Name: At_Drought_Soil_Dry_P Parameter: Age (day) Value: 27
  misc_feature: MA Experiment 20001557 PARAMETER Experiment Name: At_Drought_Soil_Dry_P Parameter: Organism Value: A. thaliana
  misc_feature: MA Experiment 20001557 PARAMETER Experiment Name: At_Drought_Soil_Dry_P Parameter: Plant Line Value: WS
  misc_feature: MA Experiment 20001557 PARAMETER Experiment Name: At_Drought_Soil_Dry_P Parameter: Post Timepoint (hr) Value: 3
  misc_feature: MA Experiment 20001557 PARAMETER Experiment Name: At_Drought_Soil_Dry_P Parameter: Post-Treatment Value: Re-Water vs. No Drought
  misc_feature: MA Experiment 20001557 PARAMETER Experiment Name: At_Drought_Soil_Dry_P Parameter: Timepoint (day) Value: 13
  misc_feature: MA Experiment 20001557 PARAMETER Experiment Name: At_Drought_Soil_Dry_P Parameter: Treatment Value: Drought vs. No Drought
  misc_feature: MA Experiment ID: 20001558 Result: Down-regulated in Transcription
  misc_feature: MA Experiment 20001558 PARAMETER Experiment Name: At_Drought_Soil_Dry_P Parameter: Age (day) Value: 27
  misc_feature: MA Experiment 20001558 PARAMETER Experiment Name: At_Drought_Soil_Dry_P Parameter: Organism Value: A. thaliana
  misc_feature: MA Experiment 20001558 PARAMETER Experiment Name: At_Drought_Soil_Dry_P Parameter: Plant Line Value: WS
  misc_feature: MA Experiment 20001558 PARAMETER Experiment Name: At_Drought_Soil_Dry_P Parameter: Post Timepoint (hr) Value: 6
  misc_feature: MA Experiment 20001558 PARAMETER Experiment Name: At_Drought_Soil_Dry_P Parameter: Post-Treatment Value: Re-Water vs. No Drought
  misc_feature: MA Experiment 20001558 PARAMETER Experiment Name: At_Drought_Soil_Dry_P Parameter: Timepoint (day) Value: 13
  misc_feature: MA Experiment 20001558 PARAMETER Experiment Name: At_Drought_Soil_Dry_P Parameter: Treatment Value: Drought vs. No Drought
  misc_feature: MA Experiment ID: 20001560 Result: Down-regulated in Transcription
  misc_feature: MA Experiment 20001560 PARAMETER Experiment Name: At_Drought_Soil_Dry_P Parameter: Age (day) Value: 28
  misc_feature: MA Experiment 20001560 PARAMETER Experiment Name: At_Drought_Soil_Dry_P Parameter: Organism Value: A. thaliana
  misc_feature: MA Experiment 20001560 PARAMETER Experiment Name: At_Drought_Soil_Dry_P Parameter: Plant Line Value: WS
  misc_feature: MA Experiment 20001560 PARAMETER Experiment Name: At_Drought_Soil_Dry_P Parameter: Post Timepoint (hr) Value: None
  misc_feature: MA Experiment 20001560 PARAMETER Experiment Name: At_Drought_Soil_Dry_P Parameter: Post-Treatment Value: None
  misc_feature: MA Experiment 20001560 PARAMETER Experiment Name: At_Drought_Soil_Dry_P Parameter: Timepoint (day) Value: 14
  misc_feature: MA Experiment 20001560 PARAMETER Experiment Name: At_Drought_Soil_Dry_P Parameter: Treatment Value: Drought vs. No Drought
  misc_feature: MA Experiment ID: 20001904 Result: Down-regulated in Transcription
  misc_feature: MA Experiment 20001904 PARAMETER Experiment Name: At_Drought_Reproduction_P Parameter: Age (day) Value: 37
  misc_feature: MA Experiment 20001904 PARAMETER Experiment Name: At_Drought_Reproduction_P Parameter: Organism Value: A. thaliana
  misc_feature: MA Experiment 20001904 PARAMETER Experiment Name: At_Drought_Reproduction_P Parameter: Plant Line Value: WS
  misc_feature: MA Experiment 20001904 PARAMETER Experiment Name: At_Drought_Reproduction_P Parameter: Timepoint (day) Value: 7
  misc_feature: MA Experiment 20001904 PARAMETER Experiment Name: At_Drought_Reproduction_P Parameter: Tissue Value: Rosettes
  misc_feature: MA Experiment 20001904 PARAMETER Experiment Name: At_Drought_Reproduction_P Parameter: Treatment Value: Drought vs. No Drought
  misc_feature: MA Experiment ID: 20001905 Result: Down-regulated in Transcription
  misc_feature: MA Experiment 20001905 PARAMETER Experiment Name: At_Drought_Reproduction_P Parameter: Age (day) Value: 40
  misc_feature: MA Experiment 20001905 PARAMETER Experiment Name: At_Drought_Reproduction_P Parameter: Organism Value: A. thaliana
  misc_feature: MA Experiment 20001905 PARAMETER Experiment Name: At_Drought_Reproduction_P Parameter: Plant Line Value: WS
  misc_feature: MA Experiment 20001905 PARAMETER Experiment Name: At_Drought_Reproduction_P Parameter: Timepoint (day) Value: 10
  misc_feature: MA Experiment 20001905 PARAMETER Experiment Name: At_Drought_Reproduction_P Parameter: Tissue Value: Rosettes
  misc_feature: MA Experiment 20001905 PARAMETER Experiment Name: At_Drought_Reproduction_P Parameter: Treatment Value: Drought vs. No Drought
gctttttctgattgcttctctgatctcttatctctaattctaatccatagtaaactcgatttcatcatcttctgctcacaacacttactgttgttgttgttgttgttattgttcttctcgattcactcgatcgatgttgttcaaaatgcgttcttttgtggcttttgtgctccttctgagctggttcggttcgtgttgttctctcaaggaccaagctgtagattttctcaaaagtgaagatagtttaaagaaagatctatcgtcagatgaagattccacgtatttgaaagcttttggatttcacaggaaaacacttgtccgtaacccttacaaagacttgccttcaagaaaagaccgcaaaaaccgtgttgtggctgcaactacaacaccatcatcatccccagaacctgctccaaaacatgtttcaactaaagcttcaacagtttcagagccacaaaagagatcatctacacaagatgtttcaccttctccatctgcgccacttgcaaactctcccattccaagaaactctcattcttctgttcctttagttgttggctgcgtaggcggtgctttttttcttctccttgtagctaccggtctctactttttcacaagtaaggccgggaaaactgtgaatccttggcgtactggtcttagtggacaacttcagaaagtattcgttactggtattcctgtactcaaaagatctgagattgaagctgcatgtgaagattttagtaatgtcattggatcttgtcccattgggaagttgttcaaaggaacattatcaagtggagtggagattgctgttgcttcttttgctactactactgccaaagactggaaggacagtacagaaattcacttcaggaagaagatcgaaatgttatcgaagatcaaccacaagaattttgcaaaccttcttggttattgtgaagaaaaggaacctttcaccaggatcttgatctttgagtatgctccaaatggatcactctttgagcatttacattataaagaatcagaacacttggattggggaatgcggttaagaattgcaatgggattagcatattgccttgaccatatgcaccaactcaatccacctatagctcacaccaatctcgtctcatcatctcttcagctcacagaggattatgctgtcaaagtatcagatttcagtttcggttcatctgagacagagactaacatcaacaacaacacagtcatagacacacacatctcagccttgaatccagaagacaacatttacagctttggtttactgttattcgaaatgataaccgggaaactcatagaatccgttaacaaacctgactcagtagatagctcgctggttgatttcttaagaggagagactctagccaaaatggtagatccaacactggaatcttatgatgccaagattgagaatataggtgaagtgatcaaatcatgccttaggactgacccgaaagagagacctacaatgcaagaagtcacaggatggttacgggagatcacgggattgtcaccgaacgatgctacaccgaaattgtcacctctttggtgggcagagttggaggttttgtccacggcgtaagagagaccccttcactaataaaactgtatatattttgaagatgtgagttttgtaagtgtctgttttatttatctctcgtaatattggtaaagcaaaattgaagttctcttcaagtttagtaaatttacaaacatgtatatgataaattagtgtgcatatcggaaaaaagttcttg

SEQ ID NO: 87125 - protein, 489 aa, Arabidopsis thaliana; identical to SEQ ID NO: 41786
  peptide (1)..(489): Ceres Seq. ID no. 12697460
  misc_feature (200)..(460): Pfam Name: Protein kinase domain Pfam Description: Protein kinase domain
  misc_feature (1)..(489): Homolog of NCBI NO: 18405327 NR Description: putative protein kinase; protein id: At2g40270.1, by cDNA: 123911., supported by cDNA: gi_20147220 [Arabidopsis >gi|20147221|gb|AAM10326.1| At2g40270/T7M7.15 kinase [Arabidopsis
  misc_feature (5)..(489): Homolog of NCBI NO: 4588001 NR Description: hypothetical Ser-Thr protein kinase [Arabidopsis
  misc_feature (6)..(489): Homolog of NCBI NO: 15228810 NR Description: putative protein kinase; protein id: At3g56050.1, by cDNA: gi_15028142, supported by cDNA: gi_20259276, supported cDNA: gi_20466709 [Arabidopsis thaliana] >gi|11358664|pir||T47722
  misc_feature (252)..(489): Homolog of NCBI NO: 25408681 NR Description: probable protein kinase [imported] - Arabidopsis
  misc_feature (167)..(488): Homolog of NCBI NO: 28916446 NR Description: ser-thr protein kinase [Gossypium hirsutum]
  misc_feature (26)..(487): Homolog of NCBI NO: 34911074 NR Description: putative receptor protein kinase-like protein
  misc_feature (82)..(488): Homolog of NCBI NO: 15242513 NR Description: leucine-rich repeat transmembrane protein kinase,
  misc_feature (70)..(488): Homolog of NCBI NO: 7486276 NR Description: hypothetical protein F28A21.50 - Arabidopsis (fragment) >gi|4539383|emb|CAB37449.1| putative protein
  misc_feature (70)..(488): Homolog of NCBI NO: 7268658 NR Description: putative protein (fragment) [Arabidopsis thaliana]
  misc_feature (70)..(488): Homolog of NCBI NO: 30684487 NR Description: leucine-rich repeat transmembrane protein kinase,

SEQ ID NO: 87126 - protein, 485 aa, Arabidopsis thaliana; identical to SEQ ID NO: 41787
  peptide (1)..(485): Ceres Seq. ID no. 12697461
  misc_feature (196)..(456): Pfam Name: Protein kinase domain Pfam Description: Protein kinase domain
  misc_feature (1)..(485): Homolog of NCBI NO: 18405327 NR Description: putative protein kinase; protein id: At2g40270.1, by cDNA: 123911., supported by cDNA: gi_20147220 [Arabidopsis >gi|20147221|gb|AAM10326.1| At2g40270/T7M7.15 kinase [Arabidopsis
  misc_feature (1)..(485): Homolog of NCBI NO: 4588001 NR Description: hypothetical Ser-Thr protein kinase [Arabidopsis
  misc_feature (2)..(485): Homolog of NCBI NO: 15228810 NR Description: putative protein kinase; protein id: At3g56050.1, by cDNA: gi_15028142, supported by cDNA: gi_20259276, supported cDNA: gi_20466709 [Arabidopsis thaliana] >gi|11358664|pir||T47722
  misc_feature (248)..(485): Homolog of NCBI NO: 25408681 NR Description: probable protein kinase [imported] - Arabidopsis
  misc_feature (163)..(484): Homolog of NCBI NO: 28916446 NR Description: ser-thr protein kinase [Gossypium hirsutum]
  misc_feature (22)..(483): Homolog of NCBI NO: 34911074 NR Description: putative receptor protein kinase-like protein
  misc_feature (78)..(484): Homolog of NCBI NO: 15242513 NR Description: leucine-rich repeat transmembrane protein kinase,
  misc_feature (66)..(484): Homolog of NCBI NO: 7486276 NR Description: hypothetical protein F28A21.50 - Arabidopsis (fragment) >gi|4539383|emb|CAB37449.1| putative protein
  misc_feature (66)..(484): Homolog of NCBI NO: 7268658 NR Description: putative protein (fragment) [Arabidopsis thaliana]
  misc_feature (66)..(484): Homolog of NCBI NO: 30684487 NR Description: leucine-rich repeat transmembrane protein kinase,

SEQ ID NO: 87127 - DNA, 1402 bp, Arabidopsis thaliana
  misc_feature (1)..(1402): Ceres Seq. ID no. 12697462
  misc_feature: MA Experiment ID: 108434 Result: Up-regulated in Transcription
  misc_feature: MA Experiment 108434 PARAMETER Experiment Name: At_Root_Tips_cDNA_P Parameter: Tissue Value: Root Tips
  misc_feature: MA Experiment ID: 108462 Result: Down-regulated in Transcription
  misc_feature: MA Experiment 108462 PARAMETER Experiment Name: At_Germinating_Seeds_cDNA_P Parameter: Age (day) Value: 2 vs. 0
  misc_feature: MA Experiment 108462 PARAMETER Experiment Name: At_Germinating_Seeds_cDNA_P Parameter: Tissue Value: Germinating Seeds
  misc_feature: MA Experiment ID: 108463 Result: Down-regulated in Transcription
  misc_feature: MA Experiment 108463 PARAMETER Experiment Name: At_Germinating_Seeds_cDNA_P Parameter: Age (day) Value: 3 vs. 0
  misc_feature: MA Experiment 108463 PARAMETER Experiment Name: At_Germinating_Seeds_cDNA_P Parameter: Tissue Value: Germinating Seeds
  misc_feature: MA Experiment ID: 108595 Result: Down-regulated in Transcription
  misc_feature: MA Experiment 108595 PARAMETER Experiment Name: At_Ler-pi_Ovule_cDNA_P Parameter: Plant Line Value: null
  misc_feature: MA Experiment ID: 20000234 Result: Up-regulated in Transcription
  misc_feature: MA Experiment 20000234 PARAMETER Experiment Name: At_Siliques_P Parameter: Age (day) Value: 21
  misc_feature: MA Experiment 20000234 PARAMETER Experiment Name: At_Siliques_P Parameter: Organism Value: A. thaliana
  misc_feature: MA Experiment 20000234 PARAMETER Experiment Name: At_Siliques_P Parameter: Plant Line Value: WS
  misc_feature: MA Experiment 20000234 PARAMETER Experiment Name: At_Siliques_P Parameter: Tissue Value: Less Than 5mm Siliques vs. Whole Plant
  misc_feature: MA Experiment ID: 20001557 Result: Up-regulated in Transcription
  misc_feature: MA Experiment 20001557 PARAMETER Experiment Name: At_Drought_Soil_Dry_P Parameter: Age (day) Value: 27
  misc_feature: MA Experiment 20001557 PARAMETER Experiment Name: At_Drought_Soil_Dry_P Parameter: Organism Value: A. thaliana
  misc_feature: MA Experiment 20001557 PARAMETER Experiment Name: At_Drought_Soil_Dry_P Parameter: Plant Line Value: WS
  misc_feature: MA Experiment 20001557 PARAMETER Experiment Name: At_Drought_Soil_Dry_P Parameter: Post Timepoint (hr) Value: 3
  misc_feature: MA Experiment 20001557 PARAMETER Experiment Name: At_Drought_Soil_Dry_P Parameter: Post-Treatment Value: Re-Water vs. No Drought
  misc_feature: MA Experiment 20001557 PARAMETER Experiment Name: At_Drought_Soil_Dry_P Parameter: Timepoint (day) Value: 13
  misc_feature: MA Experiment 20001557 PARAMETER Experiment Name: At_Drought_Soil_Dry_P Parameter: Treatment Value: Drought vs. No Drought
attttccgtttgtgttccttgctcatttcttatctctagaaacctgtctgatttgctccgtcgcctaaaaagtctaaaaccctaagtgtctccgcctcgtagctttacccgattcaacgaagagtgaattcgcgtgagctcaagcagtatcgaaatctaccaatcatggcgagtcaaacaccgaatctcgagtgtcggatgtacgaggcgaaatacccagaggtggatatggcggtgatgatccaggtgaagaacattgccgatatgggagcttatgtttctctcctcgagtacaacaacatcgaaggcatgatccttttctccgagctctctcgtcgtcggatccgaagtgttagcagtttgattaaggtcggaagaattgagcctgtcatggttctccgtgttgacaaagagaaaggttacattgatctgagcaaacgtagagtcagcgaggaagatattcagacttgtgaagagaggtataacaagagcaaacttgttcattctatcatgcgccatgttgctgagactctttcaattgatttggaggacttgtatgtgaacattggttggcctttgtatcgacgacatggtcatgcttttgaggctttcaagatcttagtgacggatcctgattcagtgttgggtcctctcacccgtgagatcaaagaagttgggcctgatgggcaagaggtgactaaggttgtacctgctgttacggaagaagtgaaagatgcacttgtgaagaacattaggaggagaatgacaccacaaccaatgaaaatccgggctgatatcgaattgaagtgttttcagtttgatggagttgttcacattaaggaggctatgaaaaatgctgaagccgctggaaatgaagactgtcctgttaagattaaattggttgctccacctctgtatgtccttactactcagacacttgacaaggaacaagggattgaaattctaaacaaagccatagcagcatgcactgagacaattgagacacacaaaggcaagcttgtcgttaaggagggggctagagctgtgagtgaacgtgatgaaaagatgctgacagaacacatggctaagctacgtcttgacaatgaagaaatgagcggcgatgaagatagcggagacgaagaagaggacactggtatgggcgaagtggatctcgatgcaggtgccggaatcatcgagtaagattgccggatttttctttctattaaatctacccaatctcaacagtcccagtattttggtttaagctttgacaaggcagtagaaaaacctccgagaggatttatgtgctttttgatgactctgaggcattttattttacccatagggggtggttacatatcaatcatacattcatggttttataaaagatttgattctttgc

SEQ ID NO: 87128 - protein, 344 aa, Arabidopsis thaliana [sequence omitted]

SEQ ID NO: 87129 - protein, 333 aa, Arabidopsis thaliana; identical to SEQ ID NO: 29335
  peptide (1)..(333): Ceres Seq. ID no. 12697464
  misc_feature (6)..(81): Pfam Name: S1 RNA binding domain Pfam Description: S1 RNA binding domain
  misc_feature (1)..(333): Homolog of NCBI NO: 18405334 NR Description: putative eukaryotic translation initiation factor alpha subunit, eIF2; protein id: At2g40290.1, supported by cDNA: supported by cDNA: gi_19347785 [Arabidopsis thaliana]
  misc_feature (1)..(333): Homolog of NCBI NO: 21537411 NR Description: putative eukaryotic translation initiation factor
  misc_feature (1)..(333): Homolog of NCBI NO: 15239135 NR Description: eukaryotic translation initiation factor 2 alpha like protein; protein id: At5g05470.1, supported by cDNA: supported by cDNA: gi_13549159 [Arabidopsis thaliana]
  misc_feature (1)..(333): Homolog of NCBI NO: 13549160 NR Description: protein synthesis initiation factor eIF2 alpha
  misc_feature (1)..(268): Homolog of NCBI NO: 4588003 NR Description: hypothetical EIF-2-Alpha [Arabidopsis thaliana]
  misc_feature (1)..(330): Homolog of NCBI NO: 34898218 NR Description: putative eukaryotic translation initiation factor
  misc_feature (1)..(148): Homolog of NCBI NO: 19114993 NR Description: eukaryotic translation initiation factor 2 alpha [Schizosaccharomyces pombe] >gi|3024013|sp|P56286|IF2A_SCHPO
  misc_feature (171)..(314): Homolog of NCBI NO: 19114993 NR Description: eukaryotic translation initiation factor 2 alpha [Schizosaccharomyces pombe] >gi|3024013|sp|P56286|IF2A_SCHPO
  misc_feature (166)..(333): Homolog of NCBI NO: 4588003 NR Description: hypothetical EIF-2-Alpha [Arabidopsis thaliana]
  misc_feature (1)..(315): Homolog of NCBI NO: 12711655 NR Description: eukaryotic initiation factor 2 alpha subunit

SEQ ID NO: 87130 - protein, 323 aa, Arabidopsis thaliana; identical to SEQ ID NO: 29336
  peptide (1)..(323): Ceres Seq. ID no. 12697465
  misc_feature (1)..(71): Pfam Name: S1 RNA binding domain Pfam Description: S1 RNA binding domain
  misc_feature (1)..(323): Homolog of NCBI NO: 18405334 NR Description: putative eukaryotic translation initiation factor alpha subunit, eIF2; protein id: At2g40290.1, supported by cDNA: supported by cDNA: gi_19347785 [Arabidopsis thaliana]
  misc_feature (1)..(323): Homolog of NCBI NO: 21537411 NR Description: putative eukaryotic translation initiation factor
  misc_feature (1)..(323): Homolog of NCBI NO: 15239135 NR Description: eukaryotic translation initiation factor 2 alpha like protein; protein id: At5g05470.1, supported by cDNA: supported by cDNA: gi_13549159 [Arabidopsis thaliana]
  misc_feature (1)..(323): Homolog of NCBI NO: 13549160 NR Description: protein synthesis initiation factor eIF2 alpha
  misc_feature (1)..(258): Homolog of NCBI NO: 4588003 NR Description: hypothetical EIF-2-Alpha [Arabidopsis thaliana]
  misc_feature (1)..(320): Homolog of NCBI NO: 34898218 NR Description: putative eukaryotic translation initiation factor
  misc_feature (1)..(138): Homolog of NCBI NO: 19114993 NR Description: eukaryotic translation initiation factor 2 alpha [Schizosaccharomyces pombe] >gi|3024013|sp|P56286|IF2A_SCHPO
  misc_feature (161)..(304): Homolog of NCBI NO: 19114993 NR Description: eukaryotic translation initiation factor 2 alpha [Schizosaccharomyces pombe] >gi|3024013|sp|P56286|IF2A_SCHPO
  misc_feature (156)..(323): Homolog of NCBI NO: 4588003 NR Description: hypothetical EIF-2-Alpha [Arabidopsis thaliana]
  misc_feature (1)..(305): Homolog of NCBI NO: 12711655 NR Description: eukaryotic initiation factor 2 alpha subunit

SEQ ID NO: 87131 - DNA, 780 bp, Arabidopsis thaliana
  misc_feature (1)..(780): Ceres Seq. ID no. 12697466
  misc_feature: MA Experiment ID: 20000306 Result: Up-regulated in Transcription
  misc_feature: MA Experiment 20000306 PARAMETER Experiment Name: At_Germinating_Seeds_Sub_P Parameter: Age (hr) Value: 6 vs. 0
  misc_feature: MA Experiment 20000306 PARAMETER Experiment Name: At_Germinating_Seeds_Sub_P Parameter: Organism Value: A. thaliana
  misc_feature: MA Experiment 20000306 PARAMETER Experiment Name: At_Germinating_Seeds_Sub_P Parameter: Plant Line Value: WS
  misc_feature: MA Experiment 20000306 PARAMETER Experiment Name: At_Germinating_Seeds_Sub_P Parameter: Tissue Value: Germinating Seeds
  misc_feature: MA Experiment ID: 20000307 Result: Up-regulated in Transcription
  misc_feature: MA Experiment 20000307 PARAMETER Experiment Name: At_Germinating_Seeds_Sub_P Parameter: Age (hr) Value: 24 vs. 0
  misc_feature: MA Experiment 20000307 PARAMETER Experiment Name: At_Germinating_Seeds_Sub_P Parameter: Organism Value: A. thaliana
  misc_feature: MA Experiment 20000307 PARAMETER Experiment Name: At_Germinating_Seeds_Sub_P Parameter: Plant Line Value: WS
  misc_feature: MA Experiment 20000307 PARAMETER Experiment Name: At_Germinating_Seeds_Sub_P Parameter: Tissue Value: Germinating Seeds
  misc_feature: MA Experiment ID: 20000314 Result: Down-regulated in Transcription
  misc_feature: MA Experiment 20000314 PARAMETER Experiment Name: At_14day_Shoots-Roots_Sub_P Parameter: Age (day) Value: 14
  misc_feature: MA Experiment 20000314 PARAMETER Experiment Name: At_14day_Shoots-Roots_Sub_P Parameter: Organism Value: A. thaliana
  misc_feature: MA Experiment 20000314 PARAMETER Experiment Name: At_14day_Shoots-Roots_Sub_P Parameter: Plant Line Value: WS
  misc_feature: MA Experiment 20000314 PARAMETER Experiment Name: At_14day_Shoots-Roots_Sub_P Parameter: Tissue Value: Roots vs. Whole Plant
  misc_feature: MA Experiment ID: 20000327 Result: Up-regulated in Transcription
  misc_feature: MA Experiment 20000327 PARAMETER Experiment Name: At_42deg_Heat_Sub_P Parameter: Age (day) Value: 14
  misc_feature: MA Experiment 20000327 PARAMETER Experiment Name: At_42deg_Heat_Sub_P Parameter: Organism Value: A. thaliana
  misc_feature: MA Experiment 20000327 PARAMETER Experiment Name: At_42deg_Heat_Sub_P Parameter: Plant Line Value: WS
  misc_feature: MA Experiment 20000327 PARAMETER Experiment Name: At_42deg_Heat_Sub_P Parameter: Temperature (deg C) Value: 42 vs. 22
  misc_feature: MA Experiment 20000327 PARAMETER Experiment Name: At_42deg_Heat_Sub_P Parameter: Timepoint (hr) Value: 1
  misc_feature: MA Experiment 20000327 PARAMETER Experiment Name: At_42deg_Heat_Sub_P Parameter: Tissue Value: Aerial
  misc_feature: MA Experiment ID: 20000328 Result: Up-regulated in Transcription
  misc_feature: MA Experiment 20000328 PARAMETER Experiment Name: At_42deg_Heat_Sub_P Parameter: Age (day) Value: 14
  misc_feature: MA Experiment 20000328 PARAMETER Experiment Name: At_42deg_Heat_Sub_P Parameter: Organism Value: A. thaliana
  misc_feature: MA Experiment 20000328 PARAMETER Experiment Name: At_42deg_Heat_Sub_P Parameter: Plant Line Value: WS
  misc_feature: MA Experiment 20000328 PARAMETER Experiment Name: At_42deg_Heat_Sub_P Parameter: Temperature (deg C) Value: 42 vs. 22
  misc_feature: MA Experiment 20000328 PARAMETER Experiment Name: At_42deg_Heat_Sub_P Parameter: Timepoint (hr) Value: 6
  misc_feature: MA Experiment 20000328 PARAMETER Experiment Name: At_42deg_Heat_Sub_P Parameter: Tissue Value: Aerial
  misc_feature: MA Experiment ID: 20000355 Result: Up-regulated in Transcription
  misc_feature: MA Experiment 20000355 PARAMETER Experiment Name: At_Siliques_Sub_P Parameter: Age (day) Value: 21
  misc_feature: MA Experiment 20000355 PARAMETER Experiment Name: At_Siliques_Sub_P Parameter: Organism Value: A. thaliana
  misc_feature: MA Experiment 20000355 PARAMETER Experiment Name: At_Siliques_Sub_P Parameter: Plant Line Value: WS
  misc_feature: MA Experiment 20000355 PARAMETER Experiment Name: At_Siliques_Sub_P Parameter: Tissue Value: Less Than 5mm Siliques vs. Whole Plant
  misc_feature: MA Experiment ID: 20000440 Result: Up-regulated in Transcription
  misc_feature: MA Experiment 20000440 PARAMETER Experiment Name: At_Closed-Flower__Sub_P Parameter: Tissue Value: Closed Flower vs. Whole Plant
  misc_feature: MA Experiment ID: 20000634 Result: Down-regulated in Transcription
  misc_feature: MA Experiment 20000634 PARAMETER Experiment Name: At_10percent_PEG_Sub_P Parameter: Age (day) Value: 12
  misc_feature: MA Experiment 20000634 PARAMETER Experiment Name: At_10percent_PEG_Sub_P Parameter: Organism Value: A. thaliana
  misc_feature: MA Experiment 20000634 PARAMETER Experiment Name: At_10percent_PEG_Sub_P Parameter: Plant Line Value: WS
  misc_feature: MA Experiment 20000634 PARAMETER Experiment Name: At_10percent_PEG_Sub_P Parameter: Timepoint (day) Value: 12
  misc_feature: MA Experiment 20000634 PARAMETER Experiment Name: At_10percent_PEG_Sub_P Parameter: Tissue Value: Whole Plant
  misc_feature: MA Experiment 20000634 PARAMETER Experiment Name: At_10percent_PEG_Sub_P Parameter: Treatment Value: 10% PEG vs. No Treatment
atgcttctcaagactgtttcttcatcttcttcttcagctctctcgctggtgaatttccatggcgtgaagaaggatgtgtctcctttgttaccttccatttcatcgaatcttcgagtttcttctggaaaatctggaaacttaactttctcttttcgcgcatctaaaagctcaaccaccgacgcgctaagcggcgttgtcttcgagccgtttaaggaagtaaaaaaggagctcgatctcgtccctaccagctctcatctctcactcgctcgacaaaagtactcagacgagtgcgaagccgccattaacgagcagatcaatgtggaatacaatgtctcgtatgtgtatcacgctatgtatgcttactttgatcgggataacatcgcgctcaaaggtcttgccaagttctttaaggaatcaagtttggaagaaagagagcatgctgagaagttaatggagtatcagaacaaacgtggtgggagggttaagttacagtccattgtaatgcctctttcagagtttgaacatgttgacaaaggagatgctctttatggcatggagcttgctctgtcactggagaaactagttaatgagaagctcttaaaccttcacagtgttgcttcgaagaacaatgatgtccacttggcagattttattgagagcgagtttctgacagagcaggtggaagcaatcaagttgatctcagaatatgtggctcaactgcgacgagttggcaaaggacacggaacatggcatttcaatcagatgcttctggaagggtaa

SEQ ID NO: 87132 - protein, 259 aa, Arabidopsis thaliana; identical to SEQ ID NO: 77941
  peptide (1)..(259): Ceres Seq. ID no. 12697467
  misc_feature (98)..(243): Pfam Name: Ferritin-like domain Pfam Description: Ferritin-like domain
  misc_feature (1)..(259): Homolog of NCBI NO: 15225679 NR Description: putative ferritin; protein id: At2g40300.1, by cDNA: gi_17065437, supported by cDNA: gi_20148572 [Arabidopsis
  misc_feature (1)..(257): Homolog of NCBI NO: 15228818 NR Description: putative protein; protein id: At3g56090.1, by cDNA: 33282., supported by cDNA: gi_13358190, supported by

SEQ ID NO: 87133 - protein, 142 aa, Arabidopsis thaliana; identical to SEQ ID NO: 77942
  peptide (1)..(142): Ceres Seq. ID no. 12697468
  misc_feature (1)..(126): Pfam Name: Ferritin-like domain Pfam Description: Ferritin-like domain
  misc_feature (1)..(142): Homolog of NCBI NO: 15225679 NR Description: putative ferritin; protein id: At2g40300.1, by cDNA: gi_17065437, supported by cDNA: gi_20148572 [Arabidopsis
  misc_feature (1)..(140): Homolog of NCBI NO: 15228818 NR Description: putative protein; protein id: At3g56090.1, by cDNA: 33282., supported by cDNA: gi_13358190, supported by

SEQ ID NO: 87134 - DNA, 845 bp, Arabidopsis thaliana
  misc_feature (1)..(845): Ceres Seq. ID no. 12697647
  misc_feature: MA Experiment ID: 108462 Result: Down-regulated in Transcription
  misc_feature: MA Experiment 108462 PARAMETER Experiment Name: At_Germinating_Seeds_cDNA_P Parameter: Age (day) Value: 2 vs. 0
  misc_feature: MA Experiment 108462 PARAMETER Experiment Name: At_Germinating_Seeds_cDNA_P Parameter: Tissue Value: Germinating Seeds
  misc_feature: MA Experiment ID: 108464 Result: Down-regulated in Transcription
  misc_feature: MA Experiment 108464 PARAMETER Experiment Name: At_Germinating_Seeds_cDNA_P Parameter: Age (day) Value: 4 vs. 0
  misc_feature: MA Experiment 108464 PARAMETER Experiment Name: At_Germinating_Seeds_cDNA_P Parameter: Tissue Value: Germinating Seeds
  misc_feature: MA Experiment ID: 108573 Result: Up-regulated in Transcription
  misc_feature: MA Experiment 108573 PARAMETER Experiment Name: At_Drought_cDNA_P Parameter: Timepoint (hr) Value: 6
  misc_feature: MA Experiment 108573 PARAMETER Experiment Name: At_Drought_cDNA_P Parameter: Tissue Value: Aerial
  misc_feature: MA Experiment 108573 PARAMETER Experiment Name: At_Drought_cDNA_P Parameter: Treatment Value: Drought vs. No Drought
  misc_feature: MA Experiment ID: 108576 Result: Down-regulated in Transcription
  misc_feature: MA Experiment 108576 PARAMETER Experiment Name: At_42deg_Heat_cDNA_P Parameter: Temperature (deg C) Value: 42 vs. 22
  misc_feature: MA Experiment 108576 PARAMETER Experiment Name: At_42deg_Heat_cDNA_P Parameter: Timepoint (hr) Value: 1
  misc_feature: MA Experiment 108576 PARAMETER Experiment Name: At_42deg_Heat_cDNA_P Parameter: Tissue Value: Aerial
  misc_feature: MA Experiment ID: 108577 Result: Down-regulated in Transcription
  misc_feature: MA Experiment 108577 PARAMETER Experiment Name: At_42deg_Heat_cDNA_P Parameter: Temperature (deg C) Value: 42 vs. 22
  misc_feature: MA Experiment 108577 PARAMETER Experiment Name: At_42deg_Heat_cDNA_P Parameter: Timepoint (hr) Value: 6
  misc_feature: MA Experiment 108577 PARAMETER Experiment Name: At_42deg_Heat_cDNA_P Parameter: Tissue Value: Aerial
  misc_feature: MA Experiment ID: 20001557 Result: Up-regulated in Transcription
  misc_feature: MA Experiment 20001557 PARAMETER Experiment Name: At_Drought_Soil_Dry_P Parameter: Age (day) Value: 27
  misc_feature: MA Experiment 20001557 PARAMETER Experiment Name: At_Drought_Soil_Dry_P Parameter: Organism Value: A. thaliana
  misc_feature: MA Experiment 20001557 PARAMETER Experiment Name: At_Drought_Soil_Dry_P Parameter: Plant Line Value: WS
  misc_feature: MA Experiment 20001557 PARAMETER Experiment Name: At_Drought_Soil_Dry_P Parameter: Post Timepoint (hr) Value: 3
  misc_feature: MA Experiment 20001557 PARAMETER Experiment Name: At_Drought_Soil_Dry_P Parameter: Post-Treatment Value: Re-Water vs. No Drought
  misc_feature: MA Experiment 20001557 PARAMETER Experiment Name: At_Drought_Soil_Dry_P Parameter: Timepoint (day) Value: 13
  misc_feature: MA Experiment 20001557 PARAMETER Experiment Name: At_Drought_Soil_Dry_P Parameter: Treatment Value: Drought vs. No Drought
catttggtattgctgcttacgtcgtcagatctgctcgttttttcgctccatttttgggtcaccattactcagcttccgttttaaatatcacattagatggacgaaagcggaggtgatagtggttcagtggccacacctgttcaacagcgagcacatgaggcatggaggatttaccaacactatcttgacaagactacacctcatgcaaattacagatggattggaactcttgtcgtcgctcttatctactgtttgagggtttactatattcagggtttctacatcatcgcctatggtcttggaatctaccttctcaatctgcttatcgggttcttgtcccctcttgttgatcctgaagctggtggggtctctgatgggccttctctgcctactagaggttctgatgagttcaagcctttcattcgccgtctccccgagttcaaattctggtactccatgacaaaggctttctgcatagctttcctcatgacattcttctcggtgtttgacgttcctgtgttttggccaattctgctgtgctattggatcgttctctttgttctcaccatgagacgccagatcgcccacatgatcaagtacaaatacatccctttcagcttcggcaaacagaaatatggtggacggagcagcagcggctcacgtgcggattgatctgaccaatttgctgaccattagctactttttttgtctttgcaaaagagaaagaaaaaattgttaagaatatcattttggaccatttttacattgacaaaactatgcagagctataaggaagaattataggcaggataaaaaaggatggaaactaaacttgatttagctcgg

SEQ ID NO: 87135 - protein, 191 aa, Arabidopsis thaliana; identical to SEQ ID NO: 35029
  peptide (1)..(191): Ceres Seq. ID no. 12697648
  misc_feature (2)..(183): Pfam Name: Rer1 family Pfam Description: Rer1 family
  misc_feature (1)..(191): Homolog of NCBI NO: 15234975 NR Description: AtRer1A; protein id: At4g39220.1, supported by [Arabidopsis thaliana] >gi|6225938|sp|O48670|RERA_ARATH RER1A
  misc_feature (1)..(191): Homolog of NCBI NO: 11281669 NR Description: endoplasmatic reticulum retrieval protein Rer1B
  misc_feature (1)..(191): Homolog of NCBI NO: 15226596 NR Description: AtRer1B; protein id: At2g21600.1, supported by [Arabidopsis thaliana] >gi|21431803|sp|O48671|RERB_ARATH RER1B
  misc_feature (6)..(179): Homolog of NCBI NO: 34894094 NR Description: putative Rer1A protein (AtRer1A) [Oryza sativa
  misc_feature (7)..(181): Homolog of NCBI NO: 18400234 NR Description: putative integral membrane protein; protein id: supported by cDNA: 25204., supported by cDNA: gi_17978977, by cDNA: gi_20453334, supported by cDNA: gi_4163829 [Arabidopsis
  misc_feature (7)..(181): Homolog of NCBI NO: 30682033 NR Description: integral membrane protein -related [Arabidopsis
  misc_feature (7)..(178): Homolog of NCBI NO: 7488292 NR Description: probable integral membrane protein At2g23310
  misc_feature (2)..(119): Homolog of NCBI NO: 35210534 NR Description: putative endoplasmatic reticulum retrieval
  misc_feature (103)..(178): Homolog of NCBI NO: 35210534 NR Description: putative endoplasmatic reticulum retrieval
  misc_feature (2)..(177): Homolog of NCBI NO: 18398679 NR Description: putative integral membrane protein; protein id: [Arabidopsis thaliana] >gi|20197807|gb|AAD15512.2| putative membrane protein [Arabidopsis thaliana]

SEQ ID NO: 87136 - DNA, 1292 bp, Arabidopsis thaliana
  misc_feature (1)..(1292): Ceres Seq. ID no. 12697709
  misc_feature: MA Experiment ID: 108434 Result: Down-regulated in Transcription
  misc_feature: MA Experiment 108434 PARAMETER Experiment Name: At_Root_Tips_cDNA_P Parameter: Tissue Value: Root Tips
  misc_feature: MA Experiment ID: 108488 Result: Down-regulated in Transcription
  misc_feature: MA Experiment ID: 108489 Result: Up-regulated in Transcription
  misc_feature: MA Experiment ID: 20000794 Result: Up-regulated in Transcription
  misc_feature: MA Experiment 20000794 PARAMETER Experiment Name: At_Petals_P Parameter: Age (day) Value: 23-25 days
  misc_feature: MA Experiment 20000794 PARAMETER Experiment Name: At_Petals_P Parameter: Plant Line Value: WS
  misc_feature: MA Experiment 20000794 PARAMETER Experiment Name: At_Petals_P Parameter: Tissue Value: Petals vs. Whole plant
  misc_feature: MA Experiment ID: 20001905 Result: Up-regulated in Transcription
  misc_feature: MA Experiment 20001905 PARAMETER Experiment Name: At_Drought_Reproduction_P Parameter: Age (day) Value: 40
  misc_feature: MA Experiment 20001905 PARAMETER Experiment Name: At_Drought_Reproduction_P Parameter: Organism Value: A. thaliana
  misc_feature: MA Experiment 20001905 PARAMETER Experiment Name: At_Drought_Reproduction_P Parameter: Plant Line Value: WS
  misc_feature: MA Experiment 20001905 PARAMETER Experiment Name: At_Drought_Reproduction_P Parameter: Timepoint (day) Value: 10
  misc_feature: MA Experiment 20001905 PARAMETER Experiment Name: At_Drought_Reproduction_P Parameter: Tissue Value: Rosettes
  misc_feature: MA Experiment 20001905 PARAMETER Experiment Name: At_Drought_Reproduction_P Parameter: Treatment Value: Drought vs. No Drought
atttccagttggaagtttaattaattagatatgaactaaagcgttacgccacggaagaatttaggatctgttcgcagcatccgtttcaacgctaaatccaaacaacaaaagaagattagcaaaatcggattatcttctttgtttcttttcccttgacaagtcttcgtttttgaattagggtttttggacaattcttctcttcttcggctgcaaaaggttttcgcaagatatggctggctctgttggtgaggaaactgagccagaatggattaagagagtgaaattagagggagctgttccatgtcttaagccagacgacaactgcaaaaatggttggacgacgccatctcctgacacatttatggttagaggaccaaagtatttctctgacaaagttaagatacctgctggtgatttccttctaaagcctctgggttttgattggattaaaggtcctaaaaagctttctgagatcctgagttatccaagcagccgaatcaggaaagttatcgatgaggagtttcaaaaagatggaactaagccttttgtctgggcattcaatctccagcttcctcacaaagacaattacagtgctgtggcttactttgttaccacagagcctatccttgaaggctccctgatggatcggtttttgaaaggagatgatgggttcaagaaatcgaggcttaaactgattgcaaacattgtcaaaggcccttggattgttagaaaagctgttggagagcaagcgatctgtgtgattggacgtgcactctcttgcaaatatgtttcaggggaaaactttgtggagattgatgtcgatattggttcttcaatggtcgctagtgccattgttcatctcgcatttggctacgttactacattgacagttgatcttgcgttcctcattgagagtcagaccgaagcagagcttccagaaaagctactaggagctgtgagattctctgagctgcagaccgagtcagccacatctatcgaactgtcctcaagcaccagtaatgaccagtgggatcaaactacctcagagcggtcgagctggtggaaatcgattggaaatggattctctaatctgcttaatcaagatacggccaacatgaacaatacttctcatggggacatccagaaggatgaacatgtacagaagcagtaagtgttttgggagttattaacttcacaattctttgaatttgttcgatttcattaccaaaaaacagaaacaaaaacttgtcaattctttaaaaaaaccacagatgtatagattggtttttact

SEQ ID NO: 87137 - protein, 313 aa, Arabidopsis thaliana
  peptide (1)..(313): Ceres Seq. ID no. 12697710
  misc_feature (1)..(313): Homolog of NCBI NO: 25406892 NR Description: hypothetical protein [imported] - Arabidopsis >gi|8810466|gb|AAF80127.1|AC024174_9 Contains similarity to an protein T1B3.16 gi|4432844 from Arabidopsis thaliana BAC from
  misc_feature (1)..(313): Homolog of NCBI NO: 18390605 NR Description: expressed protein; protein id: At1g06050.1,
  misc_feature (1)..(313): Homolog of NCBI NO: 21618178 NR Description: unknown [Arabidopsis thaliana]
  misc_feature (4)..(257): Homolog of NCBI NO: 15238248 NR Description: putative protein; protein id: At5g10750.1, by cDNA: 2344. [Arabidopsis thaliana] >gi|11358294|pir||T50784
  misc_feature (4)..(257): Homolog of NCBI NO: 22655107 NR Description: putative protein [Arabidopsis thaliana]
  misc_feature (12)..(257): Homolog of NCBI NO: 21592409 NR Description: unknown [Arabidopsis thaliana]
  misc_feature (9)..(257): Homolog of NCBI NO: 15238672 NR Description: putative protein; protein id: At5g24990.1, by cDNA: gi_15028368, supported by cDNA: gi_19310654 [Arabidopsis >gi|15028369|gb|AAK76661.1| unknown protein [Arabidopsis
  misc_feature (9)..(257): Homolog of NCBI NO: 15238674 NR Description: putative protein; protein id: At5g25010.1
  misc_feature (29)..(258): Homolog of NCBI NO: 8978350 NR Description: emb|CAB77600.1~gene_id:K3D20.2~similar to unknown
  misc_feature (29)..(257): Homolog of NCBI NO: 18421431 NR Description: putative protein; protein id: At5g35180.1, by cDNA: gi_16930704 [Arabidopsis thaliana]
MAGSVGEETEPEWIKRVKLEGAVPCLKPDDNCKNGWTTPSPDTFMVRGPKYFSDKVKIPAGDFLLKPLGFDWIKGPKKLSEILSYPSSRIRKVIDEEFQKDGTKPFVWAFNLQLPHKDNYSAVAYFVTTEPILEGSLMDRFLKGDDGFKKSRLKLIANIVKGPWIVRKAVGEQAICVIGRALSCKYVSGENFVEIDVDIGSSMVASAIVHLAFGYVTTLTVDLAFLIESQTEAELPEKLLGAVRFSELQTESATSIELSSSTSNDQWDQTTSERSSWWKSIGNGFSNLLNQDTANMNNTSHGDIQKDEHVQKQ

SEQ ID NO: 87138 - protein, 269 aa, Arabidopsis thaliana; identical to SEQ ID NO: 38661
  peptide (1)..(269): Ceres Seq. ID no. 12697711
  misc_feature (1)..(269): Homolog of NCBI NO: 25406892 NR Description: hypothetical protein [imported] - Arabidopsis >gi|8810466|gb|AAF80127.1|AC024174_9 Contains similarity to an protein T1B3.16 gi|4432844 from Arabidopsis thaliana BAC from
  misc_feature (1)..(269): Homolog of NCBI NO: 18390605 NR Description: expressed protein; protein id: At1g06050.1,
  misc_feature (1)..(269): Homolog of NCBI NO: 21618178 NR Description: unknown [Arabidopsis thaliana]
  misc_feature (1)..(213): Homolog of NCBI NO: 15238248 NR Description: putative protein; protein id: At5g10750.1, by cDNA: 2344. [Arabidopsis thaliana] >gi|11358294|pir||T50784
  misc_feature (1)..(213): Homolog of NCBI NO: 22655107 NR Description: putative protein [Arabidopsis thaliana]
  misc_feature (1)..(213): Homolog of NCBI NO: 21592409 NR Description: unknown [Arabidopsis thaliana]
  misc_feature (1)..(213): Homolog of NCBI NO: 15238672 NR Description: putative protein; protein id: At5g24990.1, by cDNA: gi_15028368, supported by cDNA: gi_19310654 [Arabidopsis >gi|15028369|gb|AAK76661.1| unknown protein [Arabidopsis
  misc_feature (1)..(213): Homolog of NCBI NO: 15238674 NR Description: putative protein; protein id: At5g25010.1
  misc_feature (1)..(214): Homolog of NCBI NO: 8978350 NR Description: emb|CAB77600.1~gene_id:K3D20.2~similar to unknown
  misc_feature (1)..(213): Homolog of NCBI NO: 18421431 NR Description: putative protein; protein id: At5g35180.1, by cDNA: gi_16930704 [Arabidopsis thaliana]

SEQ ID NO: 87139 - protein, 176 aa, Arabidopsis thaliana; identical to SEQ ID NO: 38662
  peptide (1)..(176): Ceres Seq. ID no. 12697712
  misc_feature (1)..(176): Homolog of NCBI NO: 25406892 NR Description: hypothetical protein [imported] - Arabidopsis >gi|8810466|gb|AAF80127.1|AC024174_9 Contains similarity to an protein T1B3.16 gi|4432844 from Arabidopsis thaliana BAC from
  misc_feature (1)..(176): Homolog of NCBI NO: 18390605 NR Description: expressed protein; protein id: At1g06050.1,
  misc_feature (1)..(176): Homolog of NCBI NO: 21618178 NR Description: unknown [Arabidopsis thaliana]
  misc_feature (1)..(120): Homolog of NCBI NO: 15238248 NR Description: putative protein; protein id: At5g10750.1, by cDNA: 2344. [Arabidopsis thaliana] >gi|11358294|pir||T50784
  misc_feature (1)..(120): Homolog of NCBI NO: 22655107 NR Description: putative protein [Arabidopsis thaliana]
  misc_feature (1)..(120): Homolog of NCBI NO: 21592409 NR Description: unknown [Arabidopsis thaliana]
  misc_feature (1)..(120): Homolog of NCBI NO: 15238672 NR Description: putative protein; protein id: At5g24990.1, by cDNA: gi_15028368, supported by cDNA: gi_19310654 [Arabidopsis >gi|15028369|gb|AAK76661.1| unknown protein [Arabidopsis
  misc_feature (1)..(120): Homolog of NCBI NO: 15238674 NR Description: putative protein; protein id: At5g25010.1
  misc_feature (1)..(121): Homolog of NCBI NO: 8978350 NR Description: emb|CAB77600.1~gene_id:K3D20.2~similar to unknown
  misc_feature (1)..(120): Homolog of NCBI NO: 18421431 NR Description: putative protein; protein id: At5g35180.1, by cDNA: gi_16930704 [Arabidopsis thaliana]

SEQ ID NO: 87140 - DNA, 1400 bp, Arabidopsis thaliana
  misc_feature (1)..(1400): Ceres Seq. ID no. 12697736
  misc_feature: MA Experiment ID: 20000265 Result: Up-regulated in Transcription
  misc_feature: MA Experiment 20000265 PARAMETER Experiment Name: At_Open_Flower_P Parameter: Age (day) Value: 21
  misc_feature: MA Experiment 20000265 PARAMETER Experiment Name: At_Open_Flower_P Parameter: Plant Line Value: WS
  misc_feature: MA Experiment 20000265 PARAMETER Experiment Name: At_Open_Flower_P Parameter: Tissue Value: Closed Flower vs. Whole Plant
  misc_feature: MA Experiment ID: 20000286 Result: Up-regulated in Transcription
  misc_feature: MA Experiment 20000286 PARAMETER Experiment Name: At_Open_Flower_P Parameter: Age (day) Value: 21
  misc_feature: MA Experiment 20000286 PARAMETER Experiment Name: At_Open_Flower_P Parameter: Plant Line Value: WS
  misc_feature: MA Experiment 20000286 PARAMETER Experiment Name: At_Open_Flower_P Parameter: Tissue Value: Half Open vs. Whole Plant
  misc_feature: MA Experiment ID: 20001910 Result: Down-regulated in Transcription
  misc_feature: MA Experiment 20001910 PARAMETER Experiment Name: At_Drought_Reproduction_P Parameter: Age (day) Value: 37
  misc_feature: MA Experiment 20001910 PARAMETER Experiment Name: At_Drought_Reproduction_P Parameter: Organism Value: A. thaliana
  misc_feature: MA Experiment 20001910 PARAMETER Experiment Name: At_Drought_Reproduction_P Parameter: Plant Line Value: WS
  misc_feature: MA Experiment 20001910 PARAMETER Experiment Name: At_Drought_Reproduction_P Parameter: Timepoint (day) Value: 7
  misc_feature: MA Experiment 20001910 PARAMETER Experiment Name: At_Drought_Reproduction_P Parameter: Tissue Value: Flowers
  misc_feature: MA Experiment 20001910 PARAMETER Experiment Name: At_Drought_Reproduction_P Parameter: Treatment Value: Drought vs. No Drought
aagaacaagaagaaaaaggtttgtgaaaaaaaaacaaaggcaaacatggtggagggcataccaaagagatggaaggtgctaagtggccaaaacaaatggaaaggcctgcttgatccacttgacccggatcttcgccgctacatcattcactacggcgagatgtctcaggttggttacgatgcctttaactgggaccgtaagtccagatacgccggtgattgttattactccaagaaccgactgttagctcgaaccggcttccttaaagccaaccctttcaggtacaaagtgactaagtacatctacgcaacagcttccataaagttaccaatctctttcatcgtaaagtctttgtcaaaggatgcatctcgcgtgcagactaactggatgggttacattgcggttgctacagaccagggaaaagcgatgttagggaggagagacattgttgttgcatggagaggaactctacagccatatgaatgggctaatgatttcgattttccgcttgagccagctatctcggttttcccagtaactgaccccaaagataaccctcgtattggaagtggctggctcgacatctataccgcttctgattctcgctcaccttatgacacgactagtgcacaagaacaggtacaaggagagctcaagaggttgctagaactttacaaggatgaagaaataagcatcaccttcacaggccatagcttgggcgcagttatgtcagttctatcagctgcagatcttgtctatggcaaaaagaataatatcaatataaatcttcaaaaaaagcaagttcctatcacagtttttgctttcgggagtcctcggattggagaccataacttcaaaaacgtagtcgactcactccaaccactaaacattctaagaatagtaaatgttccagatgtcgcaccacattatccactcttactgtactcagaaattggcgaggtgttagagatcaatactttgaactcaacatacctgaaacggtctctgaacttcaggaactaccataacctggagatatacctgcacggcatggcagggatgcaagatacagacggggtattcaagctggagattggccgggatatttcgttggtcaataaaggattggatgctctaaaggacgagtacttagtgccaagtacctggaggtgtctggcaaacaaagggatgcttcaaatggatgatgggacatggaagctggatgtccacaggagagatcatgatgatgatgttgatgctgatgacaatgacgactcctcaactagtaaccaactacaagagctaaatacagattagttacaaaaacttatataagattctgcacaatatgtttgtacacaaaaaaaaattcatttagaagaacaaagaatctgggaacc

SEQ ID NO: 87141 - protein, 438 aa, Arabidopsis thaliana
  peptide (1)..(438): Ceres Seq. ID no. 12697737
  misc_feature (16)..(438): Homolog of NCBI NO: 15221426 NR Description: lipase-like protein; protein id: At1g06250.1, by cDNA: 12912. [Arabidopsis thaliana] >gi|25406908|pir||C86198
  misc_feature (16)..(438): Homolog of NCBI NO: 21537306 NR Description: lipase-like protein [Arabidopsis thaliana]
  misc_feature (137)..(424): Homolog of NCBI NO: 15224613 NR Description: putative lipase; protein id: At2g31100.1
  misc_feature (16)..(56): Homolog of NCBI NO: 15224613 NR Description: putative lipase; protein id: At2g31100.1
  misc_feature (3)..(419): Homolog of NCBI NO: 15233922 NR Description: lipase-like protein; protein id: At4g18550.1
  misc_feature (20)..(417): Homolog of NCBI NO: 34911830 NR Description: lipase-like protein [Oryza sativa (japonica
  misc_feature (209)..(417): Homolog of NCBI NO: 34911870 NR Description: lipase-like protein [Oryza sativa (japonica
  misc_feature (20)..(213): Homolog of NCBI NO: 34911870 NR Description: lipase-like protein [Oryza sativa (japonica
  misc_feature (17)..(413): Homolog of NCBI NO: 1527001 NR Description: Ipomoea nil Pn47p
  misc_feature (22)..(410): Homolog of NCBI NO: 34911842 NR Description: lipase-like protein [Oryza sativa (japonica
KNKKKKVCEKKTKANMVEGIPKRWKVLSGQNKWKGLLDPLDPDLRRYIIHYGEMSQVGYDAFNWDRKSRYAGDCYYSKNRLLARTGFLKANPFRYKVTKYIYATASIKLPISFIVKSLSKDASRVQTNWMGYIAVATDQGKAMLGRRDIVVAWRGTLQPYEWANDFDFPLEPAISVFPVTDPKDNPRIGSGWLDIYTASDSRSPYDTTSAQEQVQGELKRLLELYKDEEISITFTGHSLGAVMSVLSAADLVYGKKNNININLQKKQVPITVFAFGSPRIGDHNFKNVVDSLQPLNILRIVNVPDVAPHYPLLLYSEIGEVLEINTLNSTYLKRSLNFRNYHNLEIYLHGMAGMQDTDGVFKLEIGRDISLVNKGLDALKDEYLVPSTWRCLANKGMLQMDDGTWKLDVHRRDHDDDVDADDNDDSSTSNQLQELNTD

SEQ ID NO: 87142 - protein, 423 aa, Arabidopsis thaliana
  peptide (1)..(423): Ceres Seq. ID no. 12697738
  misc_feature (1)..(423): Homolog of NCBI NO: 15221426 NR Description: lipase-like protein; protein id: At1g06250.1, by cDNA: 12912. [Arabidopsis thaliana] >gi|25406908|pir||C86198
  misc_feature (1)..(423): Homolog of NCBI NO: 21537306 NR Description: lipase-like protein [Arabidopsis thaliana]
  misc_feature (122)..(409): Homolog of NCBI NO: 15224613 NR Description: putative lipase; protein id: At2g31100.1
  misc_feature (1)..(41): Homolog of NCBI NO: 15224613 NR Description: putative lipase; protein id: At2g31100.1
  misc_feature (1)..(404): Homolog of NCBI NO: 15233922 NR Description: lipase-like protein; protein id: At4g18550.1
  misc_feature (5)..(402): Homolog of NCBI NO: 34911830 NR Description: lipase-like protein [Oryza sativa (japonica
  misc_feature (194)..(402): Homolog of NCBI NO: 34911870 NR Description: lipase-like protein [Oryza sativa (japonica
  misc_feature (5)..(198): Homolog of NCBI NO: 34911870 NR Description: lipase-like protein [Oryza sativa (japonica
  misc_feature (2)..(398): Homolog of NCBI NO: 1527001 NR Description: Ipomoea nil Pn47p
  misc_feature (7)..(395): Homolog of NCBI NO: 34911842 NR Description: lipase-like protein [Oryza sativa (japonica
MVEGIPKRWKVLSGQNKWKGLLDPLDPDLRRYIIHYGEMSQVGYDAFNWDRKSRYAGDCYYSKNRLLARTGFLKANPFRYKVTKYIYATASIKLPISFIVKSLSKDASRVQTNWMGYIAVATDQGKAMLGRRDIVVAWRGTLQPYEWANDFDFPLEPAISVFPVTDPKDNPRIGSGWLDIYTASDSRSPYDTTSAQEQVQGELKRLLELYKDEEISITFTGHSLGAVMSVLSAADLVYGKKNNININLQKKQVPITVFAFGSPRIGDHNFKNVVDSLQPLNILRIVNVPDVAPHYPLLLYSEIGEVLEINTLNSTYLKRSLNFRNYHNLEIYLHGMAGMQDTDGVFKLEIGRDISLVNKGLDALKDEYLVPSTWRCLANKGMLQMDDGTWKLDVHRRDHDDDVDADDNDDSSTSNQLQELNTD

SEQ ID NO: 87143 - protein, 385 aa, Arabidopsis thaliana
  peptide (1)..(385): Ceres Seq. ID no. 12697739
  misc_feature (1)..(385): Homolog of NCBI NO: 15221426 NR Description: lipase-like protein; protein id: At1g06250.1, by cDNA: 12912. [Arabidopsis thaliana] >gi|25406908|pir||C86198
  misc_feature (1)..(385): Homolog of NCBI NO: 21537306 NR Description: lipase-like protein [Arabidopsis thaliana]
  misc_feature (84)..(371): Homolog of NCBI NO: 15224613 NR Description: putative lipase; protein id: At2g31100.1
  misc_feature (1)..(366): Homolog of NCBI NO: 15233922 NR Description: lipase-like protein; protein id: At4g18550.1
  misc_feature (1)..(364): Homolog of NCBI NO: 34911830 NR Description: lipase-like protein [Oryza sativa (japonica
  misc_feature (156)..(364): Homolog of NCBI NO: 34911870 NR Description: lipase-like protein [Oryza sativa (japonica
  misc_feature (1)..(160): Homolog of NCBI NO: 34911870 NR Description: lipase-like protein [Oryza sativa (japonica
  misc_feature (1)..(360): Homolog of NCBI NO: 1527001 NR Description: Ipomoea nil Pn47p
  misc_feature (1)..(357): Homolog of NCBI NO: 34911842 NR Description: lipase-like protein [Oryza sativa (japonica
  misc_feature (1)..(369): Homolog of NCBI NO: 34911832 NR Description: lipase-like protein [Oryza sativa (japonica
MSQVGYDAFNWDRKSRYAGDCYYSKNRLLARTGFLKANPFRYKVTKYIYATASIKLPISFIVKSLSKDASRVQTNWMGYIAVATDQGKAMLGRRDIVVAWRGTLQPYEWANDFDFPLEPAISVFPVTDPKDNPRIGSGWLDIYTASDSRSPYDTTSAQEQVQGELKRLLELYKDEEISITFTGHSLGAVMSVLSAADLVYGKKNNININLQKKQVPITVFAFGSPRIGDHNFKNVVDSLQPLNILRIVNVPDVAPHYPLLLYSEIGEVLEINTLNSTYLKRSLNFRNYHNLEIYLHGMAGMQDTDGVFKLEIGRDISLVNKGLDALKDEYLVPSTWRCLANKGMLQMDDGTWKLDVHRRDHDDDVDADDNDDSSTSNQLQELNTD

SEQ ID NO: 87144 - DNA, 1284 bp, Arabidopsis thaliana
  misc_feature (1)..(1284): Ceres Seq. ID no. 12697828
  misc_feature: MA Experiment ID: 20000328 Result: Down-regulated in Transcription
  misc_feature: MA Experiment 20000328 PARAMETER Experiment Name: At_42deg_Heat_Sub_P Parameter: Age (day) Value: 14
  misc_feature: MA Experiment 20000328 PARAMETER Experiment Name: At_42deg_Heat_Sub_P Parameter: Organism Value: A. thaliana
  misc_feature: MA Experiment 20000328 PARAMETER Experiment Name: At_42deg_Heat_Sub_P Parameter: Plant Line Value: WS
  misc_feature: MA Experiment 20000328 PARAMETER Experiment Name: At_42deg_Heat_Sub_P Parameter: Temperature (deg C) Value: 42 vs. 22
  misc_feature: MA Experiment 20000328 PARAMETER Experiment Name: At_42deg_Heat_Sub_P Parameter: Timepoint (hr) Value: 6
  misc_feature: MA Experiment 20000328 PARAMETER Experiment Name: At_42deg_Heat_Sub_P Parameter: Tissue Value: Aerial
atggttccattgggttggattggtggtgtggttggtctcattcttgctactgcaatctccctttacgcaaacactcttgatatgtgctttggagctattggtgctcagaaagaggaaaaacagaacagaaagtcatatttccaccaacatactcgatcaccagtatcagagagggaagcggaatccgatcccagacgttccagcactcagaaggcgtttaatggaacgttggatctactaattccagtgataatcgtctctatcccaagggattggccgtttagagcggttattggctttaacagtcgattcttattgattagtgttttaggattaattgatctcaaaaacctattatcaactcttatcgccaagcttcatgagtttggtggcaaaagacacattcgttatagagatctcgcaggcttcatctatggtaaaaagatgtatcgtgttacatggggattgcaatatgtctatcttttcatgattaattgtgccttcatcttacttgctggttcgaccttaaaggctgtttatgtactttttagagataattgtctcatgaaactgcctcactttatcgccatcgcgggtgttgtatgtgcgattttggccatcggtattcctcatttatcagctcttggaatctggctaggagtttcaacaatccttagcataatctacattattgttgcaatagttctagcagctaaagatggagtaaacaagcctgaaagagattacaacatacaaggatcatcaataaacaaactcttaaccataacaggagcagtttgcattcaacacgggaatgctaccggaaatacaggcaattcactgttggtgttttaccgatgtatgcggttacattcatcggatattgggcttacgggtcctcgacatcgacttatctgtttaatagcgtcagtggacctctttgggtcaaagcactcgctaatatttcagcttttctccaatctgttatctctttacataacagtagcaagaggaagctacatcgcggtgagcactcttctctcggctcttttaccgtttctcggagatttcatgagcctcactggagcaataagcacgttccctctcacattcatattagcgaatcacatgtatcttgttgctatgaacgataagcttagtcttgtgcaaaagctttggcattggcttaatgtttgcttctttggattaatgtctcttgctgctgctattgctgctgttagactcatctctgtggactcccaagaacttccatgtttttgctga

SEQ ID NO: 87145 - protein, 427 aa, Arabidopsis thaliana
  peptide (1)..(427): Ceres Seq. ID no. 12697829
  misc_feature (109)..(265): Homolog of NCBI NO: 15228183 NR Description: proline transporter 2; protein id: At3g55740.1, by cDNA: gi_19698890 [Arabidopsis thaliana]
  misc_feature (331)..(426): Homolog of NCBI NO: 15228183 NR Description: proline transporter 2; protein id: At3g55740.1, by cDNA: gi_19698890 [Arabidopsis thaliana]
  misc_feature (1)..(26): Homolog of NCBI NO: 15228183 NR Description: proline transporter 2; protein id: At3g55740.1, by cDNA: gi_19698890 [Arabidopsis thaliana]
  misc_feature (109)..(265): Homolog of NCBI NO: 21554196 NR Description: putative proline transporter [Arabidopsis
  misc_feature (331)..(426): Homolog of NCBI NO: 21554196 NR Description: putative proline transporter [Arabidopsis
  misc_feature (1)..(26): Homolog of NCBI NO: 21554196 NR Description: putative proline transporter [Arabidopsis
  misc_feature (109)..(265): Homolog of NCBI NO: 15228000 NR Description: putative proline transporter; protein id: supported by cDNA: 20959. [Arabidopsis thaliana]
  misc_feature (331)..(426): Homolog of NCBI NO: 15228000 NR Description: putative proline transporter; protein id: supported by cDNA: 20959. [Arabidopsis thaliana]
  misc_feature (1)..(26): Homolog of NCBI NO: 15228000 NR Description: putative proline transporter; protein id: supported by cDNA: 20959. [Arabidopsis thaliana]
  misc_feature (86)..(265): Homolog of NCBI NO: 15225591 NR Description: proline transporter 1; protein id: At2g39890.1, by cDNA: 39048. [Arabidopsis thaliana] >gi|11358707|pir||T50692
MVPLGWIGGVVGLILATAISLYANTLDMCFGAIGAQKEEKQNRKSYFHQHTRSPVSEREAESDPRRSSTQKAFNGTLDLLIPVIIVSIPRDWPFRAVIGFNSRFLLISVLGLIDLKNLLSTLIAKLHEFGGKRHIRYRDLAGFIYGKKMYRVTWGLQYVYLFMINCAFILLAGSTLKAVYVLFRDNCLMKLPHFIAIAGVVCAILAIGIPHLSALGIWLGVSTILSIIYIIVAIVLAAKDGVNKPERDYNIQGSSINKLLTITGAVCIQHGNATGNTGNSLLVFYRCMRLHSSDIGLTGPRHRLICLIASVDLFGSKHSLIFQLFSNLLSLYITVARGSYIAVSTLLSALLPFLGDFMSLTGAISTFPLTFILANHMYLVAMNDKLSLVQKLWHWLNVCFFGLMSLAAAIAAVRLISVDSQELPCFC

SEQ ID NO: 87146 - protein, 400 aa, Arabidopsis thaliana
  peptide (1)..(400): Ceres Seq. ID no. 12697830
  misc_feature (82)..(238): Homolog of NCBI NO: 15228183 NR Description: proline transporter 2; protein id: At3g55740.1, by cDNA: gi_19698890 [Arabidopsis thaliana]
  misc_feature (304)..(399): Homolog of NCBI NO: 15228183 NR Description: proline transporter 2; protein id: At3g55740.1, by cDNA: gi_19698890 [Arabidopsis thaliana]
  misc_feature (82)..(238): Homolog of NCBI NO: 21554196 NR Description: putative proline transporter [Arabidopsis
  misc_feature (304)..(399): Homolog of NCBI NO: 21554196 NR Description: putative proline transporter [Arabidopsis
  misc_feature (82)..(238): Homolog of NCBI NO: 15228000 NR Description: putative proline transporter; protein id: supported by cDNA: 20959. [Arabidopsis thaliana]
  misc_feature (304)..(399): Homolog of NCBI NO: 15228000 NR Description: putative proline transporter; protein id: supported by cDNA: 20959. [Arabidopsis thaliana]
  misc_feature (59)..(238): Homolog of NCBI NO: 15225591 NR Description: proline transporter 1; protein id: At2g39890.1, by cDNA: 39048. [Arabidopsis thaliana] >gi|11358707|pir||T50692
  misc_feature (59)..(238): Homolog of NCBI NO: 21593453 NR Description: proline transporter 1 [Arabidopsis thaliana]
  misc_feature (304)..(399): Homolog of NCBI NO: 15225591 NR Description: proline transporter 1; protein id: At2g39890.1, by cDNA: 39048. [Arabidopsis thaliana] >gi|11358707|pir||T50692
  misc_feature (304)..(399): Homolog of NCBI NO: 21593453 NR Description: proline transporter 1 [Arabidopsis thaliana]
MCFGAIGAQKEEKQNRKSYFHQHTRSPVSEREAESDPRRSSTQKAFNGTLDLLIPVIIVSIPRDWPFRAVIGFNSRFLLISVLGLIDLKNLLSTLIAKLHEFGGKRHIRYRDLAGFIYGKKMYRVTWGLQYVYLFMINCAFILLAGSTLKAVYVLFRDNCLMKLPHFIAIAGVVCAILAIGIPHLSALGIWLGVSTILSIIYIIVAIVLAAKDGVNKPERDYNIQGSSINKLLTITGAVCIQHGNATGNTGNSLLVFYRCMRLHSSDIGLTGPRHRLICLIASVDLFGSKHSLIFQLFSNLLSLYITVARGSYIAVSTLLSALLPFLGDFMSLTGAISTFPLTFILANHMYLVAMNDKLSLVQKLWHWLNVCFFGLMSLAAAIAAVRLISVDSQELPCFC

SEQ ID NO: 87147 - protein, 279 aa, Arabidopsis thaliana
  peptide (1)..(279): Ceres Seq. ID no. 12697831
  misc_feature (1)..(117): Homolog of NCBI NO: 15228183 NR Description: proline transporter 2; protein id: At3g55740.1, by cDNA: gi_19698890 [Arabidopsis thaliana]
  misc_feature (183)..(278): Homolog of NCBI NO: 15228183 NR Description: proline transporter 2; protein id: At3g55740.1, by cDNA: gi_19698890 [Arabidopsis thaliana]
  misc_feature (1)..(117): Homolog of NCBI NO: 21554196 NR Description: putative proline transporter [Arabidopsis
  misc_feature (183)..(278): Homolog of NCBI NO: 21554196 NR Description: putative proline transporter [Arabidopsis
  misc_feature (1)..(117): Homolog of NCBI NO: 15228000 NR Description: putative proline transporter; protein id: supported by cDNA: 20959. [Arabidopsis thaliana]
  misc_feature (183)..(278): Homolog of NCBI NO: 15228000 NR Description: putative proline transporter; protein id: supported by cDNA: 20959. [Arabidopsis thaliana]
  misc_feature (1)..(117): Homolog of NCBI NO: 15225591 NR Description: proline transporter 1; protein id: At2g39890.1, by cDNA: 39048. [Arabidopsis thaliana] >gi|11358707|pir||T50692
  misc_feature (1)..(117): Homolog of NCBI NO: 21593453 NR Description: proline transporter 1 [Arabidopsis thaliana]
  misc_feature (183)..(278): Homolog of NCBI NO: 15225591 NR Description: proline transporter 1; protein id: At2g39890.1, by cDNA: 39048. [Arabidopsis thaliana] >gi|11358707|pir||T50692
  misc_feature (183)..(278): Homolog of NCBI NO: 21593453 NR Description: proline transporter 1 [Arabidopsis thaliana]
MYRVTWGLQYVYLFMINCAFILLAGSTLKAVYVLFRDNCLMKLPHFIAIAGVVCAILAIGIPHLSALGIWLGVSTILSIIYIIVAIVLAAKDGVNKPERDYNIQGSSINKLLTITGAVCIQHGNATGNTGNSLLVFYRCMRLHSSDIGLTGPRHRLICLIASVDLFGSKHSLIFQLFSNLLSLYITVARGSYIAVSTLLSALLPFLGDFMSLTGAISTFPLTFILANHMYLVAMNDKLSLVQKLWHWLNVCFFGLMSLAAAIAAVRLISVDSQELPCFC

SEQ ID NO: 87148 - DNA, 855 bp, Arabidopsis thaliana
  misc_feature (1)..(855): Ceres Seq. ID no. 12698074
  misc_feature: MA Experiment ID: 20001807 Result: Up-regulated in Transcription
  misc_feature: MA Experiment 20001807 PARAMETER Experiment Name: At_50mM_NH4NO3_L-to-H_Sub_P Parameter: Timepoint (hr) Value: 6
  misc_feature: MA Experiment 20001807 PARAMETER Experiment Name: At_50mM_NH4NO3_L-to-H_Sub_P Parameter: Tissue Value: Leaf
  misc_feature: MA Experiment 20001807 PARAMETER Experiment Name: At_50mM_NH4NO3_L-to-H_Sub_P Parameter: Treatment Value: 50mM NH4NO3 vs 100mM Mannitol
atggcggaaagaggaggagaaagcggcgcagagcgtggcggtgaccgtggtgacttcgggcgtggattcggcggtggacgtggaggtggccgtggccgtgatcgtggtccaagaggccgtggaagacgtggaggccgtgcctcggaagaaacgaaatgggttccagtgaccaaactaggtcgtctagtggctgacaataaaataacgaagctagagcagatctatcttcattctctcccagtaaaggagtaccaaatcatagatcatcttgttggtcctacgttgaaagacgaggttatgaagatcatgcctgttcagaaacaaaccagagctggtcaaaggactagattcaaggcctttgttgttgttggtgatggaaatggtcatgttggtttgggtgtcaagtgttctaaggaagttgctactgccattagaggagctattattcttgctaagctatcagtggttccggtgaggagaggttattgggggaataagattgggaagccacacactgtgccttgtaaggttactggtaaatgtggttctgttactgtgagaatggttcctgctccgagaggttctggtattgttgctgctagggttcctaagaaggttcttcagttcgctggtattgatgatgtctttacttcttcaagaggatctaccaaaacccttggaaactttgtcaaggctacattcgattgcttacagaagacatatgggttccttacaccagagttctggaaagagactagattctccagatcgccgtaccaagagcacactgatttcctgtcgactaaggctgtttctgcaaccaaggttatcactgagggtgaagaccaagcttaa

SEQ ID NO: 87149 - protein, 284 aa, Arabidopsis thaliana [sequence omitted]

SEQ ID NO: 87150 - protein, 185 aa, Arabidopsis thaliana; identical to SEQ ID NO: 38083
  peptide (1)..(185): Ceres Seq. ID no. 12698076
  misc_feature (78)..(151): Pfam Name: Ribosomal protein S5, C-terminal domain Pfam Description: Ribosomal protein S5, C-terminal domain
  misc_feature (1)..(185): Homolog of NCBI NO: 18406325 NR Description: ribosomal protein S2, putative; protein id: supported by cDNA: gi_18086425 [Arabidopsis thaliana] ribosomal protein S2, putative; protein id: At1g59359.1
  misc_feature (1)..(185): Homolog of NCBI NO: 15217951 NR Description: ribosomal protein S2, putative; protein id: [Arabidopsis thaliana] >gi|11276533|pir||T50673 ribosomal protein
  misc_feature (1)..(185): Homolog of NCBI NO: 21539457 NR Description: ribosomal protein S2, putative [Arabidopsis
  misc_feature (1)..(185): Homolog of NCBI NO: 21618011 NR Description: ribosomal protein S2, putative [Arabidopsis
  misc_feature (1)..(185): Homolog of NCBI NO: 25294520 NR Description: hypothetical protein RF12 [imported] - thaliana (fragment) >gi|6566279|dbj|BAA88264.1| similar to
  misc_feature (1)..(185): Homolog of NCBI NO: 15227443 NR Description: 40S ribosomal protein S2; protein id: supported by cDNA: 17415., supported by cDNA: gi_15081714 thaliana] >gi|3915847|sp|P49688|RS2_ARATH 40S ribosomal protein
  misc_feature (1)..(185): Homolog of NCBI NO: 21553851 NR Description: 40S ribosomal protein S2 [Arabidopsis thaliana]
  misc_feature (1)..(180): Homolog of NCBI NO: 15230312 NR Description: 40S ribosomal protein S2 homolog; protein id: supported by cDNA: 101250. [Arabidopsis thaliana]
  misc_feature (1)..(132): Homolog of NCBI NO: 8979936 NR Description: Identical to gene XW6 from Arabidopsis thaliana and contains a Ribosomal protein S5 PF|00333 domain. ESTs
  misc_feature (1)..(168): Homolog of NCBI NO: 34393314 NR Description: putative 40S ribosomal protein S2 [Oryza sativa

SEQ ID NO: 87151 - protein, 182 aa, Arabidopsis thaliana; identical to SEQ ID NO: 38084
  peptide (1)..(182): Ceres Seq. ID no. 12698077
  misc_feature (75)..(148): Pfam Name: Ribosomal protein S5, C-terminal domain Pfam Description: Ribosomal protein S5, C-terminal domain
  misc_feature (1)..(182): Homolog of NCBI NO: 18406325 NR Description: ribosomal protein S2, putative; protein id: supported by cDNA: gi_18086425 [Arabidopsis thaliana] ribosomal protein S2, putative; protein id: At1g59359.1
  misc_feature (1)..(182): Homolog of NCBI NO: 15217951 NR Description: ribosomal protein S2, putative; protein id: [Arabidopsis thaliana] >gi|11276533|pir||T50673 ribosomal protein
  misc_feature (1)..(182): Homolog of NCBI NO: 21539457 NR Description: ribosomal protein S2, putative [Arabidopsis
  misc_feature (1)..(182): Homolog of NCBI NO: 21618011 NR Description: ribosomal protein S2, putative [Arabidopsis
  misc_feature (1)..(182): Homolog of NCBI NO: 25294520 NR Description: hypothetical protein RF12 [imported] - thaliana (fragment) >gi|6566279|dbj|BAA88264.1| similar to
  misc_feature (1)..(182): Homolog of NCBI NO: 15227443 NR Description: 40S ribosomal protein S2; protein id: supported by cDNA: 17415., supported by cDNA: gi_15081714 thaliana] >gi|3915847|sp|P49688|RS2_ARATH 40S ribosomal protein
  misc_feature (1)..(182): Homolog of NCBI NO: 21553851 NR Description: 40S ribosomal protein S2 [Arabidopsis thaliana]
  misc_feature (1)..(177): Homolog of NCBI NO: 15230312 NR Description: 40S ribosomal protein S2 homolog; protein id: supported by cDNA: 101250. [Arabidopsis thaliana]
  misc_feature (1)..(129): Homolog of NCBI NO: 8979936 NR Description: Identical to gene XW6 from Arabidopsis thaliana and contains a Ribosomal protein S5 PF|00333 domain. ESTs
  misc_feature (1)..(165): Homolog of NCBI NO: 34393314 NR Description: putative 40S ribosomal protein S2 [Oryza sativa

SEQ ID NO: 87152 - DNA, 2631 bp, Arabidopsis thaliana
  misc_feature (1)..(2631): Ceres Seq. ID no. 12698097
  misc_feature: MA Experiment ID: 20000171 Result: Down-regulated in Transcription
  misc_feature: MA Experiment 20000171 PARAMETER Experiment Name: At_42deg_Heat_P Parameter: Age (day) Value: 14
  misc_feature: MA Experiment 20000171 PARAMETER Experiment Name: At_42deg_Heat_P Parameter: Organism Value: A. thaliana
  misc_feature: MA Experiment 20000171 PARAMETER Experiment Name: At_42deg_Heat_P Parameter: Plant Line Value: WS
  misc_feature: MA Experiment 20000171 PARAMETER Experiment Name: At_42deg_Heat_P Parameter: Temperature (deg C) Value: 42 vs. 22
  misc_feature: MA Experiment 20000171 PARAMETER Experiment Name: At_42deg_Heat_P Parameter: Timepoint (hr) Value: 1
  misc_feature: MA Experiment 20000171 PARAMETER Experiment Name: At_42deg_Heat_P Parameter: Tissue Value: Aerial
  misc_feature: MA Experiment ID: 20000185 Result: Up-regulated in Transcription
  misc_feature: MA Experiment 20000185 PARAMETER Experiment Name: At_Roots__P Parameter: Age (day) Value: 7 vs. 21
  misc_feature: MA Experiment 20000185 PARAMETER Experiment Name: At_Roots__P Parameter: Organism Value: A. thaliana
  misc_feature: MA Experiment 20000185 PARAMETER Experiment Name: At_Roots__P Parameter: Tissue Value: Roots vs. Whole Plant
  misc_feature: MA Experiment ID: 20000227 Result: Up-regulated in Transcription
  misc_feature: MA Experiment 20000227 PARAMETER Experiment Name: At_Root-Tips-vs-Tops_P Parameter: Tissue Value: Root Tips vs. Root Tops
  misc_feature: MA Experiment ID: 20000234 Result: Up-regulated in Transcription
  misc_feature: MA Experiment 20000234 PARAMETER Experiment Name: At_Siliques_P Parameter: Age (day) Value: 21
  misc_feature: MA Experiment 20000234 PARAMETER Experiment Name: At_Siliques_P Parameter: Organism Value: A. thaliana
  misc_feature: MA Experiment 20000234 PARAMETER Experiment Name: At_Siliques_P Parameter: Plant Line Value: WS
  misc_feature: MA Experiment 20000234 PARAMETER Experiment Name: At_Siliques_P Parameter: Tissue Value: Less Than 5mm Siliques vs. Whole Plant
  misc_feature: MA Experiment ID: 20000264 Result: Up-regulated in Transcription
  misc_feature: MA Experiment 20000264 PARAMETER Experiment Name: At_Open_Flower_P Parameter: Age (day) Value: 21
  misc_feature: MA Experiment 20000264 PARAMETER Experiment Name: At_Open_Flower_P Parameter: Plant Line Value: WS
  misc_feature: MA Experiment 20000264 PARAMETER Experiment Name: At_Open_Flower_P Parameter: Tissue Value: Open Flower vs. Whole Plant
  misc_feature: MA Experiment ID: 20000265 Result: Up-regulated in Transcription
  misc_feature: MA Experiment 20000265 PARAMETER Experiment Name: At_Open_Flower_P Parameter: Age (day) Value: 21
  misc_feature: MA Experiment 20000265 PARAMETER Experiment Name: At_Open_Flower_P Parameter: Plant Line Value: WS
  misc_feature: MA Experiment 20000265 PARAMETER Experiment Name: At_Open_Flower_P Parameter: Tissue Value: Closed Flower vs. Whole Plant
  misc_feature: MA Experiment ID: 20000286 Result: Up-regulated in Transcription
  misc_feature: MA Experiment 20000286 PARAMETER Experiment Name: At_Open_Flower_P Parameter: Age (day) Value: 21
  misc_feature: MA Experiment 20000286 PARAMETER Experiment Name: At_Open_Flower_P Parameter: Plant Line Value: WS
  misc_feature: MA Experiment 20000286 PARAMETER Experiment Name: At_Open_Flower_P Parameter: Tissue Value: Half Open vs. Whole Plant
  misc_feature: MA Experiment ID: 20000437 Result: Down-regulated in Transcription
  misc_feature: MA Experiment 20000437 PARAMETER Experiment Name: At_Drought_P Parameter: Age (day) Value: 8
  misc_feature: MA Experiment 20000437 PARAMETER Experiment Name: At_Drought_P Parameter: Organism Value: A. thaliana
  misc_feature: MA Experiment 20000437 PARAMETER Experiment Name: At_Drought_P Parameter: Plant Line Value: WS
  misc_feature: MA Experiment 20000437 PARAMETER Experiment Name: At_Drought_P Parameter: Timepoint (hr) Value: 24
  misc_feature: MA Experiment 20000437 PARAMETER Experiment Name: At_Drought_P Parameter: Tissue Value: Whole Plant
  misc_feature: MA Experiment 20000437 PARAMETER Experiment Name: At_Drought_P Parameter: Treatment Value: Drought vs. No Drought
  misc_feature: MA Experiment ID: 20000495 Result: Up-regulated in Transcription
  misc_feature: MA Experiment 20000495 PARAMETER Experiment Name: At_Guard_Cells_P Parameter: Harvest Date Value: 8/2/2002
  misc_feature: MA Experiment 20000495 PARAMETER Experiment Name: At_Guard_Cells_P Parameter: Organism Value: A. thaliana
  misc_feature: MA Experiment 20000495 PARAMETER Experiment Name: At_Guard_Cells_P Parameter: Tissue Value: Guard Cells vs. Leaves
  misc_feature: MA Experiment ID: 20001451 Result: Down-regulated in Transcription
  misc_feature: MA Experiment 20001451 PARAMETER Experiment Name: At_Far-red-induction_P Parameter: Age (day) Value: 7
  misc_feature: MA Experiment 20001451 PARAMETER Experiment Name: At_Far-red-induction_P Parameter: Light Value: Far-red vs. White
  misc_feature: MA Experiment 20001451 PARAMETER Experiment Name: At_Far-red-induction_P Parameter: Organism Value: A. thaliana
  misc_feature: MA Experiment 20001451 PARAMETER Experiment Name: At_Far-red-induction_P Parameter: Plant Line Value: Columbia
  misc_feature: MA Experiment 20001451 PARAMETER Experiment Name: At_Far-red-induction_P Parameter: Timepoint (hr) Value: 24
  misc_feature: MA Experiment 20001451 PARAMETER Experiment Name: At_Far-red-induction_P Parameter: Tissue Value: Whole Plant
atggaaaagatctgtgtcgcagtcagggtaagaccgccggcgccggaaaacggagcttcactctggaaagtcgaagataatcggatctctcttcataaatcactcgacactccaatcacaaccgcttctcacgcttttgtttctggaatttcaatttctacagatctgattgaaatcgtaagtctcttcctttttagttttggtgttgtttacttttttcttctttttgcagatcatgtgttcgacgaaagttctacgaatgctagtgtctacgagcttcttactaaggatatcatacatgccgctgttgagggttttaatggtactgcatttgcttatgggcaaactagtagtgggaagacgtttacgatgacgggctctgaaactgatcctggaattattcgaagatctgttcgagatgtgtttgaaagaatacatatgatatctgatcgtgagtttctcatccgggtttcgtacatggaaatttacaacgaagaaattaatgatcttttagctgttgagaaccagagactgcaaattcatgagcatttggagcgtggagtgtttgttgctggtcttaaggaagaaattgttagtgatgctgaacagattctaaagcttatagattctggagaagttaataggcactttggcgagacaaacatgaatgttcatagtagcaggtctcacaccatattcagaatggtgattgagagcaggggaaaagataatagttcttcagatgctattcgtgtctcagtcttgaatttggtcgatttagctggatctgagcgaattgctaaaactggtgctggtggtgtacgcttgcaagaagggaagtacattaataagagcttaatgattcttggtaatgtcatcaataaattaagtgacagtacaaagctaagggcacatattccgtaccgagatagtaagctgactcgaattcttcagcctgcacttggtggtaatgcaaagacctgcattatatgcactatcgcaccagaagagcatcatattgaggaatcaaaaggaactctccaatttgcaagcagagcaaagcgcatcaccaactgtgctcaagtgaatgagatcttgactgatgccgctttattgaagcgccaaaagttggagatagaagagctacgcatgaagcttcagggatctcatgcggaagtgttggaacaagagatcttaaatttaagcaatcagatgctgaagtatgagttggaatgtgaaaggctaaaaacacaactggaagaagagaaaaggaagcagaaggagcaggaaaattgcatcaaggagcaacagatgaaaattgagaaccttaacaattttgtcactaattctgacttcaagaggaaccagtcagaggactttatcatttcaagaaagactccagatgggctatgcaatgtcaatgacactagcgatgttcctggaaccccttgctttaaatcagcttcccgttcctttgtggttgctcggtcaaataattattcaggactatctgattttagtccgatggttcattccctgggggacgtggccgatgaagatacttggatgaaactaaacaagggttttgttgcagaccttgatcaaatccaatttacacctgctgttaaatgtcaacccactcctttaagtattgcaaccacggagtgcccgcgtgaaaatcactcagaggtggaagatctcaaaagtcggattcagttgctgaccaatgagaatgacagtcttcaggtaaaatttaatgaacaagtactcctgagcaacaatctgatgcaagagatgtctgagctcaaacaagaaacgcttactgtgaaagaaattccgaataggttatctgagtcagttgctaattgcaaagatgtctacaaggatgtcatagtcactatgaagagcttaatcactgacaaggaatctccaacggcaaacctgctcctgggtacaactgaaatcacaacgagcctactggcaactctagaaacacaattctcaatgataatggatggtcagaaaacgggtagtagcatagatcatcctttatctgaccattgggaaacacttcgtgtgaatctgaagaacacaacgacgttgttgctgtcagacgcacaagcaaaagatgaatttttgaactcccacaacaagttagatgttgtggtcagactactatttcacctttctctaagacaggttttgaatgtgattttaaagggacaagaaacagctgctttggaggagaagaaactgaagtctgagctcatcatcatcaaggaaagatacaacgagctcgagaaagagttgtgtttggataaacagcttctagaagcttcaagagaaagtcatgagaagctgataaaagaggtacagttcctgaaggaagaaagagattctttagatagaaaaatctctcaatcaactcagagattgagagtgattgcaagtgataaagagaatgctttgaaagatcttaatgtggaagtgaagaggaggaaagatatggaggaagagattaagcacatcagcattgctttcgctaccaggcacaaatcttttgtgtcttttcacagtgaaatcaagtccaaaatgcagaaactaaccactcaaaactcaaaagctccttag

SEQ ID NO: 87153 - protein, 876 aa, Arabidopsis thaliana
  peptide (1)..(876): Ceres Seq. ID no. 12698098
  misc_feature (360)..(443): Pfam Name: Myosin tail Pfam Description: Myosin tail
  misc_feature (31)..(874): Homolog of NCBI NO: 22330953 NR Description: kinesin-related protein; protein id: At3g10180.1
  misc_feature (42)..(456): Homolog of NCBI NO: 6056206 NR Description: putative kinesin-like centromere protein
  misc_feature (397)..(876): Homolog of NCBI NO: 18406379 NR Description: kinesin-related protein; protein id: At1g59540.1,
  misc_feature (78)..(853): Homolog of NCBI NO: 40789293 NR Description: cDNA sequence BC049989 [Mus musculus]
  misc_feature (78)..(863): Homolog of NCBI NO: 4502781 NR Description: centromere protein E; Centromere autoantigen E centromere protein E (312kD); kinesin family member 10 [Homo
  misc_feature (733)..(876): Homolog of NCBI NO: 14475945 NR Description: kinesin motor protein (kin2), putative
  misc_feature (78)..(863): Homolog of NCBI NO: 382658 NR Description: CENP-E protein
  misc_feature (78)..(843): Homolog of NCBI NO: 7512169 NR Description: kinesin-related protein - African clawed frog
  misc_feature (78)..(457): Homolog of NCBI NO: 40074465 NR Description: kinesin family member 11 [Dictyostelium
  misc_feature (78)..(423): Homolog of NCBI NO: 31217360 NR Description: Unknown (protein for IMAGE:30053884) [Mus
MEKICVAVRVRPPAPENGASLWKVEDNRISLHKSLDTPITTASHAFVSGISISTDLIEIVSLFLFSFGVVYFFLLFADHVFDESSTNASVYELLTKDIIHAAVEGFNGTAFAYGQTSSGKTFTMTGSETDPGIIRRSVRDVFERIHMISDREFLIRVSYMEIYNEEINDLLAVENQRLQIHEHLERGVFVAGLKEEIVSDAEQILKLIDSGEVNRHFGETNMNVHSSRSHTIFRMVIESRGKDNSSSDAIRVSVLNLVDLAGSERIAKTGAGGVRLQEGKYINKSLMILGNVINKLSDSTKLRAHIPYRDSKLTRILQPALGGNAKTCIICTIAPEEHHIEESKGTLQFASRAKRITNCAQVNEILTDAALLKRQKLEIEELRMKLQGSHAEVLEQEILNLSNQMLKYELECERLKTQLEEEKRKQKEQENCIKEQQMKIENLNNFVTNSDFKRNQSEDFIISRKTPDGLCNVNDTSDVPGTPCFKSASRSFVVARSNNYSGLSDFSPMVHSLGDVADEDTWMKLNKGFVADLDQIQFTPAVKCQPTPLSIATTECPRENHSEVEDLKSRIQLLTNENDSLQVKFNEQVLLSNNLMQEMSELKQETLTVKEIPNRLSESVANCKDVYKDVIVTMKSLITDKESPTANLLLGTTEITTSLLATLETQFSMIMDGQKTGSSIDHPLSDHWETLRVNLKNTTTLLLSDAQAKDEFLNSHNKLDVVVRLLFHLSLRQVLNVILKGQETAALEEKKLKSELIIIKERYNELEKELCLDKQLLEASRESHEKLIKEVQFLKEERDSLDRKISQSTQRLRVIASDKENALKDLNVEVKRRKDMEEEIKHISIAFATRHKSFVSFHSEIKSKMQKLTTQNSKAP

SEQ ID NO: 87154 - protein, 753 aa, Arabidopsis thaliana
  peptide (1)..(753): Ceres Seq. ID no. 12698099
  misc_feature (237)..(320): Pfam Name: Myosin tail Pfam Description: Myosin tail
  misc_feature (1)..(751): Homolog of NCBI NO: 22330953 NR Description: kinesin-related protein; protein id: At3g10180.1
  misc_feature (1)..(333): Homolog of NCBI NO: 6056206 NR Description: putative kinesin-like centromere protein
  misc_feature (274)..(753): Homolog of NCBI NO: 18406379 NR Description: kinesin-related protein; protein id: At1g59540.1,
  misc_feature (1)..(730): Homolog of NCBI NO: 40789293 NR Description: cDNA sequence BC049989 [Mus musculus]
  misc_feature (1)..(740): Homolog of NCBI NO: 4502781 NR Description: centromere protein E; Centromere autoantigen E centromere protein E (312kD); kinesin family member 10 [Homo
  misc_feature (610)..(753): Homolog of NCBI NO: 14475945 NR Description: kinesin motor protein (kin2), putative
  misc_feature (1)..(740): Homolog of NCBI NO: 382658 NR Description: CENP-E protein
  misc_feature (1)..(720): Homolog of NCBI NO: 7512169 NR Description: kinesin-related protein - African clawed frog
  misc_feature (1)..(334): Homolog of NCBI NO: 40074465 NR Description: kinesin family member 11 [Dictyostelium
  misc_feature (1)..(300): Homolog of NCBI NO: 31217360 NR Description: Unknown (protein for IMAGE:30053884) [Mus
MTGSETDPGIIRRSVRDVFERIHMISDREFLIRVSYMEIYNEEINDLLAVENQRLQIHEHLERGVFVAGLKEEIVSDAEQILKLIDSGEVNRHFGETNMNVHSSRSHTIFRMVIESRGKDNSSSDAIRVSVLNLVDLAGSERIAKTGAGGVRLQEGKYINKSLMILGNVINKLSDSTKLRAHIPYRDSKLTRILQPALGGNAKTCIICTIAPEEHHIEESKGTLQFASRAKRITNCAQVNEILTDAALLKRQKLEIEELRMKLQGSHAEVLEQEILNLSNQMLKYELECERLKTQLEEEKRKQKEQENCIKEQQMKIENLNNFVTNSDFKRNQSEDFIISRKTPDGLCNVNDTSDVPGTPCFKSASRSFVVARSNNYSGLSDFSPMVHSLGDVADEDTWMKLNKGFVADLDQIQFTPAVKCQPTPLSIATTECPRENHSEVEDLKSRIQLLTNENDSLQVKFNEQVLLSNNLMQEMSELKQETLTVKEIPNRLSESVANCKDVYKDVIVTMKSLITDKESPTANLLLGTTEITTSLLATLETQFSMIMDGQKTGSSIDHPLSDHWETLRVNLKNTTTLLLSDAQAKDEFLNSHNKLDVVVRLLFHLSLRQVLNVILKGQETAALEEKKLKSELIIIKERYNELEKELCLDKQLLEASRESHEKLIKEVQFLKEERDSLDRKISQSTQRLRVIASDKENALKDLNVEVKRRKDMEEEIKHISIAFATRHKSFVSFHSEIKSKMQKLTTQNSKAP

SEQ ID NO: 87155 - protein, 730 aa, Arabidopsis thaliana
  peptide (1)..(730): Ceres Seq. ID no. 12698100
  misc_feature (214)..(297): Pfam Name: Myosin tail Pfam Description: Myosin tail
  misc_feature (1)..(728): Homolog of NCBI NO: 22330953 NR Description: kinesin-related protein; protein id: At3g10180.1
  misc_feature (1)..(310): Homolog of NCBI NO: 6056206 NR Description: putative kinesin-like centromere protein
  misc_feature (251)..(730): Homolog of NCBI NO: 18406379 NR Description: kinesin-related protein; protein id: At1g59540.1,
  misc_feature (1)..(707): Homolog of NCBI NO: 40789293 NR Description: cDNA sequence BC049989 [Mus musculus]
  misc_feature (1)..(717): Homolog of NCBI NO: 4502781 NR Description: centromere protein E; Centromere autoantigen E centromere protein E (312kD); kinesin family member 10 [Homo
  misc_feature (587)..(730): Homolog of NCBI NO: 14475945 NR Description: kinesin motor protein (kin2), putative
  misc_feature (1)..(717): Homolog of NCBI NO: 382658 NR Description: CENP-E protein
  misc_feature (1)..(697): Homolog of NCBI NO: 7512169 NR Description: kinesin-related protein - African clawed frog
  misc_feature (1)..(311): Homolog of NCBI NO: 40074465 NR Description: kinesin family member 11 [Dictyostelium
  misc_feature (1)..(277): Homolog of NCBI NO: 31217360 NR Description: Unknown (protein for IMAGE:30053884) [Mus
MISDREFLIRVSYMEIYNEEINDLLAVENQRLQIHEHLERGVFVAGLKEEIVSDAEQILKLIDSGEVNRHFGETNMNVHSSRSHTIFRMVIESRGKDNSSSDAIRVSVLNLVDLAGSERIAKTGAGGVRLQEGKYINKSLMILGNVINKLSDSTKLRAHIPYRDSKLTRILQPALGGNAKTCIICTIAPEEHHIEESKGTLQFASRAKRITNCAQVNEILTDAALLKRQKLEIEELRMKLQGSHAEVLEQEILNLSNQMLKYELECERLKTQLEEEKRKQKEQENCIKEQQMKIENLNNFVTNSDFKRNQSEDFIISRKTPDGLCNVNDTSDVPGTPCFKSASRSFVVARSNNYSGLSDFSPMVHSLGDVADEDTWMKLNKGFVADLDQIQFTPAVKCQPTPLSIATTECPRENHSEVEDLKSRIQLLTNENDSLQVKFNEQVLLSNNLMQEMSELKQETLTVKEIPNRLSESVANCKDVYKDVIVTMKSLITDKESPTANLLLGTTEITTSLLATLETQFSMIMDGQKTGSSIDHPLSDHWETLRVNLKNTTTLLLSDAQAKDEFLNSHNKLDVVVRLLFHLSLRQVLNVILKGQETAALEEKKLKSELIIIKERYNELEKELCLDKQLLEASRESHEKLIKEVQFLKEERDSLDRKISQSTQRLRVIASDKENALKDLNVEVKRRKDMEEEIKHISIAFATRHKSFVSFHSEIKSKMQKLTTQNSKAP

SEQ ID NO: 87156 - DNA, 3162 bp, Arabidopsis thaliana
  misc_feature (1)..(3162): Ceres Seq. ID no. 12698107
  misc_feature: MA Experiment ID: 20000113 Result: Down-regulated in Transcription
  misc_feature: MA Experiment 20000113 PARAMETER Experiment Name: At_42deg_Heat_cDNA_P Parameter: Temperature (deg C) Value: 42 vs. 22
  misc_feature: MA Experiment 20000113 PARAMETER Experiment Name: At_42deg_Heat_cDNA_P Parameter: Timepoint (hr) Value: 8
  misc_feature: MA Experiment 20000113 PARAMETER Experiment Name: At_42deg_Heat_cDNA_P Parameter: Tissue Value: Aerial
atggaggcgatcgatgagttgtctcagctttcggattcgatgagacaagcggcgtctctgctcgctgacgaagatcccgatgagacctcttcttctagacggccagctacttctctcaacgtcgttgccctagggaatgtgggagctggaaagtctgcagttctaaatagcctaattgggcatccagttctgccgacgggtgagaatggtgcgacacgggctcctattatcattgatttgagtagagaagaatcactgagcagcaaggcaataatcttgcaaattgacaataaaaatcaacaagtttctgcaagtgcactaaggcattcactacaagataggcttagcaaaggagcttcaggaaggggtcgtgatgaaatatacctaaaacttcgtaccagcacagctccaccactgaaattgattgatttgcctggactggaccagcgaattgtggacgattctatgggcttcatagattcattatcattgtcatcttataatttgtttctctcctctctttgcaagattggtgaacatgcacagcacaacgatgctatattgctggttgttgtgcctgctagccaggcatctgaaatttcgtcatctcgagccctgaagatcgcaaaggagtatgatccagagagtgagtatataggcactttcgttatacagacccttcattatacttctaaacaactggggttactacatttggatagaaacattggaactaaattttgtgtatactataaccaaaaaaaaaaacatcactccttatttataggtactaggacagtaggaattatcagcaaaattgatcaggcagcagagaacccaaagtcccttgcagcagttcaggcgcttctttcaaatcaaggacctccaaaaacaactgatattccatgggttgcacttattggccaatctgtctcaattgcatcagcgcagtctggaggcagtgagaactctttagaaactgcttggcgtgctgagagtgaaagccttaaatccattttgactggtgctccacaaagcaaacttggcagaattgccctggtcgacactcttgctagccagatccgtagcagaatgaagctcaggcttccgaacatcttaactggactccagggtaagtctcaaatagtgcaggacgaattagcgaggcttggtgagcaattggttagcagtgctgaaggcacaagggcaatagctttggagctttgtcgtgagtttgaagacaaatttcttctccatttagctggtggtgaaggaagtggttggaaagttgttgcaagttttgaaggcaatttccccaatcgtatcaaaaagcttccgttggatagacattttgacttgaacaatgtcaaaaggatcgtgttggaggctgatggttatcaaccttatctcatatctccagagaaagggttgagatcgttaataaaaaccgttcttgagttggctaaagacccagcacgactatgtgttgatgaggttcaccgagtgcttgttgacatagtttcagcttccgcgaatgccacacctggtcttgggagatatcctccttttaagagagaggttgtagctatagcaagtgccgcacttgatggattcaagaatgaagctaagaagatggtagttgcattagttgatatggagcgtgcatttgtaccacctcagcacttcatccgcctcgtacaaagaagaatggaaaggcagcgtcgtgaggaggagctaaaaggtcgttcctctaaaaagggacaagatgcagagcagtctctcttaaacagggtttgcttttatctcagaacaatctggattcatttagtggatgtgcttctactatttttttgtgatatggaagtacataatgaaacaattctttttttgcttgtacatcaggctactagtcctcagccagatgggccatcatcaactggtggtagcttaaaatctttgagagacaaattaatgccacaagataaagataaagataaagaaaaagagactccggaggtgtctggtctgaagactgctggacctgagggagagataactgcagggtacttaatgaagaaaagtgcaaagacaaatgggtggagtaggcgatggtttgttctgaatgaaaaaactggaaagcttggttatacaaaaaaacaagaagaaagaaacttccgcggcactgtaactttggaggaatgcagtatcgaagaaatttctgatgatgaaggagaaaaatcaaagagctcgaaagataagaaatcaaatggaccggattcaaaaggaccaggccttgtatttaagataacttgcagggttccatataagactgtacttaaaggtatgtcaagcgattatcaaaatttactgcttgaccctctttttactctattatatgagcaaatcctcatatgctcttatattgcagctcacaatgcgttggttctcaaggccgagagcatggttgataagaatgaatggataaataagctgcaaaaggttatccaggcccgaggaggccaagtgggtagcgcttccatgagacaaagtctttcagaaggctcacttgataagatggtaaggaaaccggtcgacccggaagaggaattacggtggatgtcccaagaagtacggggttatgttgaagctgttctcaacagtctagctgccaatgttccaaaggctgttgttctctgtcaagtggagaaatccaaggaagacatgctgaatcagctatacagctctatcagcgcaattggtaatgagaggattgaatcattgattcaagaggatcagaacgtcaaaagacgaagagaccgttaccagaaacagtcctctcttctctcaaagctcactaggcagcttagcattcacgataaccgagcagctgctgcttcaagctggtctgacaatagtggcactgaaagcagcccgagaaccaatggagggtcatcaggagaggactggatgaatgcgtttaacgcagctgctagtggacctgactcattgaagagatatggatctggcggccatagccgtcgttacagtgatccagcacagaatggtgaggattcttctggatctggtggcagctcccgtcgcaccacaccaaaccggctcccaccagctccgccacagtctggatcatcttacaggtattag

SEQ ID NO: 87157 - protein, 1053 aa, Arabidopsis thaliana
  peptide (1)..(1053): Ceres Seq. ID no. 12698108
  misc_feature (321)..(579): Pfam Name: Dynamin central region Pfam Description: Dynamin central region
  misc_feature (263)..(593): Homolog of NCBI NO: 38175440 NR Description: putative dynamin homolog [Oryza sativa (japonica
  misc_feature (808)..(1022): Homolog of NCBI NO: 38175440 NR Description: putative dynamin homolog [Oryza sativa (japonica
  misc_feature (1)..(156): Homolog of NCBI NO: 38175440 NR Description: putative dynamin homolog [Oryza sativa (japonica
  misc_feature (662)..(780): Homolog of NCBI NO: 38175440 NR Description: putative dynamin homolog [Oryza sativa (japonica
  misc_feature (177)..(220): Homolog of NCBI NO: 38175440 NR Description: putative dynamin homolog [Oryza sativa (japonica
  misc_feature (263)..(595): Homolog of NCBI NO: 34904996 NR Description: P0456B03.5 [Oryza sativa (japonica
  misc_feature (1)..(156): Homolog of NCBI NO: 34904996 NR Description: P0456B03.5 [Oryza sativa (japonica
  misc_feature (810)..(921): Homolog of NCBI NO: 34904996 NR Description: P0456B03.5 [Oryza sativa (japonica
  misc_feature (987)..(1048): Homolog of NCBI NO: 34904996 NR Description: P0456B03.5 [Oryza sativa (japonica
  misc_feature (706)..(763): Homolog of NCBI NO: 34904996 NR Description: P0456B03.5 [Oryza sativa (japonica
MEAIDELSQLSDSMRQAASLLADEDPDETSSSRRPATSLNVVALGNVGAGKSAVLNSLIGHPVLPTGENGATRAPIIIDLSREESLSSKAIILQIDNKNQQVSASALRHSLQDRLSKGASGRGRDEIYLKLRTSTAPPLKLIDLPGLDQRIVDDSMGFIDSLSLSSYNLFLSSLCKIGEHAQHNDAILLVVVPASQASEISSSRALKIAKEYDPESEYIGTFVIQTLHYTSKQLGLLHLDRNIGTKFCVYYNQKKKHHSLFIGTRTVGIISKIDQAAENPKSLAAVQALLSNQGPPKTTDIPWVALIGQSVSIASAQSGGSENSLETAWRAESESLKSILTGAPQSKLGRIALVDTLASQIRSRMKLRLPNILTGLQGKSQIVQDELARLGEQLVSSAEGTRAIALELCREFEDKFLLHLAGGEGSGWKVVASFEGNFPNRIKKLPLDRHFDLNNVKRIVLEADGYQPYLISPEKGLRSLIKTVLELAKDPARLCVDEVHRVLVDIVSASANATPGLGRYPPFKREVVAIASAALDGFKNEAKKMVVALVDMERAFVPPQHFIRLVQRRMERQRREEELKGRSSKKGQDAEQSLLNRVCFYLRTIWIHLVDVLLLFFCDMEVHNETILFLLVHQATSPQPDGPSSTGGSLKSLRDKLMPQDKDKDKEKETPEVSGLKTAGPEGEITAGYLMKKSAKTNGWSRRWFVLNEKTGKLGYTKKQEERNFRGTVTLEECSIEEISDDEGEKSKSSKDKKSNGPDSKGPGLVFKITCRVPYKTVLKGMSSDYQNLLLDPLFTLLYEQILICSYIAAHNALVLKAESMVDKNEWINKLQKVIQARGGQVGSASMRQSLSEGSLDKMVRKPVDPEEELRWMSQEVRGYVEAVLNSLAANVPKAVVLCQVEKSKEDMLNQLYSSISAIGNERIESLIQEDQNVKRRRDRYQKQSSLLSKLTRQLSIHDNRAAAASSWSDNSGTESSPRTNGGSSGEDWMNAFNAAASGPDSLKRYGSGGHSRRYSDPAQNGEDSSGSGGSSRRTTPNRLPPAPPQSGSSYRY

SEQ ID NO: 87158 - protein, 1040 aa, Arabidopsis thaliana
  peptide (1)..(1040): Ceres Seq. ID no. 12698109
  misc_feature (308)..(566): Pfam Name: Dynamin central region Pfam Description: Dynamin central region
  misc_feature (250)..(580): Homolog of NCBI NO: 38175440 NR Description: putative dynamin homolog [Oryza sativa (japonica
  misc_feature (795)..(1009): Homolog of NCBI NO: 38175440 NR Description: putative dynamin homolog [Oryza sativa (japonica
  misc_feature (1)..(143): Homolog of NCBI NO: 38175440 NR Description: putative dynamin homolog [Oryza sativa (japonica
  misc_feature (649)..(767): Homolog of NCBI NO: 38175440 NR Description: putative dynamin homolog [Oryza sativa (japonica
  misc_feature (164)..(207): Homolog of NCBI NO: 38175440 NR Description: putative dynamin homolog [Oryza sativa (japonica
  misc_feature (250)..(582): Homolog of NCBI NO: 34904996 NR Description: P0456B03.5 [Oryza sativa (japonica
  misc_feature (1)..(143): Homolog of NCBI NO: 34904996 NR Description: P0456B03.5 [Oryza sativa (japonica
  misc_feature (797)..(908): Homolog of NCBI NO: 34904996 NR Description: P0456B03.5 [Oryza sativa (japonica
  misc_feature (974)..(1035): Homolog of NCBI NO: 34904996 NR Description: P0456B03.5 [Oryza sativa (japonica
  misc_feature (693)..(750): Homolog of NCBI NO: 34904996 NR Description: P0456B03.5 [Oryza sativa (japonica
MRQAASLLADEDPDETSSSRRPATSLNVVALGNVGAGKSAVLNSLIGHPVLPTGENGATRAPIIIDLSREESLSSKAIILQIDNKNQQVSASALRHSLQDRLSKGASGRGRDEIYLKLRTSTAPPLKLIDLPGLDQRIVDDSMGFIDSLSLSSYNLFLSSLCKIGEHAQHNDAILLVVVPASQASEISSSRALKIAKEYDPESEYIGTFVIQTLHYTSKQLGLLHLDRNIGTKFCVYYNQKKKHHSLFIGTRTVGIISKIDQAAENPKSLAAVQALLSNQGPPKTTDIPWVALIGQSVSIASAQSGGSENSLETAWRAESESLKSILTGAPQSKLGRIALVDTLASQIRSRMKLRLPNILTGLQGKSQIVQDELARLGEQLVSSAEGTRAIALELCREFEDKFLLHLAGGEGSGWKVVASFEGNFPNRIKKLPLDRHFDLNNVKRIVLEADGYQPYLISPEKGLRSLIKTVLELAKDPARLCVDEVHRVLVDIVSASANATPGLGRYPPFKREVVAIASAALDGFKNEAKKMVVALVDMERAFVPPQHFIRLVQRRMERQRREEELKGRSSKKGQDAEQSLLNRVCFYLRTIWIHLVDVLLLFFCDMEVHNETILFLLVHQATSPQPDGPSSTGGSLKSLRDKLMPQDKDKDKEKETPEVSGLKTAGPEGEITAGYLMKKSAKTNGWSRRWFVLNEKTGKLGYTKKQEERNFRGTVTLEECSIEEISDDEGEKSKSSKDKKSNGPDSKGPGLVFKITCRVPYKTVLKGMSSDYQNLLLDPLFTLLYEQILICSYIAAHNALVLKAESMVDKNEWINKLQKVIQARGGQVGSASMRQSLSEGSLDKMVRKPVDPEEELRWMSQEVRGYVEAVLNSLAANVPKAVVLCQVEKSKEDMLNQLYSSISAIGNERIESLIQEDQNVKRRRDRYQKQSSLLSKLTRQLSIHDNRAAAASSWSDNSGTESSPRTNGGSSGEDWMNAFNAAASGPDSLKRYGSGGHSRRYSDPAQNGEDSSGSGGSSRRTTPNRLPPAPPQSGSSYRY

SEQ ID NO: 87159 - protein, 898 aa, Arabidopsis thaliana
  peptide (1)..(898): Ceres Seq. ID no. 12698110
  misc_feature (166)..(424): Pfam Name: Dynamin central region Pfam Description: Dynamin central region
  misc_feature (108)..(438): Homolog of NCBI NO: 38175440 NR Description: putative dynamin homolog [Oryza sativa (japonica
  misc_feature (653)..(867): Homolog of NCBI NO: 38175440 NR Description: putative dynamin homolog [Oryza sativa (japonica
  misc_feature (507)..(625): Homolog of NCBI NO: 38175440 NR Description: putative dynamin homolog [Oryza sativa (japonica
  misc_feature (22)..(65): Homolog of NCBI NO: 38175440 NR Description: putative dynamin homolog [Oryza sativa (japonica
  misc_feature (108)..(440): Homolog of NCBI NO: 34904996 NR Description: P0456B03.5 [Oryza sativa (japonica
  misc_feature (655)..(766): Homolog of NCBI NO: 34904996 NR Description: P0456B03.5 [Oryza sativa (japonica
  misc_feature (832)..(893): Homolog of NCBI NO: 34904996 NR Description: P0456B03.5 [Oryza sativa (japonica
  misc_feature (551)..(608): Homolog of NCBI NO: 34904996 NR Description: P0456B03.5 [Oryza sativa (japonica
  misc_feature (108)..(412): Homolog of NCBI NO: 37536976 NR Description: putative phragmoplastin [Oryza sativa (japonica group)] >gi|18854996|gb|AAL79688.1| putative phragmoplastin sativa] >gi|31433579|gb|AAP55077.1| putative phragmoplastin
  misc_feature (1)..(71): Homolog of NCBI NO: 37536976 NR Description: putative phragmoplastin [Oryza sativa (japonica group)] >gi|18854996|gb|AAL79688.1| putative phragmoplastin sativa] >gi|31433579|gb|AAP55077.1| putative phragmoplastin
MGFIDSLSLSSYNLFLSSLCKIGEHAQHNDAILLVVVPASQASEISSSRALKIAKEYDPESEYIGTFVIQTLHYTSKQLGLLHLDRNIGTKFCVYYNQKKKHHSLFIGTRTVGIISKIDQAAENPKSLAAVQALLSNQGPPKTTDIPWVALIGQSVSIASAQSGGSENSLETAWRAESESLKSILTGAPQSKLGRIALVDTLASQIRSRMKLRLPNILTGLQGKSQIVQDELARLGEQLVSSAEGTRAIALELCREFEDKFLLHLAGGEGSGWKVVASFEGNFPNRIKKLPLDRHFDLNNVKRIVLEADGYQPYLISPEKGLRSLIKTVLELAKDPARLCVDEVHRVLVDIVSASANATPGLGRYPPFKREVVAIASAALDGFKNEAKKMVVALVDMERAFVPPQHFIRLVQRRMERQRREEELKGRSSKKGQDAEQSLLNRVCFYLRTIWIHLVDVLLLFFCDMEVHNETILFLLVHQATSPQPDGPSSTGGSLKSLRDKLMPQDKDKDKEKETPEVSGLKTAGPEGEITAGYLMKKSAKTNGWSRRWFVLNEKTGKLGYTKKQEERNFRGTVTLEECSIEEISDDEGEKSKSSKDKKSNGPDSKGPGLVFKITCRVPYKTVLKGMSSDYQNLLLDPLFTLLYEQILICSYIAAHNALVLKAESMVDKNEWINKLQKVIQARGGQVGSASMRQSLSEGSLDKMVRKPVDPEEELRWMSQEVRGYVEAVLNSLAANVPKAVVLCQVEKSKEDMLNQLYSSISAIGNERIESLIQEDQNVKRRRDRYQKQSSLLSKLTRQLSIHDNRAAAASSWSDNSGTESSPRTNGGSSGEDWMNAFNAAASGPDSLKRYGSGGHSRRYSDPAQNGEDSSGSGGSSRRTTPNRLPPAPPQSGSSYRY

SEQ ID NO: 87160 - DNA, 865 bp, Arabidopsis thaliana
  misc_feature (1)..(865): Ceres Seq. ID no. 12698123
  misc_feature: MA Experiment ID: 108434 Result: Down-regulated in Transcription
  misc_feature: MA Experiment 108434 PARAMETER Experiment Name: At_Root_Tips_cDNA_P Parameter: Tissue Value: Root Tips
  misc_feature: MA Experiment ID: 108463 Result: Up-regulated in Transcription
  misc_feature: MA Experiment 108463 PARAMETER Experiment Name: At_Germinating_Seeds_cDNA_P Parameter: Age (day) Value: 3 vs. 0
  misc_feature: MA Experiment 108463 PARAMETER Experiment Name: At_Germinating_Seeds_cDNA_P Parameter: Tissue Value: Germinating Seeds
  misc_feature: MA Experiment ID: 108488 Result: Down-regulated in Transcription
  misc_feature: MA Experiment ID: 108572 Result: Up-regulated in Transcription
  misc_feature: MA Experiment 108572 PARAMETER Experiment Name: At_Drought_cDNA_P Parameter: Timepoint (hr) Value: 1
  misc_feature: MA Experiment 108572 PARAMETER Experiment Name: At_Drought_cDNA_P Parameter: Tissue Value: Aerial
  misc_feature: MA Experiment 108572 PARAMETER Experiment Name: At_Drought_cDNA_P Parameter: Treatment Value: Drought vs. No Drought
  misc_feature: MA Experiment ID: 108585 Result: Up-regulated in Transcription
  misc_feature: MA Experiment 108585 PARAMETER Experiment Name: At_5mM_NaNP_cDNA_P Parameter: Timepoint (hr) Value: 6
  misc_feature: MA Experiment 108585 PARAMETER Experiment Name: At_5mM_NaNP_cDNA_P Parameter: Tissue Value: Aerial
  misc_feature: MA Experiment 108585 PARAMETER Experiment Name: At_5mM_NaNP_cDNA_P Parameter: Treatment Value: null
  misc_feature: MA Experiment ID: 108607 Result: Up-regulated in Transcription
  misc_feature: MA Experiment 108607 PARAMETER Experiment Name: At_100uM_ABA_cDNA_P Parameter: Timepoint (hr) Value: 4
  misc_feature: MA Experiment 108607 PARAMETER Experiment Name: At_100uM_ABA_cDNA_P Parameter: Tissue Value: Aerial
  misc_feature: MA Experiment 108607 PARAMETER Experiment Name: At_100uM_ABA_cDNA_P Parameter: Treatment Value: 100uM ABA vs. No Treatment
  misc_feature: MA Experiment ID: 108668 Result: Up-regulated in Transcription
  misc_feature: MA Experiment 108668 PARAMETER Experiment Name: At_2mM_SA_cDNA_P Parameter: Plant Line Value: WS
  misc_feature: MA Experiment 108668 PARAMETER Experiment Name: At_2mM_SA_cDNA_P Parameter: Timepoint (hr) Value: 6
  misc_feature: MA Experiment 108668 PARAMETER Experiment Name: At_2mM_SA_cDNA_P Parameter: Treatment Value: 2mM SA vs. No Treatment
  misc_feature: MA Experiment ID: 20000069 Result: Up-regulated in Transcription
  misc_feature: MA Experiment 20000069 PARAMETER Experiment Name: At_100uM_ABA_Mutants_cDNA_P Parameter: Plant Line Value: CS23
  misc_feature: MA Experiment 20000069 PARAMETER Experiment Name: At_100uM_ABA_Mutants_cDNA_P Parameter: Timepoint (hr) Value: 6
  misc_feature: MA Experiment 20000069 PARAMETER Experiment Name: At_100uM_ABA_Mutants_cDNA_P Parameter: Tissue Value: Aerial
  misc_feature: MA Experiment 20000069 PARAMETER Experiment Name: At_100uM_ABA_Mutants_cDNA_P Parameter: Treatment Value: 100uM ABA vs. No Treatment
  misc_feature: MA Experiment ID: 20000171 Result: Up-regulated in Transcription
  misc_feature: MA Experiment 20000171 PARAMETER Experiment Name: At_42deg_Heat_P Parameter: Age (day) Value: 14
  misc_feature: MA Experiment 20000171 PARAMETER Experiment Name: At_42deg_Heat_P Parameter: Organism Value: A. thaliana
  misc_feature: MA Experiment 20000171 PARAMETER Experiment Name: At_42deg_Heat_P Parameter: Plant Line Value: WS
  misc_feature: MA Experiment 20000171 PARAMETER Experiment Name: At_42deg_Heat_P Parameter: Temperature (deg C) Value: 42 vs. 22
  misc_feature: MA Experiment 20000171 PARAMETER Experiment Name: At_42deg_Heat_P Parameter: Timepoint (hr) Value: 1
  misc_feature: MA Experiment 20000171 PARAMETER Experiment Name: At_42deg_Heat_P Parameter: Tissue Value: Aerial
  misc_feature: MA Experiment ID: 20000173 Result: Up-regulated in Transcription
  misc_feature: MA Experiment 20000173 PARAMETER Experiment Name: At_42deg_Heat_P Parameter: Age (day) Value: 14
  misc_feature: MA Experiment 20000173 PARAMETER Experiment Name: At_42deg_Heat_P Parameter: Organism Value: A. thaliana
  misc_feature: MA Experiment 20000173 PARAMETER Experiment Name: At_42deg_Heat_P Parameter: Plant Line Value: WS
  misc_feature: MA Experiment 20000173 PARAMETER Experiment Name: At_42deg_Heat_P Parameter: Temperature (deg C) Value: 42 vs. 22
  misc_feature: MA Experiment 20000173 PARAMETER Experiment Name: At_42deg_Heat_P Parameter: Timepoint (hr) Value: 6
  misc_feature: MA Experiment 20000173 PARAMETER Experiment Name: At_42deg_Heat_P Parameter: Tissue Value: Aerial
  misc_feature: MA Experiment ID: 20000451 Result: Down-regulated in Transcription
  misc_feature: MA Experiment 20000451 PARAMETER Experiment Name: At_CS6879_Shoots-Roots_P Parameter: Age (day) Value: 14
  misc_feature: MA Experiment 20000451 PARAMETER Experiment Name: At_CS6879_Shoots-Roots_P Parameter: Organism Value: A. thaliana
  misc_feature: MA Experiment 20000451 PARAMETER Experiment Name: At_CS6879_Shoots-Roots_P Parameter: Plant Line Value: CS6879 vs. WS
  misc_feature: MA Experiment 20000451 PARAMETER Experiment Name: At_CS6879_Shoots-Roots_P Parameter: Tissue Value: Roots
taaaaataatttagacaaaacaaagatgggagagagagaggaagtgaaactgttgggaacatggtacagtccggtcgtgataagagcaaagatcgctcttcgtctcaaatcggttgattatgattacgttgaagaggatttgttcggatctaagagtgagcttcttctcaaatcgaaccctattttcaagaaagtcccggttctcatccacaacactaaaccggtttgtgtatctcttaacatcgttgaatacatcgacgagacgtggaactcatctggatcgtccattcttccttctcatccttatgatcgtgcccttgctcgcttctggtctgtctttgttgatgacaagtggttaccgactttgatggcagctgtggtcgctaaatcggaagaagcaaaagcaaaaggcatggaagaagtggaagaagggttgttgcaactagaagctgcgtttattgctctaagcaaagggaaatctttttttggcggtgaaacaatcgggttcatagacatttgccttggaagctttttagttctcttaaaagctagagagaagcttaaaaacgaaaagattttagacgaattaaaaactccttctctttatagatgggccaaccagtttttgtcaaatgaaatggtgaagaatgtggtgccggatattgataaagtcgccaagtttatagaagagtttgaggatagagctcaatatatccggtgcttctagatcttgagatcatcacagaaatcgttagaaaagagtggaggtttagtcttggcttcaaagtcaaacttgttatctccaaaaacagagtttcatatggtttattcatatgttagttaatctaaaagaagaacatggttc

SEQ ID NO: 87161 - protein, 241 aa, Arabidopsis thaliana
  peptide (1)..(241): Ceres Seq. ID no. 12698124
  misc_feature (9)..(241): Homolog of NCBI NO: 15218868 NR Description: glutathione transferase, putative; protein id: supported by cDNA: 123761. [Arabidopsis thaliana]
  misc_feature (9)..(241): Homolog of NCBI NO: 21537210 NR Description: glutathione S-transferase, putative [Arabidopsis
  misc_feature (9)..(236): Homolog of NCBI NO: 15218872 NR Description: glutathione transferase, putative; protein id: supported by cDNA: gi_13877558 [Arabidopsis thaliana]
  misc_feature (9)..(236): Homolog of NCBI NO: 13877559 NR Description: similar to glutathione S-transferase [Arabidopsis
  misc_feature (13)..(236): Homolog of NCBI NO: 15218517 NR Description: glutathione transferase, putative; protein id:
  misc_feature (14)..(236): Homolog of NCBI NO: 11096016 NR Description: glutathione S-transferase [Arabidopsis thaliana]
  misc_feature (14)..(236): Homolog of NCBI NO: 15375408 NR Description: glutathione S-transferase [Arabidopsis thaliana]
  misc_feature (1)..(236): Homolog of NCBI NO: 6856103 NR Description: glutathione S-transferase [Gossypium hirsutum]
  misc_feature (13)..(230): Homolog of NCBI NO: 6652870 NR Description: glutathione S-transferase 1 [Papaver somniferum]
  misc_feature (13)..(230): Homolog of NCBI NO: 6652874 NR Description: glutathione S-transferase 3 [Papaver somniferum]
KNNLDKTKMGEREEVKLLGTWYSPVVIRAKIALRLKSVDYDYVEEDLFGSKSELLLKSNPIFKKVPVLIHNTKPVCVSLNIVEYIDETWNSSGSSILPSHPYDRALARFWSVFVDDKWLPTLMAAVVAKSEEAKAKGMEEVEEGLLQLEAAFIALSKGKSFFGGETIGFIDICLGSFLVLLKAREKLKNEKILDELKTPSLYRWANQFLSNEMVKNVVPDIDKVAKFIEEFEDRAQYIRCF

SEQ ID NO: 87162 - protein, 233 aa, Arabidopsis thaliana
  peptide (1)..(233): Ceres Seq. ID no. 12698125
  misc_feature (1)..(233): Homolog of NCBI NO: 15218868 NR Description: glutathione transferase, putative; protein id: supported by cDNA: 123761. [Arabidopsis thaliana]
  misc_feature (1)..(233): Homolog of NCBI NO: 21537210 NR Description: glutathione S-transferase, putative [Arabidopsis
  misc_feature (1)..(228): Homolog of NCBI NO: 15218872 NR Description: glutathione transferase, putative; protein id: supported by cDNA: gi_13877558 [Arabidopsis thaliana]
  misc_feature (1)..(228): Homolog of NCBI NO: 13877559 NR Description: similar to glutathione S-transferase [Arabidopsis
  misc_feature (5)..(228): Homolog of NCBI NO: 15218517 NR Description: glutathione transferase, putative; protein id:
  misc_feature (6)..(228): Homolog of NCBI NO: 11096016 NR Description: glutathione S-transferase [Arabidopsis thaliana]
  misc_feature (6)..(228): Homolog of NCBI NO: 15375408 NR Description: glutathione S-transferase [Arabidopsis thaliana]
  misc_feature (1)..(228): Homolog of NCBI NO: 6856103 NR Description: glutathione S-transferase [Gossypium hirsutum]
  misc_feature (5)..(222): Homolog of NCBI NO: 6652870 NR Description: glutathione S-transferase 1 [Papaver somniferum]
  misc_feature (5)..(222): Homolog of NCBI NO: 6652874 NR Description: glutathione S-transferase 3 [Papaver somniferum]
MGEREEVKLLGTWYSPVVIRAKIALRLKSVDYDYVEEDLFGSKSELLLKSNPIFKKVPVLIHNTKPVCVSLNIVEYIDETWNSSGSSILPSHPYDRALARFWSVFVDDKWLPTLMAAVVAKSEEAKAKGMEEVEEGLLQLEAAFIALSKGKSFFGGETIGFIDICLGSFLVLLKAREKLKNEKILDELKTPSLYRWANQFLSNEMVKNVVPDIDKVAKFIEEFEDRAQYIRCF

SEQ ID NO: 87163 - DNA, 931 bp, Arabidopsis thaliana
  misc_feature (1)..(931): Ceres Seq. ID no. 12698126
  misc_feature: MA Experiment ID: 108462 Result: Up-regulated in Transcription
  misc_feature: MA Experiment 108462 PARAMETER Experiment Name: At_Germinating_Seeds_cDNA_P Parameter: Age (day) Value: 2 vs. 0
  misc_feature: MA Experiment 108462 PARAMETER Experiment Name: At_Germinating_Seeds_cDNA_P Parameter: Tissue Value: Germinating Seeds
  misc_feature: MA Experiment ID: 108463 Result: Up-regulated in Transcription
  misc_feature: MA Experiment 108463 PARAMETER Experiment Name: At_Germinating_Seeds_cDNA_P Parameter: Age (day) Value: 3 vs. 0
  misc_feature: MA Experiment 108463 PARAMETER Experiment Name: At_Germinating_Seeds_cDNA_P Parameter: Tissue Value: Germinating Seeds
  misc_feature: MA Experiment ID: 108488 Result: Down-regulated in Transcription
  misc_feature: MA Experiment ID: 108501 Result: Up-regulated in Transcription
  misc_feature: MA Experiment 108501 PARAMETER Experiment Name: At_ap2_floral_buds_cDNA_P Parameter: Plant Line Value: ap2 (Ler.)
  misc_feature: MA Experiment 108501 PARAMETER Experiment Name: At_ap2_floral_buds_cDNA_P Parameter: Tissue Value: Closed Flower
  misc_feature: MA Experiment ID: 108561 Result: Up-regulated in Transcription
  misc_feature: MA Experiment 108561 PARAMETER Experiment Name: At_100uM_ABA_cDNA_P Parameter: Timepoint (hr) Value: 6
  misc_feature: MA Experiment 108561 PARAMETER Experiment Name: At_100uM_ABA_cDNA_P Parameter: Tissue Value: Aerial
  misc_feature: MA Experiment 108561 PARAMETER Experiment Name: At_100uM_ABA_cDNA_P Parameter: Treatment Value: 100uM ABA vs. No Treatment
  misc_feature: MA Experiment ID: 108572 Result: Up-regulated in Transcription
  misc_feature: MA Experiment 108572 PARAMETER Experiment Name: At_Drought_cDNA_P Parameter: Timepoint (hr) Value: 1
  misc_feature: MA Experiment 108572 PARAMETER Experiment Name: At_Drought_cDNA_P Parameter: Tissue Value: Aerial
  misc_feature: MA Experiment 108572 PARAMETER Experiment Name: At_Drought_cDNA_P Parameter: Treatment Value: Drought vs. No Drought
  misc_feature: MA Experiment ID: 108579 Result: Down-regulated in Transcription
  misc_feature: MA Experiment 108579 PARAMETER Experiment Name: At_4deg_Cold_cDNA_P Parameter: Temperature (deg C) Value: 4 vs. 22
  misc_feature: MA Experiment 108579 PARAMETER Experiment Name: At_4deg_Cold_cDNA_P Parameter: Timepoint (hr) Value: 6
  misc_feature: MA Experiment 108579 PARAMETER Experiment Name: At_4deg_Cold_cDNA_P Parameter: Tissue Value: Aerial
  misc_feature: MA Experiment ID: 108595 Result: Down-regulated in Transcription
  misc_feature: MA Experiment 108595 PARAMETER Experiment Name: At_Ler-pi_Ovule_cDNA_P Parameter: Plant Line Value: null
  misc_feature: MA Experiment ID: 108605 Result: Up-regulated in Transcription
  misc_feature: MA Experiment 108605 PARAMETER Experiment Name: At_100uM_ABA_cDNA_P Parameter: Timepoint (hr) Value: 6
  misc_feature: MA Experiment 108605 PARAMETER Experiment Name: At_100uM_ABA_cDNA_P Parameter: Tissue Value: Aerial
  misc_feature: MA Experiment 108605 PARAMETER Experiment Name: At_100uM_ABA_cDNA_P Parameter: Treatment Value: 100uM ABA vs. No Treatment
  misc_feature: MA Experiment ID: 108607 Result: Up-regulated in Transcription
  misc_feature: MA Experiment 108607 PARAMETER Experiment Name: At_100uM_ABA_cDNA_P Parameter: Timepoint (hr) Value: 4
  misc_feature: MA Experiment 108607 PARAMETER Experiment Name: At_100uM_ABA_cDNA_P Parameter: Tissue Value: Aerial
  misc_feature: MA Experiment 108607 PARAMETER Experiment Name: At_100uM_ABA_cDNA_P Parameter: Treatment Value: 100uM ABA vs. No Treatment
  misc_feature: MA Experiment ID: 108608 Result: Up-regulated in Transcription
  misc_feature: MA Experiment 108608 PARAMETER Experiment Name: At_100uM_ABA_cDNA_P Parameter: Timepoint (hr) Value: 1
  misc_feature: MA Experiment 108608 PARAMETER Experiment Name: At_100uM_ABA_cDNA_P Parameter: Tissue Value: Aerial
  misc_feature: MA Experiment 108608 PARAMETER Experiment Name: At_100uM_ABA_cDNA_P Parameter: Treatment Value: 100uM ABA vs. No Treatment
  misc_feature: MA Experiment ID: 108668 Result: Up-regulated in Transcription
  misc_feature: MA Experiment 108668 PARAMETER Experiment Name: At_2mM_SA_cDNA_P Parameter: Plant Line Value: WS
  misc_feature: MA Experiment 108668 PARAMETER Experiment Name: At_2mM_SA_cDNA_P Parameter: Timepoint (hr) Value: 6
  misc_feature: MA Experiment 108668 PARAMETER Experiment Name: At_2mM_SA_cDNA_P Parameter: Treatment Value: 2mM SA vs. No Treatment
  misc_feature: MA Experiment ID: 20000068 Result: Up-regulated in Transcription
  misc_feature: MA Experiment ID: 20000090 Result: Down-regulated in Transcription
  misc_feature: MA Experiment ID: 20000169 Result: Up-regulated in Transcription
  misc_feature: MA Experiment 20000169 PARAMETER Experiment Name: At_100uM_ABA_P Parameter: Age (day) Value: 14
  misc_feature: MA Experiment 20000169 PARAMETER Experiment Name: At_100uM_ABA_P Parameter: Organism Value: A. thaliana
  misc_feature: MA Experiment 20000169 PARAMETER Experiment Name: At_100uM_ABA_P Parameter: Plant Line Value: WS
  misc_feature: MA Experiment 20000169 PARAMETER Experiment Name: At_100uM_ABA_P Parameter: Timepoint (hr) Value: 6
  misc_feature: MA Experiment 20000169 PARAMETER Experiment Name: At_100uM_ABA_P Parameter: Tissue Value: Aerial
  misc_feature: MA Experiment 20000169 PARAMETER Experiment Name: At_100uM_ABA_P Parameter: Treatment Value: 100uM ABA vs. No Treatment
  misc_feature: MA Experiment ID: 20000179 Result: Up-regulated in Transcription
  misc_feature: MA Experiment 20000179 PARAMETER Experiment Name: At_Germinating_Seeds_P Parameter: Age (hr) Value: 6 vs. 0
  misc_feature: MA Experiment 20000179 PARAMETER Experiment Name: At_Germinating_Seeds_P Parameter: Tissue Value: Germinating Seeds
  misc_feature: MA Experiment ID: 20000182 Result: Up-regulated in Transcription
  misc_feature: MA Experiment 20000182 PARAMETER Experiment Name: At_2mM_SA_P Parameter: Age (day) Value: 14
  misc_feature: MA Experiment 20000182 PARAMETER Experiment Name: At_2mM_SA_P Parameter: Organism Value: A. thaliana
  misc_feature: MA Experiment 20000182 PARAMETER Experiment Name: At_2mM_SA_P Parameter: Plant Line Value: WS
  misc_feature: MA Experiment 20000182 PARAMETER Experiment Name: At_2mM_SA_P Parameter: Timepoint (hr) Value: 6
  misc_feature: MA Experiment 20000182 PARAMETER Experiment Name: At_2mM_SA_P Parameter: Tissue Value: Aerial
  misc_feature: MA Experiment 20000182 PARAMETER Experiment Name: At_2mM_SA_P Parameter: Treatment Value: 2mM SA vs. No Treatment
  misc_feature: MA Experiment ID: 20000185 Result: Down-regulated in Transcription
  misc_feature: MA Experiment 20000185 PARAMETER Experiment Name: At_Roots__P Parameter: Age (day) Value: 7 vs. 21
  misc_feature: MA Experiment 20000185 PARAMETER Experiment Name: At_Roots__P Parameter: Organism Value: A. thaliana
  misc_feature: MA Experiment 20000185 PARAMETER Experiment Name: At_Roots__P Parameter: Tissue Value: Roots vs. Whole Plant
  misc_feature: MA Experiment ID: 20000234 Result: Down-regulated in Transcription
  misc_feature: MA Experiment 20000234 PARAMETER Experiment Name: At_Siliques_P Parameter: Age (day) Value: 21
  misc_feature: MA Experiment 20000234 PARAMETER Experiment Name: At_Siliques_P Parameter: Organism Value: A. thaliana
  misc_feature: MA Experiment 20000234 PARAMETER Experiment Name: At_Siliques_P Parameter: Plant Line Value: WS
  misc_feature: MA Experiment 20000234 PARAMETER Experiment Name: At_Siliques_P Parameter: Tissue Value: Less Than 5mm Siliques vs. Whole Plant
  misc_feature: MA Experiment ID: 20000268 Result: Up-regulated in Transcription
  misc_feature: MA Experiment 20000268 PARAMETER Experiment Name: At_100mM_NaCl__P Parameter: Age (day) Value: 14
  misc_feature: MA Experiment 20000268 PARAMETER Experiment Name: At_100mM_NaCl__P Parameter: Organism Value: A. thaliana
  misc_feature: MA Experiment 20000268 PARAMETER Experiment Name: At_100mM_NaCl__P Parameter: Plant Line Value: WS
  misc_feature: MA Experiment 20000268 PARAMETER Experiment Name: At_100mM_NaCl__P Parameter: Timepoint (hr) Value: 6
  misc_feature: MA Experiment 20000268 PARAMETER Experiment Name: At_100mM_NaCl__P Parameter: Tissue Value: Whole Plant
  misc_feature: MA Experiment 20000268 PARAMETER Experiment Name: At_100mM_NaCl__P Parameter: Treatment Value: 100mM NaCl vs. No Treatment
  misc_feature: MA Experiment ID: 20000439 Result: Down-regulated in Transcription
  misc_feature: MA Experiment 20000439 PARAMETER Experiment Name: At_Roots__P Parameter: Age (day) Value: 14 vs. 21
  misc_feature: MA Experiment 20000439 PARAMETER Experiment Name: At_Roots__P Parameter: Organism Value: A. thaliana
  misc_feature: MA Experiment 20000439 PARAMETER Experiment Name: At_Roots__P Parameter: Tissue Value: Roots vs. Whole Plant
  misc_feature: MA Experiment ID: 20000495 Result: Down-regulated in Transcription
  misc_feature: MA Experiment 20000495 PARAMETER Experiment Name: At_Guard_Cells_P Parameter: Harvest Date Value: 8/2/2002
  misc_feature: MA Experiment 20000495 PARAMETER Experiment Name: At_Guard_Cells_P Parameter: Organism Value: A. thaliana
  misc_feature: MA Experiment 20000495 PARAMETER Experiment Name: At_Guard_Cells_P Parameter: Tissue Value: Guard Cells vs. Leaves
  misc_feature: MA Experiment ID: 20000573 Result: Down-regulated in Transcription
  misc_feature: MA Experiment 20000573 PARAMETER Experiment Name: At_100uM_ABA_Mutants__P Parameter: Organism Value: A. thaliana
  misc_feature: MA Experiment 20000573 PARAMETER Experiment Name: At_100uM_ABA_Mutants__P Parameter: Plant Line Value: CS22 vs. Ler wt
  misc_feature: MA Experiment 20000573 PARAMETER Experiment Name: At_100uM_ABA_Mutants__P Parameter: Timepoint (hr) Value: N/A
  misc_feature: MA Experiment 20000573 PARAMETER Experiment Name: At_100uM_ABA_Mutants__P Parameter: Tissue Value: Whole Plant
  misc_feature: MA Experiment 20000573 PARAMETER Experiment Name: At_100uM_ABA_Mutants__P Parameter: Treatment Value: None
  misc_feature: MA Experiment ID: 20000574 Result: Down-regulated in Transcription
  misc_feature: MA Experiment 20000574 PARAMETER Experiment Name: At_100uM_ABA_Mutants__P Parameter: Organism Value: A. thaliana
  misc_feature: MA Experiment 20000574 PARAMETER Experiment Name: At_100uM_ABA_Mutants__P Parameter: Plant Line Value: CS23 vs. Ler wt
  misc_feature: MA Experiment 20000574 PARAMETER Experiment Name: At_100uM_ABA_Mutants__P Parameter: Timepoint (hr) Value: N/A
  misc_feature: MA Experiment 20000574 PARAMETER Experiment Name: At_100uM_ABA_Mutants__P Parameter: Tissue Value: Whole Plant
  misc_feature: MA Experiment 20000574 PARAMETER Experiment Name: At_100uM_ABA_Mutants__P Parameter: Treatment Value: None
  misc_feature: MA Experiment ID: 20000794 Result: Up-regulated in Transcription
  misc_feature: MA Experiment 20000794 PARAMETER Experiment Name: At_Petals_P Parameter: Age (day) Value: 23-25 days
  misc_feature: MA Experiment 20000794 PARAMETER Experiment Name: At_Petals_P Parameter: Plant Line Value: WS
  misc_feature: MA Experiment 20000794 PARAMETER Experiment Name: At_Petals_P Parameter: Tissue Value: Petals vs. Whole plant
  misc_feature: MA Experiment ID: 20001248 Result: Down-regulated in Transcription
  misc_feature: MA Experiment 20001248 PARAMETER Experiment Name: At_Far-red-induction_P Parameter: Age (day) Value: 7
  misc_feature: MA Experiment 20001248 PARAMETER Experiment Name: At_Far-red-induction_P Parameter: Light Value: Far-red vs. White
  misc_feature: MA Experiment 20001248 PARAMETER Experiment Name: At_Far-red-induction_P Parameter: Organism Value: A. thaliana
  misc_feature: MA Experiment 20001248 PARAMETER Experiment Name: At_Far-red-induction_P Parameter: Plant Line Value: Columbia
  misc_feature: MA Experiment 20001248 PARAMETER Experiment Name: At_Far-red-induction_P Parameter: Timepoint (hr) Value: 4
  misc_feature: MA Experiment 20001248 PARAMETER Experiment Name: At_Far-red-induction_P Parameter: Tissue Value: Whole Plant
  misc_feature: MA Experiment ID: 20001911 Result: Up-regulated in Transcription
  misc_feature: MA Experiment 20001911 PARAMETER Experiment Name: At_Drought_Reproduction_P Parameter: Age (day) Value: 40
  misc_feature: MA Experiment 20001911 PARAMETER Experiment Name: At_Drought_Reproduction_P Parameter: Organism Value: A. thaliana
  misc_feature: MA Experiment 20001911 PARAMETER Experiment Name: At_Drought_Reproduction_P Parameter: Plant Line Value: WS
  misc_feature: MA Experiment 20001911 PARAMETER Experiment Name: At_Drought_Reproduction_P Parameter: Timepoint (day) Value: 10
  misc_feature: MA Experiment 20001911 PARAMETER Experiment Name: At_Drought_Reproduction_P Parameter: Tissue Value: Flowers
  misc_feature: MA Experiment 20001911 PARAMETER Experiment Name: At_Drought_Reproduction_P Parameter: Treatment Value: Drought vs. No Drought
aaaaaaaaacgtctatacacaaaaaaacaaatgggagagaaagaggaagtgaaactattaggagtatggtacagtccatacgccataagacctaagatcgctcttcgtctcaaatcagtggattatgattacgttgaggaaaatctgtttggatccaagagtgagcttcttctcaaatcaaacccggttcacaagaaagtccctgttctcctccacaacaacaaaccgattgtcgagtctctcaacatcgttgaatacattgatgagacgtggaactcatctgcaccgtccattcttccttcacatccttatgatcgtgctcttgctcgcttttggtctgacttcgttgataacaagtggtttccggcgttgagaatggcggcgatcactaaatcggaagacgcaaaagcgaaagccatggaagaagtggaagaagggttgttgcaactcgaggatgcgtttgtttctataagcaaagggaaaccctttttcggcggtgaagcaatcgggtttatggatatttgctttggaagctttgtggttctcttgaaagctagagaaaagtttaaagcagaaaagcttttagacgaatcaaaaactccttctctttgtaaatgggccgaccggttcttgtccgatgaaacggtgaagaatgtggcaccggagatcgaaaaagtagctgagtttctacaagaacttgaggttagagctcaatccgcagcttcaagatcttgagatcatcttagaaatgtattgcaatgcaattgtgttttgtgtacatgtaaaacgaaaataagttgaagttttaaagtgttgtgttcagtctatgctaggatttatgacgcggtgtatgggctacggactattttcagtttatgtttatcgaaaatataagggtcagcccaagattattaggggtcgtccccccttt

SEQ ID NO: 87164 - protein, 244 aa, Arabidopsis thaliana
  peptide (1)..(244): Ceres Seq. ID no. 12698127
  misc_feature (11)..(244): Homolog of NCBI NO: 15218872 NR Description: glutathione transferase, putative; protein id: supported by cDNA: gi_13877558 [Arabidopsis thaliana]
  misc_feature (11)..(244): Homolog of NCBI NO: 13877559 NR Description: similar to glutathione S-transferase [Arabidopsis
  misc_feature (11)..(238): Homolog of NCBI NO: 15218868 NR Description: glutathione transferase, putative; protein id: supported by cDNA: 123761. [Arabidopsis thaliana]
  misc_feature (11)..(238): Homolog of NCBI NO: 21537210 NR Description: glutathione S-transferase, putative [Arabidopsis
  misc_feature (16)..(239): Homolog of NCBI NO: 11096016 NR Description: glutathione S-transferase [Arabidopsis thaliana]
  misc_feature (16)..(239): Homolog of NCBI NO: 15375408 NR Description: glutathione S-transferase [Arabidopsis thaliana]
  misc_feature (15)..(239): Homolog of NCBI NO: 15218517 NR Description: glutathione transferase, putative; protein id:
  misc_feature (16)..(125): Homolog of NCBI NO: 11096018 NR Description: glutathione S-transferase [Arabidopsis thaliana]
  misc_feature (146)..(239): Homolog of NCBI NO: 11096018 NR Description: glutathione S-transferase [Arabidopsis thaliana]
  misc_feature (16)..(239): Homolog of NCBI NO: 6856103 NR Description: glutathione S-transferase [Gossypium hirsutum]
KKKRLYTKKQMGEKEEVKLLGVWYSPYAIRPKIALRLKSVDYDYVEENLFGSKSELLLKSNPVHKKVPVLLHNNKPIVESLNIVEYIDETWNSSAPSILPSHPYDRALARFWSDFVDNKWFPALRMAAITKSEDAKAKAMEEVEEGLLQLEDAFVSISKGKPFFGGEAIGFMDICFGSFVVLLKAREKFKAEKLLDESKTPSLCKWADRFLSDETVKNVAPEIEKVAEFLQELEVRAQSAASRS

SEQ ID NO: 87165 - protein, 234 aa, Arabidopsis thaliana
  peptide (1)..(234): Ceres Seq. ID no. 12698128
  misc_feature (1)..(234): Homolog of NCBI NO: 15218872 NR Description: glutathione transferase, putative; protein id: supported by cDNA: gi_13877558 [Arabidopsis thaliana]
  misc_feature (1)..(234): Homolog of NCBI NO: 13877559 NR Description: similar to glutathione S-transferase [Arabidopsis
  misc_feature (1)..(228): Homolog of NCBI NO: 15218868 NR Description: glutathione transferase, putative; protein id: supported by cDNA: 123761. [Arabidopsis thaliana]
  misc_feature (1)..(228): Homolog of NCBI NO: 21537210 NR Description: glutathione S-transferase, putative [Arabidopsis
  misc_feature (6)..(229): Homolog of NCBI NO: 11096016 NR Description: glutathione S-transferase [Arabidopsis thaliana]
  misc_feature (6)..(229): Homolog of NCBI NO: 15375408 NR Description: glutathione S-transferase [Arabidopsis thaliana]
  misc_feature (5)..(229): Homolog of NCBI NO: 15218517 NR Description: glutathione transferase, putative; protein id:
  misc_feature (6)..(115): Homolog of NCBI NO: 11096018 NR Description: glutathione S-transferase [Arabidopsis thaliana]
  misc_feature (136)..(229): Homolog of NCBI NO: 11096018 NR Description: glutathione S-transferase [Arabidopsis thaliana]
  misc_feature (6)..(229): Homolog of NCBI NO: 6856103 NR Description: glutathione S-transferase [Gossypium hirsutum]
MGEKEEVKLLGVWYSPYAIRPKIALRLKSVDYDYVEENLFGSKSELLLKSNPVHKKVPVLLHNNKPIVESLNIVEYIDETWNSSAPSILPSHPYDRALARFWSDFVDNKWFPALRMAAITKSEDAKAKAMEEVEEGLLQLEDAFVSISKGKPFFGGEAIGFMDICFGSFVVLLKAREKFKAEKLLDESKTPSLCKWADRFLSDETVKNVAPEIEKVAEFLQELEVRAQSAASRS

SEQ ID NO: 87166 - DNA, 942 bp, Arabidopsis thaliana
  misc_feature (1)..(942): Ceres Seq. ID no. 12698141
  misc_feature: MA Experiment ID: 20000227 Result: Up-regulated in Transcription
  misc_feature: MA Experiment 20000227 PARAMETER Experiment Name: At_Root-Tips-vs-Tops_P Parameter: Tissue Value: Root Tips vs. Root Tops
atgggggttgattactacaatgtactcaacgtgaatccaagcgcaacggaagacgatctaaagaaatcgtatcgaagacttgcaatgaaatggcaccctgacaaaaaccctacttcaatcaagcaagaagctgaagctaagttcaaacaaatctccgaagcttacgatgttttaagcgatcctaacaaacgtcagatctatgatcaatatggtgaagacggacttacggcgacagaagcaacggcgtcgtctcaacaacataattactcttctggtaacaacaataattacaatgcagggtttaggtattatccacgtgatgctgaagatattttcgctgagtttttcggtgcatctgagaaagtctttgatggtggcgtcggcggtggcgggaggaaagctccggcgattgagagtaaattggcttgtactcttgaggagttgtataaaggtgggaggaggaagatgaagatttcccgcgttgttcctgatggtcttggaaagtcaaagccagtggaagagatcttgaagatagatataacaccaggatggaagaaaggaactaagataacttttccagagaaaggaaaccaagaacccggtgttactcccgcagatctcatctttgttatagatgagaaaccgcattcggtttacaaaagagacggtaacgatcttattgtagacaagaaagtttcgcttttggaggctttaacagggatcactcttagcttaacaacactagacgggaggaatctgactatcccggttttggatatcgttaaaccgggtcaggagatagtgattcctagtgaaggaatgcccatctctaaagaaggttcaaagagaggagatctaagaatcaactttgagatatgtttcccctcgaggctaacatcggaacagaagacagatctcaagagagttcttggtggtagctga

SEQ ID NO: 87167 - protein, 313 aa, Arabidopsis thaliana
  peptide (1)..(313): Ceres Seq. ID no. 12698142
  misc_feature (188)..(310): Pfam Name: DnaJ C terminal region Pfam Description: DnaJ C terminal region
  misc_feature (132)..(313): Homolog of NCBI NO: 21593202 NR Description: putative heat-shock protein [Arabidopsis thaliana]
  misc_feature (1)..(132): Homolog of NCBI NO: 21593202 NR Description: putative heat-shock protein [Arabidopsis thaliana]
  misc_feature (132)..(313): Homolog of NCBI NO: 15218515 NR Description: putative heat-shock protein; protein id: supported by cDNA: 37036., supported by cDNA: gi_13430679
  misc_feature (1)..(132): Homolog of NCBI NO: 15218515 NR Description: putative heat-shock protein; protein id: supported by cDNA: 37036., supported by cDNA: gi_13430679
  misc_feature (126)..(312): Homolog of NCBI NO: 15228294 NR Description: heat shock protein-like protein; protein id: [Arabidopsis thaliana] >gi|7441939|pir||T06689 heat shock protein
  misc_feature (1)..(134): Homolog of NCBI NO: 15228294 NR Description: heat shock protein-like protein; protein id: [Arabidopsis thaliana] >gi|7441939|pir||T06689 heat shock protein
  misc_feature (132)..(311): Homolog of NCBI NO: 15235310 NR Description: heat-shock protein; protein id: At4g28480.1, by cDNA: gi_14596114, supported by cDNA: gi_20148388 [Arabidopsis
  misc_feature (1)..(133): Homolog of NCBI NO: 15235310 NR Description: heat-shock protein; protein id: At4g28480.1, by cDNA: gi_14596114, supported by cDNA: gi_20148388 [Arabidopsis
  misc_feature (132)..(313): Homolog of NCBI NO: 15218901 NR Description: chaperone, putative; protein id: At1g59725.1 thaliana] >gi|25296016|pir||A96621 probable heat shock protein
  misc_feature (132)..(312): Homolog of NCBI NO: 15239455 NR Description: heat-shock protein - like; protein id:
MGVDYYNVLNVNPSATEDDLKKSYRRLAMKWHPDKNPTSIKQEAEAKFKQISEAYDVLSDPNKRQIYDQYGEDGLTATEATASSQQHNYSSGNNNNYNAGFRYYPRDAEDIFAEFFGASEKVFDGGVGGGGRKAPAIESKLACTLEELYKGGRRKMKISRVVPDGLGKSKPVEEILKIDITPGWKKGTKITFPEKGNQEPGVTPADLIFVIDEKPHSVYKRDGNDLIVDKKVSLLEALTGITLSLTTLDGRNLTIPVLDIVKPGQEIVIPSEGMPISKEGSKRGDLRINFEICFPSRLTSEQKTDLKRVLGGS

SEQ ID NO: 87168 - protein, 285 aa, Arabidopsis thaliana
  peptide (1)..(285): Ceres Seq. ID no. 12698143
  misc_feature (160)..(282): Pfam Name: DnaJ C terminal region Pfam Description: DnaJ C terminal region
  misc_feature (104)..(285): Homolog of NCBI NO: 21593202 NR Description: putative heat-shock protein [Arabidopsis thaliana]
  misc_feature (1)..(104): Homolog of NCBI NO: 21593202 NR Description: putative heat-shock protein [Arabidopsis thaliana]
  misc_feature (104)..(285): Homolog of NCBI NO: 15218515 NR Description: putative heat-shock protein; protein id: supported by cDNA: 37036., supported by cDNA: gi_13430679
  misc_feature (1)..(104): Homolog of NCBI NO: 15218515 NR Description: putative heat-shock protein; protein id: supported by cDNA: 37036., supported by cDNA: gi_13430679
  misc_feature (98)..(284): Homolog of NCBI NO: 15228294 NR Description: heat shock protein-like protein; protein id: [Arabidopsis thaliana] >gi|7441939|pir||T06689 heat shock protein
  misc_feature (1)..(106): Homolog of NCBI NO: 15228294 NR Description: heat shock protein-like protein; protein id: [Arabidopsis thaliana] >gi|7441939|pir||T06689 heat shock protein
  misc_feature (104)..(283): Homolog of NCBI NO: 15235310 NR Description: heat-shock protein; protein id: At4g28480.1, by cDNA: gi_14596114, supported by cDNA: gi_20148388 [Arabidopsis
  misc_feature (1)..(105): Homolog of NCBI NO: 15235310 NR Description: heat-shock protein; protein id: At4g28480.1, by cDNA: gi_14596114, supported by cDNA: gi_20148388 [Arabidopsis
  misc_feature (104)..(285): Homolog of NCBI NO: 15218901 NR Description: chaperone, putative; protein id: At1g59725.1 thaliana] >gi|25296016|pir||A96621 probable heat shock protein
  misc_feature (104)..(284): Homolog of NCBI NO: 15239455 NR Description: heat-shock protein - like; protein id:
MKWHPDKNPTSIKQEAEAKFKQISEAYDVLSDPNKRQIYDQYGEDGLTATEATASSQQHNYSSGNNNNYNAGFRYYPRDAEDIFAEFFGASEKVFDGGVGGGGRKAPAIESKLACTLEELYKGGRRKMKISRVVPDGLGKSKPVEEILKIDITPGWKKGTKITFPEKGNQEPGVTPADLIFVIDEKPHSVYKRDGNDLIVDKKVSLLEALTGITLSLTTLDGRNLTIPVLDIVKPGQEIVIPSEGMPISKEGSKRGDLRINFEICFPSRLTSEQKTDLKRVLGGS

SEQ ID NO: 87169 - protein, 158 aa, Arabidopsis thaliana
  peptide (1)..(158): Ceres Seq. ID no. 12698144
  misc_feature (33)..(155): Pfam Name: DnaJ C terminal region Pfam Description: DnaJ C terminal region
  misc_feature (1)..(158): Homolog of NCBI NO: 21593202 NR Description: putative heat-shock protein [Arabidopsis thaliana]
  misc_feature (1)..(158): Homolog of NCBI NO: 15218515 NR Description: putative heat-shock protein; protein id: supported by cDNA: 37036., supported by cDNA: gi_13430679
  misc_feature (1)..(157): Homolog of NCBI NO: 15228294 NR Description: heat shock protein-like protein; protein id: [Arabidopsis thaliana] >gi|7441939|pir||T06689 heat shock protein
  misc_feature (1)..(156): Homolog of NCBI NO: 15235310 NR Description: heat-shock protein; protein id: At4g28480.1, by cDNA: gi_14596114, supported by cDNA: gi_20148388 [Arabidopsis
  misc_feature (1)..(158): Homolog of NCBI NO: 15218901 NR Description: chaperone, putative; protein id: At1g59725.1 thaliana] >gi|25296016|pir||A96621 probable heat shock protein
  misc_feature (1)..(157): Homolog of NCBI NO: 15239455 NR Description: heat-shock protein - like; protein id:
  misc_feature (1)..(158): Homolog of NCBI NO: 15231987 NR Description: putative heat shock protein; protein id: supported by cDNA: 96785. [Arabidopsis thaliana]
  misc_feature (1)..(158): Homolog of NCBI NO: 21618097 NR Description: putative heat shock protein [Arabidopsis thaliana]
  misc_feature (1)..(155): Homolog of NCBI NO: 40253343 NR Description: putative DnaJ, heat shock protein hsp40 [Oryza
  misc_feature (1)..(158): Homolog of NCBI NO: 21313156 NR Description: RIKEN cDNA 2010306G19 [Mus musculus] DnaJ homolog subfamily B member 4 >gi|12842780|dbj|BAB25729.1| protein product [Mus musculus] >gi|16877864|gb|AAH17161.1| RIKEN
MKISRVVPDGLGKSKPVEEILKIDITPGWKKGTKITFPEKGNQEPGVTPADLIFVIDEKPHSVYKRDGNDLIVDKKVSLLEALTGITLSLTTLDGRNLTIPVLDIVKPGQEIVIPSEGMPISKEGSKRGDLRINFEICFPSRLTSEQKTDLKRVLGGS

SEQ ID NO: 87170 - DNA, 1677 bp, Arabidopsis thaliana
  misc_feature (1)..(1677): Ceres Seq. ID no. 12698155
  misc_feature: MA Experiment ID: 20000171 Result: Down-regulated in Transcription
  misc_feature: MA Experiment 20000171 PARAMETER Experiment Name: At_42deg_Heat_P Parameter: Age (day) Value: 14
  misc_feature: MA Experiment 20000171 PARAMETER Experiment Name: At_42deg_Heat_P Parameter: Organism Value: A. thaliana
  misc_feature: MA Experiment 20000171 PARAMETER Experiment Name: At_42deg_Heat_P Parameter: Plant Line Value: WS
  misc_feature: MA Experiment 20000171 PARAMETER Experiment Name: At_42deg_Heat_P Parameter: Temperature (deg C) Value: 42 vs. 22
  misc_feature: MA Experiment 20000171 PARAMETER Experiment Name: At_42deg_Heat_P Parameter: Timepoint (hr) Value: 1
  misc_feature: MA Experiment 20000171 PARAMETER Experiment Name: At_42deg_Heat_P Parameter: Tissue Value: Aerial
  misc_feature: MA Experiment ID: 20000173 Result: Down-regulated in Transcription
  misc_feature: MA Experiment 20000173 PARAMETER Experiment Name: At_42deg_Heat_P Parameter: Age (day) Value: 14
  misc_feature: MA Experiment 20000173 PARAMETER Experiment Name: At_42deg_Heat_P Parameter: Organism Value: A. thaliana
  misc_feature: MA Experiment 20000173 PARAMETER Experiment Name: At_42deg_Heat_P Parameter: Plant Line Value: WS
  misc_feature: MA Experiment 20000173 PARAMETER Experiment Name: At_42deg_Heat_P Parameter: Temperature (deg C) Value: 42 vs. 22
  misc_feature: MA Experiment 20000173 PARAMETER Experiment Name: At_42deg_Heat_P Parameter: Timepoint (hr) Value: 6
  misc_feature: MA Experiment 20000173 PARAMETER Experiment Name: At_42deg_Heat_P Parameter: Tissue Value: Aerial
  misc_feature: MA Experiment ID: 20000180 Result: Up-regulated in Transcription
  misc_feature: MA Experiment 20000180 PARAMETER Experiment Name: At_Germinating_Seeds_P Parameter: Age (hr) Value: 24 vs. 0
  misc_feature: MA Experiment 20000180 PARAMETER Experiment Name: At_Germinating_Seeds_P Parameter: Tissue Value: Germinating Seeds
  misc_feature: MA Experiment ID: 20000234 Result: Up-regulated in Transcription
  misc_feature: MA Experiment 20000234 PARAMETER Experiment Name: At_Siliques_P Parameter: Age (day) Value: 21
  misc_feature: MA Experiment 20000234 PARAMETER Experiment Name: At_Siliques_P Parameter: Organism Value: A. thaliana
  misc_feature: MA Experiment 20000234 PARAMETER Experiment Name: At_Siliques_P Parameter: Plant Line Value: WS
  misc_feature: MA Experiment 20000234 PARAMETER Experiment Name: At_Siliques_P Parameter: Tissue Value: Less Than 5mm Siliques vs. Whole Plant
  misc_feature: MA Experiment ID: 20000264 Result: Up-regulated in Transcription
  misc_feature: MA Experiment 20000264 PARAMETER Experiment Name: At_Open_Flower_P Parameter: Age (day) Value: 21
  misc_feature: MA Experiment 20000264 PARAMETER Experiment Name: At_Open_Flower_P Parameter: Plant Line Value: WS
  misc_feature: MA Experiment 20000264 PARAMETER Experiment Name: At_Open_Flower_P Parameter: Tissue Value: Open Flower vs. Whole Plant
  misc_feature: MA Experiment ID: 20000265 Result: Up-regulated in Transcription
  misc_feature: MA Experiment 20000265 PARAMETER Experiment Name: At_Open_Flower_P Parameter: Age (day) Value: 21
  misc_feature: MA Experiment 20000265 PARAMETER Experiment Name: At_Open_Flower_P Parameter: Plant Line Value: WS
  misc_feature: MA Experiment 20000265 PARAMETER Experiment Name: At_Open_Flower_P Parameter: Tissue Value: Closed Flower vs. Whole Plant
  misc_feature: MA Experiment ID: 20000286 Result: Up-regulated in Transcription
  misc_feature: MA Experiment 20000286 PARAMETER Experiment Name: At_Open_Flower_P Parameter: Age (day) Value: 21
  misc_feature: MA Experiment 20000286 PARAMETER Experiment Name: At_Open_Flower_P Parameter: Plant Line Value: WS
  misc_feature: MA Experiment 20000286 PARAMETER Experiment Name: At_Open_Flower_P Parameter: Tissue Value: Half Open vs. Whole Plant
  misc_feature: MA Experiment ID: 20000436 Result: Down-regulated in Transcription
  misc_feature: MA Experiment 20000436 PARAMETER Experiment Name: At_Drought_P Parameter: Age (day) Value: 7
  misc_feature: MA Experiment 20000436 PARAMETER Experiment Name: At_Drought_P Parameter: Organism Value: A. thaliana
  misc_feature: MA Experiment 20000436 PARAMETER Experiment Name: At_Drought_P Parameter: Plant Line Value: WS
  misc_feature: MA Experiment 20000436 PARAMETER Experiment Name: At_Drought_P Parameter: Timepoint (hr) Value: 12
  misc_feature: MA Experiment 20000436 PARAMETER Experiment Name: At_Drought_P Parameter: Tissue Value: Whole Plant
  misc_feature: MA Experiment 20000436 PARAMETER Experiment Name: At_Drought_P Parameter: Treatment Value: Drought vs. No Drought
  misc_feature: MA Experiment ID: 20000437 Result: Down-regulated in Transcription
  misc_feature: MA Experiment 20000437 PARAMETER Experiment Name: At_Drought_P Parameter: Age (day) Value: 8
  misc_feature: MA Experiment 20000437 PARAMETER Experiment Name: At_Drought_P Parameter: Organism Value: A. thaliana
  misc_feature: MA Experiment 20000437 PARAMETER Experiment Name: At_Drought_P Parameter: Plant Line Value: WS
  misc_feature: MA Experiment 20000437 PARAMETER Experiment Name: At_Drought_P Parameter: Timepoint (hr) Value: 24
  misc_feature: MA Experiment 20000437 PARAMETER Experiment Name: At_Drought_P Parameter: Tissue Value: Whole Plant
  misc_feature: MA Experiment 20000437 PARAMETER Experiment Name: At_Drought_P Parameter: Treatment Value: Drought vs. No Drought
  misc_feature: MA Experiment ID: 20000438 Result: Up-regulated in Transcription
  misc_feature: MA Experiment 20000438 PARAMETER Experiment Name: At_Shoots__P Parameter: Age (day) Value: 14
  misc_feature: MA Experiment 20000438 PARAMETER Experiment Name: At_Shoots__P Parameter: Tissue Value: Shoots vs. Whole Plant
  misc_feature: MA Experiment ID: 20000495 Result: Up-regulated in Transcription
  misc_feature: MA Experiment 20000495 PARAMETER Experiment Name: At_Guard_Cells_P Parameter: Harvest Date Value: 8/2/2002
  misc_feature: MA Experiment 20000495 PARAMETER Experiment Name: At_Guard_Cells_P Parameter: Organism Value: A. thaliana
  misc_feature: MA Experiment 20000495 PARAMETER Experiment Name: At_Guard_Cells_P Parameter: Tissue Value: Guard Cells vs. Leaves
  misc_feature: MA Experiment ID: 20000496 Result: Up-regulated in Transcription
  misc_feature: MA Experiment 20000496 PARAMETER Experiment Name: At_Guard_Cells_P Parameter: Harvest Date Value: 7/19/2002
  misc_feature: MA Experiment 20000496 PARAMETER Experiment Name: At_Guard_Cells_P Parameter: Organism Value: Canola
  misc_feature: MA Experiment 20000496 PARAMETER Experiment Name: At_Guard_Cells_P Parameter: Tissue Value: Guard Cells vs. Leaves
  misc_feature: MA Experiment ID: 20001450 Result: Down-regulated in Transcription
  misc_feature: MA Experiment 20001450 PARAMETER Experiment Name: At_Far-red-induction_P Parameter: Age (day) Value: 7
  misc_feature: MA Experiment 20001450 PARAMETER Experiment Name: At_Far-red-induction_P Parameter: Light Value: Far-red vs. White
  misc_feature: MA Experiment 20001450 PARAMETER Experiment Name: At_Far-red-induction_P Parameter: Organism Value: A. thaliana
  misc_feature: MA Experiment 20001450 PARAMETER Experiment Name: At_Far-red-induction_P Parameter: Plant Line Value: Columbia
  misc_feature: MA Experiment 20001450 PARAMETER Experiment Name: At_Far-red-induction_P Parameter: Timepoint (hr) Value: 8
  misc_feature: MA Experiment 20001450 PARAMETER Experiment Name: At_Far-red-induction_P Parameter: Tissue Value: Whole Plant
  misc_feature: MA Experiment ID: 20001560 Result: Up-regulated in Transcription
  misc_feature: MA Experiment 20001560 PARAMETER Experiment Name: At_Drought_Soil_Dry_P Parameter: Age (day) Value: 28
  misc_feature: MA Experiment 20001560 PARAMETER Experiment Name: At_Drought_Soil_Dry_P Parameter: Organism Value: A. thaliana
  misc_feature: MA Experiment 20001560 PARAMETER Experiment Name: At_Drought_Soil_Dry_P Parameter: Plant Line Value: WS
  misc_feature: MA Experiment 20001560 PARAMETER Experiment Name: At_Drought_Soil_Dry_P Parameter: Post Timepoint (hr) Value: None
  misc_feature: MA Experiment 20001560 PARAMETER Experiment Name: At_Drought_Soil_Dry_P Parameter: Post-Treatment Value: None
  misc_feature: MA Experiment 20001560 PARAMETER Experiment Name: At_Drought_Soil_Dry_P Parameter: Timepoint (day) Value: 14
  misc_feature: MA Experiment 20001560 PARAMETER Experiment Name: At_Drought_Soil_Dry_P Parameter: Treatment Value: Drought vs. No Drought
  misc_feature: MA Experiment ID: 20001911 Result: Down-regulated in Transcription
  misc_feature: MA Experiment 20001911 PARAMETER Experiment Name: At_Drought_Reproduction_P Parameter: Age (day) Value: 40
  misc_feature: MA Experiment 20001911 PARAMETER Experiment Name: At_Drought_Reproduction_P Parameter: Organism Value: A. thaliana
  misc_feature: MA Experiment 20001911 PARAMETER Experiment Name: At_Drought_Reproduction_P Parameter: Plant Line Value: WS
  misc_feature: MA Experiment 20001911 PARAMETER Experiment Name: At_Drought_Reproduction_P Parameter: Timepoint (day) Value: 10
  misc_feature: MA Experiment 20001911 PARAMETER Experiment Name: At_Drought_Reproduction_P Parameter: Tissue Value: Flowers
  misc_feature: MA Experiment 20001911 PARAMETER Experiment Name: At_Drought_Reproduction_P Parameter: Treatment Value: Drought vs. No Drought
atggaggataatagctgtatcgggtttgagggatcgaaaagatttggtgagactagtaaacgtatcattggtttgattgactcagtgactgagtcaacgactgattcaagtcttagcagctcaagttctggtgttggatcgagctccgggaggtcttctgtagctgagagatctgtttcatcacctccgacgaaatcgcagattcttggatggccgttaggacaaggttcatggaggaagagttctggtaaaatgaagaagaaaactccgacaaagatcgatgattttgggtttaagagagttggaacagagacttcagagattgagttgttgaaagagagaatggcgaagttgttgcttggtgaagacatgtctggttctggtgaaggagtttgtcctgctttggctatttctaatgccattaccaatctctatgctgcaatattgggacaacaatggaggctagagccaatccctagtgagaaaaaattaatgtggagaagagaaatcgaagttcttctttctgttagtgatcacattgttgaattggtaccttcctttcagaatttccccaatggaaacaagattgaggtgatgaactgcagaccaagatcagatctctttacttgtcttcctgctcttaggaagctagacaatatgcttattgaaatattagatagttttggagaaacagagttctggtacgttgatcaagggattgtagctgcggaatctgcaaggtctaactctttccgtgaagacggagacaaatggtggcttccgctgccgcgtgtgccatccgatggacttaccgaacaaactaggaagaaactggatcatactcgcgaattcaccaaccaaatcttgaaagcttgtatgtcaatcaacagcattgctttagctgaaatggaagttccacaatcataccttgaagcccttccaaagaacggaagatcttgtcttggagattttctatatagaaacatcacatcggataacttctctgcggatcacttgctagaatcaatagatctttcatctgagcttgcggttgtagaaatggcgaaccgagtagaagcatcaatgtacgtttggaggagaagagctcactcgaggcatctgatatctctgtatcgatccacaagtacaagatgggggatgatagtgaaggagatgatgatgcatcaaaccgatggtgacaaaagggaaatatttgcggagagagcagaaagcttattgatccgtctcaagcaacgtttcccgggacttagacaaacagctttagacacaagcaagatccaatacaacaaggatgtaggaaagtctatacttgagagctactcaagggtattagagagtttagcgtatagcattggtgtacgcatagaggaagtgttgttcatggatgacatcagcaaagatgatggtgatggtgatgatgattcttgttcagacaagttgagattgttgtctaaagaagcagctagtggcacgtcaactccgtacagaactctatctttctctgcatcgactccaagttattcaccaatgccgttgataagccccatcaacggaggaagaggaggagaaagagctccgtttctctctgggaggaacattagagaacgttgcgggtttggtccaaagaaagcattggccaattatctccggggttga

SEQ ID NO: 87171 - protein, 558 aa, Arabidopsis thaliana
  peptide (1)..(558): Ceres Seq. ID no. 12698156
  misc_feature (6)..(476): Pfam Name: Domain of unknown function (DUF315) Pfam Description: Domain of unknown function (DUF315)
  misc_feature (1)..(503): Homolog of NCBI NO: 15228166 NR Description: putative protein; protein id: At3g55660.1
  misc_feature (471)..(558): Homolog of NCBI NO: 15228166 NR Description: putative protein; protein id: At3g55660.1
  misc_feature (31)..(553): Homolog of NCBI NO: 34908302 NR Description: P0005H10.23 [Oryza sativa (japonica
  misc_feature (100)..(516): Homolog of NCBI NO: 15241663 NR Description: putative protein; protein id: At5g02010.1
  misc_feature (107)..(556): Homolog of NCBI NO: 15239292 NR Description: putative protein; protein id: At5g05940.1 thaliana] >gi|10177567|dbj|BAB10799.1|
  misc_feature (99)..(533): Homolog of NCBI NO: 15233845 NR Description: putative protein; protein id: At4g38430.1, by cDNA: gi_15810308, supported by cDNA: gi_15912194 [Arabidopsis >gi|18421309|ref|NP_568515.1| Expressed protein [Arabidopsis
  misc_feature (99)..(533): Homolog of NCBI NO: 15810309 NR Description: unknown protein [Arabidopsis thaliana]
  misc_feature (107)..(469): Homolog of NCBI NO: 15236138 NR Description: putative protein; protein id: At4g00460.1
  misc_feature (26)..(469): Homolog of NCBI NO: 37536670 NR Description: hypothetical protein [Oryza sativa (japonica group)] >gi|10140653|gb|AAG13489.1| hypothetical protein [Oryza
  misc_feature (2)..(469): Homolog of NCBI NO: 15223455 NR Description: hypothetical protein; protein id: At1g01700.1
MEDNSCIGFEGSKRFGETSKRIIGLIDSVTESTTDSSLSSSSSGVGSSSGRSSVAERSVSSPPTKSQILGWPLGQGSWRKSSGKMKKKTPTKIDDFGFKRVGTETSEIELLKERMAKLLLGEDMSGSGEGVCPALAISNAITNLYAAILGQQWRLEPIPSEKKLMWRREIEVLLSVSDHIVELVPSFQNFPNGNKIEVMNCRPRSDLFTCLPALRKLDNMLIEILDSFGETEFWYVDQGIVAAESARSNSFREDGDKWWLPLPRVPSDGLTEQTRKKLDHTREFTNQILKACMSINSIALAEMEVPQSYLEALPKNGRSCLGDFLYRNITSDNFSADHLLESIDLSSELAVVEMANRVEASMYVWRRRAHSRHLISLYRSTSTRWGMIVKEMMMHQTDGDKREIFAERAESLLIRLKQRFPGLRQTALDTSKIQYNKDVGKSILESYSRVLESLAYSIGVRIEEVLFMDDISKDDGDGDDDSCSDKLRLLSKEAASGTSTPYRTLSFSASTPSYSPMPLISPINGGRGGERAPFLSGRNIRERCGFGPKKALANYLRG

SEQ ID NO: 87172 - protein, 474 aa, Arabidopsis thaliana
  peptide (1)..(474): Ceres Seq. ID no. 12698157
  misc_feature (1)..(392): Pfam Name: Domain of unknown function (DUF315) Pfam Description: Domain of unknown function (DUF315)
  misc_feature (1)..(419): Homolog of NCBI NO: 15228166 NR Description: putative protein; protein id: At3g55660.1
  misc_feature (387)..(474): Homolog of NCBI NO: 15228166 NR Description: putative protein; protein id: At3g55660.1
  misc_feature (1)..(469): Homolog of NCBI NO: 34908302 NR Description: P0005H10.23 [Oryza sativa (japonica
  misc_feature (16)..(432): Homolog of NCBI NO: 15241663 NR Description: putative protein; protein id: At5g02010.1
  misc_feature (23)..(472): Homolog of NCBI NO: 15239292 NR Description: putative protein; protein id: At5g05940.1 thaliana] >gi|10177567|dbj|BAB10799.1|
  misc_feature (15)..(449): Homolog of NCBI NO: 15233845 NR Description: putative protein; protein id: At4g38430.1, by cDNA: gi_15810308, supported by cDNA: gi_15912194 [Arabidopsis >gi|18421309|ref|NP_568515.1| Expressed protein [Arabidopsis
  misc_feature (15)..(449): Homolog of NCBI NO: 15810309 NR Description: unknown protein [Arabidopsis thaliana]
  misc_feature (23)..(385): Homolog of NCBI NO: 15236138 NR Description: putative protein; protein id: At4g00460.1
  misc_feature (1)..(385): Homolog of NCBI NO: 37536670 NR Description: hypothetical protein [Oryza sativa (japonica group)] >gi|10140653|gb|AAG13489.1| hypothetical protein [Oryza
  misc_feature (1)..(385): Homolog of NCBI NO: 15223455 NR Description: hypothetical protein; protein id: At1g01700.1
MKKKTPTKIDDFGFKRVGTETSEIELLKERMAKLLLGEDMSGSGEGVCPALAISNAITNLYAAILGQQWRLEPIPSEKKLMWRREIEVLLSVSDHIVELVPSFQNFPNGNKIEVMNCRPRSDLFTCLPALRKLDNMLIEILDSFGETEFWYVDQGIVAAESARSNSFREDGDKWWLPLPRVPSDGLTEQTRKKLDHTREFTNQILKACMSINSIALAEMEVPQSYLEALPKNGRSCLGDFLYRNITSDNFSADHLLESIDLSSELAVVEMANRVEASMYVWRRRAHSRHLISLYRSTSTRWGMIVKEMMMHQTDGDKREIFAERAESLLIRLKQRFPGLRQTALDTSKIQYNKDVGKSILESYSRVLESLAYSIGVRIEEVLFMDDISKDDGDGDDDSCSDKLRLLSKEAASGTSTPYRTLSFSASTPSYSPMPLISPINGGRGGERAPFLSGRNIRERCGFGPKKALANYLRG

SEQ ID NO: 87173 - protein, 444 aa, Arabidopsis thaliana
  peptide (1)..(444): Ceres Seq. ID no. 12698158
  misc_feature (1)..(362): Pfam Name: Domain of unknown function (DUF315) Pfam Description: Domain of unknown function (DUF315)
  misc_feature (1)..(389): Homolog of NCBI NO: 15228166 NR Description: putative protein; protein id: At3g55660.1
  misc_feature (357)..(444): Homolog of NCBI NO: 15228166 NR Description: putative protein; protein id: At3g55660.1
  misc_feature (1)..(439): Homolog of NCBI NO: 34908302 NR Description: P0005H10.23 [Oryza sativa (japonica
  misc_feature (1)..(402): Homolog of NCBI NO: 15241663 NR Description: putative protein; protein id: At5g02010.1
  misc_feature (1)..(442): Homolog of NCBI NO: 15239292 NR Description: putative protein; protein id: At5g05940.1 thaliana] >gi|10177567|dbj|BAB10799.1|
  misc_feature (1)..(419): Homolog of NCBI NO: 15233845 NR Description: putative protein; protein id: At4g38430.1, by cDNA: gi_15810308, supported by cDNA: gi_15912194 [Arabidopsis >gi|18421309|ref|NP_568515.1| Expressed protein [Arabidopsis
  misc_feature (1)..(419): Homolog of NCBI NO: 15810309 NR Description: unknown protein [Arabidopsis thaliana]
  misc_feature (1)..(355): Homolog of NCBI NO: 15236138 NR Description: putative protein; protein id: At4g00460.1
  misc_feature (1)..(355): Homolog of NCBI NO: 37536670 NR Description: hypothetical protein [Oryza sativa (japonica group)] >gi|10140653|gb|AAG13489.1| hypothetical protein [Oryza
  misc_feature (1)..(355): Homolog of NCBI NO: 15223455 NR Description: hypothetical protein; protein id: At1g01700.1
MAKLLLGEDMSGSGEGVCPALAISNAITNLYAAILGQQWRLEPIPSEKKLMWRREIEVLLSVSDHIVELVPSFQNFPNGNKIEVMNCRPRSDLFTCLPALRKLDNMLIEILDSFGETEFWYVDQGIVAAESARSNSFREDGDKWWLPLPRVPSDGLTEQTRKKLDHTREFTNQILKACMSINSIALAEMEVPQSYLEALPKNGRSCLGDFLYRNITSDNFSADHLLESIDLSSELAVVEMANRVEASMYVWRRRAHSRHLISLYRSTSTRWGMIVKEMMMHQTDGDKREIFAERAESLLIRLKQRFPGLRQTALDTSKIQYNKDVGKSILESYSRVLESLAYSIGVRIEEVLFMDDISKDDGDGDDDSCSDKLRLLSKEAASGTSTPYRTLSFSASTPSYSPMPLISPINGGRGGERAPFLSGRNIRERCGFGPKKALANYLRG

SEQ ID NO: 87174 - DNA, 882 bp, Arabidopsis thaliana
  misc_feature (1)..(882): Ceres Seq. ID no. 12698163
  misc_feature: MA Experiment ID: 20000180 Result: Down-regulated in Transcription
  misc_feature: MA Experiment 20000180 PARAMETER Experiment Name: At_Germinating_Seeds_P Parameter: Age (hr) Value: 24 vs. 0
  misc_feature: MA Experiment 20000180 PARAMETER Experiment Name: At_Germinating_Seeds_P Parameter: Tissue Value: Germinating Seeds
  misc_feature: MA Experiment ID: 20001248 Result: Up-regulated in Transcription
  misc_feature: MA Experiment 20001248 PARAMETER Experiment Name: At_Far-red-induction_P Parameter: Age (day) Value: 7
  misc_feature: MA Experiment 20001248 PARAMETER Experiment Name: At_Far-red-induction_P Parameter: Light Value: Far-red vs. White
  misc_feature: MA Experiment 20001248 PARAMETER Experiment Name: At_Far-red-induction_P Parameter: Organism Value: A. thaliana
  misc_feature: MA Experiment 20001248 PARAMETER Experiment Name: At_Far-red-induction_P Parameter: Plant Line Value: Columbia
  misc_feature: MA Experiment 20001248 PARAMETER Experiment Name: At_Far-red-induction_P Parameter: Timepoint (hr) Value: 4
  misc_feature: MA Experiment 20001248 PARAMETER Experiment Name: At_Far-red-induction_P Parameter: Tissue Value: Whole Plant
  misc_feature: MA Experiment ID: 20001557 Result: Up-regulated in Transcription
  misc_feature: MA Experiment 20001557 PARAMETER Experiment Name: At_Drought_Soil_Dry_P Parameter: Age (day) Value: 27
  misc_feature: MA Experiment 20001557 PARAMETER Experiment Name: At_Drought_Soil_Dry_P Parameter: Organism Value: A. thaliana
  misc_feature: MA Experiment 20001557 PARAMETER Experiment Name: At_Drought_Soil_Dry_P Parameter: Plant Line Value: WS
  misc_feature: MA Experiment 20001557 PARAMETER Experiment Name: At_Drought_Soil_Dry_P Parameter: Post Timepoint (hr) Value: 3
  misc_feature: MA Experiment 20001557 PARAMETER Experiment Name: At_Drought_Soil_Dry_P Parameter: Post-Treatment Value: Re-Water vs. No Drought
  misc_feature: MA Experiment 20001557 PARAMETER Experiment Name: At_Drought_Soil_Dry_P Parameter: Timepoint (day) Value: 13
  misc_feature: MA Experiment 20001557 PARAMETER Experiment Name: At_Drought_Soil_Dry_P Parameter: Treatment Value: Drought vs. No Drought
  misc_feature: MA Experiment ID: 20001757 Result: Up-regulated in Transcription
  misc_feature: MA Experiment 20001757 PARAMETER Experiment Name: At_50mM_NH4NO3_L-to-H_P Parameter: Timepoint (hr) Value: 6
  misc_feature: MA Experiment 20001757 PARAMETER Experiment Name: At_50mM_NH4NO3_L-to-H_P Parameter: Tissue Value: Leaf
  misc_feature: MA Experiment 20001757 PARAMETER Experiment Name: At_50mM_NH4NO3_L-to-H_P Parameter: Treatment Value: 50mM NH4NO3 vs 100mM Mannitol
atggtcgcgccgcctatagccgccgcgtcgttagagctccctcctccgttccccgccgtcttcgaacaaccaatggagaaactcaccttccctaacgagttcccttacgagtttgcctcctcaacgttttcaacttctccggaagactcaacggagacagaagatgaaacaaccgacgacgaagatgacttcttagccgggttaactcgcagactcgctctctcgactcagcgcctctcttctccttccttcgtcaccgacaagtctcagatgaaacccaaagtcacagagtcaactcagagtggactcggaagtcctaatggtccgttttctcaagttccttcaccgccgacatctccgtctcgtgaagaagactctttgaaagtgttatctgctgcagctggagaagtcgccaagatcaaaaaggccaattttgatgctaaacccatcagctacccaaaccctaaccctaattacttaaccagctttcctcaaaacgtggcatattataactgctactggttatgggagccgcattatcctcaatctcagatgggaatagttccaaatgcttggcatatacctccttctcccgttagagccttttacacccttccaaccgccgttaaatcgccgtcgactggtaccggcgttttccttccccggaaatactcaaacccttctgattccccgaagaagaaatcaggagatggatgtgttaaggttgttaaccagcaaaaacctaaaattgaagtgttaccggttcgctgtaaaccaaattcgaaagctggtctctctacaggacgcagcaaaatcgattacgtagctggtggtggatgtctgaagcatgaaaagcctcttctacaagaatggatgtactga

SEQ ID NO: 87175 - protein, 293 aa, Arabidopsis thaliana; identical to SEQ ID NO: 43365
  peptide (1)..(293): Ceres Seq. ID no. 12698164
  misc_feature (1)..(293): Homolog of NCBI NO: 15228172 NR Description: putative protein; protein id: At3g55690.1
  misc_feature (27)..(170): Homolog of NCBI NO: 18405186 NR Description: expressed protein; protein id: At2g39870.1, by cDNA: gi_13877742, supported by cDNA: gi_18086440, supported cDNA: gi_21281182 [Arabidopsis thaliana] >gi|7460053|pir||T01016
  misc_feature (192)..(232): Homolog of NCBI NO: 18405186 NR Description: expressed protein; protein id: At2g39870.1, by cDNA: gi_13877742, supported by cDNA: gi_18086440, supported cDNA: gi_21281182 [Arabidopsis thaliana] >gi|7460053|pir||T01016

SEQ ID NO: 87176 - protein, 269 aa, Arabidopsis thaliana; identical to SEQ ID NO: 43366
  peptide (1)..(269): Ceres Seq. ID no. 12698165
  misc_feature (1)..(269): Homolog of NCBI NO: 15228172 NR Description: putative protein; protein id: At3g55690.1
  misc_feature (3)..(146): Homolog of NCBI NO: 18405186 NR Description: expressed protein; protein id: At2g39870.1, by cDNA: gi_13877742, supported by cDNA: gi_18086440, supported cDNA: gi_21281182 [Arabidopsis thaliana] >gi|7460053|pir||T01016
  misc_feature (168)..(208): Homolog of NCBI NO: 18405186 NR Description: expressed protein; protein id: At2g39870.1, by cDNA: gi_13877742, supported by cDNA: gi_18086440, supported cDNA: gi_21281182 [Arabidopsis thaliana] >gi|7460053|pir||T01016

SEQ ID NO: 87177 - protein, 203 aa, Arabidopsis thaliana
  peptide (1)..(203): Ceres Seq. ID no. 12698166
  misc_feature (1)..(203): Homolog of NCBI NO: 15228172 NR Description: putative protein; protein id: At3g55690.1
  misc_feature (1)..(80): Homolog of NCBI NO: 18405186 NR Description: expressed protein; protein id: At2g39870.1, by cDNA: gi_13877742, supported by cDNA: gi_18086440, supported cDNA: gi_21281182 [Arabidopsis thaliana] >gi|7460053|pir||T01016
  misc_feature (102)..(142): Homolog of NCBI NO: 18405186 NR Description: expressed protein; protein id: At2g39870.1, by cDNA: gi_13877742, supported by cDNA: gi_18086440, supported cDNA: gi_21281182 [Arabidopsis thaliana] >gi|7460053|pir||T01016
MKPKVTESTQSGLGSPNGPFSQVPSPPTSPSREEDSLKVLSAAAGEVAKIKKANFDAKPISYPNPNPNYLTSFPQNVAYYNCYWLWEPHYPQSQMGIVPNAWHIPPSPVRAFYTLPTAVKSPSTGTGVFLPRKYSNPSDSPKKKSGDGCVKVVNQQKPKIEVLPVRCKPNSKAGLSTGRSKIDYVAGGGCLKHEKPLLQEWMY

SEQ ID NO: 87178 - DNA, 1111 bp, Arabidopsis thaliana
  misc_feature (1)..(1111): Ceres Seq. ID no. 12698195
  misc_feature: MA Experiment ID: 108434 Result: Up-regulated in Transcription
  misc_feature: MA Experiment 108434 PARAMETER Experiment Name: At_Root_Tips_cDNA_P Parameter: Tissue Value: Root Tips
  misc_feature: MA Experiment ID: 108461 Result: Up-regulated in Transcription
  misc_feature: MA Experiment 108461 PARAMETER Experiment Name: At_Germinating_Seeds_cDNA_P Parameter: Age (day) Value: 1 vs. 0
  misc_feature: MA Experiment 108461 PARAMETER Experiment Name: At_Germinating_Seeds_cDNA_P Parameter: Tissue Value: Germinating Seeds
  misc_feature: MA Experiment ID: 108574 Result: Up-regulated in Transcription
  misc_feature: MA Experiment 108574 PARAMETER Experiment Name: At_Wounding__cDNA_P Parameter: Timepoint (hr) Value: 1
  misc_feature: MA Experiment 108574 PARAMETER Experiment Name: At_Wounding__cDNA_P Parameter: Tissue Value: Aerial
  misc_feature: MA Experiment 108574 PARAMETER Experiment Name: At_Wounding__cDNA_P Parameter: Treatment Value: Wounding vs. No Wounding
  misc_feature: MA Experiment ID: 108579 Result: Up-regulated in Transcription
  misc_feature: MA Experiment 108579 PARAMETER Experiment Name: At_4deg_Cold_cDNA_P Parameter: Temperature (deg C) Value: 4 vs. 22
  misc_feature: MA Experiment 108579 PARAMETER Experiment Name: At_4deg_Cold_cDNA_P Parameter: Timepoint (hr) Value: 6
  misc_feature: MA Experiment 108579 PARAMETER Experiment Name: At_4deg_Cold_cDNA_P Parameter: Tissue Value: Aerial
  misc_feature: MA Experiment ID: 108585 Result: Up-regulated in Transcription
  misc_feature: MA Experiment 108585 PARAMETER Experiment Name: At_5mM_NaNP_cDNA_P Parameter: Timepoint (hr) Value: 6
  misc_feature: MA Experiment 108585 PARAMETER Experiment Name: At_5mM_NaNP_cDNA_P Parameter: Tissue Value: Aerial
  misc_feature: MA Experiment 108585 PARAMETER Experiment Name: At_5mM_NaNP_cDNA_P Parameter: Treatment Value: null
  misc_feature: MA Experiment ID: 108595 Result: Up-regulated in Transcription
  misc_feature: MA Experiment 108595 PARAMETER Experiment Name: At_Ler-pi_Ovule_cDNA_P Parameter: Plant Line Value: null
  misc_feature: MA Experiment ID: 108668 Result: Down-regulated in Transcription
  misc_feature: MA Experiment 108668 PARAMETER Experiment Name: At_2mM_SA_cDNA_P Parameter: Plant Line Value: WS
  misc_feature: MA Experiment 108668 PARAMETER Experiment Name: At_2mM_SA_cDNA_P Parameter: Timepoint (hr) Value: 6
  misc_feature: MA Experiment 108668 PARAMETER Experiment Name: At_2mM_SA_cDNA_P Parameter: Treatment Value: 2mM SA vs. No Treatment
  misc_feature: MA Experiment ID: 20000111 Result: Up-regulated in Transcription
  misc_feature: MA Experiment 20000111 PARAMETER Experiment Name: At_42deg_Heat_cDNA_P Parameter: Temperature (deg C) Value: 42 vs. 22
  misc_feature: MA Experiment 20000111 PARAMETER Experiment Name: At_42deg_Heat_cDNA_P Parameter: Timepoint (hr) Value: 6
  misc_feature: MA Experiment 20000111 PARAMETER Experiment Name: At_42deg_Heat_cDNA_P Parameter: Tissue Value: Aerial
  misc_feature: MA Experiment ID: 20000112 Result: Up-regulated in Transcription
  misc_feature: MA Experiment 20000112 PARAMETER Experiment Name: At_42deg_Heat_cDNA_P Parameter: Temperature (deg C) Value: 42 vs. 22
  misc_feature: MA Experiment 20000112 PARAMETER Experiment Name: At_42deg_Heat_cDNA_P Parameter: Timepoint (hr) Value: 2
  misc_feature: MA Experiment 20000112 PARAMETER Experiment Name: At_42deg_Heat_cDNA_P Parameter: Tissue Value: Aerial
  misc_feature: MA Experiment ID: 20000113 Result: Up-regulated in Transcription
  misc_feature: MA Experiment 20000113 PARAMETER Experiment Name: At_42deg_Heat_cDNA_P Parameter: Temperature (deg C) Value: 42 vs. 22
  misc_feature: MA Experiment 20000113 PARAMETER Experiment Name: At_42deg_Heat_cDNA_P Parameter: Timepoint (hr) Value: 8
  misc_feature: MA Experiment 20000113 PARAMETER Experiment Name: At_42deg_Heat_cDNA_P Parameter: Tissue Value: Aerial
  misc_feature: MA Experiment ID: 20000173 Result: Up-regulated in Transcription
  misc_feature: MA Experiment 20000173 PARAMETER Experiment Name: At_42deg_Heat_P Parameter: Age (day) Value: 14
  misc_feature: MA Experiment 20000173 PARAMETER Experiment Name: At_42deg_Heat_P Parameter: Organism Value: A. thaliana
  misc_feature: MA Experiment 20000173 PARAMETER Experiment Name: At_42deg_Heat_P Parameter: Plant Line Value: WS
  misc_feature: MA Experiment 20000173 PARAMETER Experiment Name: At_42deg_Heat_P Parameter: Temperature (deg C) Value: 42 vs. 22
  misc_feature: MA Experiment 20000173 PARAMETER Experiment Name: At_42deg_Heat_P Parameter: Timepoint (hr) Value: 6
  misc_feature: MA Experiment 20000173 PARAMETER Experiment Name: At_42deg_Heat_P Parameter: Tissue Value: Aerial
  misc_feature: MA Experiment ID: 20000182 Result: Down-regulated in Transcription
  misc_feature: MA Experiment 20000182 PARAMETER Experiment Name: At_2mM_SA_P Parameter: Age (day) Value: 14
  misc_feature: MA Experiment 20000182 PARAMETER Experiment Name: At_2mM_SA_P Parameter: Organism Value: A. thaliana
  misc_feature: MA Experiment 20000182 PARAMETER Experiment Name: At_2mM_SA_P Parameter: Plant Line Value: WS
  misc_feature: MA Experiment 20000182 PARAMETER Experiment Name: At_2mM_SA_P Parameter: Timepoint (hr) Value: 6
  misc_feature: MA Experiment 20000182 PARAMETER Experiment Name: At_2mM_SA_P Parameter: Tissue Value: Aerial
  misc_feature: MA Experiment 20000182 PARAMETER Experiment Name: At_2mM_SA_P Parameter: Treatment Value: 2mM SA vs. No Treatment
  misc_feature: MA Experiment ID: 20000224 Result: Down-regulated in Transcription
  misc_feature: MA Experiment ID: 20000227 Result: Up-regulated in Transcription
  misc_feature: MA Experiment 20000227 PARAMETER Experiment Name: At_Root-Tips-vs-Tops_P Parameter: Tissue Value: Root Tips vs. Root Tops
  misc_feature: MA Experiment ID: 20000234 Result: Up-regulated in Transcription
  misc_feature: MA Experiment 20000234 PARAMETER Experiment Name: At_Siliques_P Parameter: Age (day) Value: 21
  misc_feature: MA Experiment 20000234 PARAMETER Experiment Name: At_Siliques_P Parameter: Organism Value: A. thaliana
  misc_feature: MA Experiment 20000234 PARAMETER Experiment Name: At_Siliques_P Parameter: Plant Line Value: WS
  misc_feature: MA Experiment 20000234 PARAMETER Experiment Name: At_Siliques_P Parameter: Tissue Value: Less Than 5mm Siliques vs. Whole Plant
  misc_feature: MA Experiment ID: 20000264 Result: Up-regulated in Transcription
  misc_feature: MA Experiment 20000264 PARAMETER Experiment Name: At_Open_Flower_P Parameter: Age (day) Value: 21
  misc_feature: MA Experiment 20000264 PARAMETER Experiment Name: At_Open_Flower_P Parameter: Plant Line Value: WS
  misc_feature: MA Experiment 20000264 PARAMETER Experiment Name: At_Open_Flower_P Parameter: Tissue Value: Open Flower vs. Whole Plant
  misc_feature: MA Experiment ID: 20000265 Result: Up-regulated in Transcription
  misc_feature: MA Experiment 20000265 PARAMETER Experiment Name: At_Open_Flower_P Parameter: Age (day) Value: 21
  misc_feature: MA Experiment 20000265 PARAMETER Experiment Name: At_Open_Flower_P Parameter: Plant Line Value: WS
  misc_feature: MA Experiment 20000265 PARAMETER Experiment Name: At_Open_Flower_P Parameter: Tissue Value: Closed Flower vs. Whole Plant
  misc_feature: MA Experiment ID: 20000441 Result: Down-regulated in Transcription
  misc_feature: MA Experiment 20000441 PARAMETER Experiment Name: At_1uM_BR-BRZ__P Parameter: Tissue Value: Shoot Apices
  misc_feature: MA Experiment 20000441 PARAMETER Experiment Name: At_1uM_BR-BRZ__P Parameter: Treatment Value: 1uM BR vs. No Treatment
  misc_feature: MA Experiment ID: 20000443 Result: Down-regulated in Transcription
  misc_feature: MA Experiment 20000443 PARAMETER Experiment Name: At_1uM_BR-BRZ__P Parameter: Tissue Value: Shoot Apices
  misc_feature: MA Experiment 20000443 PARAMETER Experiment Name: At_1uM_BR-BRZ__P Parameter: Treatment Value: 1uM BRZ vs. No Treatment
  misc_feature: MA Experiment ID: 20000495 Result: Down-regulated in Transcription
  misc_feature: MA Experiment 20000495 PARAMETER Experiment Name: At_Guard_Cells_P Parameter: Harvest Date Value: 8/2/2002
  misc_feature: MA Experiment 20000495 PARAMETER Experiment Name: At_Guard_Cells_P Parameter: Organism Value: A. thaliana
  misc_feature: MA Experiment 20000495 PARAMETER Experiment Name: At_Guard_Cells_P Parameter: Tissue Value: Guard Cells vs. Leaves
  misc_feature: MA Experiment ID: 20001451 Result: Down-regulated in Transcription
  misc_feature: MA Experiment 20001451 PARAMETER Experiment Name: At_Far-red-induction_P Parameter: Age (day) Value: 7
  misc_feature: MA Experiment 20001451 PARAMETER Experiment Name: At_Far-red-induction_P Parameter: Light Value: Far-red vs. White
  misc_feature: MA Experiment 20001451 PARAMETER Experiment Name: At_Far-red-induction_P Parameter: Organism Value: A. thaliana
  misc_feature: MA Experiment 20001451 PARAMETER Experiment Name: At_Far-red-induction_P Parameter: Plant Line Value: Columbia
  misc_feature: MA Experiment 20001451 PARAMETER Experiment Name: At_Far-red-induction_P Parameter: Timepoint (hr) Value: 24
  misc_feature: MA Experiment 20001451 PARAMETER Experiment Name: At_Far-red-induction_P Parameter: Tissue Value: Whole Plant
  misc_feature: MA Experiment ID: 20001557 Result: Up-regulated in Transcription
  misc_feature: MA Experiment 20001557 PARAMETER Experiment Name: At_Drought_Soil_Dry_P Parameter: Age (day) Value: 27
  misc_feature: MA Experiment 20001557 PARAMETER Experiment Name: At_Drought_Soil_Dry_P Parameter: Organism Value: A. thaliana
  misc_feature: MA Experiment 20001557 PARAMETER Experiment Name: At_Drought_Soil_Dry_P Parameter: Plant Line Value: WS
  misc_feature: MA Experiment 20001557 PARAMETER Experiment Name: At_Drought_Soil_Dry_P Parameter: Post Timepoint (hr) Value: 3
  misc_feature: MA Experiment 20001557 PARAMETER Experiment Name: At_Drought_Soil_Dry_P Parameter: Post-Treatment Value: Re-Water vs. No Drought
  misc_feature: MA Experiment 20001557 PARAMETER Experiment Name: At_Drought_Soil_Dry_P Parameter: Timepoint (day) Value: 13
  misc_feature: MA Experiment 20001557 PARAMETER Experiment Name: At_Drought_Soil_Dry_P Parameter: Treatment Value: Drought vs. No Drought
  misc_feature: MA Experiment ID: 20001558 Result: Up-regulated in Transcription
  misc_feature: MA Experiment 20001558 PARAMETER Experiment Name: At_Drought_Soil_Dry_P Parameter: Age (day) Value: 27
  misc_feature: MA Experiment 20001558 PARAMETER Experiment Name: At_Drought_Soil_Dry_P Parameter: Organism Value: A. thaliana
  misc_feature: MA Experiment 20001558 PARAMETER Experiment Name: At_Drought_Soil_Dry_P Parameter: Plant Line Value: WS
  misc_feature: MA Experiment 20001558 PARAMETER Experiment Name: At_Drought_Soil_Dry_P Parameter: Post Timepoint (hr) Value: 6
  misc_feature: MA Experiment 20001558 PARAMETER Experiment Name: At_Drought_Soil_Dry_P Parameter: Post-Treatment Value: Re-Water vs. No Drought
  misc_feature: MA Experiment 20001558 PARAMETER Experiment Name: At_Drought_Soil_Dry_P Parameter: Timepoint (day) Value: 13
  misc_feature: MA Experiment 20001558 PARAMETER Experiment Name: At_Drought_Soil_Dry_P Parameter: Treatment Value: Drought vs. No Drought
  misc_feature: MA Experiment ID: 20001560 Result: Up-regulated in Transcription
  misc_feature: MA Experiment 20001560 PARAMETER Experiment Name: At_Drought_Soil_Dry_P Parameter: Age (day) Value: 28
  misc_feature: MA Experiment 20001560 PARAMETER Experiment Name: At_Drought_Soil_Dry_P Parameter: Organism Value: A. thaliana
  misc_feature: MA Experiment 20001560 PARAMETER Experiment Name: At_Drought_Soil_Dry_P Parameter: Plant Line Value: WS
  misc_feature: MA Experiment 20001560 PARAMETER Experiment Name: At_Drought_Soil_Dry_P Parameter: Post Timepoint (hr) Value: None
  misc_feature: MA Experiment 20001560 PARAMETER Experiment Name: At_Drought_Soil_Dry_P Parameter: Post-Treatment Value: None
  misc_feature: MA Experiment 20001560 PARAMETER Experiment Name: At_Drought_Soil_Dry_P Parameter: Timepoint (day) Value: 14
  misc_feature: MA Experiment 20001560 PARAMETER Experiment Name: At_Drought_Soil_Dry_P Parameter: Treatment Value: Drought vs. No Drought
  misc_feature: MA Experiment ID: 20001904 Result: Up-regulated in Transcription
  misc_feature: MA Experiment 20001904 PARAMETER Experiment Name: At_Drought_Reproduction_P Parameter: Age (day) Value: 37
  misc_feature: MA Experiment 20001904 PARAMETER Experiment Name: At_Drought_Reproduction_P Parameter: Organism Value: A. thaliana
  misc_feature: MA Experiment 20001904 PARAMETER Experiment Name: At_Drought_Reproduction_P Parameter: Plant Line Value: WS
  misc_feature: MA Experiment 20001904 PARAMETER Experiment Name: At_Drought_Reproduction_P Parameter: Timepoint (day) Value: 7
  misc_feature: MA Experiment 20001904 PARAMETER Experiment Name: At_Drought_Reproduction_P Parameter: Tissue Value: Rosettes
  misc_feature: MA Experiment 20001904 PARAMETER Experiment Name: At_Drought_Reproduction_P Parameter: Treatment Value: Drought vs. No Drought
  misc_feature: MA Experiment ID: 20001905 Result: Up-regulated in Transcription
  misc_feature: MA Experiment 20001905 PARAMETER Experiment Name: At_Drought_Reproduction_P Parameter: Age (day) Value: 40
  misc_feature: MA Experiment 20001905 PARAMETER Experiment Name: At_Drought_Reproduction_P Parameter: Organism Value: A. thaliana
  misc_feature: MA Experiment 20001905 PARAMETER Experiment Name: At_Drought_Reproduction_P Parameter: Plant Line Value: WS
  misc_feature: MA Experiment 20001905 PARAMETER Experiment Name: At_Drought_Reproduction_P Parameter: Timepoint (day) Value: 10
  misc_feature: MA Experiment 20001905 PARAMETER Experiment Name: At_Drought_Reproduction_P Parameter: Tissue Value: Rosettes
  misc_feature: MA Experiment 20001905 PARAMETER Experiment Name: At_Drought_Reproduction_P Parameter: Treatment Value: Drought vs. No Drought
accacaaaaccctttctcctccaatttcgtcgcacacaggaaaacaaaatgcttctcaaagctgcttctactttctctctattgaacattcatggagagaagaaagacatctctcctctcttctcctcctcctcctccatttcgtctccggtttcttctggaaaatccggcaatctctctttccctcttcgtgcttccaagagttcaaccactaccacaagcacgttgagcggcgttgtgttcgagcctttcgaagaggttaagaaagagatggatctagttccatctggtcaacagctttctcttgctcgtcatttgtactcccctgagtgcgaagccgccgtcaatgagcagatcaatgttgagtataacgtgtcgtatgtgtatcacgctttgtatgcatatttcgatcgtgacaacgttgccctcaagggtctcgccaagtttttcaaggaatcgagtgtggaagaacgagagcacgctgagctgttgatggagtatcagaacaaacgtggtgggagggtcaagttacagcccatggtgttgcctcagtctgagtttgatcatcctgagaaaggagatgctctctatgctatggagttggctctttcattggagaaactagtcaatgaaaagctcctaaacctgcacagtgtggcttccaagaacgatgatgtccagttggcagattttattgagagtgtgtttctgaacgaacaggtggaagccattaagaaaatctcagaatatgtttctcaacttaggagacttggcaaaggacatggaacatggcatttcgatcaggagcttcttggtgctgctgcttaatctgagttttagctgtaatctcgcagtttggttaacttttgagttattttgagtatgagatgtaacttttaaggtagatttgatcaatatcgattctgttgtgagagaaaacaagctattacgctccttggggttaactttctttgtgttttcagtattatggttttgtccacttcgtaatatcactttcctttagaacatttcaaatcagcagttgttttgaggtgtaatgtaatggtcactgatattttctattacccctgcatgaaagtagtatgtttta

SEQ ID NO: 87179 - protein, 275 aa, Arabidopsis thaliana; identical to SEQ ID NO: 22324
  peptide (1)..(275): Ceres Seq. ID no. 12698196
  misc_feature (112)..(257): Pfam Name: Ferritin-like domain Pfam Description: Ferritin-like domain
  misc_feature (17)..(275): Homolog of NCBI NO: 15228818 NR Description: putative protein; protein id: At3g56090.1, by cDNA: 33282., supported by cDNA: gi_13358190, supported by
  misc_feature (17)..(271): Homolog of NCBI NO: 15225679 NR Description: putative ferritin; protein id: At2g40300.1, by cDNA: gi_17065437, supported by cDNA: gi_20148572 [Arabidopsis

SEQ ID NO: 87180 - protein, 259 aa, Arabidopsis thaliana; identical to SEQ ID NO: 22325
  peptide (1)..(259): Ceres Seq. ID no. 12698197
  misc_feature (96)..(241): Pfam Name: Ferritin-like domain Pfam Description: Ferritin-like domain
  misc_feature (1)..(259): Homolog of NCBI NO: 15228818 NR Description: putative protein; protein id: At3g56090.1, by cDNA: 33282., supported by cDNA: gi_13358190, supported by
  misc_feature (1)..(255): Homolog of NCBI NO: 15225679 NR Description: putative ferritin; protein id: At2g40300.1, by cDNA: gi_17065437, supported by cDNA: gi_20148572 [Arabidopsis

SEQ ID NO: 87181 - protein, 185 aa, Arabidopsis thaliana; identical to SEQ ID NO: 22326
  peptide (1)..(185): Ceres Seq. ID no. 12698198
  misc_feature (22)..(167): Pfam Name: Ferritin-like domain Pfam Description: Ferritin-like domain
  misc_feature (1)..(185): Homolog of NCBI NO: 15228818 NR Description: putative protein; protein id: At3g56090.1, by cDNA: 33282., supported by cDNA: gi_13358190, supported by
  misc_feature (1)..(181): Homolog of NCBI NO: 15225679 NR Description: putative ferritin; protein id: At2g40300.1, by cDNA: gi_17065437, supported by cDNA: gi_20148572 [Arabidopsis

SEQ ID NO: 87182 - DNA, 825 bp, Arabidopsis thaliana
  misc_feature (1)..(825): Ceres Seq. ID no. 12698203
  misc_feature: MA Experiment ID: 20000180 Result: Up-regulated in Transcription
  misc_feature: MA Experiment 20000180 PARAMETER Experiment Name: At_Germinating_Seeds_P Parameter: Age (hr) Value: 24 vs. 0
  misc_feature: MA Experiment 20000180 PARAMETER Experiment Name: At_Germinating_Seeds_P Parameter: Tissue Value: Germinating Seeds
  misc_feature: MA Experiment ID: 20000184 Result: Down-regulated in Transcription
  misc_feature: MA Experiment 20000184 PARAMETER Experiment Name: At_Shoots__P Parameter: Age (day) Value: 7
  misc_feature: MA Experiment 20000184 PARAMETER Experiment Name: At_Shoots__P Parameter: Tissue Value: Shoots vs. Whole Plant
  misc_feature: MA Experiment ID: 20000185 Result: Up-regulated in Transcription
  misc_feature: MA Experiment 20000185 PARAMETER Experiment Name: At_Roots__P Parameter: Age (day) Value: 7 vs. 21
  misc_feature: MA Experiment 20000185 PARAMETER Experiment Name: At_Roots__P Parameter: Organism Value: A. thaliana
  misc_feature: MA Experiment 20000185 PARAMETER Experiment Name: At_Roots__P Parameter: Tissue Value: Roots vs. Whole Plant
  misc_feature: MA Experiment ID: 20000227 Result: Up-regulated in Transcription
  misc_feature: MA Experiment 20000227 PARAMETER Experiment Name: At_Root-Tips-vs-Tops_P Parameter: Tissue Value: Root Tips vs. Root Tops
  misc_feature: MA Experiment ID: 20000264 Result: Down-regulated in Transcription
  misc_feature: MA Experiment 20000264 PARAMETER Experiment Name: At_Open_Flower_P Parameter: Age (day) Value: 21
  misc_feature: MA Experiment 20000264 PARAMETER Experiment Name: At_Open_Flower_P Parameter: Plant Line Value: WS
  misc_feature: MA Experiment 20000264 PARAMETER Experiment Name: At_Open_Flower_P Parameter: Tissue Value: Open Flower vs. Whole Plant
  misc_feature: MA Experiment ID: 20000438 Result: Down-regulated in Transcription
  misc_feature: MA Experiment 20000438 PARAMETER Experiment Name: At_Shoots__P Parameter: Age (day) Value: 14
  misc_feature: MA Experiment 20000438 PARAMETER Experiment Name: At_Shoots__P Parameter: Tissue Value: Shoots vs. Whole Plant
  misc_feature: MA Experiment ID: 20000439 Result: Up-regulated in Transcription
  misc_feature: MA Experiment 20000439 PARAMETER Experiment Name: At_Roots__P Parameter: Age (day) Value: 14 vs. 21
  misc_feature: MA Experiment 20000439 PARAMETER Experiment Name: At_Roots__P Parameter: Organism Value: A. thaliana
  misc_feature: MA Experiment 20000439 PARAMETER Experiment Name: At_Roots__P Parameter: Tissue Value: Roots vs. Whole Plant
  misc_feature: MA Experiment ID: 20000451 Result: Down-regulated in Transcription
  misc_feature: MA Experiment 20000451 PARAMETER Experiment Name: At_CS6879_Shoots-Roots_P Parameter: Age (day) Value: 14
  misc_feature: MA Experiment 20000451 PARAMETER Experiment Name: At_CS6879_Shoots-Roots_P Parameter: Organism Value: A. thaliana
  misc_feature: MA Experiment 20000451 PARAMETER Experiment Name: At_CS6879_Shoots-Roots_P Parameter: Plant Line Value: CS6879 vs. WS
  misc_feature: MA Experiment 20000451 PARAMETER Experiment Name: At_CS6879_Shoots-Roots_P Parameter: Tissue Value: Roots
  misc_feature: MA Experiment ID: 20001773 Result: Up-regulated in Transcription
  misc_feature: MA Experiment 20001773 PARAMETER Experiment Name: At_Far-red-enriched-adult_P Parameter: Age (day) Value: 30
  misc_feature: MA Experiment 20001773 PARAMETER Experiment Name: At_Far-red-enriched-adult_P Parameter: Light Value: Far-red enriched vs. White
  misc_feature: MA Experiment 20001773 PARAMETER Experiment Name: At_Far-red-enriched-adult_P Parameter: Organism Value: A. thaliana
  misc_feature: MA Experiment 20001773 PARAMETER Experiment Name: At_Far-red-enriched-adult_P Parameter: Plant Line Value: Columbia
  misc_feature: MA Experiment 20001773 PARAMETER Experiment Name: At_Far-red-enriched-adult_P Parameter: Timepoint (hr) Value: 48
  misc_feature: MA Experiment 20001773 PARAMETER Experiment Name: At_Far-red-enriched-adult_P Parameter: Tissue Value: Aerial
atgccatctatattaagaccaccaagaaacacaatatgtggatcatgctacgaaggggctagaacaacaattgcgctgctcaagaaacttgagggctcgaaagaagatcgtcatgacaaatcgaaccataattccaccatcaataatggctcctctatttcttcgtctcctttgttttcttgtgagccgcaaccattagagaaggtgatcaaatggatgaaaaacatgaaagaaaccgaagaagaacagaagaaaagaatagtcttcttaagcagctttgtgtcgggtttcaaagaacagcttcatgctgatattcttctaaaaccgggcgatgatggccctccaattcctgcacatagagctttgctggcttcaaaatctgagatctttaagaacattctagactcagatggatgcaaaaccgctccagaatacgccataacgctccaagaactaaattccgagcaacttcaagctctcttggagtttctatacaccggtacattggcttcagataagttggagaaaaatgtctacgcgttgtttattgcagcagataagtacatgattcattacttgcaagagttgtgcgagcaatatatgttaagttccttggacatctctagtgttcttaacgttcttgatgtctcggatcttggttcgagcaagacgctgaaggaggcttgtgtagggttcgtggtgcggaacatggacgacgtcgttttctcggataagtacgaacctttctctcagaaaaaccaacatctatgtgtggagatcacaagggcgttcttgatggaaacgagaagcaagagacgtgactaa

SEQ ID NO: 87183 - protein, 274 aa, Arabidopsis thaliana; identical to SEQ ID NO: 70828
  peptide (1)..(274): Ceres Seq. ID no. 12698204
  misc_feature (97)..(205): Pfam Name: BTB/POZ domain Pfam Description: BTB/POZ domain
  misc_feature (1)..(274): Homolog of NCBI NO: 15228868 NR Description: putative protein; protein id: At3g56230.1
  misc_feature (79)..(274): Homolog of NCBI NO: 15223447 NR Description: hypothetical protein; protein id: At1g01640.1
  misc_feature (79)..(274): Homolog of NCBI NO: 33589788 NR Description: At3g01790 [Arabidopsis thaliana]
  misc_feature (83)..(273): Homolog of NCBI NO: 15226686 NR Description: hypothetical protein; protein id: At2g40450.1
  misc_feature (99)..(266): Homolog of NCBI NO: 15238994 NR Description: putative protein; protein id: At5g48510.1 thaliana] >gi|8777381|dbj|BAA96971.1|
  misc_feature (122)..(270): Homolog of NCBI NO: 15224510 NR Description: hypothetical protein; protein id: At2g05330.1
  misc_feature (83)..(263): Homolog of NCBI NO: 15233388 NR Description: hypothetical protein; protein id: At4g04090.1
  misc_feature (74)..(265): Homolog of NCBI NO: 22328490 NR Description: hypothetical protein; protein id: At4g08455.1
  misc_feature (78)..(265): Homolog of NCBI NO: 34900926 NR Description: Speckle-type POZ protein-like~contains ESTs
  misc_feature (74)..(265): Homolog of NCBI NO: 17552682 NR Description: MATH domain and BTB/POZ domain containing protein member [Caenorhabditis elegans] >gi|465837|sp|P34371|YLJ8_CAEEL

SEQ ID NO: 87184 - protein, 202 aa, Arabidopsis thaliana; identical to SEQ ID NO: 70829
  peptide (1)..(202): Ceres Seq. ID no. 12698205
  misc_feature (25)..(133): Pfam Name: BTB/POZ domain Pfam Description: BTB/POZ domain
  misc_feature (1)..(202): Homolog of NCBI NO: 15228868 NR Description: putative protein; protein id: At3g56230.1
  misc_feature (7)..(202): Homolog of NCBI NO: 15223447 NR Description: hypothetical protein; protein id: At1g01640.1
  misc_feature (7)..(202): Homolog of NCBI NO: 33589788 NR Description: At3g01790 [Arabidopsis thaliana]
  misc_feature (11)..(201): Homolog of NCBI NO: 15226686 NR Description: hypothetical protein; protein id: At2g40450.1
  misc_feature (27)..(194): Homolog of NCBI NO: 15238994 NR Description: putative protein; protein id: At5g48510.1 thaliana] >gi|8777381|dbj|BAA96971.1|
  misc_feature (50)..(198): Homolog of NCBI NO: 15224510 NR Description: hypothetical protein; protein id: At2g05330.1
  misc_feature (11)..(191): Homolog of NCBI NO: 15233388 NR Description: hypothetical protein; protein id: At4g04090.1
  misc_feature (2)..(193): Homolog of NCBI NO: 22328490 NR Description: hypothetical protein; protein id: At4g08455.1
  misc_feature (6)..(193): Homolog of NCBI NO: 34900926 NR Description: Speckle-type POZ protein-like~contains ESTs
  misc_feature (2)..(193): Homolog of NCBI NO: 17552682 NR Description: MATH domain and BTB/POZ domain containing protein member [Caenorhabditis elegans] >gi|465837|sp|P34371|YLJ8_CAEEL

SEQ ID NO: 87185 - protein, 199 aa, Arabidopsis thaliana
  peptide (1)..(199): Ceres Seq. ID no. 12698206
  misc_feature (22)..(130): Pfam Name: BTB/POZ domain Pfam Description: BTB/POZ domain
  misc_feature (1)..(199): Homolog of NCBI NO: 15228868 NR Description: putative protein; protein id: At3g56230.1
  misc_feature (4)..(199): Homolog of NCBI NO: 15223447 NR Description: hypothetical protein; protein id: At1g01640.1
  misc_feature (4)..(199): Homolog of NCBI NO: 33589788 NR Description: At3g01790 [Arabidopsis thaliana]
  misc_feature (8)..(198): Homolog of NCBI NO: 15226686 NR Description: hypothetical protein; protein id: At2g40450.1
  misc_feature (24)..(191): Homolog of NCBI NO: 15238994 NR Description: putative protein; protein id: At5g48510.1 thaliana] >gi|8777381|dbj|BAA96971.1|
  misc_feature (47)..(195): Homolog of NCBI NO: 15224510 NR Description: hypothetical protein; protein id: At2g05330.1
  misc_feature (8)..(188): Homolog of NCBI NO: 15233388 NR Description: hypothetical protein; protein id: At4g04090.1
  misc_feature (1)..(190): Homolog of NCBI NO: 22328490 NR Description: hypothetical protein; protein id: At4g08455.1
  misc_feature (3)..(190): Homolog of NCBI NO: 34900926 NR Description: Speckle-type POZ protein-like~contains ESTs
  misc_feature (1)..(190): Homolog of NCBI NO: 17552682 NR Description: MATH domain and BTB/POZ domain containing protein member [Caenorhabditis elegans] >gi|465837|sp|P34371|YLJ8_CAEEL
MKETEEEQKKRIVFLSSFVSGFKEQLHADILLKPGDDGPPIPAHRALLASKSEIFKNILDSDGCKTAPEYAITLQELNSEQLQALLEFLYTGTLASDKLEKNVYALFIAADKYMIHYLQELCEQYMLSSLDISSVLNVLDVSDLGSSKTLKEACVGFVVRNMDDVVFSDKYEPFSQKNQHLCVEITRAFLMETRSKRRD

SEQ ID NO: 87186 - DNA, 1191 bp, Arabidopsis thaliana
  misc_feature (1)..(1191): Ceres Seq. ID no. 12698297
  misc_feature: MA Experiment ID: 108434 Result: Down-regulated in Transcription
  misc_feature: MA Experiment 108434 PARAMETER Experiment Name: At_Root_Tips_cDNA_P Parameter: Tissue Value: Root Tips
  misc_feature: MA Experiment ID: 108435 Result: Up-regulated in Transcription
  misc_feature: MA Experiment 108435 PARAMETER Experiment Name: At_stm_Mutants_cDNA_P Parameter: Plant Line Value: wt Landsburg vs stm
  misc_feature: MA Experiment 108435 PARAMETER Experiment Name: At_stm_Mutants_cDNA_P Parameter: Tissue Value: Shoot Apical Meristem Region
  misc_feature: MA Experiment ID: 108461 Result: Up-regulated in Transcription
  misc_feature: MA Experiment 108461 PARAMETER Experiment Name: At_Germinating_Seeds_cDNA_P Parameter: Age (day) Value: 1 vs. 0
  misc_feature: MA Experiment 108461 PARAMETER Experiment Name: At_Germinating_Seeds_cDNA_P Parameter: Tissue Value: Germinating Seeds
  misc_feature: MA Experiment ID: 108462 Result: Up-regulated in Transcription
  misc_feature: MA Experiment 108462 PARAMETER Experiment Name: At_Germinating_Seeds_cDNA_P Parameter: Age (day) Value: 2 vs. 0
  misc_feature: MA Experiment 108462 PARAMETER Experiment Name: At_Germinating_Seeds_cDNA_P Parameter: Tissue Value: Germinating Seeds
  misc_feature: MA Experiment ID: 108463 Result: Up-regulated in Transcription
  misc_feature: MA Experiment 108463 PARAMETER Experiment Name: At_Germinating_Seeds_cDNA_P Parameter: Age (day) Value: 3 vs. 0
  misc_feature: MA Experiment 108463 PARAMETER Experiment Name: At_Germinating_Seeds_cDNA_P Parameter: Tissue Value: Germinating Seeds
  misc_feature: MA Experiment ID: 108464 Result: Up-regulated in Transcription
  misc_feature: MA Experiment 108464 PARAMETER Experiment Name: At_Germinating_Seeds_cDNA_P Parameter: Age (day) Value: 4 vs. 0
  misc_feature: MA Experiment 108464 PARAMETER Experiment Name: At_Germinating_Seeds_cDNA_P Parameter: Tissue Value: Germinating Seeds
  misc_feature: MA Experiment ID: 108501 Result: Up-regulated in Transcription
  misc_feature: MA Experiment 108501 PARAMETER Experiment Name: At_ap2_floral_buds_cDNA_P Parameter: Plant Line Value: ap2 (Ler.)
  misc_feature: MA Experiment 108501 PARAMETER Experiment Name: At_ap2_floral_buds_cDNA_P Parameter: Tissue Value: Closed Flower
  misc_feature: MA Experiment ID: 108569 Result: Up-regulated in Transcription
  misc_feature: MA Experiment 108569 PARAMETER Experiment Name: At_0.001%_MeJA__cDNA_P Parameter: Timepoint (hr) Value: 6
  misc_feature: MA Experiment 108569 PARAMETER Experiment Name: At_0.001%_MeJA__cDNA_P Parameter: Tissue Value: Aerial
  misc_feature: MA Experiment 108569 PARAMETER Experiment Name: At_0.001%_MeJA__cDNA_P Parameter: Treatment Value: 0.001% MeJA vs. No Treatment
  misc_feature: MA Experiment ID: 108572 Result: Up-regulated in Transcription
  misc_feature: MA Experiment 108572 PARAMETER Experiment Name: At_Drought_cDNA_P Parameter: Timepoint (hr) Value: 1
  misc_feature: MA Experiment 108572 PARAMETER Experiment Name: At_Drought_cDNA_P Parameter: Tissue Value: Aerial
  misc_feature: MA Experiment 108572 PARAMETER Experiment Name: At_Drought_cDNA_P Parameter: Treatment Value: Drought vs. No Drought
  misc_feature: MA Experiment ID: 108573 Result: Up-regulated in Transcription
  misc_feature: MA Experiment 108573 PARAMETER Experiment Name: At_Drought_cDNA_P Parameter: Timepoint (hr) Value: 6
  misc_feature: MA Experiment 108573 PARAMETER Experiment Name: At_Drought_cDNA_P Parameter: Tissue Value: Aerial
  misc_feature: MA Experiment 108573 PARAMETER Experiment Name: At_Drought_cDNA_P Parameter: Treatment Value: Drought vs. No Drought
  misc_feature: MA Experiment ID: 108585 Result: Up-regulated in Transcription
  misc_feature: MA Experiment 108585 PARAMETER Experiment Name: At_5mM_NaNP_cDNA_P Parameter: Timepoint (hr) Value: 6
  misc_feature: MA Experiment 108585 PARAMETER Experiment Name: At_5mM_NaNP_cDNA_P Parameter: Tissue Value: Aerial
  misc_feature: MA Experiment 108585 PARAMETER Experiment Name: At_5mM_NaNP_cDNA_P Parameter: Treatment Value: null
  misc_feature: MA Experiment ID: 108605 Result: Up-regulated in Transcription
  misc_feature: MA Experiment 108605 PARAMETER Experiment Name: At_100uM_ABA_cDNA_P Parameter: Timepoint (hr) Value: 6
  misc_feature: MA Experiment 108605 PARAMETER Experiment Name: At_100uM_ABA_cDNA_P Parameter: Tissue Value: Aerial
  misc_feature: MA Experiment 108605 PARAMETER Experiment Name: At_100uM_ABA_cDNA_P Parameter: Treatment Value: 100uM ABA vs. No Treatment
  misc_feature: MA Experiment ID: 108609 Result: Up-regulated in Transcription
  misc_feature: MA Experiment 108609 PARAMETER Experiment Name: At_100uM_ABA_cDNA_P Parameter: Timepoint (hr) Value: 24
  misc_feature: MA Experiment 108609 PARAMETER Experiment Name: At_100uM_ABA_cDNA_P Parameter: Tissue Value: Aerial
  misc_feature: MA Experiment 108609 PARAMETER Experiment Name: At_100uM_ABA_cDNA_P Parameter: Treatment Value: 100uM ABA vs. No Treatment
  misc_feature: MA Experiment ID: 108668 Result: Up-regulated in Transcription
  misc_feature: MA Experiment 108668 PARAMETER Experiment Name: At_2mM_SA_cDNA_P Parameter: Plant Line Value: WS
  misc_feature: MA Experiment 108668 PARAMETER Experiment Name: At_2mM_SA_cDNA_P Parameter: Timepoint (hr) Value: 6
  misc_feature: MA Experiment 108668 PARAMETER Experiment Name: At_2mM_SA_cDNA_P Parameter: Treatment Value: 2mM SA vs. No Treatment
  misc_feature: MA Experiment ID: 20000071 Result: Up-regulated in Transcription
  misc_feature: MA Experiment 20000071 PARAMETER Experiment Name: At_100uM_ABA_Mutants_cDNA_P Parameter: Plant Line Value: CS8104
  misc_feature: MA Experiment 20000071 PARAMETER Experiment Name: At_100uM_ABA_Mutants_cDNA_P Parameter: Timepoint (hr) Value: 6
  misc_feature: MA Experiment 20000071 PARAMETER Experiment Name: At_100uM_ABA_Mutants_cDNA_P Parameter: Tissue Value: Aerial
  misc_feature: MA Experiment 20000071 PARAMETER Experiment Name: At_100uM_ABA_Mutants_cDNA_P Parameter: Treatment Value: 100uM ABA vs. No Treatment
  misc_feature: MA Experiment ID: 20000072 Result: Up-regulated in Transcription
  misc_feature: MA Experiment 20000072 PARAMETER Experiment Name: At_100uM_ABA_Mutants_cDNA_P Parameter: Plant Line Value: CS8105
  misc_feature: MA Experiment 20000072 PARAMETER Experiment Name: At_100uM_ABA_Mutants_cDNA_P Parameter: Timepoint (hr) Value: 6
  misc_feature: MA Experiment 20000072 PARAMETER Experiment Name: At_100uM_ABA_Mutants_cDNA_P Parameter: Tissue Value: Aerial
  misc_feature: MA Experiment 20000072 PARAMETER Experiment Name: At_100uM_ABA_Mutants_cDNA_P Parameter: Treatment Value: 100uM ABA vs. No Treatment
  misc_feature: MA Experiment ID: 20000086 Result: Up-regulated in Transcription
  misc_feature: MA Experiment 20000086 PARAMETER Experiment Name: At_100uM_ABA_Mutants_cDNA_P Parameter: Plant Line Value: CS22
  misc_feature: MA Experiment 20000086 PARAMETER Experiment Name: At_100uM_ABA_Mutants_cDNA_P Parameter: Timepoint (hr) Value: 6
  misc_feature: MA Experiment 20000086 PARAMETER Experiment Name: At_100uM_ABA_Mutants_cDNA_P Parameter: Tissue Value: Aerial
  misc_feature: MA Experiment 20000086 PARAMETER Experiment Name: At_100uM_ABA_Mutants_cDNA_P Parameter: Treatment Value: 100uM ABA vs. No Treatment
  misc_feature: MA Experiment ID: 20000087 Result: Up-regulated in Transcription
  misc_feature: MA Experiment 20000087 PARAMETER Experiment Name: At_100uM_ABA_Mutants_cDNA_P Parameter: Plant Line Value: WS
  misc_feature: MA Experiment 20000087 PARAMETER Experiment Name: At_100uM_ABA_Mutants_cDNA_P Parameter: Timepoint (hr) Value: 6
  misc_feature: MA Experiment 20000087 PARAMETER Experiment Name: At_100uM_ABA_Mutants_cDNA_P Parameter: Tissue Value: Aerial
  misc_feature: MA Experiment 20000087 PARAMETER Experiment Name: At_100uM_ABA_Mutants_cDNA_P Parameter: Treatment Value: 100uM ABA vs. No Treatment
  misc_feature: MA Experiment ID: 20000088 Result: Up-regulated in Transcription
  misc_feature: MA Experiment 20000088 PARAMETER Experiment Name: At_100uM_ABA_Mutants_cDNA_P Parameter: Plant Line Value: Landsberg
  misc_feature: MA Experiment 20000088 PARAMETER Experiment Name: At_100uM_ABA_Mutants_cDNA_P Parameter: Timepoint (hr) Value: 6
  misc_feature: MA Experiment 20000088 PARAMETER Experiment Name: At_100uM_ABA_Mutants_cDNA_P Parameter: Tissue Value: Aerial
  misc_feature: MA Experiment 20000088 PARAMETER Experiment Name: At_100uM_ABA_Mutants_cDNA_P Parameter: Treatment Value: 100uM ABA vs. No Treatment
  misc_feature: MA Experiment ID: 20000090 Result: Up-regulated in Transcription
  misc_feature: MA Experiment ID: 20000307 Result: Up-regulated in Transcription
  misc_feature: MA Experiment 20000307 PARAMETER Experiment Name: At_Germinating_Seeds_Sub_P Parameter: Age (hr) Value: 24 vs. 0
  misc_feature: MA Experiment 20000307 PARAMETER Experiment Name: At_Germinating_Seeds_Sub_P Parameter: Organism Value: A. thaliana
  misc_feature: MA Experiment 20000307 PARAMETER Experiment Name: At_Germinating_Seeds_Sub_P Parameter: Plant Line Value: WS
  misc_feature: MA Experiment 20000307 PARAMETER Experiment Name: At_Germinating_Seeds_Sub_P Parameter: Tissue Value: Germinating Seeds
  misc_feature: MA Experiment ID: 20000314 Result: Up-regulated in Transcription
  misc_feature: MA Experiment 20000314 PARAMETER Experiment Name: At_14day_Shoots-Roots_Sub_P Parameter: Age (day) Value: 14
  misc_feature: MA Experiment 20000314 PARAMETER Experiment Name: At_14day_Shoots-Roots_Sub_P Parameter: Organism Value: A. thaliana
  misc_feature: MA Experiment 20000314 PARAMETER Experiment Name: At_14day_Shoots-Roots_Sub_P Parameter: Plant Line Value: WS
  misc_feature: MA Experiment 20000314 PARAMETER Experiment Name: At_14day_Shoots-Roots_Sub_P Parameter: Tissue Value: Roots vs. Whole Plant
  misc_feature: MA Experiment ID: 20000315 Result: Up-regulated in Transcription
  misc_feature: MA Experiment 20000315 PARAMETER Experiment Name: At_14day_Shoots-Roots_Sub_P Parameter: Age (day) Value: 14
  misc_feature: MA Experiment 20000315 PARAMETER Experiment Name: At_14day_Shoots-Roots_Sub_P Parameter: Organism Value: A. thaliana
  misc_feature: MA Experiment 20000315 PARAMETER Experiment Name: At_14day_Shoots-Roots_Sub_P Parameter: Plant Line Value: WS
  misc_feature: MA Experiment 20000315 PARAMETER Experiment Name: At_14day_Shoots-Roots_Sub_P Parameter: Tissue Value: Shoots vs. Whole Plant
  misc_feature: MA Experiment ID: 20000328 Result: Down-regulated in Transcription
  misc_feature: MA Experiment 20000328 PARAMETER Experiment Name: At_42deg_Heat_Sub_P Parameter: Age (day) Value: 14
  misc_feature: MA Experiment 20000328 PARAMETER Experiment Name: At_42deg_Heat_Sub_P Parameter: Organism Value: A. thaliana
  misc_feature: MA Experiment 20000328 PARAMETER Experiment Name: At_42deg_Heat_Sub_P Parameter: Plant Line Value: WS
  misc_feature: MA Experiment 20000328 PARAMETER Experiment Name: At_42deg_Heat_Sub_P Parameter: Temperature (deg C) Value: 42 vs. 22
  misc_feature: MA Experiment 20000328 PARAMETER Experiment Name: At_42deg_Heat_Sub_P Parameter: Timepoint (hr) Value: 6
  misc_feature: MA Experiment 20000328 PARAMETER Experiment Name: At_42deg_Heat_Sub_P Parameter: Tissue Value: Aerial
  misc_feature: MA Experiment ID: 20000355 Result: Down-regulated in Transcription
  misc_feature: MA Experiment 20000355 PARAMETER Experiment Name: At_Siliques_Sub_P Parameter: Age (day) Value: 21
  misc_feature: MA Experiment 20000355 PARAMETER Experiment Name: At_Siliques_Sub_P Parameter: Organism Value: A. thaliana
  misc_feature: MA Experiment 20000355 PARAMETER Experiment Name: At_Siliques_Sub_P Parameter: Plant Line Value: WS
  misc_feature: MA Experiment 20000355 PARAMETER Experiment Name: At_Siliques_Sub_P Parameter: Tissue Value: Less Than 5mm Siliques vs. Whole Plant
  misc_feature: MA Experiment ID: 20000440 Result: Down-regulated in Transcription
  misc_feature: MA Experiment 20000440 PARAMETER Experiment Name: At_Closed-Flower__Sub_P Parameter: Tissue Value: Closed Flower vs. Whole Plant
atcttctcaaactaaatcaattaaagaggtttcttcttatagaaatgaatttctcttattcttccttgtcaacttggacaaccctaatgacattgggttgtcttctgcttcattcatccatttccagtgctcagctaaccccaactttctatgacaatacatgtccaagcgtctttaccatcgtacgggataccatagtaaacgagctaagatcggatcctcgtatcgctgcaagcatccttcgtcttcacttccacgactgtttcgtcaatggctgtgatgcatcgatcctgttagacaacacaacatcctttcgaacagagaaagatgcggctccaaacgcaaactcggctcgaggatttccagtgatcgatagaatgaaagcagcagtagagacagcatgtccaaggactgtttcatgcgcagatatacttaccatcgcagctcaacaagctgtaaatttggcaggaggtccttcttggagggttcctttggggagaagagatagcttacaagcattctttgctctcgctaatacaaatcttcccgctccattcttcactctcccacaacttaaggccagttttcaaaatgttggacttgaccgtccctctgatctcgttgcactctctggtggtcacacatttggtaaaaaccagtgccaatttattatggatagactatacaactttagcaacactggtttacccgaccctactcttaatactacatacctccagacacttcgtggacaatgtccccgcaatggtaaccagaccgtcttagttgatttcgatctacgcacaccgacggtttttgacaataaatactatgtgaatctgaaagagctaaagggacttatccagacggatcaagagttgttttccagccctaatgccactgacacaatccccttggtgagagaatacgctgatggcactcaaaaattcttcaatgcttttgtggaagcaatgaatagaatgggaaacattacacctctcactggaactcaaggacaaatcagacagaattgtagggtggttaactccaactcgctgctacatgatgtggtcgaaatcgttgactttgtcagctctatgtaacataacgttgtctcgatatatgtggcaaccaaaaatatgttttatgaaataaagtgttctcaaaatgtttatgaagaacatttcgtct

SEQ ID NO: 87187 - protein, 366 aa, Arabidopsis thaliana
  peptide (1)..(366): Ceres Seq. ID no. 12698298
  misc_feature (15)..(366): Homolog of NCBI NO: 25453209 NR Description: Peroxidase 32 precursor (Atperox P32) (PRXR3) >gi|1402908|emb|CAA66959.1| peroxidase [Arabidopsis thaliana] peroxidase ATP16a [Arabidopsis thaliana]
  misc_feature (15)..(366): Homolog of NCBI NO: 21592888 NR Description: peroxidase [Arabidopsis thaliana]
  misc_feature (15)..(366): Homolog of NCBI NO: 15229095 NR Description: peroxidase, putative; protein id: At3g49120.1, by cDNA: 39678., supported by cDNA: gi_11908065, supported by gi_12642879, supported by cDNA: gi_13265526, supported by cDNA:
  misc_feature (15)..(366): Homolog of NCBI NO: 480907 NR Description: peroxidase (EC 1.11.1.7) Cb - Arabidopsis
  misc_feature (15)..(366): Homolog of NCBI NO: 15229084 NR Description: peroxidase; protein id: At3g49110.1, supported by gi_15146325, supported by cDNA: gi_15450610 [Arabidopsis >gi|129815|sp|P24101|PE33_ARATH Peroxidase 33 precursor (Atperox
  misc_feature (15)..(366): Homolog of NCBI NO: 129813 NR Description: PEROXIDASE C1A PRECURSOR >gi|2144377|pir||OPRHC
  misc_feature (18)..(366): Homolog of NCBI NO: 129814 NR Description: Peroxidase C1B precursor >gi|81666|pir||S00626
  misc_feature (15)..(366): Homolog of NCBI NO: 168241 NR Description: HRPC1
  misc_feature (35)..(366): Homolog of NCBI NO: 129816 NR Description: Peroxidase C1C precursor >gi|81668|pir||S00627
LLKLNQLKRFLLIEMNFSYSSLSTWTTLMTLGCLLLHSSISSAQLTPTFYDNTCPSVFTIVRDTIVNELRSDPRIAASILRLHFHDCFVNGCDASILLDNTTSFRTEKDAAPNANSARGFPVIDRMKAAVETACPRTVSCADILTIAAQQAVNLAGGPSWRVPLGRRDSLQAFFALANTNLPAPFFTLPQLKASFQNVGLDRPSDLVALSGGHTFGKNQCQFIMDRLYNFSNTGLPDPTLNTTYLQTLRGQCPRNGNQTVLVDFDLRTPTVFDNKYYVNLKELKGLIQTDQELFSSPNATDTIPLVREYADGTQKFFNAFVEAMNRMGNITPLTGTQGQIRQNCRVVNSNSLLHDVVEIVDFVSSM

SEQ ID NO: 87188 - protein, 352 aa, Arabidopsis thaliana
  peptide (1)..(352): Ceres Seq. ID no. 12698299
  misc_feature (1)..(352): Homolog of NCBI NO: 25453209 NR Description: Peroxidase 32 precursor (Atperox P32) (PRXR3) >gi|1402908|emb|CAA66959.1| peroxidase [Arabidopsis thaliana] peroxidase ATP16a [Arabidopsis thaliana]
  misc_feature (1)..(352): Homolog of NCBI NO: 21592888 NR Description: peroxidase [Arabidopsis thaliana]
  misc_feature (1)..(352): Homolog of NCBI NO: 15229095 NR Description: peroxidase, putative; protein id: At3g49120.1, by cDNA: 39678., supported by cDNA: gi_11908065, supported by gi_12642879, supported by cDNA: gi_13265526, supported by cDNA:
  misc_feature (1)..(352): Homolog of NCBI NO: 480907 NR Description: peroxidase (EC 1.11.1.7) Cb - Arabidopsis
  misc_feature (1)..(352): Homolog of NCBI NO: 15229084 NR Description: peroxidase; protein id: At3g49110.1, supported by gi_15146325, supported by cDNA: gi_15450610 [Arabidopsis >gi|129815|sp|P24101|PE33_ARATH Peroxidase 33 precursor (Atperox
  misc_feature (1)..(352): Homolog of NCBI NO: 129813 NR Description: PEROXIDASE C1A PRECURSOR >gi|2144377|pir||OPRHC
  misc_feature (4)..(352): Homolog of NCBI NO: 129814 NR Description: Peroxidase C1B precursor >gi|81666|pir||S00626
  misc_feature (1)..(352): Homolog of NCBI NO: 168241 NR Description: HRPC1
  misc_feature (21)..(352): Homolog of NCBI NO: 129816 NR Description: Peroxidase C1C precursor >gi|81668|pir||S00627
MNFSYSSLSTWTTLMTLGCLLLHSSISSAQLTPTFYDNTCPSVFTIVRDTIVNELRSDPRIAASILRLHFHDCFVNGCDASILLDNTTSFRTEKDAAPNANSARGFPVIDRMKAAVETACPRTVSCADILTIAAQQAVNLAGGPSWRVPLGRRDSLQAFFALANTNLPAPFFTLPQLKASFQNVGLDRPSDLVALSGGHTFGKNQCQFIMDRLYNFSNTGLPDPTLNTTYLQTLRGQCPRNGNQTVLVDFDLRTPTVFDNKYYVNLKELKGLIQTDQELFSSPNATDTIPLVREYADGTQKFFNAFVEAMNRMGNITPLTGTQGQIRQNCRVVNSNSLLHDVVEIVDFVSSM

SEQ ID NO: 87189 - protein, 338 aa, Arabidopsis thaliana
  peptide (1)..(338): Ceres Seq. ID no. 12698300
  misc_feature (1)..(338): Homolog of NCBI NO: 25453209 NR Description: Peroxidase 32 precursor (Atperox P32) (PRXR3) >gi|1402908|emb|CAA66959.1| peroxidase [Arabidopsis thaliana] peroxidase ATP16a [Arabidopsis thaliana]
  misc_feature (1)..(338): Homolog of NCBI NO: 21592888 NR Description: peroxidase [Arabidopsis thaliana]
  misc_feature (1)..(338): Homolog of NCBI NO: 15229095 NR Description: peroxidase, putative; protein id: At3g49120.1, by cDNA: 39678., supported by cDNA: gi_11908065, supported by gi_12642879, supported by cDNA: gi_13265526, supported by cDNA:
  misc_feature (1)..(338): Homolog of NCBI NO: 480907 NR Description: peroxidase (EC 1.11.1.7) Cb - Arabidopsis
  misc_feature (1)..(338): Homolog of NCBI NO: 15229084 NR Description: peroxidase; protein id: At3g49110.1, supported by gi_15146325, supported by cDNA: gi_15450610 [Arabidopsis >gi|129815|sp|P24101|PE33_ARATH Peroxidase 33 precursor (Atperox
  misc_feature (1)..(338): Homolog of NCBI NO: 129813 NR Description: PEROXIDASE C1A PRECURSOR >gi|2144377|pir||OPRHC
  misc_feature (1)..(338): Homolog of NCBI NO: 129814 NR Description: Peroxidase C1B precursor >gi|81666|pir||S00626
  misc_feature (1)..(338): Homolog of NCBI NO: 168241 NR Description: HRPC1
  misc_feature (7)..(338): Homolog of NCBI NO: 129816 NR Description: Peroxidase C1C precursor >gi|81668|pir||S00627
MTLGCLLLHSSISSAQLTPTFYDNTCPSVFTIVRDTIVNELRSDPRIAASILRLHFHDCFVNGCDASILLDNTTSFRTEKDAAPNANSARGFPVIDRMKAAVETACPRTVSCADILTIAAQQAVNLAGGPSWRVPLGRRDSLQAFFALANTNLPAPFFTLPQLKASFQNVGLDRPSDLVALSGGHTFGKNQCQFIMDRLYNFSNTGLPDPTLNTTYLQTLRGQCPRNGNQTVLVDFDLRTPTVFDNKYYVNLKELKGLIQTDQELFSSPNATDTIPLVREYADGTQKFFNAFVEAMNRMGNITPLTGTQGQIRQNCRVVNSNSLLHDVVEIVDFVSSM

SEQ ID NO: 87190 - DNA, 6111 bp, Arabidopsis thaliana
  misc_feature (1)..(6111): Ceres Seq. ID no. 12699052
  misc_feature: MA Experiment ID: 108579 Result: Down-regulated in Transcription
  misc_feature: MA Experiment 108579 PARAMETER Experiment Name: At_4deg_Cold_cDNA_P Parameter: Temperature (deg C) Value: 4 vs. 22
  misc_feature: MA Experiment 108579 PARAMETER Experiment Name: At_4deg_Cold_cDNA_P Parameter: Timepoint (hr) Value: 6
  misc_feature: MA Experiment 108579 PARAMETER Experiment Name: At_4deg_Cold_cDNA_P Parameter: Tissue Value: Aerial
  misc_feature: MA Experiment ID: 20000224 Result: Down-regulated in Transcription
  misc_feature: MA Experiment ID: 20000227 Result: Down-regulated in Transcription
  misc_feature: MA Experiment 20000227 PARAMETER Experiment Name: At_Root-Tips-vs-Tops_P Parameter: Tissue Value: Root Tips vs. Root Tops
  misc_feature: MA Experiment ID: 20000495 Result: Down-regulated in Transcription
  misc_feature: MA Experiment 20000495 PARAMETER Experiment Name: At_Guard_Cells_P Parameter: Harvest Date Value: 8/2/2002
  misc_feature: MA Experiment 20000495 PARAMETER Experiment Name: At_Guard_Cells_P Parameter: Organism Value: A. thaliana
  misc_feature: MA Experiment 20000495 PARAMETER Experiment Name: At_Guard_Cells_P Parameter: Tissue Value: Guard Cells vs. Leaves
  misc_feature: MA Experiment ID: 20000496 Result: Down-regulated in Transcription
  misc_feature: MA Experiment 20000496 PARAMETER Experiment Name: At_Guard_Cells_P Parameter: Harvest Date Value: 7/19/2002
  misc_feature: MA Experiment 20000496 PARAMETER Experiment Name: At_Guard_Cells_P Parameter: Organism Value: Canola
  misc_feature: MA Experiment 20000496 PARAMETER Experiment Name: At_Guard_Cells_P Parameter: Tissue Value: Guard Cells vs. Leaves
atggagtcatcacttccccaagttgctgcacttgatcgttcaactctactcaaagctttcgacgagactaaaaccggcgtgaaaggccttatcgacgccggaatcacagagattccttcgatatttcgtgcacctccggctactttaacaagtccaaaaccaccttcctcctctgatttctccatccccacaatcgatctcaaaggaggtggcacggactcgatcacgcggcggagcttggtggagaagatcggagacgcggcagagaaatggggatttttccaggtgatcaaccacgggatcccgatggatgtgttggagaagatgatagatgggattcgtgagtttcacgagcaagacactgaagtgaagaaagggttttactctcgagatccagctagtaagatggtatacagcagcaacttcgatctgtttagctcaccggcggcgaattggagagatacacttggttgttatacagcaccagatcccccgagaccggaggacttacccgccacttgtggatttttacgcccccattattcattagtgtgtcttaaagattttggtggacattttttcagggagatgatgattgagtactcaaaggaagtgatgaaattgggtaaattactcttcgagcttctctcggaagctctagggttaaacactaatcacctcaaggacatggattgcactaactccttgctgttgctcggccattattacccgccatgtccccaacccgaccttactctaggcttaacgaaacactccgacaactcttttctcactattcttcttcaagaccatatcggagggcttcaagttcttcatgaccaatattgggttgatgttcctcctgtccctggagctcttgttcttataacaaacgacaagttcataagcgtggagcatagggttttggccaatgtagctggaccgagaatttcagtggcatgtttcttcagctcgtatttgatggcgaatcctcgagtttatggacccatcaaagagattttgtctgaagaaaaccctcctaattatagagacactactattacagagtatgcaaagttctacagatccaaaggattcgatgcttgtctaataagggtgcttgggactttgattatatgtgtaatgccttcttttatgactgttaaagccatgcatgaaactgtcacaaggtcgatttttggatacattattggtttatgtgttaattcaaggcagttgaatcacttgatgtttcaggtactgttgtttatctctatggatgccaaaaagttggatactggcccgagagatgcaatcaactggctccctgacgagattctgggcaaaatcttgtcattacttgcgacaaaacaggctgtttcaacatcggttctttctaaaaagtggaggactctctttaaattagtggataccctcgagtttgacgattctgtctctggaatgggtgaacaagaagcgagctatgtgtttccggagagctttaaggatttggtggatcgaacagtagctttgcagtgtgattatccgatcaggaagttgtcactaaaatgtcatgttggcagggacgatgaacaacgaaaggcttgtgtgggccgctggatatcgaatgtcgtagggcgcggtgtttcagaagtggtactaaggatcaatgatcgtggtttacactttctgtctcctcagctcttgacatgcaaaacactggttaagctgacactaggcacacgtctctttcttggaaagcttccttcatatgtgtcacttccatctcttaagtttctcttcatccatagcgtcttctttgatgattttggagagttgtctaatgtgcttcttgctggttgcccggtggtcgaggcgttatatctcaatcaaaatggcgaatcaatgccttacaccatatcgagtcctacgctcaagagactatcagttcactacgagtatcattttgagagcgtaatctcatttgacctgccaaatctcgagtaccttgactactctgattacgccttgtatgggtatccacaagttaacttggaatcccttgttgaagcttatctgaatcttgataaggctgaacatgtcgagagcccggatgtaaccaaactcattatgggaataagaaatgttgagatccttagtctatctcccgattcggttggagtgatctattcatgctgtaaatatgggctacttctaccggtattcaacaatctggttagtttatcttttgggactaagaaaacacgagcttggaaattgcttgcagatatacttaaacagtctccaaagcttgaaactctcatcatcgaggatctgaatggttacccactcgatgtctccatgcctctgaaccaagtgaaggagttgcagattctggaatatggagaaagtgatgacgagagactccaaagtcgattggaatcgaaaaacaaactcggttcttttgatttcgagaagtttctgttcccgattcctccgccaatcaaaatcacggtgagtcctcatccttctgattccggtggtgatggttcgaactcgaagtcttcttccgacgacgagtttgttagcttggactcttccacttctggcttatgttcttcttccggcaagtttttcgatcttattaaatttctgattgctctatctgtcttacgagagaccaaaacgatggagagcacgaagattgctccttcattcgatcgtgccagtgagcttaaagctttcgatgagacgaagactggtgtgaaaggactcgttgactctggaatctcaaagattccacgcattttccatcactcatctgtcgaactagcaaaccctaaaccacttccctcggacctgctacatctcaagacgatcccaacgatcgatctcggaggacgggacttccaggacgcgattaagcacaagaacgcgattgaagggattaaagaagcagctgccaagtggggtttcttccaagtgatcaaccatggagtttcgctcgagcttcttgagaagatgaaagatggagttcgtgactttcatgagcaacctcctgaagtgaggaaagatttgtacagccgcgatttcggcagaaagtttatctatttaagtaatttcgatctctacactgctgcagctgcgaattggagagacacattctattgttacatggctccagatcctccagaaccacaggatctgccagagatttgtagggatgttatgatggaatactcaaagcaagtgatgattttgggtgaatttctgtttgagcttttgtcagaagcactagggttgaaccctaatcacctcaaggacatggagtgcttaaagggtttgcgcatgctttgccactacttcccaccgtgtccggagcctgacctaacttttggcacaagtaagcactccgacggctcttttcttaccgtccttctaccagataacatagaagggcttcaggtttgtcgtgagggatactggttcgatgttcctcatgttcccggcgctctcatcatcaacatcggagatcttctgcaggcaagtttgcgcaatcaatacatgtttgctagctcagatttcacaagtttatttacaatgctagatttgtttaagaaatcttcctcttggttcaaacttataacaaacgacaagttcatcagtttgaagcatagagtattggcgaacagagccacaagagctcgagtctctgtcgcatgtttcttccatacccacgtaaaaccaaatcctagagtgtacggacccattaaagagcttgtgtccgaagaaaatcctccaaagtacagagagaccaccatcagagattacgctacttacttcaatggcaaaggacttggcgggacctctgctttgctggattttaaacaactggtcccatctttgaacttgcgaaaaatgtttcattcttgctctgttattcgagaagctaaaactatggagacgaagaatattgctccttcattcgatcgtgccagtgagcttaaagcttttgatgagaccaaaacgggtgtgaaaggactcgtcgactccggaatctcacagattccacgcatctttcatcattcatctgtcaaacttgcaaaccctgaaccagtttcctcggacttgctacatctcaagacgatcccaacgatcgatcttggaggacgagttttcgaggacgagcttaagcacaagaacgcgattgaaaagattaaagaagcagcagagaagtggggtttcttccaggtgatcaaccatggagtttcgctcgaacttcttgagaagatgaaagatggagttcgtgggtttcacgagcaatcccctgaagtgaggaaagatttctacagtcgcgatttaactagaaagtttcagtattcaagtatgagtccattccttatacttgacttgatgtgtaatctctattcatatatggtgaattgtttcagggatgtcaccatagaatattcagagcaagtgatgaatttgggtgaatttctctttacgcttctatcagaagctctagggttgaaccctaatcacctcaatgacatggattgttctaagggtttgatcatgctttgccattactacccaccatgtccagagcctgacctaactttaggcacaagtcagcacgccgacaatacttttcttaccgttcttcttccagatcagatcgaagggcttcaggttcttcgtgaagggtactggttcaacgttcctcatgttccaggagctctaatcatcaacatcggagatcttctacaggcaagtttgcacaaccaatacatttttttgctctgttttgcagaacttataacaaacgacaagttcgtcagtttggagcacagagtattggcgaacagagcaacaagagctcgagtctctgtagcagaaacaaaaacgatggagatgatgaagattgatcctttattcgatcgtgccagtgagcttaaagctttcgatgaaacgaaaacgggtgtgaaaggactcgtcgactccggagtttcacaagttccacgcatctttcatcatccaactgtcaaattatcaaccccaaaaccacttccctcggacctgctacatctcaagacgatcccaacgatcgatctcggaggacgggacttccaggacgcgattaagcgcaataacgcgattgaagagattaaagaagcagcagcgaagtggggtttcttccaggtgatcaaccatggagtttcgcttgaacttcttgagaagatgaaaaaaggagttcgtgacttccacgagcaatcacaagaagtgaggaaagaattctacagtcgcgatttcagcagaaggtttctgtatttaagtaatttcgatctctttagttctccagcagcaaattggagagacactttctcttgtaccatggctccagatactccaaaaccacaggatcttccggagatttgtagggatattatgatggaatattcaaagcaagtgatgaatttgggtaaatttctcttcgagcttttatcagaagctctagggttggaacctaatcacctcaatgacatggattgctctaagggtttgctcatgctctcccactactacccaccgtgtccagagcctgacctaactttaggcacaagtcagcactccgacaactcttttctcactgtccttcttcccgatcagatcgaagggcttcaggttcgtcgtgaagggcactggttcgatgttcctcatgtttccggcgctctcatcatcaacatcggagatcttttacaggcaagttcactgatgcatttttgctcagttttgcattgtataacttatcttccctattgttcatttttgggttttgtggttttgatgcagcttataacaaacgacaaattcatcagtttggagcacagagtattggcgaacagagcaacaagagctcgagtgtctgtcgcatgtttctttaccactggagtaagaccgaatcctagaatgtacggaccgattagagagcttgtgtctgaagaaaatcctccaaagtacagagagaccacaattaaagactacgctacttacttcaatgccaaaggacttgacgggacctctgctttgctccattttaagatatga

SEQ ID NO: 87191 - protein, 2036 aa, Arabidopsis thaliana
  peptide (1)..(2036): Ceres Seq. ID no. 12699053
  misc_feature (1113)..(1245): Pfam Name: 2OG-Fe(II) oxygenase superfamily Pfam Description: 2OG-Fe(II) oxygenase superfamily
  misc_feature (930)..(1286): Homolog of NCBI NO: 9280671 NR Description: F21B7.3 [Arabidopsis thaliana]
  misc_feature (12)..(189): Homolog of NCBI NO: 9280671 NR Description: F21B7.3 [Arabidopsis thaliana]
  misc_feature (196)..(364): Homolog of NCBI NO: 9280671 NR Description: F21B7.3 [Arabidopsis thaliana]
  misc_feature (426)..(830): Homolog of NCBI NO: 18390671 NR Description: Expressed protein; protein id: At1g06630.1,
  misc_feature (897)..(1189): Homolog of NCBI NO: 15221544 NR Description: oxidoreductase, putative; protein id: supported by cDNA: gi_13430545 [Arabidopsis thaliana] putative oxidoreductase [Arabidopsis thaliana]
  misc_feature (1213)..(1296): Homolog of NCBI NO: 15221544 NR Description: oxidoreductase, putative; protein id: supported by cDNA: gi_13430545 [Arabidopsis thaliana] putative oxidoreductase [Arabidopsis thaliana]
  misc_feature (1638)..(1934): Homolog of NCBI NO: 15221545 NR Description: oxidoreductase, putative; protein id: supported by cDNA: gi_13878118 [Arabidopsis thaliana]
  misc_feature (1950)..(2036): Homolog of NCBI NO: 15221545 NR Description: oxidoreductase, putative; protein id: supported by cDNA: gi_13878118 [Arabidopsis thaliana]
  misc_feature (1638)..(1934): Homolog of NCBI NO: 13878119 NR Description: putative oxidoreductase [Arabidopsis thaliana]
  misc_feature (1950)..(2036): Homolog of NCBI NO: 13878119 NR Description: putative oxidoreductase [Arabidopsis thaliana]
MESSLPQVAALDRSTLLKAFDETKTGVKGLIDAGITEIPSIFRAPPATLTSPKPPSSSDFSIPTIDLKGGGTDSITRRSLVEKIGDAAEKWGFFQVINHGIPMDVLEKMIDGIREFHEQDTEVKKGFYSRDPASKMVYSSNFDLFSSPAANWRDTLGCYTAPDPPRPEDLPATCGFLRPHYSLVCLKDFGGHFFREMMIEYSKEVMKLGKLLFELLSEALGLNTNHLKDMDCTNSLLLLGHYYPPCPQPDLTLGLTKHSDNSFLTILLQDHIGGLQVLHDQYWVDVPPVPGALVLITNDKFISVEHRVLANVAGPRISVACFFSSYLMANPRVYGPIKEILSEENPPNYRDTTITEYAKFYRSKGFDACLIRVLGTLIICVMPSFMTVKAMHETVTRSIFGYIIGLCVNSRQLNHLMFQVLLFISMDAKKLDTGPRDAINWLPDEILGKILSLLATKQAVSTSVLSKKWRTLFKLVDTLEFDDSVSGMGEQEASYVFPESFKDLVDRTVALQCDYPIRKLSLKCHVGRDDEQRKACVGRWISNVVGRGVSEVVLRINDRGLHFLSPQLLTCKTLVKLTLGTRLFLGKLPSYVSLPSLKFLFIHSVFFDDFGELSNVLLAGCPVVEALYLNQNGESMPYTISSPTLKRLSVHYEYHFESVISFDLPNLEYLDYSDYALYGYPQVNLESLVEAYLNLDKAEHVESPDVTKLIMGIRNVEILSLSPDSVGVIYSCCKYGLLLPVFNNLVSLSFGTKKTRAWKLLADILKQSPKLETLIIEDLNGYPLDVSMPLNQVKELQILEYGESDDERLQSRLESKNKLGSFDFEKFLFPIPPPIKITVSPHPSDSGGDGSNSKSSSDDEFVSLDSSTSGLCSSSGKFFDLIKFLIALSVLRETKTMESTKIAPSFDRASELKAFDETKTGVKGLVDSGISKIPRIFHHSSVELANPKPLPSDLLHLKTIPTIDLGGRDFQDAIKHKNAIEGIKEAAAKWGFFQVINHGVSLELLEKMKDGVRDFHEQPPEVRKDLYSRDFGRKFIYLSNFDLYTAAAANWRDTFYCYMAPDPPEPQDLPEICRDVMMEYSKQVMILGEFLFELLSEALGLNPNHLKDMECLKGLRMLCHYFPPCPEPDLTFGTSKHSDGSFLTVLLPDNIEGLQVCREGYWFDVPHVPGALIINIGDLLQASLRNQYMFASSDFTSLFTMLDLFKKSSSWFKLITNDKFISLKHRVLANRATRARVSVACFFHTHVKPNPRVYGPIKELVSEENPPKYRETTIRDYATYFNGKGLGGTSALLDFKQLVPSLNLRKMFHSCSVIREAKTMETKNIAPSFDRASELKAFDETKTGVKGLVDSGISQIPRIFHHSSVKLANPEPVSSDLLHLKTIPTIDLGGRVFEDELKHKNAIEKIKEAAEKWGFFQVINHGVSLELLEKMKDGVRGFHEQSPEVRKDFYSRDLTRKFQYSSMSPFLILDLMCNLYSYMVNCFRDVTIEYSEQVMNLGEFLFTLLSEALGLNPNHLNDMDCSKGLIMLCHYYPPCPEPDLTLGTSQHADNTFLTVLLPDQIEGLQVLREGYWFNVPHVPGALIINIGDLLQASLHNQYIFLLCFAELITNDKFVSLEHRVLANRATRARVSVAETKTMEMMKIDPLFDRASELKAFDETKTGVKGLVDSGVSQVPRIFHHPTVKLSTPKPLPSDLLHLKTIPTIDLGGRDFQDAIKRNNAIEEIKEAAAKWGFFQVINHGVSLELLEKMKKGVRDFHEQSQEVRKEFYSRDFSRRFLYLSNFDLFSSPAANWRDTFSCTMAPDTPKPQDLPEICRDIMMEYSKQVMNLGKFLFELLSEALGLEPNHLNDMDCSKGLLMLSHYYPPCPEPDLTLGTSQHSDNSFLTVLLPDQIEGLQVRREGHWFDVPHVSGALIINIGDLLQASSLMHFCSVLHCITYLPYCSFLGFVVLMQLITNDKFISLEHRVLANRATRARVSVACFFTTGVRPNPRMYGPIRELVSEENPPKYRETTIKDYATYFNAKGLDGTSALLHFKI

SEQ ID NO: 87192 - protein, 1934 aa, Arabidopsis thaliana
  peptide (1)..(1934): Ceres Seq. ID no. 12699054
  misc_feature (1011)..(1143): Pfam Name: 2OG-Fe(II) oxygenase superfamily Pfam Description: 2OG-Fe(II) oxygenase superfamily
  misc_feature (828)..(1184): Homolog of NCBI NO: 9280671 NR Description: F21B7.3 [Arabidopsis thaliana]
  misc_feature (1)..(87): Homolog of NCBI NO: 9280671 NR Description: F21B7.3 [Arabidopsis thaliana]
  misc_feature (94)..(262): Homolog of NCBI NO: 9280671 NR Description: F21B7.3 [Arabidopsis thaliana]
  misc_feature (324)..(728): Homolog of NCBI NO: 18390671 NR Description: Expressed protein; protein id: At1g06630.1,
  misc_feature (795)..(1087): Homolog of NCBI NO: 15221544 NR Description: oxidoreductase, putative; protein id: supported by cDNA: gi_13430545 [Arabidopsis thaliana] putative oxidoreductase [Arabidopsis thaliana]
  misc_feature (1111)..(1194): Homolog of NCBI NO: 15221544 NR Description: oxidoreductase, putative; protein id: supported by cDNA: gi_13430545 [Arabidopsis thaliana] putative oxidoreductase [Arabidopsis thaliana]
  misc_feature (1536)..(1832): Homolog of NCBI NO: 15221545 NR Description: oxidoreductase, putative; protein id: supported by cDNA: gi_13878118 [Arabidopsis thaliana]
  misc_feature (1848)..(1934): Homolog of NCBI NO: 15221545 NR Description: oxidoreductase, putative; protein id: supported by cDNA: gi_13878118 [Arabidopsis thaliana]
  misc_feature (1536)..(1832): Homolog of NCBI NO: 13878119 NR Description: putative oxidoreductase [Arabidopsis thaliana]
  misc_feature (1848)..(1934): Homolog of NCBI NO: 13878119 NR Description: putative oxidoreductase [Arabidopsis thaliana]
MDVLEKMIDGIREFHEQDTEVKKGFYSRDPASKMVYSSNFDLFSSPAANWRDTLGCYTAPDPPRPEDLPATCGFLRPHYSLVCLKDFGGHFFREMMIEYSKEVMKLGKLLFELLSEALGLNTNHLKDMDCTNSLLLLGHYYPPCPQPDLTLGLTKHSDNSFLTILLQDHIGGLQVLHDQYWVDVPPVPGALVLITNDKFISVEHRVLANVAGPRISVACFFSSYLMANPRVYGPIKEILSEENPPNYRDTTITEYAKFYRSKGFDACLIRVLGTLIICVMPSFMTVKAMHETVTRSIFGYIIGLCVNSRQLNHLMFQVLLFISMDAKKLDTGPRDAINWLPDEILGKILSLLATKQAVSTSVLSKKWRTLFKLVDTLEFDDSVSGMGEQEASYVFPESFKDLVDRTVALQCDYPIRKLSLKCHVGRDDEQRKACVGRWISNVVGRGVSEVVLRINDRGLHFLSPQLLTCKTLVKLTLGTRLFLGKLPSYVSLPSLKFLFIHSVFFDDFGELSNVLLAGCPVVEALYLNQNGESMPYTISSPTLKRLSVHYEYHFESVISFDLPNLEYLDYSDYALYGYPQVNLESLVEAYLNLDKAEHVESPDVTKLIMGIRNVEILSLSPDSVGVIYSCCKYGLLLPVFNNLVSLSFGTKKTRAWKLLADILKQSPKLETLIIEDLNGYPLDVSMPLNQVKELQILEYGESDDERLQSRLESKNKLGSFDFEKFLFPIPPPIKITVSPHPSDSGGDGSNSKSSSDDEFVSLDSSTSGLCSSSGKFFDLIKFLIALSVLRETKTMESTKIAPSFDRASELKAFDETKTGVKGLVDSGISKIPRIFHHSSVELANPKPLPSDLLHLKTIPTIDLGGRDFQDAIKHKNAIEGIKEAAAKWGFFQVINHGVSLELLEKMKDGVRDFHEQPPEVRKDLYSRDFGRKFIYLSNFDLYTAAAANWRDTFYCYMAPDPPEPQDLPEICRDVMMEYSKQVMILGEFLFELLSEALGLNPNHLKDMECLKGLRMLCHYFPPCPEPDLTFGTSKHSDGSFLTVLLPDNIEGLQVCREGYWFDVPHVPGALIINIGDLLQASLRNQYMFASSDFTSLFTMLDLFKKSSSWFKLITNDKFISLKHRVLANRATRARVSVACFFHTHVKPNPRVYGPIKELVSEENPPKYRETTIRDYATYFNGKGLGGTSALLDFKQLVPSLNLRKMFHSCSVIREAKTMETKNIAPSFDRASELKAFDETKTGVKGLVDSGISQIPRIFHHSSVKLANPEPVSSDLLHLKTIPTIDLGGRVFEDELKHKNAIEKIKEAAEKWGFFQVINHGVSLELLEKMKDGVRGFHEQSPEVRKDFYSRDLTRKFQYSSMSPFLILDLMCNLYSYMVNCFRDVTIEYSEQVMNLGEFLFTLLSEALGLNPNHLNDMDCSKGLIMLCHYYPPCPEPDLTLGTSQHADNTFLTVLLPDQIEGLQVLREGYWFNVPHVPGALIINIGDLLQASLHNQYIFLLCFAELITNDKFVSLEHRVLANRATRARVSVAETKTMEMMKIDPLFDRASELKAFDETKTGVKGLVDSGVSQVPRIFHHPTVKLSTPKPLPSDLLHLKTIPTIDLGGRDFQDAIKRNNAIEEIKEAAAKWGFFQVINHGVSLELLEKMKKGVRDFHEQSQEVRKEFYSRDFSRRFLYLSNFDLFSSPAANWRDTFSCTMAPDTPKPQDLPEICRDIMMEYSKQVMNLGKFLFELLSEALGLEPNHLNDMDCSKGLLMLSHYYPPCPEPDLTLGTSQHSDNSFLTVLLPDQIEGLQVRREGHWFDVPHVSGALIINIGDLLQASSLMHFCSVLHCITYLPYCSFLGFVVLMQLITNDKFISLEHRVLANRATRARVSVACFFTTGVRPNPRMYGPIRELVSEENPPKYRETTIKDYATYFNAKGLDGTSALLHFKI

SEQ ID NO: 87193 - protein, 1928 aa, Arabidopsis thaliana
  peptide (1)..(1928): Ceres Seq. ID no. 12699055
  misc_feature (1005)..(1137): Pfam Name: 2OG-Fe(II) oxygenase superfamily Pfam Description: 2OG-Fe(II) oxygenase superfamily
  misc_feature (822)..(1178): Homolog of NCBI NO: 9280671 NR Description: F21B7.3 [Arabidopsis thaliana]
  misc_feature (1)..(81): Homolog of NCBI NO: 9280671 NR Description: F21B7.3 [Arabidopsis thaliana]
  misc_feature (88)..(256): Homolog of NCBI NO: 9280671 NR Description: F21B7.3 [Arabidopsis thaliana]
  misc_feature (318)..(722): Homolog of NCBI NO: 18390671 NR Description: Expressed protein; protein id: At1g06630.1,
  misc_feature (789)..(1081): Homolog of NCBI NO: 15221544 NR Description: oxidoreductase, putative; protein id: supported by cDNA: gi_13430545 [Arabidopsis thaliana] putative oxidoreductase [Arabidopsis thaliana]
  misc_feature (1105)..(1188): Homolog of NCBI NO: 15221544 NR Description: oxidoreductase, putative; protein id: supported by cDNA: gi_13430545 [Arabidopsis thaliana] putative oxidoreductase [Arabidopsis thaliana]
  misc_feature (1530)..(1826): Homolog of NCBI NO: 15221545 NR Description: oxidoreductase, putative; protein id: supported by cDNA: gi_13878118 [Arabidopsis thaliana]
  misc_feature (1842)..(1928): Homolog of NCBI NO: 15221545 NR Description: oxidoreductase, putative; protein id: supported by cDNA: gi_13878118 [Arabidopsis thaliana]
  misc_feature (1530)..(1826): Homolog of NCBI NO: 13878119 NR Description: putative oxidoreductase [Arabidopsis thaliana]
  misc_feature (1842)..(1928): Homolog of NCBI NO: 13878119 NR Description: putative oxidoreductase [Arabidopsis thaliana]
MIDGIREFHEQDTEVKKGFYSRDPASKMVYSSNFDLFSSPAANWRDTLGCYTAPDPPRPEDLPATCGFLRPHYSLVCLKDFGGHFFREMMIEYSKEVMKLGKLLFELLSEALGLNTNHLKDMDCTNSLLLLGHYYPPCPQPDLTLGLTKHSDNSFLTILLQDHIGGLQVLHDQYWVDVPPVPGALVLITNDKFISVEHRVLANVAGPRISVACFFSSYLMANPRVYGPIKEILSEENPPNYRDTTITEYAKFYRSKGFDACLIRVLGTLIICVMPSFMTVKAMHETVTRSIFGYIIGLCVNSRQLNHLMFQVLLFISMDAKKLDTGPRDAINWLPDEILGKILSLLATKQAVSTSVLSKKWRTLFKLVDTLEFDDSVSGMGEQEASYVFPESFKDLVDRTVALQCDYPIRKLSLKCHVGRDDEQRKACVGRWISNVVGRGVSEVVLRINDRGLHFLSPQLLTCKTLVKLTLGTRLFLGKLPSYVSLPSLKFLFIHSVFFDDFGELSNVLLAGCPVVEALYLNQNGESMPYTISSPTLKRLSVHYEYHFESVISFDLPNLEYLDYSDYALYGYPQVNLESLVEAYLNLDKAEHVESPDVTKLIMGIRNVEILSLSPDSVGVIYSCCKYGLLLPVFNNLVSLSFGTKKTRAWKLLADILKQSPKLETLIIEDLNGYPLDVSMPLNQVKELQILEYGESDDERLQSRLESKNKLGSFDFEKFLFPIPPPIKITVSPHPSDSGGDGSNSKSSSDDEFVSLDSSTSGLCSSSGKFFDLIKFLIALSVLRETKTMESTKIAPSFDRASELKAFDETKTGVKGLVDSGISKIPRIFHHSSVELANPKPLPSDLLHLKTIPTIDLGGRDFQDAIKHKNAIEGIKEAAAKWGFFQVINHGVSLELLEKMKDGVRDFHEQPPEVRKDLYSRDFGRKFIYLSNFDLYTAAAANWRDTFYCYMAPDPPEPQDLPEICRDVMMEYSKQVMILGEFLFELLSEALGLNPNHLKDMECLKGLRMLCHYFPPCPEPDLTFGTSKHSDGSFLTVLLPDNIEGLQVCREGYWFDVPHVPGALIINIGDLLQASLRNQYMFASSDFTSLFTMLDLFKKSSSWFKLITNDKFISLKHRVLANRATRARVSVACFFHTHVKPNPRVYGPIKELVSEENPPKYRETTIRDYATYFNGKGLGGTSALLDFKQLVPSLNLRKMFHSCSVIREAKTMETKNIAPSFDRASELKAFDETKTGVKGLVDSGISQIPRIFHHSSVKLANPEPVSSDLLHLKTIPTIDLGGRVFEDELKHKNAIEKIKEAAEKWGFFQVINHGVSLELLEKMKDGVRGFHEQSPEVRKDFYSRDLTRKFQYSSMSPFLILDLMCNLYSYMVNCFRDVTIEYSEQVMNLGEFLFTLLSEALGLNPNHLNDMDCSKGLIMLCHYYPPCPEPDLTLGTSQHADNTFLTVLLPDQIEGLQVLREGYWFNVPHVPGALIINIGDLLQASLHNQYIFLLCFAELITNDKFVSLEHRVLANRATRARVSVAETKTMEMMKIDPLFDRASELKAFDETKTGVKGLVDSGVSQVPRIFHHPTVKLSTPKPLPSDLLHLKTIPTIDLGGRDFQDAIKRNNAIEEIKEAAAKWGFFQVINHGVSLELLEKMKKGVRDFHEQSQEVRKEFYSRDFSRRFLYLSNFDLFSSPAANWRDTFSCTMAPDTPKPQDLPEICRDIMMEYSKQVMNLGKFLFELLSEALGLEPNHLNDMDCSKGLLMLSHYYPPCPEPDLTLGTSQHSDNSFLTVLLPDQIEGLQVRREGHWFDVPHVSGALIINIGDLLQASSLMHFCSVLHCITYLPYCSFLGFVVLMQLITNDKFISLEHRVLANRATRARVSVACFFTTGVRPNPRMYGPIRELVSEENPPKYRETTIKDYATYFNAKGLDGTSALLHFKI

SEQ ID NO: 87194 - DNA, 1146 bp, Arabidopsis thaliana
  misc_feature (1)..(1146): Ceres Seq. ID no. 12699064
  misc_feature: MA Experiment ID: 20000179 Result: Down-regulated in Transcription
  misc_feature: MA Experiment 20000179 PARAMETER Experiment Name: At_Germinating_Seeds_P Parameter: Age (hr) Value: 6 vs. 0
  misc_feature: MA Experiment 20000179 PARAMETER Experiment Name: At_Germinating_Seeds_P Parameter: Tissue Value: Germinating Seeds
  misc_feature: MA Experiment ID: 20000180 Result: Down-regulated in Transcription
  misc_feature: MA Experiment 20000180 PARAMETER Experiment Name: At_Germinating_Seeds_P Parameter: Age (hr) Value: 24 vs. 0
  misc_feature: MA Experiment 20000180 PARAMETER Experiment Name: At_Germinating_Seeds_P Parameter: Tissue Value: Germinating Seeds
  misc_feature: MA Experiment ID: 20000184 Result: Down-regulated in Transcription
  misc_feature: MA Experiment 20000184 PARAMETER Experiment Name: At_Shoots__P Parameter: Age (day) Value: 7
  misc_feature: MA Experiment 20000184 PARAMETER Experiment Name: At_Shoots__P Parameter: Tissue Value: Shoots vs. Whole Plant
  misc_feature: MA Experiment ID: 20000185 Result: Up-regulated in Transcription
  misc_feature: MA Experiment 20000185 PARAMETER Experiment Name: At_Roots__P Parameter: Age (day) Value: 7 vs. 21
  misc_feature: MA Experiment 20000185 PARAMETER Experiment Name: At_Roots__P Parameter: Organism Value: A. thaliana
  misc_feature: MA Experiment 20000185 PARAMETER Experiment Name: At_Roots__P Parameter: Tissue Value: Roots vs. Whole Plant
  misc_feature: MA Experiment ID: 20000264 Result: Up-regulated in Transcription
  misc_feature: MA Experiment 20000264 PARAMETER Experiment Name: At_Open_Flower_P Parameter: Age (day) Value: 21
  misc_feature: MA Experiment 20000264 PARAMETER Experiment Name: At_Open_Flower_P Parameter: Plant Line Value: WS
  misc_feature: MA Experiment 20000264 PARAMETER Experiment Name: At_Open_Flower_P Parameter: Tissue Value: Open Flower vs. Whole Plant
  misc_feature: MA Experiment ID: 20001458 Result: Up-regulated in Transcription
  misc_feature: MA Experiment 20001458 PARAMETER Experiment Name: At_50mM_NH4NO3_L-to-H_P Parameter: Age (day) Value: Undefined
  misc_feature: MA Experiment 20001458 PARAMETER Experiment Name: At_50mM_NH4NO3_L-to-H_P Parameter: Organism Value: Undefined
  misc_feature: MA Experiment 20001458 PARAMETER Experiment Name: At_50mM_NH4NO3_L-to-H_P Parameter: Plant Line Value: Undefined
  misc_feature: MA Experiment 20001458 PARAMETER Experiment Name: At_50mM_NH4NO3_L-to-H_P Parameter: Timepoint (hr) Value: 2
  misc_feature: MA Experiment 20001458 PARAMETER Experiment Name: At_50mM_NH4NO3_L-to-H_P Parameter: Tissue Value: Siliques
  misc_feature: MA Experiment 20001458 PARAMETER Experiment Name: At_50mM_NH4NO3_L-to-H_P Parameter: Treatment Value: 50mM NH4NO3 vs. 100mM Manitol
  misc_feature: MA Experiment ID: 20001557 Result: Up-regulated in Transcription
  misc_feature: MA Experiment 20001557 PARAMETER Experiment Name: At_Drought_Soil_Dry_P Parameter: Age (day) Value: 27
  misc_feature: MA Experiment 20001557 PARAMETER Experiment Name: At_Drought_Soil_Dry_P Parameter: Organism Value: A. thaliana
  misc_feature: MA Experiment 20001557 PARAMETER Experiment Name: At_Drought_Soil_Dry_P Parameter: Plant Line Value: WS
  misc_feature: MA Experiment 20001557 PARAMETER Experiment Name: At_Drought_Soil_Dry_P Parameter: Post Timepoint (hr) Value: 3
  misc_feature: MA Experiment 20001557 PARAMETER Experiment Name: At_Drought_Soil_Dry_P Parameter: Post-Treatment Value: Re-Water vs. No Drought
  misc_feature: MA Experiment 20001557 PARAMETER Experiment Name: At_Drought_Soil_Dry_P Parameter: Timepoint (day) Value: 13
  misc_feature: MA Experiment 20001557 PARAMETER Experiment Name: At_Drought_Soil_Dry_P Parameter: Treatment Value: Drought vs. No Drought
  misc_feature: MA Experiment ID: 20001558 Result: Up-regulated in Transcription
  misc_feature: MA Experiment 20001558 PARAMETER Experiment Name: At_Drought_Soil_Dry_P Parameter: Age (day) Value: 27
  misc_feature: MA Experiment 20001558 PARAMETER Experiment Name: At_Drought_Soil_Dry_P Parameter: Organism Value: A. thaliana
  misc_feature: MA Experiment 20001558 PARAMETER Experiment Name: At_Drought_Soil_Dry_P Parameter: Plant Line Value: WS
  misc_feature: MA Experiment 20001558 PARAMETER Experiment Name: At_Drought_Soil_Dry_P Parameter: Post Timepoint (hr) Value: 6
  misc_feature: MA Experiment 20001558 PARAMETER Experiment Name: At_Drought_Soil_Dry_P Parameter: Post-Treatment Value: Re-Water vs. No Drought
  misc_feature: MA Experiment 20001558 PARAMETER Experiment Name: At_Drought_Soil_Dry_P Parameter: Timepoint (day) Value: 13
  misc_feature: MA Experiment 20001558 PARAMETER Experiment Name: At_Drought_Soil_Dry_P Parameter: Treatment Value: Drought vs. No Drought
  misc_feature: MA Experiment ID: 20001757 Result: Up-regulated in Transcription
  misc_feature: MA Experiment 20001757 PARAMETER Experiment Name: At_50mM_NH4NO3_L-to-H_P Parameter: Timepoint (hr) Value: 6
  misc_feature: MA Experiment 20001757 PARAMETER Experiment Name: At_50mM_NH4NO3_L-to-H_P Parameter: Tissue Value: Leaf
  misc_feature: MA Experiment 20001757 PARAMETER Experiment Name: At_50mM_NH4NO3_L-to-H_P Parameter: Treatment Value: 50mM NH4NO3 vs 100mM Mannitol
  misc_feature: MA Experiment ID: 20001911 Result: Up-regulated in Transcription
  misc_feature: MA Experiment 20001911 PARAMETER Experiment Name: At_Drought_Reproduction_P Parameter: Age (day) Value: 40
  misc_feature: MA Experiment 20001911 PARAMETER Experiment Name: At_Drought_Reproduction_P Parameter: Organism Value: A. thaliana
  misc_feature: MA Experiment 20001911 PARAMETER Experiment Name: At_Drought_Reproduction_P Parameter: Plant Line Value: WS
  misc_feature: MA Experiment 20001911 PARAMETER Experiment Name: At_Drought_Reproduction_P Parameter: Timepoint (day) Value: 10
  misc_feature: MA Experiment 20001911 PARAMETER Experiment Name: At_Drought_Reproduction_P Parameter: Tissue Value: Flowers
  misc_feature: MA Experiment 20001911 PARAMETER Experiment Name: At_Drought_Reproduction_P Parameter: Treatment Value: Drought vs. No Drought
atggttgaattctttgatccttgtcatccaattctagttggaggtattggtttcggcgaggacaatgttggatatatgcaggcccggttgaagaaacataggtggcataagaaagtactaaagacaagagatcctattattgtgtctattggatggagacgctatcagactattcctgtatttgccattgaagatcgcaatggcaggcatcgaatgctcaagtatactccagaacacatgcactgccttgcttcgttctggggtcctcttgtcccacccaacactggctttgtcgctttccagaacctgtcaaacaatcaggcaggatttaggataacagcgacttctgtagttctggagtttaatcaccaggcccgtattgtaaagaaaatcaagctggttgggactccgtgcaagatcaagaaaaagactgcatttatcaaagacatgttcacttctgaccttgaaatagctcgatttgaaggttcatctgttcggacagttagtggcattagaggacaagtaaaaaaggctggaaaaaacatgcttgataacaaggctgaagaagggattgcgaggtgtacctttgaagatcaaatccatatgagcgacatggtattcttaagggcttggactacagtggaagttccacaattttacaatcctctaacgacagccttgcaaccccgcgataagacctggaatgggatgaaaacttttggcgaactccgtagagagctgaatattcctattccagtgaataaggattcactctacaaggcaatcgaaagaaagcaaaagaagttcaatccactacagattccaaagcgtctagaaaaagatttaccgtttatgtcgaaacccaaaaatataccaaagcggaaaagaccatcactagaggataaaagagcagttataatggaaccgaaagaaagaaaagagcatactatcatccagcaattccagctgcttcaacatcacacgatgaagaagaaaaaggcaacggatcagaagaagaggaaagagtatgaagcagagaaagctaagaatgaggaaataaataagaaacgtaggagagaagagagacgggacagatatcgtgaggaagataaacagaaaaagaagacgagaagaagccttgattaa

SEQ ID NO: 87195 - protein, 381 aa, Arabidopsis thaliana
  peptide (1)..(381): Ceres Seq. ID no. 12699065
  misc_feature (1)..(214): Pfam Name: Protein of unknown function (DUF663) Pfam Description: Protein of unknown function (DUF663)
  misc_feature (1)..(381): Homolog of NCBI NO: 14596139 NR Description: Unknown protein [Arabidopsis thaliana]
  misc_feature (1)..(381): Homolog of NCBI NO: 15222176 NR Description: unknown protein; protein id: At1g06720.1
  misc_feature (1)..(381): Homolog of NCBI NO: 25372790 NR Description: hypothetical protein [imported] - Arabidopsis >gi|7523707|gb|AAF63146.1|AC011001_16 Putative membrane protein
  misc_feature (2)..(379): Homolog of NCBI NO: 27696627 NR Description: KIAA0187 gene product [Homo sapiens]
  misc_feature (2)..(379): Homolog of NCBI NO: 7661980 NR Description: KIAA0187 gene product [Homo sapiens] Ribosome biogenesis protein BMS1 homolog
  misc_feature (2)..(379): Homolog of NCBI NO: 40788900 NR Description: KIAA0187 [Homo sapiens]
  misc_feature (2)..(379): Homolog of NCBI NO: 21410151 NR Description: Unknown (protein for IMAGE:4503618) [Mus musculus]
  misc_feature (2)..(379): Homolog of NCBI NO: 39930555 NR Description: BMS1-like, ribosome assembly protein; ribosome protein BMS1 homolog; cDNA sequence BC030906; EST AA408648 [Mus
  misc_feature (5)..(374): Homolog of NCBI NO: 40739528 NR Description: hypothetical protein AN6334.2 [Aspergillus
  misc_feature (2)..(379): Homolog of NCBI NO: 27151472 NR Description: Ribosome biogenesis protein BMS1 homolog
MVEFFDPCHPILVGGIGFGEDNVGYMQARLKKHRWHKKVLKTRDPIIVSIGWRRYQTIPVFAIEDRNGRHRMLKYTPEHMHCLASFWGPLVPPNTGFVAFQNLSNNQAGFRITATSVVLEFNHQARIVKKIKLVGTPCKIKKKTAFIKDMFTSDLEIARFEGSSVRTVSGIRGQVKKAGKNMLDNKAEEGIARCTFEDQIHMSDMVFLRAWTTVEVPQFYNPLTTALQPRDKTWNGMKTFGELRRELNIPIPVNKDSLYKAIERKQKKFNPLQIPKRLEKDLPFMSKPKNIPKRKRPSLEDKRAVIMEPKERKEHTIIQQFQLLQHHTMKKKKATDQKKRKEYEAEKAKNEEINKKRRREERRDRYREEDKQKKKTRRSLD

SEQ ID NO: 87196 - protein, 356 aa, Arabidopsis thaliana
  peptide (1)..(356): Ceres Seq. ID no. 12699066
  misc_feature (1)..(189): Pfam Name: Protein of unknown function (DUF663) Pfam Description: Protein of unknown function (DUF663)
  misc_feature (1)..(356): Homolog of NCBI NO: 14596139 NR Description: Unknown protein [Arabidopsis thaliana]
  misc_feature (1)..(356): Homolog of NCBI NO: 15222176 NR Description: unknown protein; protein id: At1g06720.1
  misc_feature (1)..(356): Homolog of NCBI NO: 25372790 NR Description: hypothetical protein [imported] - Arabidopsis >gi|7523707|gb|AAF63146.1|AC011001_16 Putative membrane protein
  misc_feature (1)..(354): Homolog of NCBI NO: 27696627 NR Description: KIAA0187 gene product [Homo sapiens]
  misc_feature (1)..(354): Homolog of NCBI NO: 7661980 NR Description: KIAA0187 gene product [Homo sapiens] Ribosome biogenesis protein BMS1 homolog
  misc_feature (1)..(354): Homolog of NCBI NO: 40788900 NR Description: KIAA0187 [Homo sapiens]
  misc_feature (1)..(354): Homolog of NCBI NO: 21410151 NR Description: Unknown (protein for IMAGE:4503618) [Mus musculus]
  misc_feature (1)..(354): Homolog of NCBI NO: 39930555 NR Description: BMS1-like, ribosome assembly protein; ribosome protein BMS1 homolog; cDNA sequence BC030906; EST AA408648 [Mus
  misc_feature (1)..(349): Homolog of NCBI NO: 40739528 NR Description: hypothetical protein AN6334.2 [Aspergillus
  misc_feature (1)..(354): Homolog of NCBI NO: 27151472 NR Description: Ribosome biogenesis protein BMS1 homolog
MQARLKKHRWHKKVLKTRDPIIVSIGWRRYQTIPVFAIEDRNGRHRMLKYTPEHMHCLASFWGPLVPPNTGFVAFQNLSNNQAGFRITATSVVLEFNHQARIVKKIKLVGTPCKIKKKTAFIKDMFTSDLEIARFEGSSVRTVSGIRGQVKKAGKNMLDNKAEEGIARCTFEDQIHMSDMVFLRAWTTVEVPQFYNPLTTALQPRDKTWNGMKTFGELRRELNIPIPVNKDSLYKAIERKQKKFNPLQIPKRLEKDLPFMSKPKNIPKRKRPSLEDKRAVIMEPKERKEHTIIQQFQLLQHHTMKKKKATDQKKRKEYEAEKAKNEEINKKRRREERRDRYREEDKQKKKTRRSLD

SEQ ID NO: 87197 - protein, 310 aa, Arabidopsis thaliana
  peptide (1)..(310): Ceres Seq. ID no. 12699067
  misc_feature (1)..(143): Pfam Name: Protein of unknown function (DUF663) Pfam Description: Protein of unknown function (DUF663)
  misc_feature (1)..(310): Homolog of NCBI NO: 14596139 NR Description: Unknown protein [Arabidopsis thaliana]
  misc_feature (1)..(310): Homolog of NCBI NO: 15222176 NR Description: unknown protein; protein id: At1g06720.1
  misc_feature (1)..(310): Homolog of NCBI NO: 25372790 NR Description: hypothetical protein [imported] - Arabidopsis >gi|7523707|gb|AAF63146.1|AC011001_16 Putative membrane protein
  misc_feature (1)..(308): Homolog of NCBI NO: 27696627 NR Description: KIAA0187 gene product [Homo sapiens]
  misc_feature (1)..(308): Homolog of NCBI NO: 7661980 NR Description: KIAA0187 gene product [Homo sapiens] Ribosome biogenesis protein BMS1 homolog
  misc_feature (1)..(308): Homolog of NCBI NO: 40788900 NR Description: KIAA0187 [Homo sapiens]
  misc_feature (1)..(308): Homolog of NCBI NO: 21410151 NR Description: Unknown (protein for IMAGE:4503618) [Mus musculus]
  misc_feature (1)..(308): Homolog of NCBI NO: 39930555 NR Description: BMS1-like, ribosome assembly protein; ribosome protein BMS1 homolog; cDNA sequence BC030906; EST AA408648 [Mus
  misc_feature (1)..(303): Homolog of NCBI NO: 40739528 NR Description: hypothetical protein AN6334.2 [Aspergillus
  misc_feature (1)..(308): Homolog of NCBI NO: 27151472 NR Description: Ribosome biogenesis protein BMS1 homolog
MLKYTPEHMHCLASFWGPLVPPNTGFVAFQNLSNNQAGFRITATSVVLEFNHQARIVKKIKLVGTPCKIKKKTAFIKDMFTSDLEIARFEGSSVRTVSGIRGQVKKAGKNMLDNKAEEGIARCTFEDQIHMSDMVFLRAWTTVEVPQFYNPLTTALQPRDKTWNGMKTFGELRRELNIPIPVNKDSLYKAIERKQKKFNPLQIPKRLEKDLPFMSKPKNIPKRKRPSLEDKRAVIMEPKERKEHTIIQQFQLLQHHTMKKKKATDQKKRKEYEAEKAKNEEINKKRRREERRDRYREEDKQKKKTRRSLD

SEQ ID NO: 87198 - DNA, 1245 bp, Arabidopsis thaliana
  misc_feature (1)..(1245): Ceres Seq. ID no. 12699072
  misc_feature: MA Experiment ID: 20000440 Result: Up-regulated in Transcription
  misc_feature: MA Experiment 20000440 PARAMETER Experiment Name: At_Closed-Flower__Sub_P Parameter: Tissue Value: Closed Flower vs. Whole Plant
atgatagcagccgcagtgcattaccgtctgcggaggctacgtgacaccaaaatcatccctcgtctcaaatcatctcacaaacacaaaggccatgagaaactcgagagattctctcattacgtcgcaaggcaaatgggattcaaggacagaagagagtgtccaaatctctgcaagttagcagcagaatacataagtaaatctgaatgttgtgaagaagacatttacagctttttctctgaagaacctgatgctgataccctcttcattaagcttgttgaggagtttgaaagatgcattctcagctactttgcgtttcactggagccacgccgatctcatgattactcagctacaagggaaaagcactgtgcttaaggacatactcaaagaagcattctgggcaggagcagactctgtggtgattgaagctgatgctttcaaagagtctgatgtcatttacagagccttaagctctcgtggccatgtcgatatgatccagacagctgaattggttcatcagtcatcaacagatgcagcttcatccctgctagtgacggctctgaacgaaggaagggatgtgataatggatgggacactctcttgggtaccttttgtggtgcagacaataacaatggcgaggaacgtacaccgacaccattacagaatgggagctggatacaaggttggtgatgatggagttataacagagaactattgggaacgaattggtgaaaggcaacagattcaagaggatggtcgtaggagaaaaccgtatagaatagaactagttggagttgtgtgcgatgcgtatttagcagttataagaggcattaggagagctatcatgtgcagaagagcagttagggtgagatcacagctgagatctcacaaacggtttgcggaagcatttcctacatattgcagccttgtcgacaatgctaggctctactgcactaacgcgctggaaggctctccaaagctgataggttggaaagaaaaggaaaagacattgctagtagatacagaagagatagattgtttgaagcgagtaggagggttaaacgagaacgcaggctccatttacgagctctatagacaacccaaccctgcttgtgaagcaggttcaatctggaaagacattgttctttcaccttcaaggtttagcattcaacaggaactcaaatattccattcagaaagttgaaaaaagatctaaacaacatctcatcaacaacaccaaaagctga

SEQ ID NO: 87199 - protein, 414 aa, Arabidopsis thaliana
  peptide (1)..(414): Ceres Seq. ID no. 12699073
  misc_feature (119)..(414): Homolog of NCBI NO: 15222183 NR Description: unknown protein; protein id: At1g06750.1
  misc_feature (1)..(142): Homolog of NCBI NO: 15222183 NR Description: unknown protein; protein id: At1g06750.1
  misc_feature (119)..(408): Homolog of NCBI NO: 15224537 NR Description: unknown protein; protein id: At2g30630.1
  misc_feature (1)..(134): Homolog of NCBI NO: 15224537 NR Description: unknown protein; protein id: At2g30630.1
  misc_feature (119)..(408): Homolog of NCBI NO: 28207052 NR Description: hypothetical protein [Arabidopsis thaliana]
  misc_feature (1)..(120): Homolog of NCBI NO: 28207052 NR Description: hypothetical protein [Arabidopsis thaliana]
  misc_feature (119)..(408): Homolog of NCBI NO: 28207050 NR Description: hypothetical protein [Arabidopsis thaliana]
  misc_feature (1)..(134): Homolog of NCBI NO: 28207050 NR Description: hypothetical protein [Arabidopsis thaliana]
  misc_feature (137)..(414): Homolog of NCBI NO: 1076336 NR Description: hypothetical protein H1.1flk - Arabidopsis
  misc_feature (138)..(414): Homolog of NCBI NO: 388260 NR Description: H1-1flk [Arabidopsis thaliana]
MIAAAVHYRLRRLRDTKIIPRLKSSHKHKGHEKLERFSHYVARQMGFKDRRECPNLCKLAAEYISKSECCEEDIYSFFSEEPDADTLFIKLVEEFERCILSYFAFHWSHADLMITQLQGKSTVLKDILKEAFWAGADSVVIEADAFKESDVIYRALSSRGHVDMIQTAELVHQSSTDAASSLLVTALNEGRDVIMDGTLSWVPFVVQTITMARNVHRHHYRMGAGYKVGDDGVITENYWERIGERQQIQEDGRRRKPYRIELVGVVCDAYLAVIRGIRRAIMCRRAVRVRSQLRSHKRFAEAFPTYCSLVDNARLYCTNALEGSPKLIGWKEKEKTLLVDTEEIDCLKRVGGLNENAGSIYELYRQPNPACEAGSIWKDIVLSPSRFSIQQELKYSIQKVEKRSKQHLINNTKS

SEQ ID NO: 87200 - protein, 370 aa, Arabidopsis thaliana
  peptide (1)..(370): Ceres Seq. ID no. 12699074
  misc_feature (75)..(370): Homolog of NCBI NO: 15222183 NR Description: unknown protein; protein id: At1g06750.1
  misc_feature (1)..(98): Homolog of NCBI NO: 15222183 NR Description: unknown protein; protein id: At1g06750.1
  misc_feature (75)..(364): Homolog of NCBI NO: 15224537 NR Description: unknown protein; protein id: At2g30630.1
  misc_feature (1)..(90): Homolog of NCBI NO: 15224537 NR Description: unknown protein; protein id: At2g30630.1
  misc_feature (75)..(364): Homolog of NCBI NO: 28207052 NR Description: hypothetical protein [Arabidopsis thaliana]
  misc_feature (1)..(76): Homolog of NCBI NO: 28207052 NR Description: hypothetical protein [Arabidopsis thaliana]
  misc_feature (75)..(364): Homolog of NCBI NO: 28207050 NR Description: hypothetical protein [Arabidopsis thaliana]
  misc_feature (1)..(90): Homolog of NCBI NO: 28207050 NR Description: hypothetical protein [Arabidopsis thaliana]
  misc_feature (93)..(370): Homolog of NCBI NO: 1076336 NR Description: hypothetical protein H1.1flk - Arabidopsis
  misc_feature (94)..(370): Homolog of NCBI NO: 388260 NR Description: H1-1flk [Arabidopsis thaliana]
MGFKDRRECPNLCKLAAEYISKSECCEEDIYSFFSEEPDADTLFIKLVEEFERCILSYFAFHWSHADLMITQLQGKSTVLKDILKEAFWAGADSVVIEADAFKESDVIYRALSSRGHVDMIQTAELVHQSSTDAASSLLVTALNEGRDVIMDGTLSWVPFVVQTITMARNVHRHHYRMGAGYKVGDDGVITENYWERIGERQQIQEDGRRRKPYRIELVGVVCDAYLAVIRGIRRAIMCRRAVRVRSQLRSHKRFAEAFPTYCSLVDNARLYCTNALEGSPKLIGWKEKEKTLLVDTEEIDCLKRVGGLNENAGSIYELYRQPNPACEAGSIWKDIVLSPSRFSIQQELKYSIQKVEKRSKQHLINNTKS

SEQ ID NO: 87201 - protein, 302 aa, Arabidopsis thaliana
  peptide (1)..(302): Ceres Seq. ID no. 12699075
  misc_feature (7)..(302): Homolog of NCBI NO: 15222183 NR Description: unknown protein; protein id: At1g06750.1
  misc_feature (1)..(30): Homolog of NCBI NO: 15222183 NR Description: unknown protein; protein id: At1g06750.1
  misc_feature (7)..(296): Homolog of NCBI NO: 15224537 NR Description: unknown protein; protein id: At2g30630.1
  misc_feature (1)..(22): Homolog of NCBI NO: 15224537 NR Description: unknown protein; protein id: At2g30630.1
  misc_feature (7)..(296): Homolog of NCBI NO: 28207052 NR Description: hypothetical protein [Arabidopsis thaliana]
  misc_feature (7)..(296): Homolog of NCBI NO: 28207050 NR Description: hypothetical protein [Arabidopsis thaliana]
  misc_feature (1)..(22): Homolog of NCBI NO: 28207050 NR Description: hypothetical protein [Arabidopsis thaliana]
  misc_feature (25)..(302): Homolog of NCBI NO: 1076336 NR Description: hypothetical protein H1.1flk - Arabidopsis
  misc_feature (26)..(302): Homolog of NCBI NO: 388260 NR Description: H1-1flk [Arabidopsis thaliana]
  misc_feature (1)..(30): Homolog of NCBI NO: 25406934 NR Description: hypothetical protein [imported] - Arabidopsis >gi|7523704|gb|AAF63143.1|AC011001_13 Hypothetical protein
MITQLQGKSTVLKDILKEAFWAGADSVVIEADAFKESDVIYRALSSRGHVDMIQTAELVHQSSTDAASSLLVTALNEGRDVIMDGTLSWVPFVVQTITMARNVHRHHYRMGAGYKVGDDGVITENYWERIGERQQIQEDGRRRKPYRIELVGVVCDAYLAVIRGIRRAIMCRRAVRVRSQLRSHKRFAEAFPTYCSLVDNARLYCTNALEGSPKLIGWKEKEKTLLVDTEEIDCLKRVGGLNENAGSIYELYRQPNPACEAGSIWKDIVLSPSRFSIQQELKYSIQKVEKRSKQHLINNTKS

SEQ ID NO: 87202 - DNA, 978 bp, Arabidopsis thaliana
  misc_feature (1)..(978): Ceres Seq. ID no. 12699087
  misc_feature: MA Experiment ID: 20000307 Result: Up-regulated in Transcription
  misc_feature: MA Experiment 20000307 PARAMETER Experiment Name: At_Germinating_Seeds_Sub_P Parameter: Age (hr) Value: 24 vs. 0
  misc_feature: MA Experiment 20000307 PARAMETER Experiment Name: At_Germinating_Seeds_Sub_P Parameter: Organism Value: A. thaliana
  misc_feature: MA Experiment 20000307 PARAMETER Experiment Name: At_Germinating_Seeds_Sub_P Parameter: Plant Line Value: WS
  misc_feature: MA Experiment 20000307 PARAMETER Experiment Name: At_Germinating_Seeds_Sub_P Parameter: Tissue Value: Germinating Seeds
  misc_feature: MA Experiment ID: 20000315 Result: Down-regulated in Transcription
  misc_feature: MA Experiment 20000315 PARAMETER Experiment Name: At_14day_Shoots-Roots_Sub_P Parameter: Age (day) Value: 14
  misc_feature: MA Experiment 20000315 PARAMETER Experiment Name: At_14day_Shoots-Roots_Sub_P Parameter: Organism Value: A. thaliana
  misc_feature: MA Experiment 20000315 PARAMETER Experiment Name: At_14day_Shoots-Roots_Sub_P Parameter: Plant Line Value: WS
  misc_feature: MA Experiment 20000315 PARAMETER Experiment Name: At_14day_Shoots-Roots_Sub_P Parameter: Tissue Value: Shoots vs. Whole Plant
  misc_feature: MA Experiment ID: 20000329 Result: Down-regulated in Transcription
  misc_feature: MA Experiment 20000329 PARAMETER Experiment Name: At_4deg_Cold_Sub_P Parameter: Age (day) Value: 14
  misc_feature: MA Experiment 20000329 PARAMETER Experiment Name: At_4deg_Cold_Sub_P Parameter: Organism Value: A. thaliana
  misc_feature: MA Experiment 20000329 PARAMETER Experiment Name: At_4deg_Cold_Sub_P Parameter: Plant Line Value: WS
  misc_feature: MA Experiment 20000329 PARAMETER Experiment Name: At_4deg_Cold_Sub_P Parameter: Temperature (deg C) Value: 4 vs. 22
  misc_feature: MA Experiment 20000329 PARAMETER Experiment Name: At_4deg_Cold_Sub_P Parameter: Timepoint (hr) Value: 6
  misc_feature: MA Experiment 20000329 PARAMETER Experiment Name: At_4deg_Cold_Sub_P Parameter: Tissue Value: Aerial
atgagcgagggccagaagttccagttgggaacaatcggcgctttgagtttgtccgttgtgtcatctgtctcgattgtgatctgtaacaaagcgcttattagcacccttggcttcacattcgcgactactttgacaagttggcatcttttggtcacattttgttcccttcatgtggcattatggatgaagatgttcgaacacaagccttttgatccacgagctgtgatgggatttggcatattgaatgggatatccataggactattgaacctcagcctgggctttaattctgtcggtttttaccagatgactaaactagctatcatcccctgcactgttctcttggagaccctcttcttcaggaaaaagttcagtcgaaaaatccagttttcattaaccatccttctccttggtgttggaattgcaaccgtcacagatcttcaacttaatatgctgggttctgtcttgtcgctgctggctgttgtcacaacttgtgttgctcaaattatgacaaataccatccagaagaagttcaaagtttcatccacgcagcttctgtatcagtcttgcccatatcaagcaatcactcttttcgtcactgggccatttttagatgggctcctaaccaatcagaacgtgtttgctttcaagtacacttctcaagtagtgttcttcatcgtcctgtcttgcctcatatcagtctctgtaaacttcagcacatttcttgtcattggaaaaacatctcctgtcacatatcaggttctaggacatctcaaaacatgcctggttctagcatttggctatgtgttgctgcgagacccattcgactggcgcaacattctcggtattctagtggctgtgattggaatggttgtttattcctattactgctcgattgagactcagcagaaggcaagtgaaacctcaactcagttgcctcaggtctatctatatatactgacttgttatattgcttaa

SEQ ID NO: 87203 - protein, 325 aa, Arabidopsis thaliana
  peptide (1)..(325): Ceres Seq. ID no. 12699088
  misc_feature (1)..(315): Homolog of NCBI NO: 22329373 NR Description: unknown protein; protein id: At1g06890.1, by cDNA: gi_19423945 [Arabidopsis thaliana] unknown protein [Arabidopsis thaliana]
  misc_feature (1)..(315): Homolog of NCBI NO: 27311731 NR Description: putative integral membrane protein [Arabidopsis
  misc_feature (4)..(315): Homolog of NCBI NO: 34896140 NR Description: P0701D05.25 [Oryza sativa (japonica >gi|13486667|dbj|BAB39904.1| contains ESTs
  misc_feature (4)..(311): Homolog of NCBI NO: 13699188 NR Description: putative glucose-6-phosphate/phosphate-tranlocat
  misc_feature (1)..(312): Homolog of NCBI NO: 30683853 NR Description: transporter-related [Arabidopsis thaliana]
  misc_feature (2)..(313): Homolog of NCBI NO: 13384378 NR Description: putative phosphate translocator [Oryza sativa
  misc_feature (103)..(315): Homolog of NCBI NO: 25406945 NR Description: hypothetical protein [imported] - Arabidopsis >gi|7523696|gb|AAF63135.1|AC011001_5 Hypothetical protein
  misc_feature (103)..(313): Homolog of NCBI NO: 37535412 NR Description: putative
  misc_feature (2)..(81): Homolog of NCBI NO: 37535412 NR Description: putative
  misc_feature (5)..(308): Homolog of NCBI NO: 18411172 NR Description: expressed protein; protein id: At1g76670.1, by cDNA: gi_14532697, supported by cDNA: gi_16604379, supported cDNA: gi_18491194 [Arabidopsis thaliana] >gi|25354481|pir||A96795
MSEGQKFQLGTIGALSLSVVSSVSIVICNKALISTLGFTFATTLTSWHLLVTFCSLHVALWMKMFEHKPFDPRAVMGFGILNGISIGLLNLSLGFNSVGFYQMTKLAIIPCTVLLETLFFRKKFSRKIQFSLTILLLGVGIATVTDLQLNMLGSVLSLLAVVTTCVAQIMTNTIQKKFKVSSTQLLYQSCPYQAITLFVTGPFLDGLLTNQNVFAFKYTSQVVFFIVLSCLISVSVNFSTFLVIGKTSPVTYQVLGHLKTCLVLAFGYVLLRDPFDWRNILGILVAVIGMVVYSYYCSIETQQKASETSTQLPQVYLYILTCYIA

SEQ ID NO: 87204 - protein, 264 aa, Arabidopsis thaliana
  peptide (1)..(264): Ceres Seq. ID no. 12699089
  misc_feature (1)..(254): Homolog of NCBI NO: 22329373 NR Description: unknown protein; protein id: At1g06890.1, by cDNA: gi_19423945 [Arabidopsis thaliana] unknown protein [Arabidopsis thaliana]
  misc_feature (1)..(254): Homolog of NCBI NO: 27311731 NR Description: putative integral membrane protein [Arabidopsis
  misc_feature (1)..(254): Homolog of NCBI NO: 34896140 NR Description: P0701D05.25 [Oryza sativa (japonica >gi|13486667|dbj|BAB39904.1| contains ESTs
  misc_feature (1)..(250): Homolog of NCBI NO: 13699188 NR Description: putative glucose-6-phosphate/phosphate-tranlocat
  misc_feature (1)..(251): Homolog of NCBI NO: 30683853 NR Description: transporter-related [Arabidopsis thaliana]
  misc_feature (1)..(252): Homolog of NCBI NO: 13384378 NR Description: putative phosphate translocator [Oryza sativa
  misc_feature (42)..(254): Homolog of NCBI NO: 25406945 NR Description: hypothetical protein [imported] - Arabidopsis >gi|7523696|gb|AAF63135.1|AC011001_5 Hypothetical protein
  misc_feature (42)..(252): Homolog of NCBI NO: 37535412 NR Description: putative
  misc_feature (1)..(20): Homolog of NCBI NO: 37535412 NR Description: putative
  misc_feature (1)..(247): Homolog of NCBI NO: 18411172 NR Description: expressed protein; protein id: At1g76670.1, by cDNA: gi_14532697, supported by cDNA: gi_16604379, supported cDNA: gi_18491194 [Arabidopsis thaliana] >gi|25354481|pir||A96795
MKMFEHKPFDPRAVMGFGILNGISIGLLNLSLGFNSVGFYQMTKLAIIPCTVLLETLFFRKKFSRKIQFSLTILLLGVGIATVTDLQLNMLGSVLSLLAVVTTCVAQIMTNTIQKKFKVSSTQLLYQSCPYQAITLFVTGPFLDGLLTNQNVFAFKYTSQVVFFIVLSCLISVSVNFSTFLVIGKTSPVTYQVLGHLKTCLVLAFGYVLLRDPFDWRNILGILVAVIGMVVYSYYCSIETQQKASETSTQLPQVYLYILTCYIA

SEQ ID NO: 87205 - protein, 262 aa, Arabidopsis thaliana
  peptide (1)..(262): Ceres Seq. ID no. 12699090
  misc_feature (1)..(252): Homolog of NCBI NO: 22329373 NR Description: unknown protein; protein id: At1g06890.1, by cDNA: gi_19423945 [Arabidopsis thaliana] unknown protein [Arabidopsis thaliana]
  misc_feature (1)..(252): Homolog of NCBI NO: 27311731 NR Description: putative integral membrane protein [Arabidopsis
  misc_feature (1)..(252): Homolog of NCBI NO: 34896140 NR Description: P0701D05.25 [Oryza sativa (japonica >gi|13486667|dbj|BAB39904.1| contains ESTs
  misc_feature (1)..(248): Homolog of NCBI NO: 13699188 NR Description: putative glucose-6-phosphate/phosphate-tranlocat
  misc_feature (1)..(249): Homolog of NCBI NO: 30683853 NR Description: transporter-related [Arabidopsis thaliana]
  misc_feature (1)..(250): Homolog of NCBI NO: 13384378 NR Description: putative phosphate translocator [Oryza sativa
  misc_feature (40)..(252): Homolog of NCBI NO: 25406945 NR Description: hypothetical protein [imported] - Arabidopsis >gi|7523696|gb|AAF63135.1|AC011001_5 Hypothetical protein
  misc_feature (40)..(250): Homolog of NCBI NO: 37535412 NR Description: putative
  misc_feature (1)..(18): Homolog of NCBI NO: 37535412 NR Description: putative
  misc_feature (1)..(245): Homolog of NCBI NO: 18411172 NR Description: expressed protein; protein id: At1g76670.1, by cDNA: gi_14532697, supported by cDNA: gi_16604379, supported cDNA: gi_18491194 [Arabidopsis thaliana] >gi|25354481|pir||A96795
MFEHKPFDPRAVMGFGILNGISIGLLNLSLGFNSVGFYQMTKLAIIPCTVLLETLFFRKKFSRKIQFSLTILLLGVGIATVTDLQLNMLGSVLSLLAVVTTCVAQIMTNTIQKKFKVSSTQLLYQSCPYQAITLFVTGPFLDGLLTNQNVFAFKYTSQVVFFIVLSCLISVSVNFSTFLVIGKTSPVTYQVLGHLKTCLVLAFGYVLLRDPFDWRNILGILVAVIGMVVYSYYCSIETQQKASETSTQLPQVYLYILTCYIA

SEQ ID NO: 87206 - DNA, 1590 bp, Arabidopsis thaliana
  misc_feature (1)..(1590): Ceres Seq. ID no. 12699091
  misc_feature: MA Experiment ID: 108585 Result: Up-regulated in Transcription
  misc_feature: MA Experiment 108585 PARAMETER Experiment Name: At_5mM_NaNP_cDNA_P Parameter: Timepoint (hr) Value: 6
  misc_feature: MA Experiment 108585 PARAMETER Experiment Name: At_5mM_NaNP_cDNA_P Parameter: Tissue Value: Aerial
  misc_feature: MA Experiment 108585 PARAMETER Experiment Name: At_5mM_NaNP_cDNA_P Parameter: Treatment Value: null
  misc_feature: MA Experiment ID: 108594 Result: Down-regulated in Transcription
  misc_feature: MA Experiment 108594 PARAMETER Experiment Name: At_Ler-rhl_Root_cDNA_P Parameter: Plant Line Value: null
  misc_feature: MA Experiment ID: 20000439 Result: Up-regulated in Transcription
  misc_feature: MA Experiment 20000439 PARAMETER Experiment Name: At_Roots__P Parameter: Age (day) Value: 14 vs. 21
  misc_feature: MA Experiment 20000439 PARAMETER Experiment Name: At_Roots__P Parameter: Organism Value: A. thaliana
  misc_feature: MA Experiment 20000439 PARAMETER Experiment Name: At_Roots__P Parameter: Tissue Value: Roots vs. Whole Plant
aagactctctctgctttcgaccaaaaccttctcctctcctctgggagatctccatcttcttcgcttcttcgcttccccgcctgaaacaattactcgatctcgccggcggaacaagctctccgtttctctttccggcagatcgattcttccaattccttattcctttctaggtcttccttaagaaacccttactttcttcaaaatctgcatttatggcgattagggttaccttcacctactccagctatgttgctaggagcattgcttcatccgccgggactcgtgtcggtaccggcgacgttagatcatgcttcgaaacatgggttcgtcccaggttctgcggccacaatcagataccagatattgttgataaatctcccggatccaacacatggggtccaagctcaggccctcgtgctcgaccagcttcatcaatgtatagcaccattgcgagggaaatcctcgaagaaggctgcaagagtccacttgtcttgggtatgatctctctcatgaatttgactggagctccacagttttcgggtatgaccggtctcgggatctctccctttaagacttcttctgtcatcccgttccttaggggttccaagtggatgccttgtagtattccggcgacgttatcaacggatattgctgaggttgatagaggaggaaaggtctgtgatcctaaagtgaagttggagttgagtgataaagtctcgaatggtggaaacggatgggttaataagctgttgaatatctgctcggaggatgctaaggctgctttcacggcggttactgtttctctccttttccgatcggctttggccgagccaaagtctataccttcaacatctatgcttcctactctcgatgtgggtgatcgtgttatagccgagaaggtctcatactttttcaggaagccagaggtttcagacatagttatcttcaaggctcctcctattttggtggaacatggttacagttgtgctgatgttttcataaaaaggatagttgctagcgaaggtgactgggttgaagtttgtgatggaaagctcttagtaaatgacactgttcaagcagaggattttgtcttagagccaattgactatgaaatggaaccaatgtttgtccctgaaggttatgtcttcgtcctaggagacaaccgcaacaaaagctttgattctcataactggggtccacttccaataaagaacatcatagggagatctgtgtttcgctattggccaccaagcaaagtgtcagacataatacaccatgaacaagttagccaaaagagagctgttgatgtatcttgaccaacgcagatggtatcttaggattaagcagaaaatttgattagatgagctgtgccatgccaaccattttggcgctgaaggcaacagagcaattctttcttcctgtctaggcttgatggcggacatggaatgcactgggaaatccatataaaaagaacaagaaaattgatatttttgctttgattttttttgatgtgttgaaacctaaatgcatccagtgtaattggcagtagctgtcaaacataaaagggtaaactttcttttttgagtattt

SEQ ID NO: 87207 - protein, 367 aa, Arabidopsis thaliana
  peptide (1)..(367): Ceres Seq. ID no. 12699092
  misc_feature (176)..(337): Pfam Name: Signal peptidase I Pfam Description: Signal peptidase I
  misc_feature (1)..(367): Homolog of NCBI NO: 15222236 NR Description: chloroplast thylakoidal processing peptidase, protein id: At1g06870.1, supported by cDNA: 15392. [Arabidopsis
  misc_feature (1)..(367): Homolog of NCBI NO: 21553622 NR Description: chloroplast thylakoidal processing peptidase,
  misc_feature (67)..(367): Homolog of NCBI NO: 30684587 NR Description: signal peptidase I -related [Arabidopsis >gi|2769566|emb|CAA71502.1| chloroplast thylakoidal processing [Arabidopsis thaliana] >gi|22135950|gb|AAM91557.1| putative
  misc_feature (111)..(367): Homolog of NCBI NO: 25408074 NR Description: probable signal peptidase I [imported] - thaliana >gi|1946373|gb|AAB63091.1| putative signal peptidase I
  misc_feature (180)..(353): Homolog of NCBI NO: 9294054 NR Description: contains similarity to signal peptidase (leader
  misc_feature (180)..(353): Homolog of NCBI NO: 30687572 NR Description: chloroplast thylakoidal processing peptidase
  misc_feature (180)..(353): Homolog of NCBI NO: 25082936 NR Description: chloroplast thylakoidal processing peptidase,
  misc_feature (168)..(352): Homolog of NCBI NO: 23042815 NR Description: hypothetical protein [Trichodesmium erythraeum
  misc_feature (185)..(348): Homolog of NCBI NO: 16329254 NR Description: leader peptidase I [Synechocystis sp. PCC 6803]
  misc_feature (193)..(352): Homolog of NCBI NO: 17230467 NR Description: signal peptidase I [Nostoc sp. PCC 7120]
MAIRVTFTYSSYVARSIASSAGTRVGTGDVRSCFETWVRPRFCGHNQIPDIVDKSPGSNTWGPSSGPRARPASSMYSTIAREILEEGCKSPLVLGMISLMNLTGAPQFSGMTGLGISPFKTSSVIPFLRGSKWMPCSIPATLSTDIAEVDRGGKVCDPKVKLELSDKVSNGGNGWVNKLLNICSEDAKAAFTAVTVSLLFRSALAEPKSIPSTSMLPTLDVGDRVIAEKVSYFFRKPEVSDIVIFKAPPILVEHGYSCADVFIKRIVASEGDWVEVCDGKLLVNDTVQAEDFVLEPIDYEMEPMFVPEGYVFVLGDNRNKSFDSHNWGPLPIKNIIGRSVFRYWPPSKVSDIIHHEQVSQKRAVDVS

SEQ ID NO: 87208 - protein, 293 aa, Arabidopsis thaliana
  peptide (1)..(293): Ceres Seq. ID no. 12699093
  misc_feature (102)..(263): Pfam Name: Signal peptidase I Pfam Description: Signal peptidase I
  misc_feature (1)..(293): Homolog of NCBI NO: 15222236 NR Description: chloroplast thylakoidal processing peptidase, protein id: At1g06870.1, supported by cDNA: 15392. [Arabidopsis
  misc_feature (1)..(293): Homolog of NCBI NO: 21553622 NR Description: chloroplast thylakoidal processing peptidase,
  misc_feature (1)..(293): Homolog of NCBI NO: 30684587 NR Description: signal peptidase I -related [Arabidopsis >gi|2769566|emb|CAA71502.1| chloroplast thylakoidal processing [Arabidopsis thaliana] >gi|22135950|gb|AAM91557.1| putative
  misc_feature (37)..(293): Homolog of NCBI NO: 25408074 NR Description: probable signal peptidase I [imported] - thaliana >gi|1946373|gb|AAB63091.1| putative signal peptidase I
  misc_feature (106)..(279): Homolog of NCBI NO: 9294054 NR Description: contains similarity to signal peptidase (leader
  misc_feature (106)..(279): Homolog of NCBI NO: 30687572 NR Description: chloroplast thylakoidal processing peptidase
  misc_feature (106)..(279): Homolog of NCBI NO: 25082936 NR Description: chloroplast thylakoidal processing peptidase,
  misc_feature (94)..(278): Homolog of NCBI NO: 23042815 NR Description: hypothetical protein [Trichodesmium erythraeum
  misc_feature (111)..(274): Homolog of NCBI NO: 16329254 NR Description: leader peptidase I [Synechocystis sp. PCC 6803]
  misc_feature (119)..(278): Homolog of NCBI NO: 17230467 NR Description: signal peptidase I [Nostoc sp. PCC 7120]
MYSTIAREILEEGCKSPLVLGMISLMNLTGAPQFSGMTGLGISPFKTSSVIPFLRGSKWMPCSIPATLSTDIAEVDRGGKVCDPKVKLELSDKVSNGGNGWVNKLLNICSEDAKAAFTAVTVSLLFRSALAEPKSIPSTSMLPTLDVGDRVIAEKVSYFFRKPEVSDIVIFKAPPILVEHGYSCADVFIKRIVASEGDWVEVCDGKLLVNDTVQAEDFVLEPIDYEMEPMFVPEGYVFVLGDNRNKSFDSHNWGPLPIKNIIGRSVFRYWPPSKVSDIIHHEQVSQKRAVDVS

SEQ ID NO: 87209 - protein, 272 aa, Arabidopsis thaliana
  peptide (1)..(272): Ceres Seq. ID no. 12699094
  misc_feature (81)..(242): Pfam Name: Signal peptidase I Pfam Description: Signal peptidase I
  misc_feature (1)..(272): Homolog of NCBI NO: 15222236 NR Description: chloroplast thylakoidal processing peptidase, protein id: At1g06870.1, supported by cDNA: 15392. [Arabidopsis
  misc_feature (1)..(272): Homolog of NCBI NO: 21553622 NR Description: chloroplast thylakoidal processing peptidase,
  misc_feature (1)..(272): Homolog of NCBI NO: 30684587 NR Description: signal peptidase I -related [Arabidopsis >gi|2769566|emb|CAA71502.1| chloroplast thylakoidal processing [Arabidopsis thaliana] >gi|22135950|gb|AAM91557.1| putative
  misc_feature (16)..(272): Homolog of NCBI NO: 25408074 NR Description: probable signal peptidase I [imported] - thaliana >gi|1946373|gb|AAB63091.1| putative signal peptidase I
  misc_feature (85)..(258): Homolog of NCBI NO: 9294054 NR Description: contains similarity to signal peptidase (leader
  misc_feature (85)..(258): Homolog of NCBI NO: 30687572 NR Description: chloroplast thylakoidal processing peptidase
  misc_feature (85)..(258): Homolog of NCBI NO: 25082936 NR Description: chloroplast thylakoidal processing peptidase,
  misc_feature (73)..(257): Homolog of NCBI NO: 23042815 NR Description: hypothetical protein [Trichodesmium erythraeum
  misc_feature (90)..(253): Homolog of NCBI NO: 16329254 NR Description: leader peptidase I [Synechocystis sp. PCC 6803]
  misc_feature (98)..(257): Homolog of NCBI NO: 17230467 NR Description: signal peptidase I [Nostoc sp. PCC 7120]
MISLMNLTGAPQFSGMTGLGISPFKTSSVIPFLRGSKWMPCSIPATLSTDIAEVDRGGKVCDPKVKLELSDKVSNGGNGWVNKLLNICSEDAKAAFTAVTVSLLFRSALAEPKSIPSTSMLPTLDVGDRVIAEKVSYFFRKPEVSDIVIFKAPPILVEHGYSCADVFIKRIVASEGDWVEVCDGKLLVNDTVQAEDFVLEPIDYEMEPMFVPEGYVFVLGDNRNKSFDSHNWGPLPIKNIIGRSVFRYWPPSKVSDIIHHEQVSQKRAVDVS

SEQ ID NO: 87210 - DNA, 1731 bp, Arabidopsis thaliana
  misc_feature (1)..(1731): Ceres Seq. ID no. 12699159
  misc_feature: MA Experiment ID: 20000265 Result: Up-regulated in Transcription
  misc_feature: MA Experiment 20000265 PARAMETER Experiment Name: At_Open_Flower_P Parameter: Age (day) Value: 21
  misc_feature: MA Experiment 20000265 PARAMETER Experiment Name: At_Open_Flower_P Parameter: Plant Line Value: WS
  misc_feature: MA Experiment 20000265 PARAMETER Experiment Name: At_Open_Flower_P Parameter: Tissue Value: Closed Flower vs. Whole Plant
  misc_feature: MA Experiment ID: 20000443 Result: Up-regulated in Transcription
  misc_feature: MA Experiment 20000443 PARAMETER Experiment Name: At_1uM_BR-BRZ__P Parameter: Tissue Value: Shoot Apices
  misc_feature: MA Experiment 20000443 PARAMETER Experiment Name: At_1uM_BR-BRZ__P Parameter: Treatment Value: 1uM BRZ vs. No Treatment
atggctgttggttcgatgaatgtcgaagaaggcactaaagcttttcctgcgaagctgacaggtcaagtctttctttgctgtgtcattgctgctgttggtggtctcatgtttggttacgacatcggaatctcaggaggtgtaacgagtatggacactttcttgttagattttttcccacacgtgtacgagaagaaacacagagtacacgaaaacaactactgcaaattcgatgaccagctcttgcagttgttcacttcctcactctacttggctggaatcttcgctagctttatttcttcctatgtttctagggcttttggaagaaaacccacaatcatgctcgcctccatcttcttcctcgtcggtgctatcctcaacttatctgcccaagaactcggcatgttgatcggtggtcgtattcttctcggctttggtatcggtttcggtaaccaggtatcatgtcaaaccctcaaaacgtttttctatctcagtggattcctctgttttcatctagggttcctctgttttcacctagggtttcctctgtttttatgccttaactcatcgtgttttgttttgttttgtttattaacattgaaagcaatacttttgcagaccgttccattgttcatctcagagattgctccggcgagatacagaggaggactaaacgtcatgttccagtttctcatcaccattggaatcttagcagcaagttatgtgaactacttaacttccacgttgaaaaacggctggagatattctctcggtggtgctgctgtccccgctttaatcctcttgataggatccttctttatccacgagactccggctagtctcatcgagcgcggtaaagacgaaaaggggaagcaagtcctgaggaagatcagaggcattgaagatattgagctcgagttcaatgagatcaaatacgcaacagaggtagcgacaaaggtgaaaagcccattcaaagaactcttcaccaagagtgagaacagaccaccattggtgtgtggaacgttacttcagttctttcaacagttcaccggtatcaacgtggttatgttctacgctccagttttgttccagacgatgggtagtggtgacaacgcttctctgatctctactgttgtcaccaatggtgtgaacgcaatcgctacagttatctctcttttagtggttgatttcgccggtagaaggtgtcttctgatggaaggagctctccagatgaccgctacacaggttagtttttttttttttttttttgcttgtgtcacatggtacacatattcttacttggataacaagctaacttatgacaattggaggcattctcttagctcacttgaagctagttggtcctattactggccatgccgtgcgctgattgtattgatcctcatctgcgtatacgtgtctggatttgcatggtcttggggtccattgggatggcttgttccgtctgagatctaccctcttgaagtgagaaatgctggttacttctgtgcggtggcgatgaacatggtctgcactttcatcattggacagttcttcttgtctgctctctgcagattcagatcattattgttcttcttcttcggaataatgaacattatcatgggactatttgtcgtgttttttcttcccgaaaccaaaggtgttcctattgaggaaatggccgagaagcgttggaaaacgcacccgcgttggaagaaatatttcaaagactag

SEQ ID NO: 87211 - protein, 576 aa, Arabidopsis thaliana
  peptide (1)..(576): Ceres Seq. ID no. 12699160
  misc_feature (26)..(563): Pfam Name: Sugar (and other) transporter Pfam Description: Sugar (and other) transporter
  misc_feature (1)..(576): Homolog of NCBI NO: 25308948 NR Description: protein F22G5.32 [imported] - Arabidopsis >gi|8778557|gb|AAF79565.1|AC022464_23 F22G5.32 [Arabidopsis
  misc_feature (205)..(416): Homolog of NCBI NO: 15222376 NR Description: hexose transporter, putative; protein id:
  misc_feature (1)..(151): Homolog of NCBI NO: 15222376 NR Description: hexose transporter, putative; protein id:
  misc_feature (482)..(576): Homolog of NCBI NO: 15222376 NR Description: hexose transporter, putative; protein id:
  misc_feature (205)..(415): Homolog of NCBI NO: 15240279 NR Description: hexose transporter - like protein; protein id: [Arabidopsis thaliana] >gi|7446740|pir||T01844 probable sugar
  misc_feature (12)..(151): Homolog of NCBI NO: 15240279 NR Description: hexose transporter - like protein; protein id: [Arabidopsis thaliana] >gi|7446740|pir||T01844 probable sugar
  misc_feature (460)..(573): Homolog of NCBI NO: 15240279 NR Description: hexose transporter - like protein; protein id: [Arabidopsis thaliana] >gi|7446740|pir||T01844 probable sugar
  misc_feature (205)..(415): Homolog of NCBI NO: 15230590 NR Description: putative hexose transporter; protein id: [Arabidopsis thaliana] >gi|6671961|gb|AAF23220.1|AC013454_7 hexose transporter [Arabidopsis thaliana]
  misc_feature (1)..(151): Homolog of NCBI NO: 15230590 NR Description: putative hexose transporter; protein id: [Arabidopsis thaliana] >gi|6671961|gb|AAF23220.1|AC013454_7 hexose transporter [Arabidopsis thaliana]
  misc_feature (460)..(573): Homolog of NCBI NO: 15230590 NR Description: putative hexose transporter; protein id: [Arabidopsis thaliana] >gi|6671961|gb|AAF23220.1|AC013454_7 hexose transporter [Arabidopsis thaliana]
MAVGSMNVEEGTKAFPAKLTGQVFLCCVIAAVGGLMFGYDIGISGGVTSMDTFLLDFFPHVYEKKHRVHENNYCKFDDQLLQLFTSSLYLAGIFASFISSYVSRAFGRKPTIMLASIFFLVGAILNLSAQELGMLIGGRILLGFGIGFGNQVSCQTLKTFFYLSGFLCFHLGFLCFHLGFPLFLCLNSSCFVLFCLLTLKAILLQTVPLFISEIAPARYRGGLNVMFQFLITIGILAASYVNYLTSTLKNGWRYSLGGAAVPALILLIGSFFIHETPASLIERGKDEKGKQVLRKIRGIEDIELEFNEIKYATEVATKVKSPFKELFTKSENRPPLVCGTLLQFFQQFTGINVVMFYAPVLFQTMGSGDNASLISTVVTNGVNAIATVISLLVVDFAGRRCLLMEGALQMTATQVSFFFFFFACVTWYTYSYLDNKLTYDNWRHSLSSLEASWSYYWPCRALIVLILICVYVSGFAWSWGPLGWLVPSEIYPLEVRNAGYFCAVAMNMVCTFIIGQFFLSALCRFRSLLFFFFGIMNIIMGLFVVFFLPETKGVPIEEMAEKRWKTHPRWKKYFKD

SEQ ID NO: 87212 - protein, 571 aa, Arabidopsis thaliana
  peptide (1)..(571): Ceres Seq. ID no. 12699161
  misc_feature (21)..(558): Pfam Name: Sugar (and other) transporter Pfam Description: Sugar (and other) transporter
  misc_feature (1)..(571): Homolog of NCBI NO: 25308948 NR Description: protein F22G5.32 [imported] - Arabidopsis >gi|8778557|gb|AAF79565.1|AC022464_23 F22G5.32 [Arabidopsis
  misc_feature (200)..(411): Homolog of NCBI NO: 15222376 NR Description: hexose transporter, putative; protein id:
  misc_feature (1)..(146): Homolog of NCBI NO: 15222376 NR Description: hexose transporter, putative; protein id:
  misc_feature (477)..(571): Homolog of NCBI NO: 15222376 NR Description: hexose transporter, putative; protein id:
  misc_feature (200)..(410): Homolog of NCBI NO: 15240279 NR Description: hexose transporter - like protein; protein id: [Arabidopsis thaliana] >gi|7446740|pir||T01844 probable sugar
  misc_feature (7)..(146): Homolog of NCBI NO: 15240279 NR Description: hexose transporter - like protein; protein id: [Arabidopsis thaliana] >gi|7446740|pir||T01844 probable sugar
  misc_feature (455)..(568): Homolog of NCBI NO: 15240279 NR Description: hexose transporter - like protein; protein id: [Arabidopsis thaliana] >gi|7446740|pir||T01844 probable sugar
  misc_feature (200)..(410): Homolog of NCBI NO: 15230590 NR Description: putative hexose transporter; protein id: [Arabidopsis thaliana] >gi|6671961|gb|AAF23220.1|AC013454_7 hexose transporter [Arabidopsis thaliana]
  misc_feature (1)..(146): Homolog of NCBI NO: 15230590 NR Description: putative hexose transporter; protein id: [Arabidopsis thaliana] >gi|6671961|gb|AAF23220.1|AC013454_7 hexose transporter [Arabidopsis thaliana]
  misc_feature (455)..(568): Homolog of NCBI NO: 15230590 NR Description: putative hexose transporter; protein id: [Arabidopsis thaliana] >gi|6671961|gb|AAF23220.1|AC013454_7 hexose transporter [Arabidopsis thaliana]
MNVEEGTKAFPAKLTGQVFLCCVIAAVGGLMFGYDIGISGGVTSMDTFLLDFFPHVYEKKHRVHENNYCKFDDQLLQLFTSSLYLAGIFASFISSYVSRAFGRKPTIMLASIFFLVGAILNLSAQELGMLIGGRILLGFGIGFGNQVSCQTLKTFFYLSGFLCFHLGFLCFHLGFPLFLCLNSSCFVLFCLLTLKAILLQTVPLFISEIAPARYRGGLNVMFQFLITIGILAASYVNYLTSTLKNGWRYSLGGAAVPALILLIGSFFIHETPASLIERGKDEKGKQVLRKIRGIEDIELEFNEIKYATEVATKVKSPFKELFTKSENRPPLVCGTLLQFFQQFTGINVVMFYAPVLFQTMGSGDNASLISTVVTNGVNAIATVISLLVVDFAGRRCLLMEGALQMTATQVSFFFFFFACVTWYTYSYLDNKLTYDNWRHSLSSLEASWSYYWPCRALIVLILICVYVSGFAWSWGPLGWLVPSEIYPLEVRNAGYFCAVAMNMVCTFIIGQFFLSALCRFRSLLFFFFGIMNIIMGLFVVFFLPETKGVPIEEMAEKRWKTHPRWKKYFKD

SEQ ID NO: 87213 - protein, 541 aa, Arabidopsis thaliana
  peptide (1)..(541): Ceres Seq. ID no. 12699162
  misc_feature (1)..(528): Pfam Name: Sugar (and other) transporter Pfam Description: Sugar (and other) transporter
  misc_feature (1)..(541): Homolog of NCBI NO: 25308948 NR Description: protein F22G5.32 [imported] - Arabidopsis >gi|8778557|gb|AAF79565.1|AC022464_23 F22G5.32 [Arabidopsis
  misc_feature (170)..(381): Homolog of NCBI NO: 15222376 NR Description: hexose transporter, putative; protein id:
  misc_feature (1)..(116): Homolog of NCBI NO: 15222376 NR Description: hexose transporter, putative; protein id:
  misc_feature (447)..(541): Homolog of NCBI NO: 15222376 NR Description: hexose transporter, putative; protein id:
  misc_feature (170)..(380): Homolog of NCBI NO: 15240279 NR Description: hexose transporter - like protein; protein id: [Arabidopsis thaliana] >gi|7446740|pir||T01844 probable sugar
  misc_feature (1)..(116): Homolog of NCBI NO: 15240279 NR Description: hexose transporter - like protein; protein id: [Arabidopsis thaliana] >gi|7446740|pir||T01844 probable sugar
  misc_feature (425)..(538): Homolog of NCBI NO: 15240279 NR Description: hexose transporter - like protein; protein id: [Arabidopsis thaliana] >gi|7446740|pir||T01844 probable sugar
  misc_feature (170)..(380): Homolog of NCBI NO: 15230590 NR Description: putative hexose transporter; protein id: [Arabidopsis thaliana] >gi|6671961|gb|AAF23220.1|AC013454_7 hexose transporter [Arabidopsis thaliana]
  misc_feature (1)..(116): Homolog of NCBI NO: 15230590 NR Description: putative hexose transporter; protein id: [Arabidopsis thaliana] >gi|6671961|gb|AAF23220.1|AC013454_7 hexose transporter [Arabidopsis thaliana]
  misc_feature (425)..(538): Homolog of NCBI NO: 15230590 NR Description: putative hexose transporter; protein id: [Arabidopsis thaliana] >gi|6671961|gb|AAF23220.1|AC013454_7 hexose transporter [Arabidopsis thaliana]
MFGYDIGISGGVTSMDTFLLDFFPHVYEKKHRVHENNYCKFDDQLLQLFTSSLYLAGIFASFISSYVSRAFGRKPTIMLASIFFLVGAILNLSAQELGMLIGGRILLGFGIGFGNQVSCQTLKTFFYLSGFLCFHLGFLCFHLGFPLFLCLNSSCFVLFCLLTLKAILLQTVPLFISEIAPARYRGGLNVMFQFLITIGILAASYVNYLTSTLKNGWRYSLGGAAVPALILLIGSFFIHETPASLIERGKDEKGKQVLRKIRGIEDIELEFNEIKYATEVATKVKSPFKELFTKSENRPPLVCGTLLQFFQQFTGINVVMFYAPVLFQTMGSGDNASLISTVVTNGVNAIATVISLLVVDFAGRRCLLMEGALQMTATQVSFFFFFFACVTWYTYSYLDNKLTYDNWRHSLSSLEASWSYYWPCRALIVLILICVYVSGFAWSWGPLGWLVPSEIYPLEVRNAGYFCAVAMNMVCTFIIGQFFLSALCRFRSLLFFFFGIMNIIMGLFVVFFLPETKGVPIEEMAEKRWKTHPRWKKYFKD

SEQ ID NO: 87214 - DNA, 1533 bp, Arabidopsis thaliana
  misc_feature (1)..(1533): Ceres Seq. ID no. 12699183
  misc_feature: MA Experiment ID: 108462 Result: Up-regulated in Transcription
  misc_feature: MA Experiment 108462 PARAMETER Experiment Name: At_Germinating_Seeds_cDNA_P Parameter: Age (day) Value: 2 vs. 0
  misc_feature: MA Experiment 108462 PARAMETER Experiment Name: At_Germinating_Seeds_cDNA_P Parameter: Tissue Value: Germinating Seeds
  misc_feature: MA Experiment ID: 108464 Result: Up-regulated in Transcription
  misc_feature: MA Experiment 108464 PARAMETER Experiment Name: At_Germinating_Seeds_cDNA_P Parameter: Age (day) Value: 4 vs. 0
  misc_feature: MA Experiment 108464 PARAMETER Experiment Name: At_Germinating_Seeds_cDNA_P Parameter: Tissue Value: Germinating Seeds
  misc_feature: MA Experiment ID: 20000069 Result: Down-regulated in Transcription
  misc_feature: MA Experiment 20000069 PARAMETER Experiment Name: At_100uM_ABA_Mutants_cDNA_P Parameter: Plant Line Value: CS23
  misc_feature: MA Experiment 20000069 PARAMETER Experiment Name: At_100uM_ABA_Mutants_cDNA_P Parameter: Timepoint (hr) Value: 6
  misc_feature: MA Experiment 20000069 PARAMETER Experiment Name: At_100uM_ABA_Mutants_cDNA_P Parameter: Tissue Value: Aerial
  misc_feature: MA Experiment 20000069 PARAMETER Experiment Name: At_100uM_ABA_Mutants_cDNA_P Parameter: Treatment Value: 100uM ABA vs. No Treatment
  misc_feature: MA Experiment ID: 20000070 Result: Down-regulated in Transcription
  misc_feature: MA Experiment 20000070 PARAMETER Experiment Name: At_100uM_ABA_Mutants_cDNA_P Parameter: Plant Line Value: CS24
  misc_feature: MA Experiment 20000070 PARAMETER Experiment Name: At_100uM_ABA_Mutants_cDNA_P Parameter: Timepoint (hr) Value: 6
  misc_feature: MA Experiment 20000070 PARAMETER Experiment Name: At_100uM_ABA_Mutants_cDNA_P Parameter: Tissue Value: Aerial
  misc_feature: MA Experiment 20000070 PARAMETER Experiment Name: At_100uM_ABA_Mutants_cDNA_P Parameter: Treatment Value: 100uM ABA vs. No Treatment
  misc_feature: MA Experiment ID: 20000071 Result: Down-regulated in Transcription
  misc_feature: MA Experiment 20000071 PARAMETER Experiment Name: At_100uM_ABA_Mutants_cDNA_P Parameter: Plant Line Value: CS8104
  misc_feature: MA Experiment 20000071 PARAMETER Experiment Name: At_100uM_ABA_Mutants_cDNA_P Parameter: Timepoint (hr) Value: 6
  misc_feature: MA Experiment 20000071 PARAMETER Experiment Name: At_100uM_ABA_Mutants_cDNA_P Parameter: Tissue Value: Aerial
  misc_feature: MA Experiment 20000071 PARAMETER Experiment Name: At_100uM_ABA_Mutants_cDNA_P Parameter: Treatment Value: 100uM ABA vs. No Treatment
  misc_feature: MA Experiment ID: 20000087 Result: Down-regulated in Transcription
  misc_feature: MA Experiment 20000087 PARAMETER Experiment Name: At_100uM_ABA_Mutants_cDNA_P Parameter: Plant Line Value: WS
  misc_feature: MA Experiment 20000087 PARAMETER Experiment Name: At_100uM_ABA_Mutants_cDNA_P Parameter: Timepoint (hr) Value: 6
  misc_feature: MA Experiment 20000087 PARAMETER Experiment Name: At_100uM_ABA_Mutants_cDNA_P Parameter: Tissue Value: Aerial
  misc_feature: MA Experiment 20000087 PARAMETER Experiment Name: At_100uM_ABA_Mutants_cDNA_P Parameter: Treatment Value: 100uM ABA vs. No Treatment
  misc_feature: MA Experiment ID: 20000089 Result: Down-regulated in Transcription
  misc_feature: MA Experiment ID: 20000117 Result: Down-regulated in Transcription
  misc_feature: MA Experiment 20000117 PARAMETER Experiment Name: At_100uM_ABA_Mutants_cDNA_P Parameter: Plant Line Value: Columbia
  misc_feature: MA Experiment 20000117 PARAMETER Experiment Name: At_100uM_ABA_Mutants_cDNA_P Parameter: Timepoint (hr) Value: 6
  misc_feature: MA Experiment 20000117 PARAMETER Experiment Name: At_100uM_ABA_Mutants_cDNA_P Parameter: Tissue Value: Aerial
  misc_feature: MA Experiment 20000117 PARAMETER Experiment Name: At_100uM_ABA_Mutants_cDNA_P Parameter: Treatment Value: 100uM ABA vs. No Treatment
  misc_feature: MA Experiment ID: 20000179 Result: Up-regulated in Transcription
  misc_feature: MA Experiment 20000179 PARAMETER Experiment Name: At_Germinating_Seeds_P Parameter: Age (hr) Value: 6 vs. 0
  misc_feature: MA Experiment 20000179 PARAMETER Experiment Name: At_Germinating_Seeds_P Parameter: Tissue Value: Germinating Seeds
  misc_feature: MA Experiment ID: 20000180 Result: Up-regulated in Transcription
  misc_feature: MA Experiment 20000180 PARAMETER Experiment Name: At_Germinating_Seeds_P Parameter: Age (hr) Value: 24 vs. 0
  misc_feature: MA Experiment 20000180 PARAMETER Experiment Name: At_Germinating_Seeds_P Parameter: Tissue Value: Germinating Seeds
  misc_feature: MA Experiment ID: 20000182 Result: Down-regulated in Transcription
  misc_feature: MA Experiment 20000182 PARAMETER Experiment Name: At_2mM_SA_P Parameter: Age (day) Value: 14
  misc_feature: MA Experiment 20000182 PARAMETER Experiment Name: At_2mM_SA_P Parameter: Organism Value: A. thaliana
  misc_feature: MA Experiment 20000182 PARAMETER Experiment Name: At_2mM_SA_P Parameter: Plant Line Value: WS
  misc_feature: MA Experiment 20000182 PARAMETER Experiment Name: At_2mM_SA_P Parameter: Timepoint (hr) Value: 6
  misc_feature: MA Experiment 20000182 PARAMETER Experiment Name: At_2mM_SA_P Parameter: Tissue Value: Aerial
  misc_feature: MA Experiment 20000182 PARAMETER Experiment Name: At_2mM_SA_P Parameter: Treatment Value: 2mM SA vs. No Treatment
  misc_feature: MA Experiment ID: 20000184 Result: Down-regulated in Transcription
  misc_feature: MA Experiment 20000184 PARAMETER Experiment Name: At_Shoots__P Parameter: Age (day) Value: 7
  misc_feature: MA Experiment 20000184 PARAMETER Experiment Name: At_Shoots__P Parameter: Tissue Value: Shoots vs. Whole Plant
  misc_feature: MA Experiment ID: 20000185 Result: Down-regulated in Transcription
  misc_feature: MA Experiment 20000185 PARAMETER Experiment Name: At_Roots__P Parameter: Age (day) Value: 7 vs. 21
  misc_feature: MA Experiment 20000185 PARAMETER Experiment Name: At_Roots__P Parameter: Organism Value: A. thaliana
  misc_feature: MA Experiment 20000185 PARAMETER Experiment Name: At_Roots__P Parameter: Tissue Value: Roots vs. Whole Plant
  misc_feature: MA Experiment ID: 20000439 Result: Down-regulated in Transcription
  misc_feature: MA Experiment 20000439 PARAMETER Experiment Name: At_Roots__P Parameter: Age (day) Value: 14 vs. 21
  misc_feature: MA Experiment 20000439 PARAMETER Experiment Name: At_Roots__P Parameter: Organism Value: A. thaliana
  misc_feature: MA Experiment 20000439 PARAMETER Experiment Name: At_Roots__P Parameter: Tissue Value: Roots vs. Whole Plant
  misc_feature: MA Experiment ID: 20001248 Result: Down-regulated in Transcription
  misc_feature: MA Experiment 20001248 PARAMETER Experiment Name: At_Far-red-induction_P Parameter: Age (day) Value: 7
  misc_feature: MA Experiment 20001248 PARAMETER Experiment Name: At_Far-red-induction_P Parameter: Light Value: Far-red vs. White
  misc_feature: MA Experiment 20001248 PARAMETER Experiment Name: At_Far-red-induction_P Parameter: Organism Value: A. thaliana
  misc_feature: MA Experiment 20001248 PARAMETER Experiment Name: At_Far-red-induction_P Parameter: Plant Line Value: Columbia
  misc_feature: MA Experiment 20001248 PARAMETER Experiment Name: At_Far-red-induction_P Parameter: Timepoint (hr) Value: 4
  misc_feature: MA Experiment 20001248 PARAMETER Experiment Name: At_Far-red-induction_P Parameter: Tissue Value: Whole Plant
  misc_feature: MA Experiment ID: 20001905 Result: Down-regulated in Transcription
  misc_feature: MA Experiment 20001905 PARAMETER Experiment Name: At_Drought_Reproduction_P Parameter: Age (day) Value: 40
  misc_feature: MA Experiment 20001905 PARAMETER Experiment Name: At_Drought_Reproduction_P Parameter: Organism Value: A. thaliana
  misc_feature: MA Experiment 20001905 PARAMETER Experiment Name: At_Drought_Reproduction_P Parameter: Plant Line Value: WS
  misc_feature: MA Experiment 20001905 PARAMETER Experiment Name: At_Drought_Reproduction_P Parameter: Timepoint (day) Value: 10
  misc_feature: MA Experiment 20001905 PARAMETER Experiment Name: At_Drought_Reproduction_P Parameter: Tissue Value: Rosettes
  misc_feature: MA Experiment 20001905 PARAMETER Experiment Name: At_Drought_Reproduction_P Parameter: Treatment Value: Drought vs. No Drought
atggatattaacaggtggagtcttcaaggtatgactgctcttgtaaccggtggatcaaagggaattgggtatgcaatagtggaggaacttgtaggctttggtgcaagagttcacatctgtgacatagacgaaactctgctaaacgaatgcttaagtggatggcatgcaaaagggtttgaagtgagtggttcaatctgtgatgtttcctctcgacctcagagagtgcaattgatgcagactgtttcttctctatttggtgccaaactcaacatccttataaacaatgttggcaagtacatattaaagccaactttagaaagtacagctgaagatttctcaagtttaatggctaccaatttggaatctgcttactacatctcccaattggcacatcctttacttaaagcctcgggaaatgggaatatcgtgtttatttcctcggtaacgggggttgtctctggcacatctaccatatatggtgtaacaaaaggagccttgaatcaactggcaagagatttggcgtgtgaatgggccagtgacaacataagggctaactctgtagctccttgggtcactgcaacttctcttgtccaaaaatatcttgaagacgagatatttgcggaagctatgttctcaagaaccccattaggacgtgcatgtgagccacgtgaggttgcgtcgctggtgacatttctctgtctccctgcagcttcttatataacaggacaaaccatttgtattgatgagcaaagccagagatggagccttaaggccaagaccgtacttgtaaccggtggaacaaaaggcatcgggcatgctatagtagaggaatttgcaggatttggagcagtaatacatacttgtgctagaaacgaatatgagcttaacgagtgtttaagcaaatggcaaaagaagggttttcaagtcactggttcggtctgtgacgcatctttgagaccagagagagaaaagctaatgcagactgtgtcttcaatgtttggtggaaagctcgatatcctcataaacaatttgggagcgattcggtcaaaaccaacgctggattacacagcagaagatttctcgtttcatatttcgacaaacttagaatctgcttatcatctgagccagcttgcgcatcctctgcttaaggcttcaggatgtgggaacataattttcatgtcctctattgctggagttgtatctgctagtgtcggctccatctactctgcaacgaaaggggcattgaatcagctagcaaggaacttggcatgtgagtgggctagtgatggcattagggctaatgctgtggctcctgcagtcatcgcaactcctttggctgaagctgtgtatgatgatgagttcaagaaagtggtgatatcaagaaagccgttggggcgtttcggggagcctgaagaagtgtcctcgcttgtggcttttctatgtatgcctgcagcttcttatataactggtcaaaccatttgtgtcgatggaggtctcactgtcaatggcttctcctatcagccacaaggttaa

SEQ ID NO: 87215 - protein, 510 aa, Arabidopsis thaliana
  peptide (1)..(510): Ceres Seq. ID no. 12699184
  misc_feature (1)..(510): Homolog of NCBI NO: 25406975 NR Description: protein F22G5.20 [imported] - Arabidopsis >gi|8778545|gb|AAF79553.1|AC022464_11 F22G5.20 [Arabidopsis
  misc_feature (249)..(510): Homolog of NCBI NO: 15222399 NR Description: tropinone reductase-I, putative; protein id: supported by cDNA: gi_13605590, supported by cDNA: gi_15777866 thaliana] >gi|13605591|gb|AAK32789.1|AF361621_1
  misc_feature (1)..(248): Homolog of NCBI NO: 15222400 NR Description: tropinone reductase-I, putative; protein id:
  misc_feature (252)..(509): Homolog of NCBI NO: 30684202 NR Description: short-chain dehydrogenase/reductase family [Arabidopsis thaliana] >gi|25283131|pir||B84695 probable
  misc_feature (252)..(508): Homolog of NCBI NO: 15227073 NR Description: putative tropinone reductase; protein id: [Arabidopsis thaliana] >gi|25283130|pir||A84695 probable
  misc_feature (252)..(509): Homolog of NCBI NO: 15227071 NR Description: putative tropinone reductase; protein id: [Arabidopsis thaliana] >gi|25283128|pir||G84694 probable
  misc_feature (252)..(509): Homolog of NCBI NO: 15224550 NR Description: putative tropinone reductase; protein id: [Arabidopsis thaliana] >gi|25283135|pir||C84711 probable
  misc_feature (254)..(508): Homolog of NCBI NO: 15227072 NR Description: putative tropinone reductase; protein id: supported by cDNA: 1637. [Arabidopsis thaliana]
  misc_feature (254)..(508): Homolog of NCBI NO: 15529236 NR Description: At2g29320/F16P2.30 [Arabidopsis thaliana]
  misc_feature (254)..(508): Homolog of NCBI NO: 21553753 NR Description: putative tropinone reductase [Arabidopsis
MDINRWSLQGMTALVTGGSKGIGYAIVEELVGFGARVHICDIDETLLNECLSGWHAKGFEVSGSICDVSSRPQRVQLMQTVSSLFGAKLNILINNVGKYILKPTLESTAEDFSSLMATNLESAYYISQLAHPLLKASGNGNIVFISSVTGVVSGTSTIYGVTKGALNQLARDLACEWASDNIRANSVAPWVTATSLVQKYLEDEIFAEAMFSRTPLGRACEPREVASLVTFLCLPAASYITGQTICIDEQSQRWSLKAKTVLVTGGTKGIGHAIVEEFAGFGAVIHTCARNEYELNECLSKWQKKGFQVTGSVCDASLRPEREKLMQTVSSMFGGKLDILINNLGAIRSKPTLDYTAEDFSFHISTNLESAYHLSQLAHPLLKASGCGNIIFMSSIAGVVSASVGSIYSATKGALNQLARNLACEWASDGIRANAVAPAVIATPLAEAVYDDEFKKVVISRKPLGRFGEPEEVSSLVAFLCMPAASYITGQTICVDGGLTVNGFSYQPQG

SEQ ID NO: 87216 - protein, 500 aa, Arabidopsis thaliana
  peptide (1)..(500): Ceres Seq. ID no. 12699185
  misc_feature (1)..(500): Homolog of NCBI NO: 25406975 NR Description: protein F22G5.20 [imported] - Arabidopsis >gi|8778545|gb|AAF79553.1|AC022464_11 F22G5.20 [Arabidopsis
  misc_feature (239)..(500): Homolog of NCBI NO: 15222399 NR Description: tropinone reductase-I, putative; protein id: supported by cDNA: gi_13605590, supported by cDNA: gi_15777866 thaliana] >gi|13605591|gb|AAK32789.1|AF361621_1
  misc_feature (1)..(238): Homolog of NCBI NO: 15222400 NR Description: tropinone reductase-I, putative; protein id:
  misc_feature (242)..(499): Homolog of NCBI NO: 30684202 NR Description: short-chain dehydrogenase/reductase family [Arabidopsis thaliana] >gi|25283131|pir||B84695 probable
  misc_feature (242)..(498): Homolog of NCBI NO: 15227073 NR Description: putative tropinone reductase; protein id: [Arabidopsis thaliana] >gi|25283130|pir||A84695 probable
  misc_feature (242)..(499): Homolog of NCBI NO: 15227071 NR Description: putative tropinone reductase; protein id: [Arabidopsis thaliana] >gi|25283128|pir||G84694 probable
  misc_feature (242)..(499): Homolog of NCBI NO: 15224550 NR Description: putative tropinone reductase; protein id: [Arabidopsis thaliana] >gi|25283135|pir||C84711 probable
  misc_feature (244)..(498): Homolog of NCBI NO: 15227072 NR Description: putative tropinone reductase; protein id: supported by cDNA: 1637. [Arabidopsis thaliana]
  misc_feature (244)..(498): Homolog of NCBI NO: 15529236 NR Description: At2g29320/F16P2.30 [Arabidopsis thaliana]
  misc_feature (244)..(498): Homolog of NCBI NO: 21553753 NR Description: putative tropinone reductase [Arabidopsis
MTALVTGGSKGIGYAIVEELVGFGARVHICDIDETLLNECLSGWHAKGFEVSGSICDVSSRPQRVQLMQTVSSLFGAKLNILINNVGKYILKPTLESTAEDFSSLMATNLESAYYISQLAHPLLKASGNGNIVFISSVTGVVSGTSTIYGVTKGALNQLARDLACEWASDNIRANSVAPWVTATSLVQKYLEDEIFAEAMFSRTPLGRACEPREVASLVTFLCLPAASYITGQTICIDEQSQRWSLKAKTVLVTGGTKGIGHAIVEEFAGFGAVIHTCARNEYELNECLSKWQKKGFQVTGSVCDASLRPEREKLMQTVSSMFGGKLDILINNLGAIRSKPTLDYTAEDFSFHISTNLESAYHLSQLAHPLLKASGCGNIIFMSSIAGVVSASVGSIYSATKGALNQLARNLACEWASDGIRANAVAPAVIATPLAEAVYDDEFKKVVISRKPLGRFGEPEEVSSLVAFLCMPAASYITGQTICVDGGLTVNGFSYQPQG

SEQ ID NO: 87217 - protein, 433 aa, Arabidopsis thaliana
  peptide (1)..(433): Ceres Seq. ID no. 12699186
  misc_feature (1)..(433): Homolog of NCBI NO: 25406975 NR Description: protein F22G5.20 [imported] - Arabidopsis >gi|8778545|gb|AAF79553.1|AC022464_11 F22G5.20 [Arabidopsis
  misc_feature (172)..(433): Homolog of NCBI NO: 15222399 NR Description: tropinone reductase-I, putative; protein id: supported by cDNA: gi_13605590, supported by cDNA: gi_15777866 thaliana] >gi|13605591|gb|AAK32789.1|AF361621_1
  misc_feature (1)..(171): Homolog of NCBI NO: 15222400 NR Description: tropinone reductase-I, putative; protein id:
  misc_feature (175)..(432): Homolog of NCBI NO: 30684202 NR Description: short-chain dehydrogenase/reductase family [Arabidopsis thaliana] >gi|25283131|pir||B84695 probable
  misc_feature (175)..(431): Homolog of NCBI NO: 15227073 NR Description: putative tropinone reductase; protein id: [Arabidopsis thaliana] >gi|25283130|pir||A84695 probable
  misc_feature (175)..(432): Homolog of NCBI NO: 15227071 NR Description: putative tropinone reductase; protein id: [Arabidopsis thaliana] >gi|25283128|pir||G84694 probable
  misc_feature (175)..(432): Homolog of NCBI NO: 15224550 NR Description: putative tropinone reductase; protein id: [Arabidopsis thaliana] >gi|25283135|pir||C84711 probable
  misc_feature (177)..(431): Homolog of NCBI NO: 15227072 NR Description: putative tropinone reductase; protein id: supported by cDNA: 1637. [Arabidopsis thaliana]
  misc_feature (177)..(431): Homolog of NCBI NO: 15529236 NR Description: At2g29320/F16P2.30 [Arabidopsis thaliana]
  misc_feature (177)..(431): Homolog of NCBI NO: 21553753 NR Description: putative tropinone reductase [Arabidopsis
MQTVSSLFGAKLNILINNVGKYILKPTLESTAEDFSSLMATNLESAYYISQLAHPLLKASGNGNIVFISSVTGVVSGTSTIYGVTKGALNQLARDLACEWASDNIRANSVAPWVTATSLVQKYLEDEIFAEAMFSRTPLGRACEPREVASLVTFLCLPAASYITGQTICIDEQSQRWSLKAKTVLVTGGTKGIGHAIVEEFAGFGAVIHTCARNEYELNECLSKWQKKGFQVTGSVCDASLRPEREKLMQTVSSMFGGKLDILINNLGAIRSKPTLDYTAEDFSFHISTNLESAYHLSQLAHPLLKASGCGNIIFMSSIAGVVSASVGSIYSATKGALNQLARNLACEWASDGIRANAVAPAVIATPLAEAVYDDEFKKVVISRKPLGRFGEPEEVSSLVAFLCMPAASYITGQTICVDGGLTVNGFSYQPQG

SEQ ID NO: 87218 - DNA, 1458 bp, Arabidopsis thaliana
  misc_feature (1)..(1458): Ceres Seq. ID no. 12699191
  misc_feature: MA Experiment ID: 20000437 Result: Up-regulated in Transcription
  misc_feature: MA Experiment 20000437 PARAMETER Experiment Name: At_Drought_P Parameter: Age (day) Value: 8
  misc_feature: MA Experiment 20000437 PARAMETER Experiment Name: At_Drought_P Parameter: Organism Value: A. thaliana
  misc_feature: MA Experiment 20000437 PARAMETER Experiment Name: At_Drought_P Parameter: Plant Line Value: WS
  misc_feature: MA Experiment 20000437 PARAMETER Experiment Name: At_Drought_P Parameter: Timepoint (hr) Value: 24
  misc_feature: MA Experiment 20000437 PARAMETER Experiment Name: At_Drought_P Parameter: Tissue Value: Whole Plant
  misc_feature: MA Experiment 20000437 PARAMETER Experiment Name: At_Drought_P Parameter: Treatment Value: Drought vs. No Drought
  misc_feature: MA Experiment ID: 20000495 Result: Up-regulated in Transcription
  misc_feature: MA Experiment 20000495 PARAMETER Experiment Name: At_Guard_Cells_P Parameter: Harvest Date Value: 8/2/2002
  misc_feature: MA Experiment 20000495 PARAMETER Experiment Name: At_Guard_Cells_P Parameter: Organism Value: A. thaliana
  misc_feature: MA Experiment 20000495 PARAMETER Experiment Name: At_Guard_Cells_P Parameter: Tissue Value: Guard Cells vs. Leaves
  misc_feature: MA Experiment ID: 20000794 Result: Up-regulated in Transcription
  misc_feature: MA Experiment 20000794 PARAMETER Experiment Name: At_Petals_P Parameter: Age (day) Value: 23-25 days
  misc_feature: MA Experiment 20000794 PARAMETER Experiment Name: At_Petals_P Parameter: Plant Line Value: WS
  misc_feature: MA Experiment 20000794 PARAMETER Experiment Name: At_Petals_P Parameter: Tissue Value: Petals vs. Whole plant
  misc_feature: MA Experiment ID: 20001451 Result: Up-regulated in Transcription
  misc_feature: MA Experiment 20001451 PARAMETER Experiment Name: At_Far-red-induction_P Parameter: Age (day) Value: 7
  misc_feature: MA Experiment 20001451 PARAMETER Experiment Name: At_Far-red-induction_P Parameter: Light Value: Far-red vs. White
  misc_feature: MA Experiment 20001451 PARAMETER Experiment Name: At_Far-red-induction_P Parameter: Organism Value: A. thaliana
  misc_feature: MA Experiment 20001451 PARAMETER Experiment Name: At_Far-red-induction_P Parameter: Plant Line Value: Columbia
  misc_feature: MA Experiment 20001451 PARAMETER Experiment Name: At_Far-red-induction_P Parameter: Timepoint (hr) Value: 24
  misc_feature: MA Experiment 20001451 PARAMETER Experiment Name: At_Far-red-induction_P Parameter: Tissue Value: Whole Plant
  misc_feature: MA Experiment ID: 20001911 Result: Up-regulated in Transcription
  misc_feature: MA Experiment 20001911 PARAMETER Experiment Name: At_Drought_Reproduction_P Parameter: Age (day) Value: 40
  misc_feature: MA Experiment 20001911 PARAMETER Experiment Name: At_Drought_Reproduction_P Parameter: Organism Value: A. thaliana
  misc_feature: MA Experiment 20001911 PARAMETER Experiment Name: At_Drought_Reproduction_P Parameter: Plant Line Value: WS
  misc_feature: MA Experiment 20001911 PARAMETER Experiment Name: At_Drought_Reproduction_P Parameter: Timepoint (day) Value: 10
  misc_feature: MA Experiment 20001911 PARAMETER Experiment Name: At_Drought_Reproduction_P Parameter: Tissue Value: Flowers
  misc_feature: MA Experiment 20001911 PARAMETER Experiment Name: At_Drought_Reproduction_P Parameter: Treatment Value: Drought vs. No Drought
atgggtacaacaacgacaacaagcgctgtgtatatccatgttatcgaggatgtcgtcaacaaagttcgtgaggagttcattaacaacggaggtcctggcgagagtgttctcagcgagcttcaaggaatttgggagacgaagatgatgcaagccggagtcttgaatggaccaatagagaggtcatcggctcagaagccaacacctggtggtccactgactcatgatttgaatgttccttatgaaggtacagaggagtacgagactcccactgctgaaatgctcttccctcctacaccattgcagactccccttccaacgccgcttcccggtactgctgataactcatccatgtataacatccctaccggctcaagtgattatcccactcctggaactgagaatggagtcaacattgatgttaaagcaagacctagtccttatatgccaccgccttctccgtggacaaatcctagacttgatgtcaatgttgcttatgtggatggccgtgatgagcctgagagaggaaactctaaccagcagtttacgcaggatttatttgtgccatcctctgggaaacgaaaacgtgatgattcttctggacattatcaaaatggtggatctatacctcaacaggatggtgcaggcgatgctatccctgagtatctcgttgatacacctgattggagcacaattttgcaggcaaactttgagtgtgatgcattccgcataacctctattggcgatagaaaggtaccacgagacttcttcagctcatcatcgaagattcctcaggttgatgggccaatgcctgacccttatgatgaaatgctctctacaccaaatatatatagttatcaaggacccagtgaagagtttaacgaggccagaactcctgctccaaacgagatccaaacgagcactcctgttgctgtacaaaacgatatcattgaagatgatgaagagctgttgaacgaagatgatgatgatgacgagttggacgacctagaaagtggcgaggatatgaacacacaacacctggttttagctcaatttgacaaggtaatgactctcctctattcacaggtgacgcgcacaaagagcaggtggaagtgcagtctgaaagacgggatcatgcatataaacgataaggacattctcttcaacaaagtaatctgtgcctcccaaataaggttggagctattctggcagcaggcgagtttgacttctgatcttaacactagcaatgatgcttctaggaaagtccttcaaataccgaccgagagagacatgagtattcatgggaaagtgtactctggttggcttgttgtacaaaaagaaaagttttttctgtcgaagaaggcgtatcaactttcaccttgtttcatgaactcttattgtctttcacgcaatggaaaattaacttcccaaaaactggatcttgcttacagttgtatctag

SEQ ID NO: 87219 - protein, 485 aa, Arabidopsis thaliana
  peptide (1)..(485): Ceres Seq. ID no. 12699192
  misc_feature (1)..(396): Pfam Name: Transcription factor IIA, alpha/beta subunit Pfam Description: Transcription factor IIA, alpha/beta subunit
  misc_feature (1)..(485): Homolog of NCBI NO: 25406978 NR Description: protein F22G5.14 [imported] - Arabidopsis >gi|8778543|gb|AAF79551.1|AC022464_9 F22G5.14 [Arabidopsis
  misc_feature (1)..(174): Homolog of NCBI NO: 1429226 NR Description: TFIIA [Arabidopsis thaliana]
  misc_feature (232)..(389): Homolog of NCBI NO: 1429226 NR Description: TFIIA [Arabidopsis thaliana]
  misc_feature (1)..(354): Homolog of NCBI NO: 30680148 NR Description: transcription factor IIA large subunit thaliana] >gi|30680153|ref|NP_172228.3| transcription factor IIA subunit [Arabidopsis thaliana] >gi|11358887|pir||T51333
  misc_feature (1)..(354): Homolog of NCBI NO: 18390773 NR Description: transcription factor IIA large subunit; protein At1g07470.1, supported by cDNA: 19512., supported by cDNA: supported by cDNA: gi_15146225, supported by cDNA: gi_15983369
  misc_feature (1)..(483): Homolog of NCBI NO: 25406976 NR Description: protein F22G5.18 [imported] - Arabidopsis >gi|8778565|gb|AAF79573.1|AC022464_31 F22G5.18 [Arabidopsis
  misc_feature (163)..(389): Homolog of NCBI NO: 17065294 NR Description: similar to TFIIA [Arabidopsis thaliana]
  misc_feature (87)..(389): Homolog of NCBI NO: 30680148 NR Description: transcription factor IIA large subunit thaliana] >gi|30680153|ref|NP_172228.3| transcription factor IIA subunit [Arabidopsis thaliana] >gi|11358887|pir||T51333
  misc_feature (87)..(389): Homolog of NCBI NO: 18390773 NR Description: transcription factor IIA large subunit; protein At1g07470.1, supported by cDNA: 19512., supported by cDNA: supported by cDNA: gi_15146225, supported by cDNA: gi_15983369
  misc_feature (316)..(389): Homolog of NCBI NO: 15237841 NR Description: putative protein; protein id: At5g59230.1 thaliana] >gi|9759244|dbj|BAB09768.1| gene_id:MNC17.14~unknown
MGTTTTTSAVYIHVIEDVVNKVREEFINNGGPGESVLSELQGIWETKMMQAGVLNGPIERSSAQKPTPGGPLTHDLNVPYEGTEEYETPTAEMLFPPTPLQTPLPTPLPGTADNSSMYNIPTGSSDYPTPGTENGVNIDVKARPSPYMPPPSPWTNPRLDVNVAYVDGRDEPERGNSNQQFTQDLFVPSSGKRKRDDSSGHYQNGGSIPQQDGAGDAIPEYLVDTPDWSTILQANFECDAFRITSIGDRKVPRDFFSSSSKIPQVDGPMPDPYDEMLSTPNIYSYQGPSEEFNEARTPAPNEIQTSTPVAVQNDIIEDDEELLNEDDDDDELDDLESGEDMNTQHLVLAQFDKVMTLLYSQVTRTKSRWKCSLKDGIMHINDKDILFNKVICASQIRLELFWQQASLTSDLNTSNDASRKVLQIPTERDMSIHGKVYSGWLVVQKEKFFLSKKAYQLSPCFMNSYCLSRNGKLTSQKLDLAYSCI

SEQ ID NO: 87220 - protein, 438 aa, Arabidopsis thaliana
  peptide (1)..(438): Ceres Seq. ID no. 12699193
  misc_feature (1)..(349): Pfam Name: Transcription factor IIA, alpha/beta subunit Pfam Description: Transcription factor IIA, alpha/beta subunit
  misc_feature (1)..(438): Homolog of NCBI NO: 25406978 NR Description: protein F22G5.14 [imported] - Arabidopsis >gi|8778543|gb|AAF79551.1|AC022464_9 F22G5.14 [Arabidopsis
  misc_feature (1)..(127): Homolog of NCBI NO: 1429226 NR Description: TFIIA [Arabidopsis thaliana]
  misc_feature (185)..(342): Homolog of NCBI NO: 1429226 NR Description: TFIIA [Arabidopsis thaliana]
  misc_feature (1)..(307): Homolog of NCBI NO: 30680148 NR Description: transcription factor IIA large subunit thaliana] >gi|30680153|ref|NP_172228.3| transcription factor IIA subunit [Arabidopsis thaliana] >gi|11358887|pir||T51333
  misc_feature (1)..(307): Homolog of NCBI NO: 18390773 NR Description: transcription factor IIA large subunit; protein At1g07470.1, supported by cDNA: 19512., supported by cDNA: supported by cDNA: gi_15146225, supported by cDNA: gi_15983369
  misc_feature (1)..(436): Homolog of NCBI NO: 25406976 NR Description: protein F22G5.18 [imported] - Arabidopsis >gi|8778565|gb|AAF79573.1|AC022464_31 F22G5.18 [Arabidopsis
  misc_feature (116)..(342): Homolog of NCBI NO: 17065294 NR Description: similar to TFIIA [Arabidopsis thaliana]
  misc_feature (40)..(342): Homolog of NCBI NO: 30680148 NR Description: transcription factor IIA large subunit thaliana] >gi|30680153|ref|NP_172228.3| transcription factor IIA subunit [Arabidopsis thaliana] >gi|11358887|pir||T51333
  misc_feature (40)..(342): Homolog of NCBI NO: 18390773 NR Description: transcription factor IIA large subunit; protein At1g07470.1, supported by cDNA: 19512., supported by cDNA: supported by cDNA: gi_15146225, supported by cDNA: gi_15983369
  misc_feature (269)..(342): Homolog of NCBI NO: 15237841 NR Description: putative protein; protein id: At5g59230.1 thaliana] >gi|9759244|dbj|BAB09768.1| gene_id:MNC17.14~unknown
MMQAGVLNGPIERSSAQKPTPGGPLTHDLNVPYEGTEEYETPTAEMLFPPTPLQTPLPTPLPGTADNSSMYNIPTGSSDYPTPGTENGVNIDVKARPSPYMPPPSPWTNPRLDVNVAYVDGRDEPERGNSNQQFTQDLFVPSSGKRKRDDSSGHYQNGGSIPQQDGAGDAIPEYLVDTPDWSTILQANFECDAFRITSIGDRKVPRDFFSSSSKIPQVDGPMPDPYDEMLSTPNIYSYQGPSEEFNEARTPAPNEIQTSTPVAVQNDIIEDDEELLNEDDDDDELDDLESGEDMNTQHLVLAQFDKVMTLLYSQVTRTKSRWKCSLKDGIMHINDKDILFNKVICASQIRLELFWQQASLTSDLNTSNDASRKVLQIPTERDMSIHGKVYSGWLVVQKEKFFLSKKAYQLSPCFMNSYCLSRNGKLTSQKLDLAYSCI

SEQ ID NO: 87221 - protein, 437 aa, Arabidopsis thaliana
  peptide (1)..(437): Ceres Seq. ID no. 12699194
  misc_feature (1)..(348): Pfam Name: Transcription factor IIA, alpha/beta subunit Pfam Description: Transcription factor IIA, alpha/beta subunit
  misc_feature (1)..(437): Homolog of NCBI NO: 25406978 NR Description: protein F22G5.14 [imported] - Arabidopsis >gi|8778543|gb|AAF79551.1|AC022464_9 F22G5.14 [Arabidopsis
  misc_feature (1)..(126): Homolog of NCBI NO: 1429226 NR Description: TFIIA [Arabidopsis thaliana]
  misc_feature (184)..(341): Homolog of NCBI NO: 1429226 NR Description: TFIIA [Arabidopsis thaliana]
  misc_feature (1)..(306): Homolog of NCBI NO: 30680148 NR Description: transcription factor IIA large subunit thaliana] >gi|30680153|ref|NP_172228.3| transcription factor IIA subunit [Arabidopsis thaliana] >gi|11358887|pir||T51333
  misc_feature (1)..(306): Homolog of NCBI NO: 18390773 NR Description: transcription factor IIA large subunit; protein At1g07470.1, supported by cDNA: 19512., supported by cDNA: supported by cDNA: gi_15146225, supported by cDNA: gi_15983369
  misc_feature (1)..(435): Homolog of NCBI NO: 25406976 NR Description: protein F22G5.18 [imported] - Arabidopsis >gi|8778565|gb|AAF79573.1|AC022464_31 F22G5.18 [Arabidopsis
  misc_feature (115)..(341): Homolog of NCBI NO: 17065294 NR Description: similar to TFIIA [Arabidopsis thaliana]
  misc_feature (39)..(341): Homolog of NCBI NO: 30680148 NR Description: transcription factor IIA large subunit thaliana] >gi|30680153|ref|NP_172228.3| transcription factor IIA subunit [Arabidopsis thaliana] >gi|11358887|pir||T51333
  misc_feature (39)..(341): Homolog of NCBI NO: 18390773 NR Description: transcription factor IIA large subunit; protein At1g07470.1, supported by cDNA: 19512., supported by cDNA: supported by cDNA: gi_15146225, supported by cDNA: gi_15983369
  misc_feature (268)..(341): Homolog of NCBI NO: 15237841 NR Description: putative protein; protein id: At5g59230.1 thaliana] >gi|9759244|dbj|BAB09768.1| gene_id:MNC17.14~unknown
MQAGVLNGPIERSSAQKPTPGGPLTHDLNVPYEGTEEYETPTAEMLFPPTPLQTPLPTPLPGTADNSSMYNIPTGSSDYPTPGTENGVNIDVKARPSPYMPPPSPWTNPRLDVNVAYVDGRDEPERGNSNQQFTQDLFVPSSGKRKRDDSSGHYQNGGSIPQQDGAGDAIPEYLVDTPDWSTILQANFECDAFRITSIGDRKVPRDFFSSSSKIPQVDGPMPDPYDEMLSTPNIYSYQGPSEEFNEARTPAPNEIQTSTPVAVQNDIIEDDEELLNEDDDDDELDDLESGEDMNTQHLVLAQFDKVMTLLYSQVTRTKSRWKCSLKDGIMHINDKDILFNKVICASQIRLELFWQQASLTSDLNTSNDASRKVLQIPTERDMSIHGKVYSGWLVVQKEKFFLSKKAYQLSPCFMNSYCLSRNGKLTSQKLDLAYSCI

SEQ ID NO: 87222 - DNA, 2508 bp, Arabidopsis thaliana
  misc_feature (1)..(2508): Ceres Seq. ID no. 12699203
  misc_feature: MA Experiment ID: 20000355 Result: Up-regulated in Transcription
  misc_feature: MA Experiment 20000355 PARAMETER Experiment Name: At_Siliques_Sub_P Parameter: Age (day) Value: 21
  misc_feature: MA Experiment 20000355 PARAMETER Experiment Name: At_Siliques_Sub_P Parameter: Organism Value: A. thaliana
  misc_feature: MA Experiment 20000355 PARAMETER Experiment Name: At_Siliques_Sub_P Parameter: Plant Line Value: WS
  misc_feature: MA Experiment 20000355 PARAMETER Experiment Name: At_Siliques_Sub_P Parameter: Tissue Value: Less Than 5mm Siliques vs. Whole Plant
atgatattctccaagcttggttcttccctcgctcgatcctcacgttctaagggatttgtgtacggcggtggtgtgagatcggcggtatttaaccaagggaggttacgagcgccgcagaatctcgaggcggccgtcaatcaggtggatggtggattagggtttttgaggcggcactttgcttcttttgctgctcgaaagggactagaagccggtgatttaagccgtgctttcgctaaccctagattgcgtcggttcttttctagtcaaaccccaaagaagaagaattatgagaactactatccaaaagacagtaagaaagcacccaagaatgagcagaaatctgaatccagagatggttcaaagaaaaatgaaaacgaaaatgctggggacgcgttctcaaatgaatatcaaaatatgttaattcctcttatggccattgctttaatcctttctactttctctcttggttcccgagaacagcaacagattagtttccaggagttcaaaaacaagctcctcgaggctggtttagtggatcacatagatgtttccaataaagaagtcgcaaaagtctatgtgaggagttcaccaaaaagccaaacaacggaagaagttgttcaaggtcctggtaatggagttcctgctaaaggacgtggtggtcagtataagtactactttaatattggtagtgttgaatcatttgaggagaaactagaagaggcccaagaagctataggcgttaattctcatgactttgttcctgtcacctacgtcagtgaaactatctggtaccaggaactattgagatttgcaccgactttacttctcgtggctacgctaatttttggggcaagacggatgcaaggtggactgggaggtttaggcggacctggtgggaaggctggccgtggaattttcaatatagggaaagctcaaataacgagagcagataaaaactccaagaataagatatattttaaagatgttgcgggatgcgaggaggctaaacaagaaattatggaatttgtgcatttccttcagaacccaaagaaatatgaagatttgggagctaaaatcccaaaaggtgcgcttttagttggcccacccgggactggaaagacccttctagcaaaagctactgcaggagaatcagctgtaccgtttctctcaatatctggttcagatttcatggagatgtttgttggtgttggaccttccagagtgagaaacttgtttcaagaggctagacagtgtgcacctagcataatatttattgatgagatcgatgcgattggccgtgcgaggggacgtggaggtttctctggtggaaatgatgagcgtgaaagcacacttaatcaactgctagttgaaatggatggatttggtactaccgctggagttgtcgtccttgctgggactaacaggccagatattcttgataaagctttattacggcctggccggtttgatcgccagataaccatagataaacctgatattaaaggccgtgatcagatattccagatatacctgaagaagatcaaacttgatcacgagccctcatattactcacaaaggcttgcagccctcactcccggatttgctggagctgacattgcgaatgtctgtaacgaggcggctcttattgctgccagacatgaaggagcaacagttacaatggcgcactttgactctgcaatcgatcgtgttattggtggtctggagaagaaaaaccgggtaataagcaagctggagcgccgtacagttgcatatcatgaatctggccatgcggttgctgggtggttcctggaacatgcggaaccgttgctaaaggtgactattgttcctcgtggcacagcagcgctcggatttgcccagtatgttccaaatgaaaacttgctcatgacaaaagaacaactctttgatatgacttgcatgactctcgggggccgggcagctgaacagttggttggtagacagtttgttgagttgtttcctcttacagaagtcaagaactcattaaggtttcaggtattgattggaagaatatccactggggctcagaacgatctggaaaaggtgactaagatgacttatgcgcaagtggcagtgtacggattcagcgacaagataggattgctttcattcccacaacgggaagacgagttctccaagccgtacagcaacagaaccggtgcgatgatagatgaagaggtccgagaatgggtggggaaagcttacaagcggacggttgagctgatagaggaacacaaagagcaagtggctcagatcgctgagctcttgctagagaaggaggttttgcatcaggatgatctcactaaagtattgggcgagcgtccgtttaagtcgggtgagacaacgaattacgacaggtttaaatctggatttgaagagtcggagaaggagagccagaaggagtctgtgccggtgaagcctgtggaggatgatggaattccgcctcttgagccacaggtagttccgacgtag

SEQ ID NO: 87223 - protein, 835 aa, Arabidopsis thaliana
  peptide (1)..(835): Ceres Seq. ID no. 12699204
  misc_feature (558)..(782): Pfam Name: Peptidase family M41 Pfam Description: Peptidase family M41
  misc_feature (1)..(797): Homolog of NCBI NO: 7487874 NR Description: probable AAA-type ATPase [imported] - Arabidopsis
  misc_feature (1)..(797): Homolog of NCBI NO: 30684118 NR Description: AAA-type ATPase -related [Arabidopsis thaliana]
  misc_feature (1)..(797): Homolog of NCBI NO: 17380916 NR Description: putative AAA-type ATPase [Arabidopsis thaliana]
  misc_feature (1)..(659): Homolog of NCBI NO: 34908198 NR Description: putative AAA-metalloprotease [Oryza sativa
  misc_feature (677)..(813): Homolog of NCBI NO: 34908198 NR Description: putative AAA-metalloprotease [Oryza sativa
  misc_feature (1)..(764): Homolog of NCBI NO: 15021761 NR Description: AAA-metalloprotease FtsH [Pisum sativum]
  misc_feature (182)..(656): Homolog of NCBI NO: 28574878 NR Description: CG6512-PA [Drosophila melanogaster]
  misc_feature (677)..(834): Homolog of NCBI NO: 28574878 NR Description: CG6512-PA [Drosophila melanogaster]
  misc_feature (88)..(199): Homolog of NCBI NO: 28574878 NR Description: CG6512-PA [Drosophila melanogaster]
  misc_feature (182)..(656): Homolog of NCBI NO: 24665814 NR Description: CG6512-PB [Drosophila melanogaster]
MIFSKLGSSLARSSRSKGFVYGGGVRSAVFNQGRLRAPQNLEAAVNQVDGGLGFLRRHFASFAARKGLEAGDLSRAFANPRLRRFFSSQTPKKKNYENYYPKDSKKAPKNEQKSESRDGSKKNENENAGDAFSNEYQNMLIPLMAIALILSTFSLGSREQQQISFQEFKNKLLEAGLVDHIDVSNKEVAKVYVRSSPKSQTTEEVVQGPGNGVPAKGRGGQYKYYFNIGSVESFEEKLEEAQEAIGVNSHDFVPVTYVSETIWYQELLRFAPTLLLVATLIFGARRMQGGLGGLGGPGGKAGRGIFNIGKAQITRADKNSKNKIYFKDVAGCEEAKQEIMEFVHFLQNPKKYEDLGAKIPKGALLVGPPGTGKTLLAKATAGESAVPFLSISGSDFMEMFVGVGPSRVRNLFQEARQCAPSIIFIDEIDAIGRARGRGGFSGGNDERESTLNQLLVEMDGFGTTAGVVVLAGTNRPDILDKALLRPGRFDRQITIDKPDIKGRDQIFQIYLKKIKLDHEPSYYSQRLAALTPGFAGADIANVCNEAALIAARHEGATVTMAHFDSAIDRVIGGLEKKNRVISKLERRTVAYHESGHAVAGWFLEHAEPLLKVTIVPRGTAALGFAQYVPNENLLMTKEQLFDMTCMTLGGRAAEQLVGRQFVELFPLTEVKNSLRFQVLIGRISTGAQNDLEKVTKMTYAQVAVYGFSDKIGLLSFPQREDEFSKPYSNRTGAMIDEEVREWVGKAYKRTVELIEEHKEQVAQIAELLLEKEVLHQDDLTKVLGERPFKSGETTNYDRFKSGFEESEKESQKESVPVKPVEDDGIPPLEPQVVPT

SEQ ID NO: 87224 - protein, 697 aa, Arabidopsis thaliana
  peptide (1)..(697): Ceres Seq. ID no. 12699205
  misc_feature (420)..(644): Pfam Name: Peptidase family M41 Pfam Description: Peptidase family M41
  misc_feature (1)..(659): Homolog of NCBI NO: 7487874 NR Description: probable AAA-type ATPase [imported] - Arabidopsis
  misc_feature (1)..(659): Homolog of NCBI NO: 30684118 NR Description: AAA-type ATPase -related [Arabidopsis thaliana]
  misc_feature (1)..(659): Homolog of NCBI NO: 17380916 NR Description: putative AAA-type ATPase [Arabidopsis thaliana]
  misc_feature (1)..(521): Homolog of NCBI NO: 34908198 NR Description: putative AAA-metalloprotease [Oryza sativa
  misc_feature (539)..(675): Homolog of NCBI NO: 34908198 NR Description: putative AAA-metalloprotease [Oryza sativa
  misc_feature (1)..(626): Homolog of NCBI NO: 15021761 NR Description: AAA-metalloprotease FtsH [Pisum sativum]
  misc_feature (44)..(518): Homolog of NCBI NO: 28574878 NR Description: CG6512-PA [Drosophila melanogaster]
  misc_feature (539)..(696): Homolog of NCBI NO: 28574878 NR Description: CG6512-PA [Drosophila melanogaster]
  misc_feature (1)..(61): Homolog of NCBI NO: 28574878 NR Description: CG6512-PA [Drosophila melanogaster]
  misc_feature (44)..(518): Homolog of NCBI NO: 24665814 NR Description: CG6512-PB [Drosophila melanogaster]
MLIPLMAIALILSTFSLGSREQQQISFQEFKNKLLEAGLVDHIDVSNKEVAKVYVRSSPKSQTTEEVVQGPGNGVPAKGRGGQYKYYFNIGSVESFEEKLEEAQEAIGVNSHDFVPVTYVSETIWYQELLRFAPTLLLVATLIFGARRMQGGLGGLGGPGGKAGRGIFNIGKAQITRADKNSKNKIYFKDVAGCEEAKQEIMEFVHFLQNPKKYEDLGAKIPKGALLVGPPGTGKTLLAKATAGESAVPFLSISGSDFMEMFVGVGPSRVRNLFQEARQCAPSIIFIDEIDAIGRARGRGGFSGGNDERESTLNQLLVEMDGFGTTAGVVVLAGTNRPDILDKALLRPGRFDRQITIDKPDIKGRDQIFQIYLKKIKLDHEPSYYSQRLAALTPGFAGADIANVCNEAALIAARHEGATVTMAHFDSAIDRVIGGLEKKNRVISKLERRTVAYHESGHAVAGWFLEHAEPLLKVTIVPRGTAALGFAQYVPNENLLMTKEQLFDMTCMTLGGRAAEQLVGRQFVELFPLTEVKNSLRFQVLIGRISTGAQNDLEKVTKMTYAQVAVYGFSDKIGLLSFPQREDEFSKPYSNRTGAMIDEEVREWVGKAYKRTVELIEEHKEQVAQIAELLLEKEVLHQDDLTKVLGERPFKSGETTNYDRFKSGFEESEKESQKESVPVKPVEDDGIPPLEPQVVPT

SEQ ID NO: 87225 - protein, 692 aa, Arabidopsis thaliana
  peptide (1)..(692): Ceres Seq. ID no. 12699206
  misc_feature (415)..(639): Pfam Name: Peptidase family M41 Pfam Description: Peptidase family M41
  misc_feature (1)..(654): Homolog of NCBI NO: 7487874 NR Description: probable AAA-type ATPase [imported] - Arabidopsis
  misc_feature (1)..(654): Homolog of NCBI NO: 30684118 NR Description: AAA-type ATPase -related [Arabidopsis thaliana]
  misc_feature (1)..(654): Homolog of NCBI NO: 17380916 NR Description: putative AAA-type ATPase [Arabidopsis thaliana]
  misc_feature (1)..(516): Homolog of NCBI NO: 34908198 NR Description: putative AAA-metalloprotease [Oryza sativa
  misc_feature (534)..(670): Homolog of NCBI NO: 34908198 NR Description: putative AAA-metalloprotease [Oryza sativa
  misc_feature (1)..(621): Homolog of NCBI NO: 15021761 NR Description: AAA-metalloprotease FtsH [Pisum sativum]
  misc_feature (39)..(513): Homolog of NCBI NO: 28574878 NR Description: CG6512-PA [Drosophila melanogaster]
  misc_feature (534)..(691): Homolog of NCBI NO: 28574878 NR Description: CG6512-PA [Drosophila melanogaster]
  misc_feature (1)..(56): Homolog of NCBI NO: 28574878 NR Description: CG6512-PA [Drosophila melanogaster]
  misc_feature (39)..(513): Homolog of NCBI NO: 24665814 NR Description: CG6512-PB [Drosophila melanogaster]
MAIALILSTFSLGSREQQQISFQEFKNKLLEAGLVDHIDVSNKEVAKVYVRSSPKSQTTEEVVQGPGNGVPAKGRGGQYKYYFNIGSVESFEEKLEEAQEAIGVNSHDFVPVTYVSETIWYQELLRFAPTLLLVATLIFGARRMQGGLGGLGGPGGKAGRGIFNIGKAQITRADKNSKNKIYFKDVAGCEEAKQEIMEFVHFLQNPKKYEDLGAKIPKGALLVGPPGTGKTLLAKATAGESAVPFLSISGSDFMEMFVGVGPSRVRNLFQEARQCAPSIIFIDEIDAIGRARGRGGFSGGNDERESTLNQLLVEMDGFGTTAGVVVLAGTNRPDILDKALLRPGRFDRQITIDKPDIKGRDQIFQIYLKKIKLDHEPSYYSQRLAALTPGFAGADIANVCNEAALIAARHEGATVTMAHFDSAIDRVIGGLEKKNRVISKLERRTVAYHESGHAVAGWFLEHAEPLLKVTIVPRGTAALGFAQYVPNENLLMTKEQLFDMTCMTLGGRAAEQLVGRQFVELFPLTEVKNSLRFQVLIGRISTGAQNDLEKVTKMTYAQVAVYGFSDKIGLLSFPQREDEFSKPYSNRTGAMIDEEVREWVGKAYKRTVELIEEHKEQVAQIAELLLEKEVLHQDDLTKVLGERPFKSGETTNYDRFKSGFEESEKESQKESVPVKPVEDDGIPPLEPQVVPT

SEQ ID NO: 87226 - DNA, 2814 bp, Arabidopsis thaliana
  misc_feature (1)..(2814): Ceres Seq. ID no. 12699215
  misc_feature: MA Experiment ID: 20000314 Result: Up-regulated in Transcription
  misc_feature: MA Experiment 20000314 PARAMETER Experiment Name: At_14day_Shoots-Roots_Sub_P Parameter: Age (day) Value: 14
  misc_feature: MA Experiment 20000314 PARAMETER Experiment Name: At_14day_Shoots-Roots_Sub_P Parameter: Organism Value: A. thaliana
  misc_feature: MA Experiment 20000314 PARAMETER Experiment Name: At_14day_Shoots-Roots_Sub_P Parameter: Plant Line Value: WS
  misc_feature: MA Experiment 20000314 PARAMETER Experiment Name: At_14day_Shoots-Roots_Sub_P Parameter: Tissue Value: Roots vs. Whole Plant
atgttttatattgcaagtacattggcaattcgtaatccttttttttttttggacagaggtgggaaaatgaaaaacctccgtggacttctattggccttcctagttttgtctttaggcatttccgattttcttcgagcacaagatcaacaaggtataactttttttgtttcaggttttcttcttttaactttgactaaacatgtttcctatcacaatttagtcattaattcagtttccaaacttatttttttaccaaattatttctctgttttttttcttttgcctttatcaggattcatcagtttggattgcgggttgcaagccgatgagtctccttataccgaaccattaacaaagttaacattcacatcagacgccgatttcatcaaaagtggaaaaagcggcaagattcaaaatgttccggggatggagtatataaagccatacacggttttgagatattttccagatggagtacgaaactgttatactcttatcgtcatacaaggcacaaactatctgatcgtagccatgtttacttatggaaactacgataatcttaacacacacccaaagttcgacctttatcttggtccaaatatatggaccacggtcgatttgcaaagaaatgtaaacggaacaagggcggaaatcattcacataccaaggtcaacttctttgcagatttgtcttgttaagacgggaacaactacgccgctaatatcagctttagaactacgaccattgagaaataatacttatattcctcaatctggttccctcaagacattgttccgcgtccatttgactgattccaaagaaactgttcggtatccagaagatgtccatgatcgtctttggagtccatttttcatgccggaatggagactgttaagaacaagtctcacggtcaacacttctgatgataacggctatgacataccggaagacgtagtggttacggcagccacacctgcaaatgtgagttcaccattaaccatttcttggaatttggaaacacctgacgacttagtttatgcatacctccacgtcgctgagatccaatccttaagggaaaatgataccagggaattcaacattagcgcaggccaagatgttaactatggacctgttagtcctgacgagtttctagtgggtactctattcaatacatcaccagttaaatgtgaaggagggacatgccatttgcaactaataaaaactccaaaatcaactctccctcccctcctcaatgctattgaggcttttataacagtggagtttccgcagtctgaaactaatgcaaatgacgtccttgctatcaagagcatagaaacaagctatggattaagtagaattagttggcaaggagatccatgtgttcctcaacaattattgtgggatggtcttacctgcgagtacaccaatatgtctacaccaccaagaatccattccttagacttgtcctcaagtgaactaactggaattatagttcctgagatccaaaatcttacggagcttaaaaaattggacttttcaaataataatctaacaggtggagtacctgaatttctagccaaaatgaaatcattaaacttaagcggaaacaaccttagtggatcagtccctcaagctcttctcaacaaagtgaaaaatgggttgaagttgaacattcagggaaatccaaacctatgtttttccagttcatgcaacaaaaagaaaaatagcatcatgttaccagttgttgcatcacttgcttctttggctgctataatagcaatgatcgctctgctttttgtttgtattaaaagacgctcatcaagcagaaaaggtccatcaccaagccaacaatcaatagaaacaataaagaaaagatatacatatgccgaagttcttgccatgacaaagaaatttgaaagggttttgggtaaaggaggatttggaatggtctatcatggttatataaatggtactgaagaagtagcggtcaagctactctctccatcatcagctcaaggctataaagagttcaaaacagaggtagaacttcttctaagggtttaccacacaaatctggtaagtcttgttggatactgtgatgaaaaagatcatctggccctcatctaccagtacatggtcaatggcgatttgaaaaaacatttttcaggtagctccatcattagctgggttgatagactaaacatagctgttgatgcagcgtcaggtttggagtacttgcatattggttgcaaaccgctgatagttcatagagatgtaaaaagttctaacatactattggacgatcaattacaagctaagcttgcagattttgggctttctagatcttttcccattggggatgaatctcatgtgtctacacttgttgctggaacatttggataccttgatcatgaatactaccaaactaataggttgtctgagaagagtgatgtctacagttttggtgttgtactgctagaaattattacaaacaaaccggtgatcgatcataaccgcgacatgcctcacatagcagaatgggtgaaacttatgcttactagaggagacattagcaatattatggatcctaaacttcaaggggtctatgactctggttctgcatggaaagctcttgaattagcaatgacatgtgtgaatccttcttccttgaaaagacccaacatgtcccatgttgttcatgagctgaaggagtgtctggtatctgaaaacaacaggacaagagacatagacacatcgagatccatggacattaacttaagctttggcacagatgtgaaccccaaggcacgttag

SEQ ID NO: 87227 - protein, 937 aa, Arabidopsis thaliana
  peptide (1)..(937): Ceres Seq. ID no. 12699216
  misc_feature (68)..(937): Homolog of NCBI NO: 15232537 NR Description: serine/threonine-specific protein kinase,
  misc_feature (99)..(937): Homolog of NCBI NO: 9758831 NR Description: receptor-like protein kinase [Arabidopsis
  misc_feature (98)..(937): Homolog of NCBI NO: 25387148 NR Description: probable protein kinase [imported] - Arabidopsis >gi|9802795|gb|AAF99864.1|AC015448_14 Putative protein kinase
  misc_feature (79)..(937): Homolog of NCBI NO: 25387103 NR Description: probable receptor protein kinase [imported] - thaliana >gi|12321669|gb|AAG50871.1|AC025294_9 receptor protein
  misc_feature (98)..(937): Homolog of NCBI NO: 15222435 NR Description: protein kinase, putative; protein id: At1g07550.1
  misc_feature (98)..(937): Homolog of NCBI NO: 15225949 NR Description: putative receptor-like protein kinase; protein id:
  misc_feature (98)..(937): Homolog of NCBI NO: 15238493 NR Description: serine/threonine-specific protein kinase - like;
  misc_feature (98)..(937): Homolog of NCBI NO: 15227007 NR Description: putative receptor-like protein kinase; protein id:
  misc_feature (98)..(906): Homolog of NCBI NO: 8778538 NR Description: F22G5.7 [Arabidopsis thaliana]
  misc_feature (276)..(936): Homolog of NCBI NO: 15220696 NR Description: hypothetical protein; protein id: At1g62090.1
MFYIASTLAIRNPFFFLDRGGKMKNLRGLLLAFLVLSLGISDFLRAQDQQGITFFVSGFLLLTLTKHVSYHNLVINSVSKLIFLPNYFSVFFLLPLSGFISLDCGLQADESPYTEPLTKLTFTSDADFIKSGKSGKIQNVPGMEYIKPYTVLRYFPDGVRNCYTLIVIQGTNYLIVAMFTYGNYDNLNTHPKFDLYLGPNIWTTVDLQRNVNGTRAEIIHIPRSTSLQICLVKTGTTTPLISALELRPLRNNTYIPQSGSLKTLFRVHLTDSKETVRYPEDVHDRLWSPFFMPEWRLLRTSLTVNTSDDNGYDIPEDVVVTAATPANVSSPLTISWNLETPDDLVYAYLHVAEIQSLRENDTREFNISAGQDVNYGPVSPDEFLVGTLFNTSPVKCEGGTCHLQLIKTPKSTLPPLLNAIEAFITVEFPQSETNANDVLAIKSIETSYGLSRISWQGDPCVPQQLLWDGLTCEYTNMSTPPRIHSLDLSSSELTGIIVPEIQNLTELKKLDFSNNNLTGGVPEFLAKMKSLNLSGNNLSGSVPQALLNKVKNGLKLNIQGNPNLCFSSSCNKKKNSIMLPVVASLASLAAIIAMIALLFVCIKRRSSSRKGPSPSQQSIETIKKRYTYAEVLAMTKKFERVLGKGGFGMVYHGYINGTEEVAVKLLSPSSAQGYKEFKTEVELLLRVYHTNLVSLVGYCDEKDHLALIYQYMVNGDLKKHFSGSSIISWVDRLNIAVDAASGLEYLHIGCKPLIVHRDVKSSNILLDDQLQAKLADFGLSRSFPIGDESHVSTLVAGTFGYLDHEYYQTNRLSEKSDVYSFGVVLLEIITNKPVIDHNRDMPHIAEWVKLMLTRGDISNIMDPKLQGVYDSGSAWKALELAMTCVNPSSLKRPNMSHVVHELKECLVSENNRTRDIDTSRSMDINLSFGTDVNPKAR

SEQ ID NO: 87228 - protein, 915 aa, Arabidopsis thaliana
  peptide (1)..(915): Ceres Seq. ID no. 12699217
  misc_feature (46)..(915): Homolog of NCBI NO: 15232537 NR Description: serine/threonine-specific protein kinase,
  misc_feature (77)..(915): Homolog of NCBI NO: 9758831 NR Description: receptor-like protein kinase [Arabidopsis
  misc_feature (76)..(915): Homolog of NCBI NO: 25387148 NR Description: probable protein kinase [imported] - Arabidopsis >gi|9802795|gb|AAF99864.1|AC015448_14 Putative protein kinase
  misc_feature (57)..(915): Homolog of NCBI NO: 25387103 NR Description: probable receptor protein kinase [imported] - thaliana >gi|12321669|gb|AAG50871.1|AC025294_9 receptor protein
  misc_feature (76)..(915): Homolog of NCBI NO: 15222435 NR Description: protein kinase, putative; protein id: At1g07550.1
  misc_feature (76)..(915): Homolog of NCBI NO: 15225949 NR Description: putative receptor-like protein kinase; protein id:
  misc_feature (76)..(915): Homolog of NCBI NO: 15238493 NR Description: serine/threonine-specific protein kinase - like;
  misc_feature (76)..(915): Homolog of NCBI NO: 15227007 NR Description: putative receptor-like protein kinase; protein id:
  misc_feature (76)..(884): Homolog of NCBI NO: 8778538 NR Description: F22G5.7 [Arabidopsis thaliana]
  misc_feature (254)..(914): Homolog of NCBI NO: 15220696 NR Description: hypothetical protein; protein id: At1g62090.1
MKNLRGLLLAFLVLSLGISDFLRAQDQQGITFFVSGFLLLTLTKHVSYHNLVINSVSKLIFLPNYFSVFFLLPLSGFISLDCGLQADESPYTEPLTKLTFTSDADFIKSGKSGKIQNVPGMEYIKPYTVLRYFPDGVRNCYTLIVIQGTNYLIVAMFTYGNYDNLNTHPKFDLYLGPNIWTTVDLQRNVNGTRAEIIHIPRSTSLQICLVKTGTTTPLISALELRPLRNNTYIPQSGSLKTLFRVHLTDSKETVRYPEDVHDRLWSPFFMPEWRLLRTSLTVNTSDDNGYDIPEDVVVTAATPANVSSPLTISWNLETPDDLVYAYLHVAEIQSLRENDTREFNISAGQDVNYGPVSPDEFLVGTLFNTSPVKCEGGTCHLQLIKTPKSTLPPLLNAIEAFITVEFPQSETNANDVLAIKSIETSYGLSRISWQGDPCVPQQLLWDGLTCEYTNMSTPPRIHSLDLSSSELTGIIVPEIQNLTELKKLDFSNNNLTGGVPEFLAKMKSLNLSGNNLSGSVPQALLNKVKNGLKLNIQGNPNLCFSSSCNKKKNSIMLPVVASLASLAAIIAMIALLFVCIKRRSSSRKGPSPSQQSIETIKKRYTYAEVLAMTKKFERVLGKGGFGMVYHGYINGTEEVAVKLLSPSSAQGYKEFKTEVELLLRVYHTNLVSLVGYCDEKDHLALIYQYMVNGDLKKHFSGSSIISWVDRLNIAVDAASGLEYLHIGCKPLIVHRDVKSSNILLDDQLQAKLADFGLSRSFPIGDESHVSTLVAGTFGYLDHEYYQTNRLSEKSDVYSFGVVLLEIITNKPVIDHNRDMPHIAEWVKLMLTRGDISNIMDPKLQGVYDSGSAWKALELAMTCVNPSSLKRPNMSHVVHELKECLVSENNRTRDIDTSRSMDINLSFGTDVNPKAR

SEQ ID NO: 87229 - protein, 795 aa, Arabidopsis thaliana
  peptide (1)..(795): Ceres Seq. ID no. 12699218
  misc_feature (1)..(795): Homolog of NCBI NO: 15232537 NR Description: serine/threonine-specific protein kinase,
  misc_feature (1)..(795): Homolog of NCBI NO: 9758831 NR Description: receptor-like protein kinase [Arabidopsis
  misc_feature (1)..(795): Homolog of NCBI NO: 25387148 NR Description: probable protein kinase [imported] - Arabidopsis >gi|9802795|gb|AAF99864.1|AC015448_14 Putative protein kinase
  misc_feature (1)..(795): Homolog of NCBI NO: 25387103 NR Description: probable receptor protein kinase [imported] - thaliana >gi|12321669|gb|AAG50871.1|AC025294_9 receptor protein
  misc_feature (1)..(795): Homolog of NCBI NO: 15222435 NR Description: protein kinase, putative; protein id: At1g07550.1
  misc_feature (1)..(795): Homolog of NCBI NO: 15225949 NR Description: putative receptor-like protein kinase; protein id:
  misc_feature (1)..(795): Homolog of NCBI NO: 15238493 NR Description: serine/threonine-specific protein kinase - like;
  misc_feature (1)..(795): Homolog of NCBI NO: 15227007 NR Description: putative receptor-like protein kinase; protein id:
  misc_feature (1)..(764): Homolog of NCBI NO: 8778538 NR Description: F22G5.7 [Arabidopsis thaliana]
  misc_feature (134)..(794): Homolog of NCBI NO: 15220696 NR Description: hypothetical protein; protein id: At1g62090.1
MEYIKPYTVLRYFPDGVRNCYTLIVIQGTNYLIVAMFTYGNYDNLNTHPKFDLYLGPNIWTTVDLQRNVNGTRAEIIHIPRSTSLQICLVKTGTTTPLISALELRPLRNNTYIPQSGSLKTLFRVHLTDSKETVRYPEDVHDRLWSPFFMPEWRLLRTSLTVNTSDDNGYDIPEDVVVTAATPANVSSPLTISWNLETPDDLVYAYLHVAEIQSLRENDTREFNISAGQDVNYGPVSPDEFLVGTLFNTSPVKCEGGTCHLQLIKTPKSTLPPLLNAIEAFITVEFPQSETNANDVLAIKSIETSYGLSRISWQGDPCVPQQLLWDGLTCEYTNMSTPPRIHSLDLSSSELTGIIVPEIQNLTELKKLDFSNNNLTGGVPEFLAKMKSLNLSGNNLSGSVPQALLNKVKNGLKLNIQGNPNLCFSSSCNKKKNSIMLPVVASLASLAAIIAMIALLFVCIKRRSSSRKGPSPSQQSIETIKKRYTYAEVLAMTKKFERVLGKGGFGMVYHGYINGTEEVAVKLLSPSSAQGYKEFKTEVELLLRVYHTNLVSLVGYCDEKDHLALIYQYMVNGDLKKHFSGSSIISWVDRLNIAVDAASGLEYLHIGCKPLIVHRDVKSSNILLDDQLQAKLADFGLSRSFPIGDESHVSTLVAGTFGYLDHEYYQTNRLSEKSDVYSFGVVLLEIITNKPVIDHNRDMPHIAEWVKLMLTRGDISNIMDPKLQGVYDSGSAWKALELAMTCVNPSSLKRPNMSHVVHELKECLVSENNRTRDIDTSRSMDINLSFGTDVNPKAR

SEQ ID NO: 87230 - DNA, 1665 bp, Arabidopsis thaliana
  misc_feature (1)..(1665): Ceres Seq. ID no. 12699231
  misc_feature: MA Experiment ID: 20000171 Result: Down-regulated in Transcription
  misc_feature: MA Experiment 20000171 PARAMETER Experiment Name: At_42deg_Heat_P Parameter: Age (day) Value: 14
  misc_feature: MA Experiment 20000171 PARAMETER Experiment Name: At_42deg_Heat_P Parameter: Organism Value: A. thaliana
  misc_feature: MA Experiment 20000171 PARAMETER Experiment Name: At_42deg_Heat_P Parameter: Plant Line Value: WS
  misc_feature: MA Experiment 20000171 PARAMETER Experiment Name: At_42deg_Heat_P Parameter: Temperature (deg C) Value: 42 vs. 22
  misc_feature: MA Experiment 20000171 PARAMETER Experiment Name: At_42deg_Heat_P Parameter: Timepoint (hr) Value: 1
  misc_feature: MA Experiment 20000171 PARAMETER Experiment Name: At_42deg_Heat_P Parameter: Tissue Value: Aerial
  misc_feature: MA Experiment ID: 20000173 Result: Down-regulated in Transcription
  misc_feature: MA Experiment 20000173 PARAMETER Experiment Name: At_42deg_Heat_P Parameter: Age (day) Value: 14
  misc_feature: MA Experiment 20000173 PARAMETER Experiment Name: At_42deg_Heat_P Parameter: Organism Value: A. thaliana
  misc_feature: MA Experiment 20000173 PARAMETER Experiment Name: At_42deg_Heat_P Parameter: Plant Line Value: WS
  misc_feature: MA Experiment 20000173 PARAMETER Experiment Name: At_42deg_Heat_P Parameter: Temperature (deg C) Value: 42 vs. 22
  misc_feature: MA Experiment 20000173 PARAMETER Experiment Name: At_42deg_Heat_P Parameter: Timepoint (hr) Value: 6
  misc_feature: MA Experiment 20000173 PARAMETER Experiment Name: At_42deg_Heat_P Parameter: Tissue Value: Aerial
  misc_feature: MA Experiment ID: 20000182 Result: Up-regulated in Transcription
  misc_feature: MA Experiment 20000182 PARAMETER Experiment Name: At_2mM_SA_P Parameter: Age (day) Value: 14
  misc_feature: MA Experiment 20000182 PARAMETER Experiment Name: At_2mM_SA_P Parameter: Organism Value: A. thaliana
  misc_feature: MA Experiment 20000182 PARAMETER Experiment Name: At_2mM_SA_P Parameter: Plant Line Value: WS
  misc_feature: MA Experiment 20000182 PARAMETER Experiment Name: At_2mM_SA_P Parameter: Timepoint (hr) Value: 6
  misc_feature: MA Experiment 20000182 PARAMETER Experiment Name: At_2mM_SA_P Parameter: Tissue Value: Aerial
  misc_feature: MA Experiment 20000182 PARAMETER Experiment Name: At_2mM_SA_P Parameter: Treatment Value: 2mM SA vs. No Treatment
  misc_feature: MA Experiment ID: 20000184 Result: Down-regulated in Transcription
  misc_feature: MA Experiment 20000184 PARAMETER Experiment Name: At_Shoots__P Parameter: Age (day) Value: 7
  misc_feature: MA Experiment 20000184 PARAMETER Experiment Name: At_Shoots__P Parameter: Tissue Value: Shoots vs. Whole Plant
  misc_feature: MA Experiment ID: 20000185 Result: Down-regulated in Transcription
  misc_feature: MA Experiment 20000185 PARAMETER Experiment Name: At_Roots__P Parameter: Age (day) Value: 7 vs. 21
  misc_feature: MA Experiment 20000185 PARAMETER Experiment Name: At_Roots__P Parameter: Organism Value: A. thaliana
  misc_feature: MA Experiment 20000185 PARAMETER Experiment Name: At_Roots__P Parameter: Tissue Value: Roots vs. Whole Plant
  misc_feature: MA Experiment ID: 20000794 Result: Down-regulated in Transcription
  misc_feature: MA Experiment 20000794 PARAMETER Experiment Name: At_Petals_P Parameter: Age (day) Value: 23-25 days
  misc_feature: MA Experiment 20000794 PARAMETER Experiment Name: At_Petals_P Parameter: Plant Line Value: WS
  misc_feature: MA Experiment 20000794 PARAMETER Experiment Name: At_Petals_P Parameter: Tissue Value: Petals vs. Whole plant
  misc_feature: MA Experiment ID: 20001451 Result: Up-regulated in Transcription
  misc_feature: MA Experiment 20001451 PARAMETER Experiment Name: At_Far-red-induction_P Parameter: Age (day) Value: 7
  misc_feature: MA Experiment 20001451 PARAMETER Experiment Name: At_Far-red-induction_P Parameter: Light Value: Far-red vs. White
  misc_feature: MA Experiment 20001451 PARAMETER Experiment Name: At_Far-red-induction_P Parameter: Organism Value: A. thaliana
  misc_feature: MA Experiment 20001451 PARAMETER Experiment Name: At_Far-red-induction_P Parameter: Plant Line Value: Columbia
  misc_feature: MA Experiment 20001451 PARAMETER Experiment Name: At_Far-red-induction_P Parameter: Timepoint (hr) Value: 24
  misc_feature: MA Experiment 20001451 PARAMETER Experiment Name: At_Far-red-induction_P Parameter: Tissue Value: Whole Plant
  misc_feature: MA Experiment ID: 20001904 Result: Down-regulated in Transcription
  misc_feature: MA Experiment 20001904 PARAMETER Experiment Name: At_Drought_Reproduction_P Parameter: Age (day) Value: 37
  misc_feature: MA Experiment 20001904 PARAMETER Experiment Name: At_Drought_Reproduction_P Parameter: Organism Value: A. thaliana
  misc_feature: MA Experiment 20001904 PARAMETER Experiment Name: At_Drought_Reproduction_P Parameter: Plant Line Value: WS
  misc_feature: MA Experiment 20001904 PARAMETER Experiment Name: At_Drought_Reproduction_P Parameter: Timepoint (day) Value: 7
  misc_feature: MA Experiment 20001904 PARAMETER Experiment Name: At_Drought_Reproduction_P Parameter: Tissue Value: Rosettes
  misc_feature: MA Experiment 20001904 PARAMETER Experiment Name: At_Drought_Reproduction_P Parameter: Treatment Value: Drought vs. No Drought
  misc_feature: MA Experiment ID: 20001905 Result: Down-regulated in Transcription
  misc_feature: MA Experiment 20001905 PARAMETER Experiment Name: At_Drought_Reproduction_P Parameter: Age (day) Value: 40
  misc_feature: MA Experiment 20001905 PARAMETER Experiment Name: At_Drought_Reproduction_P Parameter: Organism Value: A. thaliana
  misc_feature: MA Experiment 20001905 PARAMETER Experiment Name: At_Drought_Reproduction_P Parameter: Plant Line Value: WS
  misc_feature: MA Experiment 20001905 PARAMETER Experiment Name: At_Drought_Reproduction_P Parameter: Timepoint (day) Value: 10
  misc_feature: MA Experiment 20001905 PARAMETER Experiment Name: At_Drought_Reproduction_P Parameter: Tissue Value: Rosettes
  misc_feature: MA Experiment 20001905 PARAMETER Experiment Name: At_Drought_Reproduction_P Parameter: Treatment Value: Drought vs. No Drought
atggacaatgatgacgatgctgatgagtatactgtgcagaacacatccaggttatcagttaatgcttcctctcccagctttggactttataggacagctcgagtctctcctttatcgttgacttactacggaatctgtcttggaaatgggaactacactgtgaatctccactttgctgagatcatctttaccgatgacaatacattatacagtctcggcaaacgtttgtttgatatttatgttcaggatcagttggtgattaaaaactttaacattcaagaagctgctcgaggatcaggtaagccaatcattaaatcgtttctggtaaatgtaacggaccatactctgaagattggtttgcgatgggctggcaaagggacaacaggcattccgattagaggggtatatggtcctatgatttcagctatatctgtggaacccaatttcaaacctccggtatattatgacacaaaggatatcatactaaaagtgggggtacctgtcgctgcagcaacacttcttttgtttatcatagtgggtgtattctggaaaaaaaggcgtgacaaaaatgatattgacaaagagctaaggggtctagatcttcaaactggaacttttactctacggcagataaaagcagccactgataatttcgatgtaacaagaaagattggtgaaggtggatttggctctgtttacaagggtgaattatctgaggggaaattaattgcagttaaacaactgtctgcaaaatcgaggcagggaaatcgcgagtttgtaaatgagataggaatgatctcagctcttcaacatccgaatcttgtgaagctatatggatgttgtgttgaaggaaaccaattgatattggtgtatgagtacttggagaacaactgtctatctcgagcgttatttggaaaggatgagagttctagactgaaactagactggtcaacaaggaagaagatttttttggggatagccaagggactgacatttctccatgaagaatctaggataaagattgtacacagagatataaaggcaagcaatgtgttactcgataaggatctcaacgctaaaatttctgactttggtttggcaaagctgaatgatgatggaaacacacacatcagcactcgtattgcaggaactataggttatatggctcctgaatatgcaatgcgtggttacttgactgaaaaagcggatgtttatagcttcggcgtcgttgcactcgaaatcgttagtggaaagagtaacacaaactttaggccaaccgaggactttgtttaccttcttgattgggcttacgttttgcaagagagaggaagcttactagagctggttgatccaacgttagcctcagattactcagaagaggaagccatgttgatgctgaacgtggcattgatgtgcactaacgcatcaccgactctaaggcctacaatgtcgcaggtggtgagtctcatagaggggaagacagcgatgcaagagttgctgtcggatccgagcttctcaacggttaacccgaagcttaaagccttgaggaaccatttttggcaaaacgagctgagcagatcgcttagcttctccacaagcgggcctcgtactgcctctgctaactcactcgttgatgcagaggagaaaaccggacttttggattaa

SEQ ID NO: 87231 - protein, 554 aa, Arabidopsis thaliana
  peptide (1)..(554): Ceres Seq. ID no. 12699232
  misc_feature (1)..(554): Homolog of NCBI NO: 25406989 NR Description: hypothetical protein [imported] - Arabidopsis
  misc_feature (124)..(554): Homolog of NCBI NO: 15222473 NR Description: leucine-rich repeat transmembrane protein kinase,
  misc_feature (1)..(100): Homolog of NCBI NO: 15222473 NR Description: leucine-rich repeat transmembrane protein kinase,
  misc_feature (15)..(543): Homolog of NCBI NO: 15220789 NR Description: receptor-like serine/threonine kinase, putative;
  misc_feature (15)..(543): Homolog of NCBI NO: 25405628 NR Description: hypothetical protein T3F20.25 [imported] -
  misc_feature (5)..(541): Homolog of NCBI NO: 15220790 NR Description: receptor-like serine/threonine kinase, putative;
  misc_feature (5)..(541): Homolog of NCBI NO: 25405630 NR Description: hypothetical protein T3F20.24 [imported] - thaliana >gi|8671882|gb|AAF78445.1|AC018748_24 Contains a weak
  misc_feature (14)..(548): Homolog of NCBI NO: 11994595 NR Description: receptor-like serine/threonine kinase
  misc_feature (14)..(548): Homolog of NCBI NO: 15231938 NR Description: receptor-like serine/threonine kinase, putative;
  misc_feature (1)..(541): Homolog of NCBI NO: 15220901 NR Description: leucine-rich repeat transmembrane protein kinase,
MDNDDDADEYTVQNTSRLSVNASSPSFGLYRTARVSPLSLTYYGICLGNGNYTVNLHFAEIIFTDDNTLYSLGKRLFDIYVQDQLVIKNFNIQEAARGSGKPIIKSFLVNVTDHTLKIGLRWAGKGTTGIPIRGVYGPMISAISVEPNFKPPVYYDTKDIILKVGVPVAAATLLLFIIVGVFWKKRRDKNDIDKELRGLDLQTGTFTLRQIKAATDNFDVTRKIGEGGFGSVYKGELSEGKLIAVKQLSAKSRQGNREFVNEIGMISALQHPNLVKLYGCCVEGNQLILVYEYLENNCLSRALFGKDESSRLKLDWSTRKKIFLGIAKGLTFLHEESRIKIVHRDIKASNVLLDKDLNAKISDFGLAKLNDDGNTHISTRIAGTIGYMAPEYAMRGYLTEKADVYSFGVVALEIVSGKSNTNFRPTEDFVYLLDWAYVLQERGSLLELVDPTLASDYSEEEAMLMLNVALMCTNASPTLRPTMSQVVSLIEGKTAMQELLSDPSFSTVNPKLKALRNHFWQNELSRSLSFSTSGPRTASANSLVDAEEKTGLLD

SEQ ID NO: 87232 - protein, 416 aa, Arabidopsis thaliana
  peptide (1)..(416): Ceres Seq. ID no. 12699233
  misc_feature (1)..(416): Homolog of NCBI NO: 25406989 NR Description: hypothetical protein [imported] - Arabidopsis
  misc_feature (1)..(416): Homolog of NCBI NO: 15222473 NR Description: leucine-rich repeat transmembrane protein kinase,
  misc_feature (1)..(405): Homolog of NCBI NO: 15220789 NR Description: receptor-like serine/threonine kinase, putative;
  misc_feature (1)..(405): Homolog of NCBI NO: 25405628 NR Description: hypothetical protein T3F20.25 [imported] -
  misc_feature (1)..(403): Homolog of NCBI NO: 15220790 NR Description: receptor-like serine/threonine kinase, putative;
  misc_feature (1)..(403): Homolog of NCBI NO: 25405630 NR Description: hypothetical protein T3F20.24 [imported] - thaliana >gi|8671882|gb|AAF78445.1|AC018748_24 Contains a weak
  misc_feature (1)..(410): Homolog of NCBI NO: 11994595 NR Description: receptor-like serine/threonine kinase
  misc_feature (1)..(410): Homolog of NCBI NO: 15231938 NR Description: receptor-like serine/threonine kinase, putative;
  misc_feature (1)..(403): Homolog of NCBI NO: 15220901 NR Description: leucine-rich repeat transmembrane protein kinase,
  misc_feature (1)..(403): Homolog of NCBI NO: 25405986 NR Description: protein F12M16.30 [imported] - Arabidopsis >gi|7769864|gb|AAF69542.1|AC008007_17 F12M16.30 [Arabidopsis
MISAISVEPNFKPPVYYDTKDIILKVGVPVAAATLLLFIIVGVFWKKRRDKNDIDKELRGLDLQTGTFTLRQIKAATDNFDVTRKIGEGGFGSVYKGELSEGKLIAVKQLSAKSRQGNREFVNEIGMISALQHPNLVKLYGCCVEGNQLILVYEYLENNCLSRALFGKDESSRLKLDWSTRKKIFLGIAKGLTFLHEESRIKIVHRDIKASNVLLDKDLNAKISDFGLAKLNDDGNTHISTRIAGTIGYMAPEYAMRGYLTEKADVYSFGVVALEIVSGKSNTNFRPTEDFVYLLDWAYVLQERGSLLELVDPTLASDYSEEEAMLMLNVALMCTNASPTLRPTMSQVVSLIEGKTAMQELLSDPSFSTVNPKLKALRNHFWQNELSRSLSFSTSGPRTASANSLVDAEEKTGLLD

SEQ ID NO: 87233 - protein, 290 aa, Arabidopsis thaliana
  peptide (1)..(290): Ceres Seq. ID no. 12699234
  misc_feature (1)..(290): Homolog of NCBI NO: 25406989 NR Description: hypothetical protein [imported] - Arabidopsis
  misc_feature (1)..(290): Homolog of NCBI NO: 15222473 NR Description: leucine-rich repeat transmembrane protein kinase,
  misc_feature (1)..(279): Homolog of NCBI NO: 15220789 NR Description: receptor-like serine/threonine kinase, putative;
  misc_feature (1)..(279): Homolog of NCBI NO: 25405628 NR Description: hypothetical protein T3F20.25 [imported] -
  misc_feature (1)..(277): Homolog of NCBI NO: 15220790 NR Description: receptor-like serine/threonine kinase, putative;
  misc_feature (1)..(277): Homolog of NCBI NO: 25405630 NR Description: hypothetical protein T3F20.24 [imported] - thaliana >gi|8671882|gb|AAF78445.1|AC018748_24 Contains a weak
  misc_feature (1)..(284): Homolog of NCBI NO: 11994595 NR Description: receptor-like serine/threonine kinase
  misc_feature (1)..(284): Homolog of NCBI NO: 15231938 NR Description: receptor-like serine/threonine kinase, putative;
  misc_feature (1)..(277): Homolog of NCBI NO: 15220901 NR Description: leucine-rich repeat transmembrane protein kinase,
  misc_feature (1)..(277): Homolog of NCBI NO: 25405986 NR Description: protein F12M16.30 [imported] - Arabidopsis >gi|7769864|gb|AAF69542.1|AC008007_17 F12M16.30 [Arabidopsis
MISALQHPNLVKLYGCCVEGNQLILVYEYLENNCLSRALFGKDESSRLKLDWSTRKKIFLGIAKGLTFLHEESRIKIVHRDIKASNVLLDKDLNAKISDFGLAKLNDDGNTHISTRIAGTIGYMAPEYAMRGYLTEKADVYSFGVVALEIVSGKSNTNFRPTEDFVYLLDWAYVLQERGSLLELVDPTLASDYSEEEAMLMLNVALMCTNASPTLRPTMSQVVSLIEGKTAMQELLSDPSFSTVNPKLKALRNHFWQNELSRSLSFSTSGPRTASANSLVDAEEKTGLLD

SEQ ID NO: 87234 - DNA, 1848 bp, Arabidopsis thaliana
  misc_feature (1)..(1848): Ceres Seq. ID no. 12699247
  misc_feature: MA Experiment ID: 20000171 Result: Up-regulated in Transcription
  misc_feature: MA Experiment 20000171 PARAMETER Experiment Name: At_42deg_Heat_P Parameter: Age (day) Value: 14
  misc_feature: MA Experiment 20000171 PARAMETER Experiment Name: At_42deg_Heat_P Parameter: Organism Value: A. thaliana
  misc_feature: MA Experiment 20000171 PARAMETER Experiment Name: At_42deg_Heat_P Parameter: Plant Line Value: WS
  misc_feature: MA Experiment 20000171 PARAMETER Experiment Name: At_42deg_Heat_P Parameter: Temperature (deg C) Value: 42 vs. 22
  misc_feature: MA Experiment 20000171 PARAMETER Experiment Name: At_42deg_Heat_P Parameter: Timepoint (hr) Value: 1
  misc_feature: MA Experiment 20000171 PARAMETER Experiment Name: At_42deg_Heat_P Parameter: Tissue Value: Aerial
  misc_feature: MA Experiment ID: 20000173 Result: Up-regulated in Transcription
  misc_feature: MA Experiment 20000173 PARAMETER Experiment Name: At_42deg_Heat_P Parameter: Age (day) Value: 14
  misc_feature: MA Experiment 20000173 PARAMETER Experiment Name: At_42deg_Heat_P Parameter: Organism Value: A. thaliana
  misc_feature: MA Experiment 20000173 PARAMETER Experiment Name: At_42deg_Heat_P Parameter: Plant Line Value: WS
  misc_feature: MA Experiment 20000173 PARAMETER Experiment Name: At_42deg_Heat_P Parameter: Temperature (deg C) Value: 42 vs. 22
  misc_feature: MA Experiment 20000173 PARAMETER Experiment Name: At_42deg_Heat_P Parameter: Timepoint (hr) Value: 6
  misc_feature: MA Experiment 20000173 PARAMETER Experiment Name: At_42deg_Heat_P Parameter: Tissue Value: Aerial
atggtgctcttgaaacccaccaccttatcaaaatcctctaaggtcgggccgcaacagcaacagggcttctccgagtctctaatcggcgatagtgtggaggcagctgacgccttcatatgccaatgggttactccacacctctgcgactcttcttcttcttcatgcagcctctcttccctcttctccgctcaaaaccgcctagaaggcagacgcttcctcgaggttctcggcaagttacaatacgccattcagagcaccgttgctatgaatccggactccgctaagcttgctaaaggacaggatttgatgcggaaagctatgaagcatttggagaaggagttttaccgggttttgaaatcgaatcgccgctttctgagtccagaatccgtctctggttggtcttctgaatccaacataccttcgagatcaagtggaaccgcttcggattcttcatcagatggagagctttactctgaatcctcatcggaattaggtaaagacataggaggaggagggaattctgatgctattgttgatttgaagatgatagcaaattgcatgatctcctctggttacgagaaggattgtgttaaaatctacaagaagtttcgcaaaaagatcatcgtcgacacattgtctcatctagggttcgagaagctaacctctacacagatgcagaaactggaatgggagattctggagaagaagatcaaaatatgggtgattgttgcgagagtagcaatcaccactctgttcaacggagaacgaatcctttccgatcacattttctcctcctccgtcgctgaatcttgcttcgttgacataacgctacagagcgcgttaaacctcttcatcttctcactaaccgtagcgaaatccagaaaaactgcagagaagatcttccctacgcttgacgtttaccagacgatcttgcaactgactcccaaaatcgatcagatttttagctacgattcaaccgctgccgttagattacaggcgaatgaatctctagagaagctatcggaatcggtgaatgcaatgatgacggagtttcaatcgtcgattacgaaggaatcgtcgaaatcggcgatttctggcggcggagttcatcagctcacgaggtatgtgatgaacttcatcgtcttcctcgcagactacagcgattctctcgccaccattctcaaggagtcatcgttacctttaccggaggattacttcagtagcagcggcgaagagaatccaggatccggtgatcgttctccgatggcggcgagactcgcgtggttgattctcgtcttgctctgtaaaatcgacgccaaatctcggctctacaacgactcggctctatcgtatctcttcctagcgaacaacctccattacgttgtgaccaaggtccgtacatcgaatctcagactcgtactcggagacgattgggtagcgaatcacgaggttaaagtgaatcaatacctcgagaaatacgaaaaaatggcctggggggatgtgatagcgtcgctccccggtgattcaacggcggggacggaggcggaggagtctctgagacggttcaacgaggcgttcgaagaggcttacaagaagcacaagacatgggtcgtacccgacccgaacctgagagacgagatccaagcgtccatagcgagaaaactaatgcccgggtatacgggtttctataagaaacacccggtcgggtcatgcaatattgtcagatttacccctgaagatctaaataattacataaccgacctatatgttggtttaggaagatccgtgcccgtatccaaaactaagaagtatatggttagcccaagccatacgacggatttgaagtaa

SEQ ID NO: 87235 - protein, 615 aa, Arabidopsis thaliana
  peptide (1)..(615): Ceres Seq. ID no. 12699248
  misc_feature (20)..(590): Pfam Name: Exo70 exocyst complex subunit Pfam Description: Exo70 exocyst complex subunit
  misc_feature (1)..(558): Homolog of NCBI NO: 22329407 NR Description: similar to leucine zipper-containing protein;
  misc_feature (50)..(595): Homolog of NCBI NO: 15226917 NR Description: unknown protein; protein id: At2g28640.1
  misc_feature (153)..(595): Homolog of NCBI NO: 15226919 NR Description: hypothetical protein; protein id: At2g28650.1
  misc_feature (1)..(156): Homolog of NCBI NO: 15226919 NR Description: hypothetical protein; protein id: At2g28650.1
  misc_feature (17)..(599): Homolog of NCBI NO: 15238510 NR Description: putative protein; protein id: At5g59730.1, by cDNA: gi_13430533, supported by cDNA: gi_14334437, supported cDNA: gi_15010739, supported by cDNA: gi_16974428, supported by
  misc_feature (17)..(599): Homolog of NCBI NO: 23397263 NR Description: unknown protein [Arabidopsis thaliana]
  misc_feature (17)..(556): Homolog of NCBI NO: 23397289 NR Description: unknown protein [Arabidopsis thaliana]
  misc_feature (21)..(612): Homolog of NCBI NO: 11278980 NR Description: hypothetical protein T26I12.30 - Arabidopsis >gi|7019648|emb|CAB75749.1| putative protein [Arabidopsis
  misc_feature (21)..(612): Homolog of NCBI NO: 22331801 NR Description: putative protein; protein id: At3g55150.1, by cDNA: gi_18377617, supported by cDNA: gi_20465378 [Arabidopsis >gi|18377618|gb|AAL66959.1| unknown protein [Arabidopsis
  misc_feature (21)..(591): Homolog of NCBI NO: 15225082 NR Description: hypothetical protein; protein id: At2g39380.1
MVLLKPTTLSKSSKVGPQQQQGFSESLIGDSVEAADAFICQWVTPHLCDSSSSSCSLSSLFSAQNRLEGRRFLEVLGKLQYAIQSTVAMNPDSAKLAKGQDLMRKAMKHLEKEFYRVLKSNRRFLSPESVSGWSSESNIPSRSSGTASDSSSDGELYSESSSELGKDIGGGGNSDAIVDLKMIANCMISSGYEKDCVKIYKKFRKKIIVDTLSHLGFEKLTSTQMQKLEWEILEKKIKIWVIVARVAITTLFNGERILSDHIFSSSVAESCFVDITLQSALNLFIFSLTVAKSRKTAEKIFPTLDVYQTILQLTPKIDQIFSYDSTAAVRLQANESLEKLSESVNAMMTEFQSSITKESSKSAISGGGVHQLTRYVMNFIVFLADYSDSLATILKESSLPLPEDYFSSSGEENPGSGDRSPMAARLAWLILVLLCKIDAKSRLYNDSALSYLFLANNLHYVVTKVRTSNLRLVLGDDWVANHEVKVNQYLEKYEKMAWGDVIASLPGDSTAGTEAEESLRRFNEAFEEAYKKHKTWVVPDPNLRDEIQASIARKLMPGYTGFYKKHPVGSCNIVRFTPEDLNNYITDLYVGLGRSVPVSKTKKYMVSPSHTTDLK

SEQ ID NO: 87236 - protein, 527 aa, Arabidopsis thaliana
  peptide (1)..(527): Ceres Seq. ID no. 12699249
  misc_feature (1)..(502): Pfam Name: Exo70 exocyst complex subunit Pfam Description: Exo70 exocyst complex subunit
  misc_feature (1)..(470): Homolog of NCBI NO: 22329407 NR Description: similar to leucine zipper-containing protein;
  misc_feature (1)..(507): Homolog of NCBI NO: 15226917 NR Description: unknown protein; protein id: At2g28640.1
  misc_feature (65)..(507): Homolog of NCBI NO: 15226919 NR Description: hypothetical protein; protein id: At2g28650.1
  misc_feature (1)..(68): Homolog of NCBI NO: 15226919 NR Description: hypothetical protein; protein id: At2g28650.1
  misc_feature (1)..(511): Homolog of NCBI NO: 15238510 NR Description: putative protein; protein id: At5g59730.1, by cDNA: gi_13430533, supported by cDNA: gi_14334437, supported cDNA: gi_15010739, supported by cDNA: gi_16974428, supported by
  misc_feature (1)..(511): Homolog of NCBI NO: 23397263 NR Description: unknown protein [Arabidopsis thaliana]
  misc_feature (1)..(468): Homolog of NCBI NO: 23397289 NR Description: unknown protein [Arabidopsis thaliana]
  misc_feature (1)..(524): Homolog of NCBI NO: 11278980 NR Description: hypothetical protein T26I12.30 - Arabidopsis >gi|7019648|emb|CAB75749.1| putative protein [Arabidopsis
  misc_feature (1)..(524): Homolog of NCBI NO: 22331801 NR Description: putative protein; protein id: At3g55150.1, by cDNA: gi_18377617, supported by cDNA: gi_20465378 [Arabidopsis >gi|18377618|gb|AAL66959.1| unknown protein [Arabidopsis
  misc_feature (1)..(503): Homolog of NCBI NO: 15225082 NR Description: hypothetical protein; protein id: At2g39380.1
MNPDSAKLAKGQDLMRKAMKHLEKEFYRVLKSNRRFLSPESVSGWSSESNIPSRSSGTASDSSSDGELYSESSSELGKDIGGGGNSDAIVDLKMIANCMISSGYEKDCVKIYKKFRKKIIVDTLSHLGFEKLTSTQMQKLEWEILEKKIKIWVIVARVAITTLFNGERILSDHIFSSSVAESCFVDITLQSALNLFIFSLTVAKSRKTAEKIFPTLDVYQTILQLTPKIDQIFSYDSTAAVRLQANESLEKLSESVNAMMTEFQSSITKESSKSAISGGGVHQLTRYVMNFIVFLADYSDSLATILKESSLPLPEDYFSSSGEENPGSGDRSPMAARLAWLILVLLCKIDAKSRLYNDSALSYLFLANNLHYVVTKVRTSNLRLVLGDDWVANHEVKVNQYLEKYEKMAWGDVIASLPGDSTAGTEAEESLRRFNEAFEEAYKKHKTWVVPDPNLRDEIQASIARKLMPGYTGFYKKHPVGSCNIVRFTPEDLNNYITDLYVGLGRSVPVSKTKKYMVSPSHTTDLK

SEQ ID NO: 87237 - protein, 513 aa, Arabidopsis thaliana
  peptide (1)..(513): Ceres Seq. ID no. 12699250
  misc_feature (1)..(488): Pfam Name: Exo70 exocyst complex subunit Pfam Description: Exo70 exocyst complex subunit
  misc_feature (1)..(456): Homolog of NCBI NO: 22329407 NR Description: similar to leucine zipper-containing protein;
  misc_feature (1)..(493): Homolog of NCBI NO: 15226917 NR Description: unknown protein; protein id: At2g28640.1
  misc_feature (51)..(493): Homolog of NCBI NO: 15226919 NR Description: hypothetical protein; protein id: At2g28650.1
  misc_feature (1)..(54): Homolog of NCBI NO: 15226919 NR Description: hypothetical protein; protein id: At2g28650.1
  misc_feature (1)..(497): Homolog of NCBI NO: 15238510 NR Description: putative protein; protein id: At5g59730.1, by cDNA: gi_13430533, supported by cDNA: gi_14334437, supported cDNA: gi_15010739, supported by cDNA: gi_16974428, supported by
  misc_feature (1)..(497): Homolog of NCBI NO: 23397263 NR Description: unknown protein [Arabidopsis thaliana]
  misc_feature (1)..(454): Homolog of NCBI NO: 23397289 NR Description: unknown protein [Arabidopsis thaliana]
  misc_feature (1)..(510): Homolog of NCBI NO: 11278980 NR Description: hypothetical protein T26I12.30 - Arabidopsis >gi|7019648|emb|CAB75749.1| putative protein [Arabidopsis
  misc_feature (1)..(510): Homolog of NCBI NO: 22331801 NR Description: putative protein; protein id: At3g55150.1, by cDNA: gi_18377617, supported by cDNA: gi_20465378 [Arabidopsis >gi|18377618|gb|AAL66959.1| unknown protein [Arabidopsis
  misc_feature (1)..(489): Homolog of NCBI NO: 15225082 NR Description: hypothetical protein; protein id: At2g39380.1
MRKAMKHLEKEFYRVLKSNRRFLSPESVSGWSSESNIPSRSSGTASDSSSDGELYSESSSELGKDIGGGGNSDAIVDLKMIANCMISSGYEKDCVKIYKKFRKKIIVDTLSHLGFEKLTSTQMQKLEWEILEKKIKIWVIVARVAITTLFNGERILSDHIFSSSVAESCFVDITLQSALNLFIFSLTVAKSRKTAEKIFPTLDVYQTILQLTPKIDQIFSYDSTAAVRLQANESLEKLSESVNAMMTEFQSSITKESSKSAISGGGVHQLTRYVMNFIVFLADYSDSLATILKESSLPLPEDYFSSSGEENPGSGDRSPMAARLAWLILVLLCKIDAKSRLYNDSALSYLFLANNLHYVVTKVRTSNLRLVLGDDWVANHEVKVNQYLEKYEKMAWGDVIASLPGDSTAGTEAEESLRRFNEAFEEAYKKHKTWVVPDPNLRDEIQASIARKLMPGYTGFYKKHPVGSCNIVRFTPEDLNNYITDLYVGLGRSVPVSKTKKYMVSPSHTTDLK

SEQ ID NO: 87238 - DNA, 1352 bp, Arabidopsis thaliana
  misc_feature (1)..(1352): Ceres Seq. ID no. 12699257
  misc_feature: MA Experiment ID: 108434 Result: Down-regulated in Transcription
  misc_feature: MA Experiment 108434 PARAMETER Experiment Name: At_Root_Tips_cDNA_P Parameter: Tissue Value: Root Tips
  misc_feature: MA Experiment ID: 108435 Result: Up-regulated in Transcription
  misc_feature: MA Experiment 108435 PARAMETER Experiment Name: At_stm_Mutants_cDNA_P Parameter: Plant Line Value: wt Landsburg vs stm
  misc_feature: MA Experiment 108435 PARAMETER Experiment Name: At_stm_Mutants_cDNA_P Parameter: Tissue Value: Shoot Apical Meristem Region
  misc_feature: MA Experiment ID: 108462 Result: Up-regulated in Transcription
  misc_feature: MA Experiment 108462 PARAMETER Experiment Name: At_Germinating_Seeds_cDNA_P Parameter: Age (day) Value: 2 vs. 0
  misc_feature: MA Experiment 108462 PARAMETER Experiment Name: At_Germinating_Seeds_cDNA_P Parameter: Tissue Value: Germinating Seeds
  misc_feature: MA Experiment ID: 108463 Result: Up-regulated in Transcription
  misc_feature: MA Experiment 108463 PARAMETER Experiment Name: At_Germinating_Seeds_cDNA_P Parameter: Age (day) Value: 3 vs. 0
  misc_feature: MA Experiment 108463 PARAMETER Experiment Name: At_Germinating_Seeds_cDNA_P Parameter: Tissue Value: Germinating Seeds
  misc_feature: MA Experiment ID: 108464 Result: Up-regulated in Transcription
  misc_feature: MA Experiment 108464 PARAMETER Experiment Name: At_Germinating_Seeds_cDNA_P Parameter: Age (day) Value: 4 vs. 0
  misc_feature: MA Experiment 108464 PARAMETER Experiment Name: At_Germinating_Seeds_cDNA_P Parameter: Tissue Value: Germinating Seeds
  misc_feature: MA Experiment ID: 108573 Result: Up-regulated in Transcription
  misc_feature: MA Experiment 108573 PARAMETER Experiment Name: At_Drought_cDNA_P Parameter: Timepoint (hr) Value: 6
  misc_feature: MA Experiment 108573 PARAMETER Experiment Name: At_Drought_cDNA_P Parameter: Tissue Value: Aerial
  misc_feature: MA Experiment 108573 PARAMETER Experiment Name: At_Drought_cDNA_P Parameter: Treatment Value: Drought vs. No Drought
  misc_feature: MA Experiment ID: 108585 Result: Up-regulated in Transcription
  misc_feature: MA Experiment 108585 PARAMETER Experiment Name: At_5mM_NaNP_cDNA_P Parameter: Timepoint (hr) Value: 6
  misc_feature: MA Experiment 108585 PARAMETER Experiment Name: At_5mM_NaNP_cDNA_P Parameter: Tissue Value: Aerial
  misc_feature: MA Experiment 108585 PARAMETER Experiment Name: At_5mM_NaNP_cDNA_P Parameter: Treatment Value: null
  misc_feature: MA Experiment ID: 108595 Result: Up-regulated in Transcription
  misc_feature: MA Experiment 108595 PARAMETER Experiment Name: At_Ler-pi_Ovule_cDNA_P Parameter: Plant Line Value: null
  misc_feature: MA Experiment ID: 108605 Result: Up-regulated in Transcription
  misc_feature: MA Experiment 108605 PARAMETER Experiment Name: At_100uM_ABA_cDNA_P Parameter: Timepoint (hr) Value: 6
  misc_feature: MA Experiment 108605 PARAMETER Experiment Name: At_100uM_ABA_cDNA_P Parameter: Tissue Value: Aerial
  misc_feature: MA Experiment 108605 PARAMETER Experiment Name: At_100uM_ABA_cDNA_P Parameter: Treatment Value: 100uM ABA vs. No Treatment
  misc_feature: MA Experiment ID: 108609 Result: Up-regulated in Transcription
  misc_feature: MA Experiment 108609 PARAMETER Experiment Name: At_100uM_ABA_cDNA_P Parameter: Timepoint (hr) Value: 24
  misc_feature: MA Experiment 108609 PARAMETER Experiment Name: At_100uM_ABA_cDNA_P Parameter: Tissue Value: Aerial
  misc_feature: MA Experiment 108609 PARAMETER Experiment Name: At_100uM_ABA_cDNA_P Parameter: Treatment Value: 100uM ABA vs. No Treatment
  misc_feature: MA Experiment ID: 20000113 Result: Down-regulated in Transcription
  misc_feature: MA Experiment 20000113 PARAMETER Experiment Name: At_42deg_Heat_cDNA_P Parameter: Temperature (deg C) Value: 42 vs. 22
  misc_feature: MA Experiment 20000113 PARAMETER Experiment Name: At_42deg_Heat_cDNA_P Parameter: Timepoint (hr) Value: 8
  misc_feature: MA Experiment 20000113 PARAMETER Experiment Name: At_42deg_Heat_cDNA_P Parameter: Tissue Value: Aerial
  misc_feature: MA Experiment ID: 20000184 Result: Up-regulated in Transcription
  misc_feature: MA Experiment 20000184 PARAMETER Experiment Name: At_Shoots__P Parameter: Age (day) Value: 7
  misc_feature: MA Experiment 20000184 PARAMETER Experiment Name: At_Shoots__P Parameter: Tissue Value: Shoots vs. Whole Plant
  misc_feature: MA Experiment ID: 20000185 Result: Up-regulated in Transcription
  misc_feature: MA Experiment 20000185 PARAMETER Experiment Name: At_Roots__P Parameter: Age (day) Value: 7 vs. 21
  misc_feature: MA Experiment 20000185 PARAMETER Experiment Name: At_Roots__P Parameter: Organism Value: A. thaliana
  misc_feature: MA Experiment 20000185 PARAMETER Experiment Name: At_Roots__P Parameter: Tissue Value: Roots vs. Whole Plant
  misc_feature: MA Experiment ID: 20000286 Result: Up-regulated in Transcription
  misc_feature: MA Experiment 20000286 PARAMETER Experiment Name: At_Open_Flower_P Parameter: Age (day) Value: 21
  misc_feature: MA Experiment 20000286 PARAMETER Experiment Name: At_Open_Flower_P Parameter: Plant Line Value: WS
  misc_feature: MA Experiment 20000286 PARAMETER Experiment Name: At_Open_Flower_P Parameter: Tissue Value: Half Open vs. Whole Plant
  misc_feature: MA Experiment ID: 20001911 Result: Up-regulated in Transcription
  misc_feature: MA Experiment 20001911 PARAMETER Experiment Name: At_Drought_Reproduction_P Parameter: Age (day) Value: 40
  misc_feature: MA Experiment 20001911 PARAMETER Experiment Name: At_Drought_Reproduction_P Parameter: Organism Value: A. thaliana
  misc_feature: MA Experiment 20001911 PARAMETER Experiment Name: At_Drought_Reproduction_P Parameter: Plant Line Value: WS
  misc_feature: MA Experiment 20001911 PARAMETER Experiment Name: At_Drought_Reproduction_P Parameter: Timepoint (day) Value: 10
  misc_feature: MA Experiment 20001911 PARAMETER Experiment Name: At_Drought_Reproduction_P Parameter: Tissue Value: Flowers
  misc_feature: MA Experiment 20001911 PARAMETER Experiment Name: At_Drought_Reproduction_P Parameter: Treatment Value: Drought vs. No Drought
acatcaaaacttactacttcttcttcttcttcctttaccaaatcttttcttctttactctttttcatcgtcgagaaaaaatggagttggatcttacacctaagttgcccaagaaggtttacggaggagatggtggatcttactctgcctggtgcccagaggagttgccgatgctcaaacagggtaacattggagccgctaagcttgctcttgagaagaatggcttcgctgtccctcgttactctgattcctctaaggtcgcttatgttcttcaaggatctggaactgctggaattgttctcccagagaaggaggagaaggtgatcgcaatcaagcaaggtgattcgattgctcttccctttggtgtggtcacatggtggttcaacaacgaggatcctgagcttgttatcctcttccttggtgaaacccacaagggtcacaaagcagggcagttcactgagttctatcttactggcacaaacggtatcttcactggtttctccactgagtttgttggcagagcctgggaccttgatgagaacaccgtgaagaaacttgttggttctcaaaccggtaatggcattgtgaagcttgatgcgggctttaagatgccacagcccaaggaggagaaccgtgctgggtttgtcttgaactgtttggaggctcctcttgatgtagacatcaaggatggaggcagggtcgttgtcttgaacaccaagaaccttcctttggttggagaggttggctttggagctgatcttgttcggatcgatgcacactccatgtgttcgcctggtttctcttgtgactctgctcttcaggtgacttacattgtgggtggaagtggaagagtccaggtggttggtggtgatgggaaaagagttcttgagacccatatcaaagctggttctctcttcattgttccaaggttctttgtggtttctaagattgctgatgctgatggcatgtcttggttctccattgtcaccactcctgatccgatcttcacacatttggccgggaatacatcggtgtggaagtctttgtcccctgaggttttgcaggcagcgtttaaggtggctccggaggtggagaagtccttccgatccacgaggacttcatcagccattttcttccctccttccaactgaagaaggagaagaatgagaacaagaaccagcttttatcttttatcgtttgttgctttccctcagagatttttgagggtttttacttttcttgtgattcaaggaagtttcttagtctagttgtttaattctcttcctgccttttccccctggaccggttcttgttctcgttgttttaaaatattaaaaaatcaacctttcctat

SEQ ID NO: 87239 - protein, 382 aa, Arabidopsis thaliana; identical to SEQ ID NO: 25400
  peptide (1)..(382): Ceres Seq. ID no. 12699258
  misc_feature (31)..(183): Pfam Name: Cupin Pfam Description: Cupin
  misc_feature (27)..(382): Homolog of NCBI NO: 15223000 NR Description: globulin-like protein; protein id: At1g07750.1, by cDNA: 40551., supported by cDNA: gi_12248028, supported by gi_15294233 [Arabidopsis thaliana] >gi|25407006|pir||A86213
  misc_feature (27)..(382): Homolog of NCBI NO: 21593610 NR Description: globulin-like protein [Arabidopsis thaliana]
  misc_feature (27)..(382): Homolog of NCBI NO: 15226926 NR Description: legumin-like protein; protein id: At2g28680.1
  misc_feature (29)..(382): Homolog of NCBI NO: 28950670 NR Description: legumin-like protein [Zea mays]
  misc_feature (27)..(382): Homolog of NCBI NO: 37730876 NR Description: legumin-like protein [Zea mays]
  misc_feature (25)..(382): Homolog of NCBI NO: 34906084 NR Description: putative legumin-like protein [Oryza sativa
  misc_feature (29)..(382): Homolog of NCBI NO: 28950668 NR Description: legumin-like protein [Zea mays]
  misc_feature (27)..(206): Homolog of NCBI NO: 7595348 NR Description: globulin-like protein [Cucumis melo]
  misc_feature (158)..(381): Homolog of NCBI NO: 949869 NR Description: legumin; 11S-globulin [Ginkgo biloba]
  misc_feature (31)..(101): Homolog of NCBI NO: 949869 NR Description: legumin; 11S-globulin [Ginkgo biloba]

SEQ ID NO: 87240 - protein, 356 aa, Arabidopsis thaliana; identical to SEQ ID NO: 25401
  peptide (1)..(356): Ceres Seq. ID no. 12699259
  misc_feature (5)..(157): Pfam Name: Cupin Pfam Description: Cupin
  misc_feature (1)..(356): Homolog of NCBI NO: 15223000 NR Description: globulin-like protein; protein id: At1g07750.1, by cDNA: 40551., supported by cDNA: gi_12248028, supported by gi_15294233 [Arabidopsis thaliana] >gi|25407006|pir||A86213
  misc_feature (1)..(356): Homolog of NCBI NO: 21593610 NR Description: globulin-like protein [Arabidopsis thaliana]
  misc_feature (1)..(356): Homolog of NCBI NO: 15226926 NR Description: legumin-like protein; protein id: At2g28680.1
  misc_feature (3)..(356): Homolog of NCBI NO: 28950670 NR Description: legumin-like protein [Zea mays]
  misc_feature (1)..(356): Homolog of NCBI NO: 37730876 NR Description: legumin-like protein [Zea mays]
  misc_feature (1)..(356): Homolog of NCBI NO: 34906084 NR Description: putative legumin-like protein [Oryza sativa
  misc_feature (3)..(356): Homolog of NCBI NO: 28950668 NR Description: legumin-like protein [Zea mays]
  misc_feature (1)..(180): Homolog of NCBI NO: 7595348 NR Description: globulin-like protein [Cucumis melo]
  misc_feature (132)..(355): Homolog of NCBI NO: 949869 NR Description: legumin; 11S-globulin [Ginkgo biloba]
  misc_feature (5)..(75): Homolog of NCBI NO: 949869 NR Description: legumin; 11S-globulin [Ginkgo biloba]

SEQ ID NO: 87241 - protein, 326 aa, Arabidopsis thaliana; identical to SEQ ID NO: 25402
  peptide (1)..(326): Ceres Seq. ID no. 12699260
  misc_feature (1)..(127): Pfam Name: Cupin Pfam Description: Cupin
  misc_feature (1)..(326): Homolog of NCBI NO: 15223000 NR Description: globulin-like protein; protein id: At1g07750.1, by cDNA: 40551., supported by cDNA: gi_12248028, supported by gi_15294233 [Arabidopsis thaliana] >gi|25407006|pir||A86213
  misc_feature (1)..(326): Homolog of NCBI NO: 21593610 NR Description: globulin-like protein [Arabidopsis thaliana]
  misc_feature (1)..(326): Homolog of NCBI NO: 15226926 NR Description: legumin-like protein; protein id: At2g28680.1
  misc_feature (1)..(326): Homolog of NCBI NO: 28950670 NR Description: legumin-like protein [Zea mays]
  misc_feature (1)..(326): Homolog of NCBI NO: 37730876 NR Description: legumin-like protein [Zea mays]
  misc_feature (1)..(326): Homolog of NCBI NO: 34906084 NR Description: putative legumin-like protein [Oryza sativa
  misc_feature (1)..(326): Homolog of NCBI NO: 28950668 NR Description: legumin-like protein [Zea mays]
  misc_feature (1)..(150): Homolog of NCBI NO: 7595348 NR Description: globulin-like protein [Cucumis melo]
  misc_feature (102)..(325): Homolog of NCBI NO: 949869 NR Description: legumin; 11S-globulin [Ginkgo biloba]
  misc_feature (1)..(45): Homolog of NCBI NO: 949869 NR Description: legumin; 11S-globulin [Ginkgo biloba]

SEQ ID NO: 87242 - DNA, 1047 bp, Arabidopsis thaliana
  misc_feature (1)..(1047): Ceres Seq. ID no. 12699266
  misc_feature: MA Experiment ID: 20000180 Result: Down-regulated in Transcription
  misc_feature: MA Experiment 20000180 PARAMETER Experiment Name: At_Germinating_Seeds_P Parameter: Age (hr) Value: 24 vs. 0
  misc_feature: MA Experiment 20000180 PARAMETER Experiment Name: At_Germinating_Seeds_P Parameter: Tissue Value: Germinating Seeds
  misc_feature: MA Experiment ID: 20000184 Result: Down-regulated in Transcription
  misc_feature: MA Experiment 20000184 PARAMETER Experiment Name: At_Shoots__P Parameter: Age (day) Value: 7
  misc_feature: MA Experiment 20000184 PARAMETER Experiment Name: At_Shoots__P Parameter: Tissue Value: Shoots vs. Whole Plant
  misc_feature: MA Experiment ID: 20001557 Result: Up-regulated in Transcription
  misc_feature: MA Experiment 20001557 PARAMETER Experiment Name: At_Drought_Soil_Dry_P Parameter: Age (day) Value: 27
  misc_feature: MA Experiment 20001557 PARAMETER Experiment Name: At_Drought_Soil_Dry_P Parameter: Organism Value: A. thaliana
  misc_feature: MA Experiment 20001557 PARAMETER Experiment Name: At_Drought_Soil_Dry_P Parameter: Plant Line Value: WS
  misc_feature: MA Experiment 20001557 PARAMETER Experiment Name: At_Drought_Soil_Dry_P Parameter: Post Timepoint (hr) Value: 3
  misc_feature: MA Experiment 20001557 PARAMETER Experiment Name: At_Drought_Soil_Dry_P Parameter: Post-Treatment Value: Re-Water vs. No Drought
  misc_feature: MA Experiment 20001557 PARAMETER Experiment Name: At_Drought_Soil_Dry_P Parameter: Timepoint (day) Value: 13
  misc_feature: MA Experiment 20001557 PARAMETER Experiment Name: At_Drought_Soil_Dry_P Parameter: Treatment Value: Drought vs. No Drought
  misc_feature: MA Experiment ID: 20001558 Result: Up-regulated in Transcription
  misc_feature: MA Experiment 20001558 PARAMETER Experiment Name: At_Drought_Soil_Dry_P Parameter: Age (day) Value: 27
  misc_feature: MA Experiment 20001558 PARAMETER Experiment Name: At_Drought_Soil_Dry_P Parameter: Organism Value: A. thaliana
  misc_feature: MA Experiment 20001558 PARAMETER Experiment Name: At_Drought_Soil_Dry_P Parameter: Plant Line Value: WS
  misc_feature: MA Experiment 20001558 PARAMETER Experiment Name: At_Drought_Soil_Dry_P Parameter: Post Timepoint (hr) Value: 6
  misc_feature: MA Experiment 20001558 PARAMETER Experiment Name: At_Drought_Soil_Dry_P Parameter: Post-Treatment Value: Re-Water vs. No Drought
  misc_feature: MA Experiment 20001558 PARAMETER Experiment Name: At_Drought_Soil_Dry_P Parameter: Timepoint (day) Value: 13
  misc_feature: MA Experiment 20001558 PARAMETER Experiment Name: At_Drought_Soil_Dry_P Parameter: Treatment Value: Drought vs. No Drought
atggaggagatcaccaaaccggtccttgttggaatagttaagaaagaagctccacagctagcatccgtgttgagagaaatgaagaatgttctagatgtggttaggagcaaagtggaagctctgactgcattggtaaaagcaaacagttttccgacagcgggtgggataagttatcttgaggccaagcatctgttacttctaagttattgccaggatcttgtatattatattctaaggaaagcaaaaggactctctattgatggtcatcctcttgtaaggagccttgtagagatacgtatgtttctggaaaagattcgtcccatagacaaaaaacttcagtaccagattcagaagctcaccacagccggtgggcctgtgacagagctagctcattccgagggaaaggggtcgtgtgaagcccaaaaatctgaagatctttcaaattataagcctaaacctgacttacttgctgacaaagaggatgaccaagaggatgatggtgtttatcgacccccgaaatttgcccctatgtctatggaagataagacttcaaaacaagaaagagatgctgccagaaaagagaaacacttttttagacaagccactgaaaatacatacatgaaagatgtgttggacgatctggaggacaggcctgaagagattagagactattatggggttgagagcaatgagcagaagaggtttatggcacagtatgaaaggcaacaaaaggcagaagaagagctctttacccgggcacctcgcactaaagaggataagaagagagagaagcgcttgaaatcaagcagcgggttgcatgaactaaccgagaacttttacgatgatatcaagttcttggataaggatggtgaaaagccaagaagcttcggccgtaataaaaggggagggccattcaagaaaagaaagtttcttttacaaggcactgatatggatacaccagtggttcctttagctgcttcagtgcaccaattttgttgccatgaaaaagatacaaattttcgatttgcttttatgattaaatgttga

SEQ ID NO: 87243 - protein, 348 aa, Arabidopsis thaliana
  peptide (1)..(348): Ceres Seq. ID no. 12699267
  misc_feature (11)..(104): Pfam Name: Sas10/Utp3 family Pfam Description: Sas10/Utp3 family
  misc_feature (1)..(309): Homolog of NCBI NO: 18390818 NR Description: expressed protein; protein id: At1g07840.1, by cDNA: gi_15810572, supported by cDNA: gi_20259572 [Arabidopsis >gi|15810573|gb|AAL07174.1| unknown protein [Arabidopsis
  misc_feature (1)..(271): Homolog of NCBI NO: 25372823 NR Description: protein F24B9.6 [imported] - Arabidopsis thaliana
  misc_feature (16)..(122): Homolog of NCBI NO: 34906856 NR Description: P0470A12.5 [Oryza sativa (japonica
  misc_feature (6)..(313): Homolog of NCBI NO: 7512783 NR Description: hypothetical protein DKFZp564O092.1 - human
  misc_feature (6)..(313): Homolog of NCBI NO: 37545892 NR Description: similar to hypothetical protein [Homo sapiens]
  misc_feature (10)..(313): Homolog of NCBI NO: 21410066 NR Description: DKFZP564O092 protein [Homo sapiens]
  misc_feature (5)..(311): Homolog of NCBI NO: 23272205 NR Description: Unknown (protein for IMAGE:5345281) [Mus musculus]
  misc_feature (12)..(311): Homolog of NCBI NO: 20876056 NR Description: RIKEN cDNA 1500001L15 [Mus musculus]
  misc_feature (12)..(309): Homolog of NCBI NO: 34874139 NR Description: similar to CG11030-PA [Rattus norvegicus]
  misc_feature (12)..(309): Homolog of NCBI NO: 40675680 NR Description: Unknown (protein for IMAGE:5336691) [Silurana
MEEITKPVLVGIVKKEAPQLASVLREMKNVLDVVRSKVEALTALVKANSFPTAGGISYLEAKHLLLLSYCQDLVYYILRKAKGLSIDGHPLVRSLVEIRMFLEKIRPIDKKLQYQIQKLTTAGGPVTELAHSEGKGSCEAQKSEDLSNYKPKPDLLADKEDDQEDDGVYRPPKFAPMSMEDKTSKQERDAARKEKHFFRQATENTYMKDVLDDLEDRPEEIRDYYGVESNEQKRFMAQYERQQKAEEELFTRAPRTKEDKKREKRLKSSSGLHELTENFYDDIKFLDKDGEKPRSFGRNKRGGPFKKRKFLLQGTDMDTPVVPLAASVHQFCCHEKDTNFRFAFMIKC

SEQ ID NO: 87244 - protein, 322 aa, Arabidopsis thaliana
  peptide (1)..(322): Ceres Seq. ID no. 12699268
  misc_feature (1)..(78): Pfam Name: Sas10/Utp3 family Pfam Description: Sas10/Utp3 family
  misc_feature (1)..(283): Homolog of NCBI NO: 18390818 NR Description: expressed protein; protein id: At1g07840.1, by cDNA: gi_15810572, supported by cDNA: gi_20259572 [Arabidopsis >gi|15810573|gb|AAL07174.1| unknown protein [Arabidopsis
  misc_feature (1)..(245): Homolog of NCBI NO: 25372823 NR Description: protein F24B9.6 [imported] - Arabidopsis thaliana
  misc_feature (1)..(96): Homolog of NCBI NO: 34906856 NR Description: P0470A12.5 [Oryza sativa (japonica
  misc_feature (1)..(287): Homolog of NCBI NO: 7512783 NR Description: hypothetical protein DKFZp564O092.1 - human
  misc_feature (1)..(287): Homolog of NCBI NO: 37545892 NR Description: similar to hypothetical protein [Homo sapiens]
  misc_feature (1)..(287): Homolog of NCBI NO: 21410066 NR Description: DKFZP564O092 protein [Homo sapiens]
  misc_feature (1)..(285): Homolog of NCBI NO: 23272205 NR Description: Unknown (protein for IMAGE:5345281) [Mus musculus]
  misc_feature (1)..(285): Homolog of NCBI NO: 20876056 NR Description: RIKEN cDNA 1500001L15 [Mus musculus]
  misc_feature (1)..(283): Homolog of NCBI NO: 34874139 NR Description: similar to CG11030-PA [Rattus norvegicus]
  misc_feature (1)..(283): Homolog of NCBI NO: 40675680 NR Description: Unknown (protein for IMAGE:5336691) [Silurana
MKNVLDVVRSKVEALTALVKANSFPTAGGISYLEAKHLLLLSYCQDLVYYILRKAKGLSIDGHPLVRSLVEIRMFLEKIRPIDKKLQYQIQKLTTAGGPVTELAHSEGKGSCEAQKSEDLSNYKPKPDLLADKEDDQEDDGVYRPPKFAPMSMEDKTSKQERDAARKEKHFFRQATENTYMKDVLDDLEDRPEEIRDYYGVESNEQKRFMAQYERQQKAEEELFTRAPRTKEDKKREKRLKSSSGLHELTENFYDDIKFLDKDGEKPRSFGRNKRGGPFKKRKFLLQGTDMDTPVVPLAASVHQFCCHEKDTNFRFAFMIKC

SEQ ID NO: 87245 - protein, 249 aa, Arabidopsis thaliana
  peptide (1)..(249): Ceres Seq. ID no. 12699269
  misc_feature (1)..(210): Homolog of NCBI NO: 18390818 NR Description: expressed protein; protein id: At1g07840.1, by cDNA: gi_15810572, supported by cDNA: gi_20259572 [Arabidopsis >gi|15810573|gb|AAL07174.1| unknown protein [Arabidopsis
  misc_feature (1)..(172): Homolog of NCBI NO: 25372823 NR Description: protein F24B9.6 [imported] - Arabidopsis thaliana
  misc_feature (1)..(23): Homolog of NCBI NO: 34906856 NR Description: P0470A12.5 [Oryza sativa (japonica
  misc_feature (1)..(214): Homolog of NCBI NO: 7512783 NR Description: hypothetical protein DKFZp564O092.1 - human
  misc_feature (1)..(214): Homolog of NCBI NO: 37545892 NR Description: similar to hypothetical protein [Homo sapiens]
  misc_feature (1)..(214): Homolog of NCBI NO: 21410066 NR Description: DKFZP564O092 protein [Homo sapiens]
  misc_feature (1)..(212): Homolog of NCBI NO: 23272205 NR Description: Unknown (protein for IMAGE:5345281) [Mus musculus]
  misc_feature (1)..(212): Homolog of NCBI NO: 20876056 NR Description: RIKEN cDNA 1500001L15 [Mus musculus]
  misc_feature (1)..(210): Homolog of NCBI NO: 34874139 NR Description: similar to CG11030-PA [Rattus norvegicus]
  misc_feature (1)..(210): Homolog of NCBI NO: 40675680 NR Description: Unknown (protein for IMAGE:5336691) [Silurana
MFLEKIRPIDKKLQYQIQKLTTAGGPVTELAHSEGKGSCEAQKSEDLSNYKPKPDLLADKEDDQEDDGVYRPPKFAPMSMEDKTSKQERDAARKEKHFFRQATENTYMKDVLDDLEDRPEEIRDYYGVESNEQKRFMAQYERQQKAEEELFTRAPRTKEDKKREKRLKSSSGLHELTENFYDDIKFLDKDGEKPRSFGRNKRGGPFKKRKFLLQGTDMDTPVVPLAASVHQFCCHEKDTNFRFAFMIKC

SEQ ID NO: 87246 - DNA, 1301 bp, Arabidopsis thaliana
  misc_feature (1)..(1301): Ceres Seq. ID no. 12699274
  misc_feature: MA Experiment ID: 20000166 Result: Up-regulated in Transcription
  misc_feature: MA Experiment 20000166 PARAMETER Experiment Name: At_100uM_ABA_P Parameter: Age (day) Value: 14
  misc_feature: MA Experiment 20000166 PARAMETER Experiment Name: At_100uM_ABA_P Parameter: Organism Value: A. thaliana
  misc_feature: MA Experiment 20000166 PARAMETER Experiment Name: At_100uM_ABA_P Parameter: Plant Line Value: WS
  misc_feature: MA Experiment 20000166 PARAMETER Experiment Name: At_100uM_ABA_P Parameter: Timepoint (hr) Value: 1
  misc_feature: MA Experiment 20000166 PARAMETER Experiment Name: At_100uM_ABA_P Parameter: Tissue Value: Aerial
  misc_feature: MA Experiment 20000166 PARAMETER Experiment Name: At_100uM_ABA_P Parameter: Treatment Value: 100uM ABA vs. No Treatment
  misc_feature: MA Experiment ID: 20000173 Result: Up-regulated in Transcription
  misc_feature: MA Experiment 20000173 PARAMETER Experiment Name: At_42deg_Heat_P Parameter: Age (day) Value: 14
  misc_feature: MA Experiment 20000173 PARAMETER Experiment Name: At_42deg_Heat_P Parameter: Organism Value: A. thaliana
  misc_feature: MA Experiment 20000173 PARAMETER Experiment Name: At_42deg_Heat_P Parameter: Plant Line Value: WS
  misc_feature: MA Experiment 20000173 PARAMETER Experiment Name: At_42deg_Heat_P Parameter: Temperature (deg C) Value: 42 vs. 22
  misc_feature: MA Experiment 20000173 PARAMETER Experiment Name: At_42deg_Heat_P Parameter: Timepoint (hr) Value: 6
  misc_feature: MA Experiment 20000173 PARAMETER Experiment Name: At_42deg_Heat_P Parameter: Tissue Value: Aerial
  misc_feature: MA Experiment ID: 20000184 Result: Down-regulated in Transcription
  misc_feature: MA Experiment 20000184 PARAMETER Experiment Name: At_Shoots__P Parameter: Age (day) Value: 7
  misc_feature: MA Experiment 20000184 PARAMETER Experiment Name: At_Shoots__P Parameter: Tissue Value: Shoots vs. Whole Plant
  misc_feature: MA Experiment ID: 20000437 Result: Up-regulated in Transcription
  misc_feature: MA Experiment 20000437 PARAMETER Experiment Name: At_Drought_P Parameter: Age (day) Value: 8
  misc_feature: MA Experiment 20000437 PARAMETER Experiment Name: At_Drought_P Parameter: Organism Value: A. thaliana
  misc_feature: MA Experiment 20000437 PARAMETER Experiment Name: At_Drought_P Parameter: Plant Line Value: WS
  misc_feature: MA Experiment 20000437 PARAMETER Experiment Name: At_Drought_P Parameter: Timepoint (hr) Value: 24
  misc_feature: MA Experiment 20000437 PARAMETER Experiment Name: At_Drought_P Parameter: Tissue Value: Whole Plant
  misc_feature: MA Experiment 20000437 PARAMETER Experiment Name: At_Drought_P Parameter: Treatment Value: Drought vs. No Drought
  misc_feature: MA Experiment ID: 20000439 Result: Up-regulated in Transcription
  misc_feature: MA Experiment 20000439 PARAMETER Experiment Name: At_Roots__P Parameter: Age (day) Value: 14 vs. 21
  misc_feature: MA Experiment 20000439 PARAMETER Experiment Name: At_Roots__P Parameter: Organism Value: A. thaliana
  misc_feature: MA Experiment 20000439 PARAMETER Experiment Name: At_Roots__P Parameter: Tissue Value: Roots vs. Whole Plant
  misc_feature: MA Experiment ID: 20001905 Result: Up-regulated in Transcription
  misc_feature: MA Experiment 20001905 PARAMETER Experiment Name: At_Drought_Reproduction_P Parameter: Age (day) Value: 40
  misc_feature: MA Experiment 20001905 PARAMETER Experiment Name: At_Drought_Reproduction_P Parameter: Organism Value: A. thaliana
  misc_feature: MA Experiment 20001905 PARAMETER Experiment Name: At_Drought_Reproduction_P Parameter: Plant Line Value: WS
  misc_feature: MA Experiment 20001905 PARAMETER Experiment Name: At_Drought_Reproduction_P Parameter: Timepoint (day) Value: 10
  misc_feature: MA Experiment 20001905 PARAMETER Experiment Name: At_Drought_Reproduction_P Parameter: Tissue Value: Rosettes
  misc_feature: MA Experiment 20001905 PARAMETER Experiment Name: At_Drought_Reproduction_P Parameter: Treatment Value: Drought vs. No Drought
atgggttgtttcggatgcagtaagaaatcgagcaaacgatccgagactaacaaagatactgtcataaatagaaaaattgtcggtggtactacgagcgttgctaagagtgataagcgagacgatcagactcagcccagttcagattcaacaaaagtcagtccatatagagatgtaaacaatgaaggaggagttggtaaggaagatcagttatctttggatgtgaagggtttgaatctaaatgaccaagtcacagggaagaaagcacagacttttacttttcaagaacttgcagaagctacgggaaactttagatcggattgttttcttggtgaaggaggtttcggaaaagttttcaagggaactatagagaaattggatcaggttgttgcaatcaagcaacttgatcgtaatggggttcaaggaatcagggaatttgtggttgaggtattgactctaagtcttgctgaccatccgaatcttgtgaagcttattgggttttgtgctgagggtgatcagagactactggtgtacgagtatatgccgcaaggatcccttgaagatcatctacatgttctcccttctggtaaaaagcctcttgactggaacacccggatgaaaatagcagctggtgcagcaagaggtttagagtatctgcatgacagaatgacgccccctgtgatttaccgagatcttaaatgttcgaatattttgcttggtgaagactatcaaccgaaactatctgactttgggttggctaaagtaggaccaagcggggataaaacccatgtctcgacaagggttatgggaacgtacggatactgtgctcctgactacgctatgacgggtcagctcacatttaaatccgatatatacagttttggagtagtccttctcgagcttatcaccggaaggaaagcgattgacaatacaaaaacgcgtaaagatcagaatttggttggatgggcacgaccattgttcaaagacaggaggaacttcccaaaaatggttgatccattgcttcagggacaatacccagttagaggactgtaccaagcactagcaatatcagcaatgtgcgttcaagagcagcctaccatgagaccagtggtatctgatgtagtattggctctcaacttcttagcctcttctaaatatgatccgaatagccctagcagcagcagcgggaagaacccttcttttcacagagacagagatgatgaagagaaaagaccacacctcgtcaaggaaactgaatgtgaagggtcctcataggatatccaataagagagtggtaaaaaatc

SEQ ID NO: 87247 - protein, 423 aa, Arabidopsis thaliana; identical to SEQ ID NO: 24904
  peptide (1)..(423): Ceres Seq. ID no. 12699275
  misc_feature (1)..(423): Homolog of NCBI NO: 15223024 NR Description: protein kinase, putative (fragment); protein id: supported by cDNA: gi_18176233, supported by cDNA: gi_20465778 thaliana] >gi|25287629|pir||B86214 hypothetical protein
  misc_feature (1)..(399): Homolog of NCBI NO: 7573596 NR Description: protein kinase 1 [Populus nigra]
  misc_feature (3)..(410): Homolog of NCBI NO: 7573598 NR Description: protein kinase 2 [Populus nigra]
  misc_feature (1)..(409): Homolog of NCBI NO: 15226901 NR Description: putative protein kinase; protein id: At2g28590.1
  misc_feature (49)..(406): Homolog of NCBI NO: 15238886 NR Description: protein kinase -like protein; protein id:
  misc_feature (29)..(389): Homolog of NCBI NO: 34394036 NR Description: putative protein serine/threonine kinase BNK1
  misc_feature (36)..(405): Homolog of NCBI NO: 34907210 NR Description: putative serine/threonine kinase PBS1 protein
  misc_feature (36)..(389): Homolog of NCBI NO: 10445209 NR Description: protein serine/threonine kinase BNK1 [Brassica
  misc_feature (88)..(404): Homolog of NCBI NO: 11259782 NR Description: protein kinase-like - Arabidopsis thaliana
  misc_feature (88)..(387): Homolog of NCBI NO: 30679773 NR Description: protein kinase family [Arabidopsis thaliana]

SEQ ID NO: 87248 - protein, 244 aa, Arabidopsis thaliana; identical to SEQ ID NO: 24905
  peptide (1)..(244): Ceres Seq. ID no. 12699276
  misc_feature (1)..(244): Homolog of NCBI NO: 15223024 NR Description: protein kinase, putative (fragment); protein id: supported by cDNA: gi_18176233, supported by cDNA: gi_20465778 thaliana] >gi|25287629|pir||B86214 hypothetical protein
  misc_feature (1)..(220): Homolog of NCBI NO: 7573596 NR Description: protein kinase 1 [Populus nigra]
  misc_feature (1)..(231): Homolog of NCBI NO: 7573598 NR Description: protein kinase 2 [Populus nigra]
  misc_feature (1)..(230): Homolog of NCBI NO: 15226901 NR Description: putative protein kinase; protein id: At2g28590.1
  misc_feature (1)..(227): Homolog of NCBI NO: 15238886 NR Description: protein kinase -like protein; protein id:
  misc_feature (1)..(210): Homolog of NCBI NO: 34394036 NR Description: putative protein serine/threonine kinase BNK1
  misc_feature (1)..(226): Homolog of NCBI NO: 34907210 NR Description: putative serine/threonine kinase PBS1 protein
  misc_feature (1)..(210): Homolog of NCBI NO: 10445209 NR Description: protein serine/threonine kinase BNK1 [Brassica
  misc_feature (1)..(225): Homolog of NCBI NO: 11259782 NR Description: protein kinase-like - Arabidopsis thaliana
  misc_feature (1)..(208): Homolog of NCBI NO: 30679773 NR Description: protein kinase family [Arabidopsis thaliana]

SEQ ID NO: 87249 - protein, 219 aa, Arabidopsis thaliana; identical to SEQ ID NO: 77421
  peptide (1)..(219): Ceres Seq. ID no. 12699277
  misc_feature (1)..(219): Homolog of NCBI NO: 15223024 NR Description: protein kinase, putative (fragment); protein id: supported by cDNA: gi_18176233, supported by cDNA: gi_20465778 thaliana] >gi|25287629|pir||B86214 hypothetical protein
  misc_feature (1)..(195): Homolog of NCBI NO: 7573596 NR Description: protein kinase 1 [Populus nigra]
  misc_feature (1)..(206): Homolog of NCBI NO: 7573598 NR Description: protein kinase 2 [Populus nigra]
  misc_feature (1)..(205): Homolog of NCBI NO: 15226901 NR Description: putative protein kinase; protein id: At2g28590.1
  misc_feature (1)..(202): Homolog of NCBI NO: 15238886 NR Description: protein kinase -like protein; protein id:
  misc_feature (1)..(185): Homolog of NCBI NO: 34394036 NR Description: putative protein serine/threonine kinase BNK1
  misc_feature (1)..(201): Homolog of NCBI NO: 34907210 NR Description: putative serine/threonine kinase PBS1 protein
  misc_feature (1)..(185): Homolog of NCBI NO: 10445209 NR Description: protein serine/threonine kinase BNK1 [Brassica
  misc_feature (1)..(200): Homolog of NCBI NO: 11259782 NR Description: protein kinase-like - Arabidopsis thaliana
  misc_feature (1)..(183): Homolog of NCBI NO: 30679773 NR Description: protein kinase family [Arabidopsis thaliana]

SEQ ID NO: 87250 - DNA, 2880 bp, Arabidopsis thaliana
  misc_feature (1)..(2880): Ceres Seq. ID no. 12699286
  misc_feature: MA Experiment ID: 20000315 Result: Up-regulated in Transcription
  misc_feature: MA Experiment 20000315 PARAMETER Experiment Name: At_14day_Shoots-Roots_Sub_P Parameter: Age (day) Value: 14
  misc_feature: MA Experiment 20000315 PARAMETER Experiment Name: At_14day_Shoots-Roots_Sub_P Parameter: Organism Value: A. thaliana
  misc_feature: MA Experiment 20000315 PARAMETER Experiment Name: At_14day_Shoots-Roots_Sub_P Parameter: Plant Line Value: WS
  misc_feature: MA Experiment 20000315 PARAMETER Experiment Name: At_14day_Shoots-Roots_Sub_P Parameter: Tissue Value: Shoots vs. Whole Plant
  misc_feature: MA Experiment ID: 20000328 Result: Up-regulated in Transcription
  misc_feature: MA Experiment 20000328 PARAMETER Experiment Name: At_42deg_Heat_Sub_P Parameter: Age (day) Value: 14
  misc_feature: MA Experiment 20000328 PARAMETER Experiment Name: At_42deg_Heat_Sub_P Parameter: Organism Value: A. thaliana
  misc_feature: MA Experiment 20000328 PARAMETER Experiment Name: At_42deg_Heat_Sub_P Parameter: Plant Line Value: WS
  misc_feature: MA Experiment 20000328 PARAMETER Experiment Name: At_42deg_Heat_Sub_P Parameter: Temperature (deg C) Value: 42 vs. 22
  misc_feature: MA Experiment 20000328 PARAMETER Experiment Name: At_42deg_Heat_Sub_P Parameter: Timepoint (hr) Value: 6
  misc_feature: MA Experiment 20000328 PARAMETER Experiment Name: At_42deg_Heat_Sub_P Parameter: Tissue Value: Aerial
atgggtaaagagaagtttcacatcaacattgtggtcattggccacgtcgattctggaaagtcgaccaccactgggcacttgatctacaagttgggtggtattgacaagcgtgtcattgagaggttcgagaaggaggctgctgagatgaacaagaggtccttcaagtacgcatgggttttggacaaacttaaggctgagcgtgagcgtggtatcaccattgacattgctctctggaagttcgagaccaccaagtactactgcactgtcattgatgctcctggccatcgtgatttcatcaagaacatgatcactggtacctcccaggctgattgtgctgtccttatcattgactccaccactggtggttttgaggctggtatctccaaggatggtcagacccgtgagcacgctctacttgctttcacccttggtgtcaagcagatgatctgctgttgtaacaagatggatgccactacccccaagtactccaaggccaggtacgatgaaatcatcaaggaggtgtcttcctacttgaagaaggttggttacaaccccgacaaaatcccatttgtgcccatctctggatttgagggtgacaacatgattgagaggtccaccaaccttgactggtacaagggaccaactctccttgaggctcttgaccagatcaacgagcccaagaggccgtcagacaagccccttcgtctcccacttcaggatgtctacaagattggtggtattggaacggtgccagtgggacgtgttgagactggtatgatcaagcctggtatggttgtgacctttgctcccacaggattgaccactgaggtcaagtctgttgagatgcaccacgagtctcttcttgaggcacttccaggtgacaacgttgggttcaatgttaagaatgttgctgtcaaggatcttaagagagggtacgtcgcatccaactccaaggatgaccctgccaagggtgctgctaacttcacctcccaggtcatcatcatgaaccaccctggtcagattggtaacggttacgccccagtcctggattgccacacctctcacattgcagtcaagttctctgagatcttgaccaagattgacaggcgttctggtaaggagattgagaaggagcccaagttcttgaagaatggtgatgctggtatggtgaagatgactccaaccaagcccatggttgtggagaccttctctgagtacccaccacttggacgtttcgctgtgagggacatgaggcagactgttgcagtcggtgttatcaagagtgttgacaagaaggacccaaccggagccaaggttaccaaggctgccgtcaagaagggtgaatcaaaggacagtgttagttttattacaatagtttggtatttggtcgcgtgtctgtgttcttgtttcgttttctccccgtcagagcgttgttctcgtaattgggttcttgatcggaggtggcggatctacacacacattcttcctccgcatcatccttctcccttgtgcgatatcgtttgcctaaccatgggtaaagagaagtttcacatcaacattgtggtcattggccacgtcgattctggaaagtcgacaaccactggacacttgatctacaagttgggtggtattgacaagcgtgtgatcgagaggttcgagaaggaggctgctgagatgaacaagaggtccttcaagtacgcatgggtgttggacaaacttaaggctgagcgtgagcgtggtatcaccattgacattgctctctggaagttcgagaccaccaagtactactgcactgtcattgatgctcctggtcatcgtgatttcatcaagaacatgatcactggtacctcccaggctgattgtgctgtccttatcattgactccaccactggtggttttgaggctggtatctccaaggatggtcagacccgtgagcacgctctccttgctttcacccttggtgtcaagcagatgatctgctgttgtaacaagatggatgccactacccccaagtactccaaggccaggtacgatgaaatcatcaaggaggtgtcttcctacttgaagaaggttggttacaaccccgacaaaatcccatttgtgcccatctctggatttgagggtgacaacatgattgagaggtccaccaaccttgactggtacaagggaccaactctccttgaggctcttgaccagatcaacgagcccaagaggccgtcagacaagccccttcgtctcccacttcaggatgtctacaagattggtggtattggaacggtgccagtgggacgtgttgagactggtatgatcaagcctggtatggttgtgacctttgctcccacaggattgaccactgaggtcaagtctgttgagatgcaccacgagtctcttcttgaggcacttccaggtgacaacgttgggttcaatgttaagaatgttgccgtgaaggatcttaagagagggtacgtcgcctccaactccaaggatgaccctgccaagggtgctgctaacttcacctcccaggtcatcatcatgaaccaccctggtcagattggtaacggttacgccccagtcttggattgccacacctctcacattgcagtcaagttctctgagatcttgaccaagattgacaggcgttctggtaaggagattgagaaggagcccaaattcttgaagaatggtgatgctggtatggtgaagatgactccaaccaagcccatggttgtggagaccttctctgagtacccaccacttggacgtttcgctgttagggacatgaggcagactgttgcagtcggtgttatcaagagtgttgacaagaaggacccaaccggagccaaggttaccaaggctgcagttaagaagggtgcaaagtga

SEQ ID NO: 87251 - protein, 959 aa, Arabidopsis thaliana
  peptide (1)..(959): Ceres Seq. ID no. 12699287
  misc_feature (5)..(227): Pfam Name: Elongation factor Tu GTP binding domain Pfam Description: Elongation factor Tu GTP binding domain
  misc_feature (511)..(959): Homolog of NCBI NO: 15239308 NR Description: elongation factor 1-alpha (EF-1-alpha); protein At5g60390.1, supported by cDNA: gi_13430509, supported by cDNA: supported by cDNA: gi_16930464, supported by cDNA: supported by
  misc_feature (511)..(959): Homolog of NCBI NO: 99688 NR Description: translation elongation factor eEF-1 alpha chain
  misc_feature (511)..(959): Homolog of NCBI NO: 13605682 NR Description: At1g07930/T6D22_3 [Arabidopsis thaliana]
  misc_feature (511)..(959): Homolog of NCBI NO: 13430510 NR Description: putative translation elongation factor eEF-1
  misc_feature (511)..(959): Homolog of NCBI NO: 23397097 NR Description: putative translation elongation factor eEF-1
  misc_feature (511)..(959): Homolog of NCBI NO: 18086389 NR Description: At1g07930/T6D22_3 [Arabidopsis thaliana]
  misc_feature (1)..(447): Homolog of NCBI NO: 15239308 NR Description: elongation factor 1-alpha (EF-1-alpha); protein At5g60390.1, supported by cDNA: gi_13430509, supported by cDNA: supported by cDNA: gi_16930464, supported by cDNA: supported by
  misc_feature (511)..(959): Homolog of NCBI NO: 17064954 NR Description: putative elongation factor 1-a [Arabidopsis
  misc_feature (1)..(447): Homolog of NCBI NO: 99688 NR Description: translation elongation factor eEF-1 alpha chain
  misc_feature (1)..(447): Homolog of NCBI NO: 13605682 NR Description: At1g07930/T6D22_3 [Arabidopsis thaliana]
MGKEKFHINIVVIGHVDSGKSTTTGHLIYKLGGIDKRVIERFEKEAAEMNKRSFKYAWVLDKLKAERERGITIDIALWKFETTKYYCTVIDAPGHRDFIKNMITGTSQADCAVLIIDSTTGGFEAGISKDGQTREHALLAFTLGVKQMICCCNKMDATTPKYSKARYDEIIKEVSSYLKKVGYNPDKIPFVPISGFEGDNMIERSTNLDWYKGPTLLEALDQINEPKRPSDKPLRLPLQDVYKIGGIGTVPVGRVETGMIKPGMVVTFAPTGLTTEVKSVEMHHESLLEALPGDNVGFNVKNVAVKDLKRGYVASNSKDDPAKGAANFTSQVIIMNHPGQIGNGYAPVLDCHTSHIAVKFSEILTKIDRRSGKEIEKEPKFLKNGDAGMVKMTPTKPMVVETFSEYPPLGRFAVRDMRQTVAVGVIKSVDKKDPTGAKVTKAAVKKGESKDSVSFITIVWYLVACLCSCFVFSPSERCSRNWVLDRRWRIYTHILPPHHPSPLCDIVCLTMGKEKFHINIVVIGHVDSGKSTTTGHLIYKLGGIDKRVIERFEKEAAEMNKRSFKYAWVLDKLKAERERGITIDIALWKFETTKYYCTVIDAPGHRDFIKNMITGTSQADCAVLIIDSTTGGFEAGISKDGQTREHALLAFTLGVKQMICCCNKMDATTPKYSKARYDEIIKEVSSYLKKVGYNPDKIPFVPISGFEGDNMIERSTNLDWYKGPTLLEALDQINEPKRPSDKPLRLPLQDVYKIGGIGTVPVGRVETGMIKPGMVVTFAPTGLTTEVKSVEMHHESLLEALPGDNVGFNVKNVAVKDLKRGYVASNSKDDPAKGAANFTSQVIIMNHPGQIGNGYAPVLDCHTSHIAVKFSEILTKIDRRSGKEIEKEPKFLKNGDAGMVKMTPTKPMVVETFSEYPPLGRFAVRDMRQTVAVGVIKSVDKKDPTGAKVTKAAVKKGAK

SEQ ID NO: 87252 - protein, 911 aa, Arabidopsis thaliana
  peptide (1)..(911): Ceres Seq. ID no. 12699288
  misc_feature (1)..(179): Pfam Name: Elongation factor Tu GTP binding domain Pfam Description: Elongation factor Tu GTP binding domain
  misc_feature (463)..(911): Homolog of NCBI NO: 15239308 NR Description: elongation factor 1-alpha (EF-1-alpha); protein At5g60390.1, supported by cDNA: gi_13430509, supported by cDNA: supported by cDNA: gi_16930464, supported by cDNA: supported by
  misc_feature (463)..(911): Homolog of NCBI NO: 99688 NR Description: translation elongation factor eEF-1 alpha chain
  misc_feature (463)..(911): Homolog of NCBI NO: 13605682 NR Description: At1g07930/T6D22_3 [Arabidopsis thaliana]
  misc_feature (463)..(911): Homolog of NCBI NO: 13430510 NR Description: putative translation elongation factor eEF-1
  misc_feature (463)..(911): Homolog of NCBI NO: 23397097 NR Description: putative translation elongation factor eEF-1
  misc_feature (463)..(911): Homolog of NCBI NO: 18086389 NR Description: At1g07930/T6D22_3 [Arabidopsis thaliana]
  misc_feature (1)..(399): Homolog of NCBI NO: 15239308 NR Description: elongation factor 1-alpha (EF-1-alpha); protein At5g60390.1, supported by cDNA: gi_13430509, supported by cDNA: supported by cDNA: gi_16930464, supported by cDNA: supported by
  misc_feature (463)..(911): Homolog of NCBI NO: 17064954 NR Description: putative elongation factor 1-a [Arabidopsis
  misc_feature (1)..(399): Homolog of NCBI NO: 99688 NR Description: translation elongation factor eEF-1 alpha chain
  misc_feature (1)..(399): Homolog of NCBI NO: 13605682 NR Description: At1g07930/T6D22_3 [Arabidopsis thaliana]
MNKRSFKYAWVLDKLKAERERGITIDIALWKFETTKYYCTVIDAPGHRDFIKNMITGTSQADCAVLIIDSTTGGFEAGISKDGQTREHALLAFTLGVKQMICCCNKMDATTPKYSKARYDEIIKEVSSYLKKVGYNPDKIPFVPISGFEGDNMIERSTNLDWYKGPTLLEALDQINEPKRPSDKPLRLPLQDVYKIGGIGTVPVGRVETGMIKPGMVVTFAPTGLTTEVKSVEMHHESLLEALPGDNVGFNVKNVAVKDLKRGYVASNSKDDPAKGAANFTSQVIIMNHPGQIGNGYAPVLDCHTSHIAVKFSEILTKIDRRSGKEIEKEPKFLKNGDAGMVKMTPTKPMVVETFSEYPPLGRFAVRDMRQTVAVGVIKSVDKKDPTGAKVTKAAVKKGESKDSVSFITIVWYLVACLCSCFVFSPSERCSRNWVLDRRWRIYTHILPPHHPSPLCDIVCLTMGKEKFHINIVVIGHVDSGKSTTTGHLIYKLGGIDKRVIERFEKEAAEMNKRSFKYAWVLDKLKAERERGITIDIALWKFETTKYYCTVIDAPGHRDFIKNMITGTSQADCAVLIIDSTTGGFEAGISKDGQTREHALLAFTLGVKQMICCCNKMDATTPKYSKARYDEIIKEVSSYLKKVGYNPDKIPFVPISGFEGDNMIERSTNLDWYKGPTLLEALDQINEPKRPSDKPLRLPLQDVYKIGGIGTVPVGRVETGMIKPGMVVTFAPTGLTTEVKSVEMHHESLLEALPGDNVGFNVKNVAVKDLKRGYVASNSKDDPAKGAANFTSQVIIMNHPGQIGNGYAPVLDCHTSHIAVKFSEILTKIDRRSGKEIEKEPKFLKNGDAGMVKMTPTKPMVVETFSEYPPLGRFAVRDMRQTVAVGVIKSVDKKDPTGAKVTKAAVKKGAK

SEQ ID NO: 87253 - protein, 858 aa, Arabidopsis thaliana
  peptide (1)..(858): Ceres Seq. ID no. 12699289
  misc_feature (1)..(126): Pfam Name: Elongation factor Tu GTP binding domain Pfam Description: Elongation factor Tu GTP binding domain
  misc_feature (410)..(858): Homolog of NCBI NO: 15239308 NR Description: elongation factor 1-alpha (EF-1-alpha); protein At5g60390.1, supported by cDNA: gi_13430509, supported by cDNA: supported by cDNA: gi_16930464, supported by cDNA: supported by
  misc_feature (410)..(858): Homolog of NCBI NO: 99688 NR Description: translation elongation factor eEF-1 alpha chain
  misc_feature (410)..(858): Homolog of NCBI NO: 13605682 NR Description: At1g07930/T6D22_3 [Arabidopsis thaliana]
  misc_feature (410)..(858): Homolog of NCBI NO: 13430510 NR Description: putative translation elongation factor eEF-1
  misc_feature (410)..(858): Homolog of NCBI NO: 23397097 NR Description: putative translation elongation factor eEF-1
  misc_feature (410)..(858): Homolog of NCBI NO: 18086389 NR Description: At1g07930/T6D22_3 [Arabidopsis thaliana]
  misc_feature (1)..(346): Homolog of NCBI NO: 15239308 NR Description: elongation factor 1-alpha (EF-1-alpha); protein At5g60390.1, supported by cDNA: gi_13430509, supported by cDNA: supported by cDNA: gi_16930464, supported by cDNA: supported by
  misc_feature (410)..(858): Homolog of NCBI NO: 17064954 NR Description: putative elongation factor 1-a [Arabidopsis
  misc_feature (1)..(346): Homolog of NCBI NO: 99688 NR Description: translation elongation factor eEF-1 alpha chain
  misc_feature (1)..(346): Homolog of NCBI NO: 13605682 NR Description: At1g07930/T6D22_3 [Arabidopsis thaliana]
MITGTSQADCAVLIIDSTTGGFEAGISKDGQTREHALLAFTLGVKQMICCCNKMDATTPKYSKARYDEIIKEVSSYLKKVGYNPDKIPFVPISGFEGDNMIERSTNLDWYKGPTLLEALDQINEPKRPSDKPLRLPLQDVYKIGGIGTVPVGRVETGMIKPGMVVTFAPTGLTTEVKSVEMHHESLLEALPGDNVGFNVKNVAVKDLKRGYVASNSKDDPAKGAANFTSQVIIMNHPGQIGNGYAPVLDCHTSHIAVKFSEILTKIDRRSGKEIEKEPKFLKNGDAGMVKMTPTKPMVVETFSEYPPLGRFAVRDMRQTVAVGVIKSVDKKDPTGAKVTKAAVKKGESKDSVSFITIVWYLVACLCSCFVFSPSERCSRNWVLDRRWRIYTHILPPHHPSPLCDIVCLTMGKEKFHINIVVIGHVDSGKSTTTGHLIYKLGGIDKRVIERFEKEAAEMNKRSFKYAWVLDKLKAERERGITIDIALWKFETTKYYCTVIDAPGHRDFIKNMITGTSQADCAVLIIDSTTGGFEAGISKDGQTREHALLAFTLGVKQMICCCNKMDATTPKYSKARYDEIIKEVSSYLKKVGYNPDKIPFVPISGFEGDNMIERSTNLDWYKGPTLLEALDQINEPKRPSDKPLRLPLQDVYKIGGIGTVPVGRVETGMIKPGMVVTFAPTGLTTEVKSVEMHHESLLEALPGDNVGFNVKNVAVKDLKRGYVASNSKDDPAKGAANFTSQVIIMNHPGQIGNGYAPVLDCHTSHIAVKFSEILTKIDRRSGKEIEKEPKFLKNGDAGMVKMTPTKPMVVETFSEYPPLGRFAVRDMRQTVAVGVIKSVDKKDPTGAKVTKAAVKKGAK

SEQ ID NO: 87254 - DNA, 1482 bp, Arabidopsis thaliana
  misc_feature (1)..(1482): Ceres Seq. ID no. 12699290
  misc_feature: MA Experiment ID: 20000315 Result: Up-regulated in Transcription
  misc_feature: MA Experiment 20000315 PARAMETER Experiment Name: At_14day_Shoots-Roots_Sub_P Parameter: Age (day) Value: 14
  misc_feature: MA Experiment 20000315 PARAMETER Experiment Name: At_14day_Shoots-Roots_Sub_P Parameter: Organism Value: A. thaliana
  misc_feature: MA Experiment 20000315 PARAMETER Experiment Name: At_14day_Shoots-Roots_Sub_P Parameter: Plant Line Value: WS
  misc_feature: MA Experiment 20000315 PARAMETER Experiment Name: At_14day_Shoots-Roots_Sub_P Parameter: Tissue Value: Shoots vs. Whole Plant
  misc_feature: MA Experiment ID: 20000328 Result: Up-regulated in Transcription
  misc_feature: MA Experiment 20000328 PARAMETER Experiment Name: At_42deg_Heat_Sub_P Parameter: Age (day) Value: 14
  misc_feature: MA Experiment 20000328 PARAMETER Experiment Name: At_42deg_Heat_Sub_P Parameter: Organism Value: A. thaliana
  misc_feature: MA Experiment 20000328 PARAMETER Experiment Name: At_42deg_Heat_Sub_P Parameter: Plant Line Value: WS
  misc_feature: MA Experiment 20000328 PARAMETER Experiment Name: At_42deg_Heat_Sub_P Parameter: Temperature (deg C) Value: 42 vs. 22
  misc_feature: MA Experiment 20000328 PARAMETER Experiment Name: At_42deg_Heat_Sub_P Parameter: Timepoint (hr) Value: 6
  misc_feature: MA Experiment 20000328 PARAMETER Experiment Name: At_42deg_Heat_Sub_P Parameter: Tissue Value: Aerial
atgggtaaagagaagtttcacatcaacattgtggtcattggccacgtcgattctggaaagtcgaccaccactggacacttgatctacaagttgggtggtattgacaagcgtgtcattgagaggttcgagaaggaggctgctgagatgaacaagaggtccttcaagtacgcatgggttttggacaaacttaaggctgagcgtgagcgtggtatcaccattgacattgctctctggaagttcgagaccaccaagtactactgcactgtcattgatgctcctggccatcgtgatttcatcaagaacatgatcactggtacctcccaggctgattgtgctgtccttatcattgactccaccactggtggttttgaggctggtatctccaaggatggtcagacccgtgagcacgctctacttgctttcacccttggtgtcaagcagatgatctgctgttgtaacaagatggatgccactacccccaagtactccaaggccaggtacgatgaaatcatcaaggaggtgtcttcctacttgaagaaggttggttacaaccccgacaaaatcccatttgtgcccatctctggatttgagggtgacaacatgattgagaggtccaccaaccttgactggtacaagggaccaactctccttgaggctcttgaccagatcaacgagcccaagaggccgtcagacaagccccttcgtctcccacttcaggatgtctacaagattggtggtattggaacggtgccagtgggacgtgttgagactggtatgatcaagcctggtatggttgtgacctttgctcccacaggattgaccactgaggtcaagtctgttgagatgcaccacgagtctcttcttgaggcacttccaggtgacaacgttgggttcaatgttaagaatgttgctgtcaaggatcttaagagagggtacgtcgcatccaactccaaggatgaccctgccaagggtgctgctaacttcacctcccaggtcatcatcatgaaccaccctggtcagattggtaacggttacgccccagtcctggattgccacacctctcacattgcagtcaagttctctgagatcttgaccaagattgacaggcgttctggtaaggagattgagaaggagcctaaattcttgaagaatggtgatgctggtatggtgaagatgactccaaccaagcccatggttgtggagaccttctctgagtacccaccacttggacgtttcgctgtgagggacatgaggcagactgttgcagtcggtgttatcaagagtgttgacaagaaggacccaactggagccaaggttaccaaggctgcagtcaagaaggtttggtatttggttggttgtttgtgttaccgcttcgtttattctccgtcggagctcaattctcggaattgggttcttgatcggaggtggcggaggtacttggcactcgagcttcctgtttatttcttttgttttgtgttatga

SEQ ID NO: 87255 - protein, 493 aa, Arabidopsis thaliana
  peptide (1)..(493): Ceres Seq. ID no. 12699291
  misc_feature (5)..(227): Pfam Name: Elongation factor Tu GTP binding domain Pfam Description: Elongation factor Tu GTP binding domain
  misc_feature (1)..(485): Homolog of NCBI NO: 25407012 NR Description: protein T6D22.2 [imported] - Arabidopsis thaliana
  misc_feature (1)..(446): Homolog of NCBI NO: 15239308 NR Description: elongation factor 1-alpha (EF-1-alpha); protein At5g60390.1, supported by cDNA: gi_13430509, supported by cDNA: supported by cDNA: gi_16930464, supported by cDNA: supported by
  misc_feature (1)..(446): Homolog of NCBI NO: 25407012 NR Description: protein T6D22.2 [imported] - Arabidopsis thaliana
  misc_feature (1)..(446): Homolog of NCBI NO: 99688 NR Description: translation elongation factor eEF-1 alpha chain
  misc_feature (1)..(446): Homolog of NCBI NO: 13605682 NR Description: At1g07930/T6D22_3 [Arabidopsis thaliana]
  misc_feature (1)..(446): Homolog of NCBI NO: 13430510 NR Description: putative translation elongation factor eEF-1
  misc_feature (1)..(446): Homolog of NCBI NO: 23397097 NR Description: putative translation elongation factor eEF-1
  misc_feature (1)..(446): Homolog of NCBI NO: 18086389 NR Description: At1g07930/T6D22_3 [Arabidopsis thaliana]
  misc_feature (1)..(446): Homolog of NCBI NO: 17064954 NR Description: putative elongation factor 1-a [Arabidopsis
  misc_feature (1)..(446): Homolog of NCBI NO: 15081765 NR Description: At1g07930/T6D22_3 [Arabidopsis thaliana]
MGKEKFHINIVVIGHVDSGKSTTTGHLIYKLGGIDKRVIERFEKEAAEMNKRSFKYAWVLDKLKAERERGITIDIALWKFETTKYYCTVIDAPGHRDFIKNMITGTSQADCAVLIIDSTTGGFEAGISKDGQTREHALLAFTLGVKQMICCCNKMDATTPKYSKARYDEIIKEVSSYLKKVGYNPDKIPFVPISGFEGDNMIERSTNLDWYKGPTLLEALDQINEPKRPSDKPLRLPLQDVYKIGGIGTVPVGRVETGMIKPGMVVTFAPTGLTTEVKSVEMHHESLLEALPGDNVGFNVKNVAVKDLKRGYVASNSKDDPAKGAANFTSQVIIMNHPGQIGNGYAPVLDCHTSHIAVKFSEILTKIDRRSGKEIEKEPKFLKNGDAGMVKMTPTKPMVVETFSEYPPLGRFAVRDMRQTVAVGVIKSVDKKDPTGAKVTKAAVKKVWYLVGCLCYRFVYSPSELNSRNWVLDRRWRRYLALELPVYFFCFVL

SEQ ID NO: 87256 - protein, 445 aa, Arabidopsis thaliana
  peptide (1)..(445): Ceres Seq. ID no. 12699292
  misc_feature (1)..(179): Pfam Name: Elongation factor Tu GTP binding domain Pfam Description: Elongation factor Tu GTP binding domain
  misc_feature (1)..(437): Homolog of NCBI NO: 25407012 NR Description: protein T6D22.2 [imported] - Arabidopsis thaliana
  misc_feature (1)..(398): Homolog of NCBI NO: 15239308 NR Description: elongation factor 1-alpha (EF-1-alpha); protein At5g60390.1, supported by cDNA: gi_13430509, supported by cDNA: supported by cDNA: gi_16930464, supported by cDNA: supported by
  misc_feature (1)..(398): Homolog of NCBI NO: 25407012 NR Description: protein T6D22.2 [imported] - Arabidopsis thaliana
  misc_feature (1)..(398): Homolog of NCBI NO: 99688 NR Description: translation elongation factor eEF-1 alpha chain
  misc_feature (1)..(398): Homolog of NCBI NO: 13605682 NR Description: At1g07930/T6D22_3 [Arabidopsis thaliana]
  misc_feature (1)..(398): Homolog of NCBI NO: 13430510 NR Description: putative translation elongation factor eEF-1
  misc_feature (1)..(398): Homolog of NCBI NO: 23397097 NR Description: putative translation elongation factor eEF-1
  misc_feature (1)..(398): Homolog of NCBI NO: 18086389 NR Description: At1g07930/T6D22_3 [Arabidopsis thaliana]
  misc_feature (1)..(398): Homolog of NCBI NO: 17064954 NR Description: putative elongation factor 1-a [Arabidopsis
  misc_feature (1)..(398): Homolog of NCBI NO: 15081765 NR Description: At1g07930/T6D22_3 [Arabidopsis thaliana]
MNKRSFKYAWVLDKLKAERERGITIDIALWKFETTKYYCTVIDAPGHRDFIKNMITGTSQADCAVLIIDSTTGGFEAGISKDGQTREHALLAFTLGVKQMICCCNKMDATTPKYSKARYDEIIKEVSSYLKKVGYNPDKIPFVPISGFEGDNMIERSTNLDWYKGPTLLEALDQINEPKRPSDKPLRLPLQDVYKIGGIGTVPVGRVETGMIKPGMVVTFAPTGLTTEVKSVEMHHESLLEALPGDNVGFNVKNVAVKDLKRGYVASNSKDDPAKGAANFTSQVIIMNHPGQIGNGYAPVLDCHTSHIAVKFSEILTKIDRRSGKEIEKEPKFLKNGDAGMVKMTPTKPMVVETFSEYPPLGRFAVRDMRQTVAVGVIKSVDKKDPTGAKVTKAAVKKVWYLVGCLCYRFVYSPSELNSRNWVLDRRWRRYLALELPVYFFCFVL

SEQ ID NO: 87257 - protein, 392 aa, Arabidopsis thaliana
  peptide (1)..(392): Ceres Seq. ID no. 12699293
  misc_feature (1)..(126): Pfam Name: Elongation factor Tu GTP binding domain Pfam Description: Elongation factor Tu GTP binding domain
  misc_feature (1)..(384): Homolog of NCBI NO: 25407012 NR Description: protein T6D22.2 [imported] - Arabidopsis thaliana
  misc_feature (1)..(345): Homolog of NCBI NO: 15239308 NR Description: elongation factor 1-alpha (EF-1-alpha); protein At5g60390.1, supported by cDNA: gi_13430509, supported by cDNA: supported by cDNA: gi_16930464, supported by cDNA: supported by
  misc_feature (1)..(345): Homolog of NCBI NO: 25407012 NR Description: protein T6D22.2 [imported] - Arabidopsis thaliana
  misc_feature (1)..(345): Homolog of NCBI NO: 99688 NR Description: translation elongation factor eEF-1 alpha chain
  misc_feature (1)..(345): Homolog of NCBI NO: 13605682 NR Description: At1g07930/T6D22_3 [Arabidopsis thaliana]
  misc_feature (1)..(345): Homolog of NCBI NO: 13430510 NR Description: putative translation elongation factor eEF-1
  misc_feature (1)..(345): Homolog of NCBI NO: 23397097 NR Description: putative translation elongation factor eEF-1
  misc_feature (1)..(345): Homolog of NCBI NO: 18086389 NR Description: At1g07930/T6D22_3 [Arabidopsis thaliana]
  misc_feature (1)..(345): Homolog of NCBI NO: 17064954 NR Description: putative elongation factor 1-a [Arabidopsis
  misc_feature (1)..(345): Homolog of NCBI NO: 15081765 NR Description: At1g07930/T6D22_3 [Arabidopsis thaliana]
MITGTSQADCAVLIIDSTTGGFEAGISKDGQTREHALLAFTLGVKQMICCCNKMDATTPKYSKARYDEIIKEVSSYLKKVGYNPDKIPFVPISGFEGDNMIERSTNLDWYKGPTLLEALDQINEPKRPSDKPLRLPLQDVYKIGGIGTVPVGRVETGMIKPGMVVTFAPTGLTTEVKSVEMHHESLLEALPGDNVGFNVKNVAVKDLKRGYVASNSKDDPAKGAANFTSQVIIMNHPGQIGNGYAPVLDCHTSHIAVKFSEILTKIDRRSGKEIEKEPKFLKNGDAGMVKMTPTKPMVVETFSEYPPLGRFAVRDMRQTVAVGVIKSVDKKDPTGAKVTKAAVKKVWYLVGCLCYRFVYSPSELNSRNWVLDRRWRRYLALELPVYFFCFVL

SEQ ID NO: 87258 - DNA, 2931 bp, Arabidopsis thaliana
  misc_feature (1)..(2931): Ceres Seq. ID no. 12699302
  misc_feature: MA Experiment ID: 20000166 Result: Up-regulated in Transcription
  misc_feature: MA Experiment 20000166 PARAMETER Experiment Name: At_100uM_ABA_P Parameter: Age (day) Value: 14
  misc_feature: MA Experiment 20000166 PARAMETER Experiment Name: At_100uM_ABA_P Parameter: Organism Value: A. thaliana
  misc_feature: MA Experiment 20000166 PARAMETER Experiment Name: At_100uM_ABA_P Parameter: Plant Line Value: WS
  misc_feature: MA Experiment 20000166 PARAMETER Experiment Name: At_100uM_ABA_P Parameter: Timepoint (hr) Value: 1
  misc_feature: MA Experiment 20000166 PARAMETER Experiment Name: At_100uM_ABA_P Parameter: Tissue Value: Aerial
  misc_feature: MA Experiment 20000166 PARAMETER Experiment Name: At_100uM_ABA_P Parameter: Treatment Value: 100uM ABA vs. No Treatment
  misc_feature: MA Experiment ID: 20000169 Result: Up-regulated in Transcription
  misc_feature: MA Experiment 20000169 PARAMETER Experiment Name: At_100uM_ABA_P Parameter: Age (day) Value: 14
  misc_feature: MA Experiment 20000169 PARAMETER Experiment Name: At_100uM_ABA_P Parameter: Organism Value: A. thaliana
  misc_feature: MA Experiment 20000169 PARAMETER Experiment Name: At_100uM_ABA_P Parameter: Plant Line Value: WS
  misc_feature: MA Experiment 20000169 PARAMETER Experiment Name: At_100uM_ABA_P Parameter: Timepoint (hr) Value: 6
  misc_feature: MA Experiment 20000169 PARAMETER Experiment Name: At_100uM_ABA_P Parameter: Tissue Value: Aerial
  misc_feature: MA Experiment 20000169 PARAMETER Experiment Name: At_100uM_ABA_P Parameter: Treatment Value: 100uM ABA vs. No Treatment
  misc_feature: MA Experiment ID: 20000182 Result: Up-regulated in Transcription
  misc_feature: MA Experiment 20000182 PARAMETER Experiment Name: At_2mM_SA_P Parameter: Age (day) Value: 14
  misc_feature: MA Experiment 20000182 PARAMETER Experiment Name: At_2mM_SA_P Parameter: Organism Value: A. thaliana
  misc_feature: MA Experiment 20000182 PARAMETER Experiment Name: At_2mM_SA_P Parameter: Plant Line Value: WS
  misc_feature: MA Experiment 20000182 PARAMETER Experiment Name: At_2mM_SA_P Parameter: Timepoint (hr) Value: 6
  misc_feature: MA Experiment 20000182 PARAMETER Experiment Name: At_2mM_SA_P Parameter: Tissue Value: Aerial
  misc_feature: MA Experiment 20000182 PARAMETER Experiment Name: At_2mM_SA_P Parameter: Treatment Value: 2mM SA vs. No Treatment
  misc_feature: MA Experiment ID: 20000184 Result: Up-regulated in Transcription
  misc_feature: MA Experiment 20000184 PARAMETER Experiment Name: At_Shoots__P Parameter: Age (day) Value: 7
  misc_feature: MA Experiment 20000184 PARAMETER Experiment Name: At_Shoots__P Parameter: Tissue Value: Shoots vs. Whole Plant
  misc_feature: MA Experiment ID: 20000227 Result: Up-regulated in Transcription
  misc_feature: MA Experiment 20000227 PARAMETER Experiment Name: At_Root-Tips-vs-Tops_P Parameter: Tissue Value: Root Tips vs. Root Tops
  misc_feature: MA Experiment ID: 20000267 Result: Up-regulated in Transcription
  misc_feature: MA Experiment 20000267 PARAMETER Experiment Name: At_Drought_P Parameter: Age (day) Value: 7
  misc_feature: MA Experiment 20000267 PARAMETER Experiment Name: At_Drought_P Parameter: Organism Value: A. thaliana
  misc_feature: MA Experiment 20000267 PARAMETER Experiment Name: At_Drought_P Parameter: Plant Line Value: WS
  misc_feature: MA Experiment 20000267 PARAMETER Experiment Name: At_Drought_P Parameter: Timepoint (hr) Value: 6
  misc_feature: MA Experiment 20000267 PARAMETER Experiment Name: At_Drought_P Parameter: Tissue Value: Whole Plant
  misc_feature: MA Experiment 20000267 PARAMETER Experiment Name: At_Drought_P Parameter: Treatment Value: Drought vs. No Drought
  misc_feature: MA Experiment ID: 20000268 Result: Up-regulated in Transcription
  misc_feature: MA Experiment 20000268 PARAMETER Experiment Name: At_100mM_NaCl__P Parameter: Age (day) Value: 14
  misc_feature: MA Experiment 20000268 PARAMETER Experiment Name: At_100mM_NaCl__P Parameter: Organism Value: A. thaliana
  misc_feature: MA Experiment 20000268 PARAMETER Experiment Name: At_100mM_NaCl__P Parameter: Plant Line Value: WS
  misc_feature: MA Experiment 20000268 PARAMETER Experiment Name: At_100mM_NaCl__P Parameter: Timepoint (hr) Value: 6
  misc_feature: MA Experiment 20000268 PARAMETER Experiment Name: At_100mM_NaCl__P Parameter: Tissue Value: Whole Plant
  misc_feature: MA Experiment 20000268 PARAMETER Experiment Name: At_100mM_NaCl__P Parameter: Treatment Value: 100mM NaCl vs. No Treatment
  misc_feature: MA Experiment ID: 20000436 Result: Up-regulated in Transcription
  misc_feature: MA Experiment 20000436 PARAMETER Experiment Name: At_Drought_P Parameter: Age (day) Value: 7
  misc_feature: MA Experiment 20000436 PARAMETER Experiment Name: At_Drought_P Parameter: Organism Value: A. thaliana
  misc_feature: MA Experiment 20000436 PARAMETER Experiment Name: At_Drought_P Parameter: Plant Line Value: WS
  misc_feature: MA Experiment 20000436 PARAMETER Experiment Name: At_Drought_P Parameter: Timepoint (hr) Value: 12
  misc_feature: MA Experiment 20000436 PARAMETER Experiment Name: At_Drought_P Parameter: Tissue Value: Whole Plant
  misc_feature: MA Experiment 20000436 PARAMETER Experiment Name: At_Drought_P Parameter: Treatment Value: Drought vs. No Drought
  misc_feature: MA Experiment ID: 20000437 Result: Up-regulated in Transcription
  misc_feature: MA Experiment 20000437 PARAMETER Experiment Name: At_Drought_P Parameter: Age (day) Value: 8
  misc_feature: MA Experiment 20000437 PARAMETER Experiment Name: At_Drought_P Parameter: Organism Value: A. thaliana
  misc_feature: MA Experiment 20000437 PARAMETER Experiment Name: At_Drought_P Parameter: Plant Line Value: WS
  misc_feature: MA Experiment 20000437 PARAMETER Experiment Name: At_Drought_P Parameter: Timepoint (hr) Value: 24
  misc_feature: MA Experiment 20000437 PARAMETER Experiment Name: At_Drought_P Parameter: Tissue Value: Whole Plant
  misc_feature: MA Experiment 20000437 PARAMETER Experiment Name: At_Drought_P Parameter: Treatment Value: Drought vs. No Drought
  misc_feature: MA Experiment ID: 20000438 Result: Up-regulated in Transcription
  misc_feature: MA Experiment 20000438 PARAMETER Experiment Name: At_Shoots__P Parameter: Age (day) Value: 14
  misc_feature: MA Experiment 20000438 PARAMETER Experiment Name: At_Shoots__P Parameter: Tissue Value: Shoots vs. Whole Plant
  misc_feature: MA Experiment ID: 20000439 Result: Up-regulated in Transcription
  misc_feature: MA Experiment 20000439 PARAMETER Experiment Name: At_Roots__P Parameter: Age (day) Value: 14 vs. 21
  misc_feature: MA Experiment 20000439 PARAMETER Experiment Name: At_Roots__P Parameter: Organism Value: A. thaliana
  misc_feature: MA Experiment 20000439 PARAMETER Experiment Name: At_Roots__P Parameter: Tissue Value: Roots vs. Whole Plant
  misc_feature: MA Experiment ID: 20000453 Result: Up-regulated in Transcription
  misc_feature: MA Experiment 20000453 PARAMETER Experiment Name: At_100uM_ABA_P Parameter: Age (day) Value: 15
  misc_feature: MA Experiment 20000453 PARAMETER Experiment Name: At_100uM_ABA_P Parameter: Organism Value: A. thaliana
  misc_feature: MA Experiment 20000453 PARAMETER Experiment Name: At_100uM_ABA_P Parameter: Plant Line Value: WS
  misc_feature: MA Experiment 20000453 PARAMETER Experiment Name: At_100uM_ABA_P Parameter: Timepoint (hr) Value: 24
  misc_feature: MA Experiment 20000453 PARAMETER Experiment Name: At_100uM_ABA_P Parameter: Tissue Value: Aerial
  misc_feature: MA Experiment 20000453 PARAMETER Experiment Name: At_100uM_ABA_P Parameter: Treatment Value: 100uM ABA vs. No Treatment
  misc_feature: MA Experiment ID: 20000460 Result: Up-regulated in Transcription
  misc_feature: MA Experiment 20000460 PARAMETER Experiment Name: At_10percent_PEG_P Parameter: Age (day) Value: 12
  misc_feature: MA Experiment 20000460 PARAMETER Experiment Name: At_10percent_PEG_P Parameter: Organism Value: A. thaliana
  misc_feature: MA Experiment 20000460 PARAMETER Experiment Name: At_10percent_PEG_P Parameter: Plant Line Value: WS
  misc_feature: MA Experiment 20000460 PARAMETER Experiment Name: At_10percent_PEG_P Parameter: Timepoint (day) Value: 12
  misc_feature: MA Experiment 20000460 PARAMETER Experiment Name: At_10percent_PEG_P Parameter: Tissue Value: Whole Plant
  misc_feature: MA Experiment 20000460 PARAMETER Experiment Name: At_10percent_PEG_P Parameter: Treatment Value: 10percent PEG vs. No Treatment
  misc_feature: MA Experiment ID: 20000527 Result: Up-regulated in Transcription
  misc_feature: MA Experiment 20000527 PARAMETER Experiment Name: At_10percent_PEG_P Parameter: Age (day) Value: 20
  misc_feature: MA Experiment 20000527 PARAMETER Experiment Name: At_10percent_PEG_P Parameter: Organism Value: A. thaliana
  misc_feature: MA Experiment 20000527 PARAMETER Experiment Name: At_10percent_PEG_P Parameter: Plant Line Value: WS
  misc_feature: MA Experiment 20000527 PARAMETER Experiment Name: At_10percent_PEG_P Parameter: Timepoint (day) Value: 20
  misc_feature: MA Experiment 20000527 PARAMETER Experiment Name: At_10percent_PEG_P Parameter: Tissue Value: Whole Plant
  misc_feature: MA Experiment 20000527 PARAMETER Experiment Name: At_10percent_PEG_P Parameter: Treatment Value: 10percent PEG vs. No Treatment
  misc_feature: MA Experiment ID: 20001247 Result: Up-regulated in Transcription
  misc_feature: MA Experiment 20001247 PARAMETER Experiment Name: At_Far-red-induction_P Parameter: Age (day) Value: 7
  misc_feature: MA Experiment 20001247 PARAMETER Experiment Name: At_Far-red-induction_P Parameter: Light Value: Far-red vs. White
  misc_feature: MA Experiment 20001247 PARAMETER Experiment Name: At_Far-red-induction_P Parameter: Organism Value: A. thaliana
  misc_feature: MA Experiment 20001247 PARAMETER Experiment Name: At_Far-red-induction_P Parameter: Plant Line Value: Columbia
  misc_feature: MA Experiment 20001247 PARAMETER Experiment Name: At_Far-red-induction_P Parameter: Timepoint (hr) Value: 1
  misc_feature: MA Experiment 20001247 PARAMETER Experiment Name: At_Far-red-induction_P Parameter: Tissue Value: Whole Plant
  misc_feature: MA Experiment ID: 20001248 Result: Up-regulated in Transcription
  misc_feature: MA Experiment 20001248 PARAMETER Experiment Name: At_Far-red-induction_P Parameter: Age (day) Value: 7
  misc_feature: MA Experiment 20001248 PARAMETER Experiment Name: At_Far-red-induction_P Parameter: Light Value: Far-red vs. White
  misc_feature: MA Experiment 20001248 PARAMETER Experiment Name: At_Far-red-induction_P Parameter: Organism Value: A. thaliana
  misc_feature: MA Experiment 20001248 PARAMETER Experiment Name: At_Far-red-induction_P Parameter: Plant Line Value: Columbia
  misc_feature: MA Experiment 20001248 PARAMETER Experiment Name: At_Far-red-induction_P Parameter: Timepoint (hr) Value: 4
  misc_feature: MA Experiment 20001248 PARAMETER Experiment Name: At_Far-red-induction_P Parameter: Tissue Value: Whole Plant
  misc_feature: MA Experiment ID: 20001450 Result: Up-regulated in Transcription
  misc_feature: MA Experiment 20001450 PARAMETER Experiment Name: At_Far-red-induction_P Parameter: Age (day) Value: 7
  misc_feature: MA Experiment 20001450 PARAMETER Experiment Name: At_Far-red-induction_P Parameter: Light Value: Far-red vs. White
  misc_feature: MA Experiment 20001450 PARAMETER Experiment Name: At_Far-red-induction_P Parameter: Organism Value: A. thaliana
  misc_feature: MA Experiment 20001450 PARAMETER Experiment Name: At_Far-red-induction_P Parameter: Plant Line Value: Columbia
  misc_feature: MA Experiment 20001450 PARAMETER Experiment Name: At_Far-red-induction_P Parameter: Timepoint (hr) Value: 8
  misc_feature: MA Experiment 20001450 PARAMETER Experiment Name: At_Far-red-induction_P Parameter: Tissue Value: Whole Plant
  misc_feature: MA Experiment ID: 20001451 Result: Up-regulated in Transcription
  misc_feature: MA Experiment 20001451 PARAMETER Experiment Name: At_Far-red-induction_P Parameter: Age (day) Value: 7
  misc_feature: MA Experiment 20001451 PARAMETER Experiment Name: At_Far-red-induction_P Parameter: Light Value: Far-red vs. White
  misc_feature: MA Experiment 20001451 PARAMETER Experiment Name: At_Far-red-induction_P Parameter: Organism Value: A. thaliana
  misc_feature: MA Experiment 20001451 PARAMETER Experiment Name: At_Far-red-induction_P Parameter: Plant Line Value: Columbia
  misc_feature: MA Experiment 20001451 PARAMETER Experiment Name: At_Far-red-induction_P Parameter: Timepoint (hr) Value: 24
  misc_feature: MA Experiment 20001451 PARAMETER Experiment Name: At_Far-red-induction_P Parameter: Tissue Value: Whole Plant
  misc_feature: MA Experiment ID: 20001554 Result: Up-regulated in Transcription
  misc_feature: MA Experiment 20001554 PARAMETER Experiment Name: At_Drought_Soil_Dry_P Parameter: Age (day) Value: 21
  misc_feature: MA Experiment 20001554 PARAMETER Experiment Name: At_Drought_Soil_Dry_P Parameter: Organism Value: A. thaliana
  misc_feature: MA Experiment 20001554 PARAMETER Experiment Name: At_Drought_Soil_Dry_P Parameter: Plant Line Value: WS
  misc_feature: MA Experiment 20001554 PARAMETER Experiment Name: At_Drought_Soil_Dry_P Parameter: Post Timepoint (hr) Value: None
  misc_feature: MA Experiment 20001554 PARAMETER Experiment Name: At_Drought_Soil_Dry_P Parameter: Post-Treatment Value: None
  misc_feature: MA Experiment 20001554 PARAMETER Experiment Name: At_Drought_Soil_Dry_P Parameter: Timepoint (day) Value: 7
  misc_feature: MA Experiment 20001554 PARAMETER Experiment Name: At_Drought_Soil_Dry_P Parameter: Treatment Value: Drought vs. No Drought
  misc_feature: MA Experiment ID: 20001555 Result: Up-regulated in Transcription
  misc_feature: MA Experiment 20001555 PARAMETER Experiment Name: At_Drought_Soil_Dry_P Parameter: Age (day) Value: 24
  misc_feature: MA Experiment 20001555 PARAMETER Experiment Name: At_Drought_Soil_Dry_P Parameter: Organism Value: A. thaliana
  misc_feature: MA Experiment 20001555 PARAMETER Experiment Name: At_Drought_Soil_Dry_P Parameter: Plant Line Value: WS
  misc_feature: MA Experiment 20001555 PARAMETER Experiment Name: At_Drought_Soil_Dry_P Parameter: Post Timepoint (hr) Value: None
  misc_feature: MA Experiment 20001555 PARAMETER Experiment Name: At_Drought_Soil_Dry_P Parameter: Post-Treatment Value: None
  misc_feature: MA Experiment 20001555 PARAMETER Experiment Name: At_Drought_Soil_Dry_P Parameter: Timepoint (day) Value: 10
  misc_feature: MA Experiment 20001555 PARAMETER Experiment Name: At_Drought_Soil_Dry_P Parameter: Treatment Value: Drought vs. No Drought
  misc_feature: MA Experiment ID: 20001556 Result: Up-regulated in Transcription
  misc_feature: MA Experiment 20001556 PARAMETER Experiment Name: At_Drought_Soil_Dry_P Parameter: Age (day) Value: 26
  misc_feature: MA Experiment 20001556 PARAMETER Experiment Name: At_Drought_Soil_Dry_P Parameter: Organism Value: A. thaliana
  misc_feature: MA Experiment 20001556 PARAMETER Experiment Name: At_Drought_Soil_Dry_P Parameter: Plant Line Value: WS
  misc_feature: MA Experiment 20001556 PARAMETER Experiment Name: At_Drought_Soil_Dry_P Parameter: Post Timepoint (hr) Value: None
  misc_feature: MA Experiment 20001556 PARAMETER Experiment Name: At_Drought_Soil_Dry_P Parameter: Post-Treatment Value: None
  misc_feature: MA Experiment 20001556 PARAMETER Experiment Name: At_Drought_Soil_Dry_P Parameter: Timepoint (day) Value: 12
  misc_feature: MA Experiment 20001556 PARAMETER Experiment Name: At_Drought_Soil_Dry_P Parameter: Treatment Value: Drought vs. No Drought
  misc_feature: MA Experiment ID: 20001557 Result: Up-regulated in Transcription
  misc_feature: MA Experiment 20001557 PARAMETER Experiment Name: At_Drought_Soil_Dry_P Parameter: Age (day) Value: 27
  misc_feature: MA Experiment 20001557 PARAMETER Experiment Name: At_Drought_Soil_Dry_P Parameter: Organism Value: A. thaliana
  misc_feature: MA Experiment 20001557 PARAMETER Experiment Name: At_Drought_Soil_Dry_P Parameter: Plant Line Value: WS
  misc_feature: MA Experiment 20001557 PARAMETER Experiment Name: At_Drought_Soil_Dry_P Parameter: Post Timepoint (hr) Value: 3
  misc_feature: MA Experiment 20001557 PARAMETER Experiment Name: At_Drought_Soil_Dry_P Parameter: Post-Treatment Value: Re-Water vs. No Drought
  misc_feature: MA Experiment 20001557 PARAMETER Experiment Name: At_Drought_Soil_Dry_P Parameter: Timepoint (day) Value: 13
  misc_feature: MA Experiment 20001557 PARAMETER Experiment Name: At_Drought_Soil_Dry_P Parameter: Treatment Value: Drought vs. No Drought
  misc_feature: MA Experiment ID: 20001560 Result: Up-regulated in Transcription
  misc_feature: MA Experiment 20001560 PARAMETER Experiment Name: At_Drought_Soil_Dry_P Parameter: Age (day) Value: 28
  misc_feature: MA Experiment 20001560 PARAMETER Experiment Name: At_Drought_Soil_Dry_P Parameter: Organism Value: A. thaliana
  misc_feature: MA Experiment 20001560 PARAMETER Experiment Name: At_Drought_Soil_Dry_P Parameter: Plant Line Value: WS
  misc_feature: MA Experiment 20001560 PARAMETER Experiment Name: At_Drought_Soil_Dry_P Parameter: Post Timepoint (hr) Value: None
  misc_feature: MA Experiment 20001560 PARAMETER Experiment Name: At_Drought_Soil_Dry_P Parameter: Post-Treatment Value: None
  misc_feature: MA Experiment 20001560 PARAMETER Experiment Name: At_Drought_Soil_Dry_P Parameter: Timepoint (day) Value: 14
  misc_feature: MA Experiment 20001560 PARAMETER Experiment Name: At_Drought_Soil_Dry_P Parameter: Treatment Value: Drought vs. No Drought
  misc_feature: MA Experiment ID: 20001904 Result: Up-regulated in Transcription
  misc_feature: MA Experiment 20001904 PARAMETER Experiment Name: At_Drought_Reproduction_P Parameter: Age (day) Value: 37
  misc_feature: MA Experiment 20001904 PARAMETER Experiment Name: At_Drought_Reproduction_P Parameter: Organism Value: A. thaliana
  misc_feature: MA Experiment 20001904 PARAMETER Experiment Name: At_Drought_Reproduction_P Parameter: Plant Line Value: WS
  misc_feature: MA Experiment 20001904 PARAMETER Experiment Name: At_Drought_Reproduction_P Parameter: Timepoint (day) Value: 7
  misc_feature: MA Experiment 20001904 PARAMETER Experiment Name: At_Drought_Reproduction_P Parameter: Tissue Value: Rosettes
  misc_feature: MA Experiment 20001904 PARAMETER Experiment Name: At_Drought_Reproduction_P Parameter: Treatment Value: Drought vs. No Drought
  misc_feature: MA Experiment ID: 20001905 Result: Up-regulated in Transcription
  misc_feature: MA Experiment 20001905 PARAMETER Experiment Name: At_Drought_Reproduction_P Parameter: Age (day) Value: 40
  misc_feature: MA Experiment 20001905 PARAMETER Experiment Name: At_Drought_Reproduction_P Parameter: Organism Value: A. thaliana
  misc_feature: MA Experiment 20001905 PARAMETER Experiment Name: At_Drought_Reproduction_P Parameter: Plant Line Value: WS
  misc_feature: MA Experiment 20001905 PARAMETER Experiment Name: At_Drought_Reproduction_P Parameter: Timepoint (day) Value: 10
  misc_feature: MA Experiment 20001905 PARAMETER Experiment Name: At_Drought_Reproduction_P Parameter: Tissue Value: Rosettes
  misc_feature: MA Experiment 20001905 PARAMETER Experiment Name: At_Drought_Reproduction_P Parameter: Treatment Value: Drought vs. No Drought
  misc_feature: MA Experiment ID: 20001909 Result: Up-regulated in Transcription
  misc_feature: MA Experiment 20001909 PARAMETER Experiment Name: At_Drought_Reproduction_P Parameter: Age (day) Value: 35
  misc_feature: MA Experiment 20001909 PARAMETER Experiment Name: At_Drought_Reproduction_P Parameter: Organism Value: A. thaliana
  misc_feature: MA Experiment 20001909 PARAMETER Experiment Name: At_Drought_Reproduction_P Parameter: Plant Line Value: WS
  misc_feature: MA Experiment 20001909 PARAMETER Experiment Name: At_Drought_Reproduction_P Parameter: Timepoint (day) Value: 5
  misc_feature: MA Experiment 20001909 PARAMETER Experiment Name: At_Drought_Reproduction_P Parameter: Tissue Value: Flowers
  misc_feature: MA Experiment 20001909 PARAMETER Experiment Name: At_Drought_Reproduction_P Parameter: Treatment Value: Drought vs. No Drought
  misc_feature: MA Experiment ID: 20001910 Result: Up-regulated in Transcription
  misc_feature: MA Experiment 20001910 PARAMETER Experiment Name: At_Drought_Reproduction_P Parameter: Age (day) Value: 37
  misc_feature: MA Experiment 20001910 PARAMETER Experiment Name: At_Drought_Reproduction_P Parameter: Organism Value: A. thaliana
  misc_feature: MA Experiment 20001910 PARAMETER Experiment Name: At_Drought_Reproduction_P Parameter: Plant Line Value: WS
  misc_feature: MA Experiment 20001910 PARAMETER Experiment Name: At_Drought_Reproduction_P Parameter: Timepoint (day) Value: 7
  misc_feature: MA Experiment 20001910 PARAMETER Experiment Name: At_Drought_Reproduction_P Parameter: Tissue Value: Flowers
  misc_feature: MA Experiment 20001910 PARAMETER Experiment Name: At_Drought_Reproduction_P Parameter: Treatment Value: Drought vs. No Drought
  misc_feature: MA Experiment ID: 20001911 Result: Up-regulated in Transcription
  misc_feature: MA Experiment 20001911 PARAMETER Experiment Name: At_Drought_Reproduction_P Parameter: Age (day) Value: 40
  misc_feature: MA Experiment 20001911 PARAMETER Experiment Name: At_Drought_Reproduction_P Parameter: Organism Value: A. thaliana
  misc_feature: MA Experiment 20001911 PARAMETER Experiment Name: At_Drought_Reproduction_P Parameter: Plant Line Value: WS
  misc_feature: MA Experiment 20001911 PARAMETER Experiment Name: At_Drought_Reproduction_P Parameter: Timepoint (day) Value: 10
  misc_feature: MA Experiment 20001911 PARAMETER Experiment Name: At_Drought_Reproduction_P Parameter: Tissue Value: Flowers
  misc_feature: MA Experiment 20001911 PARAMETER Experiment Name: At_Drought_Reproduction_P Parameter: Treatment Value: Drought vs. No Drought
atggctgttgtagaagaaccgatactttcaagattggatcgtattgatttcatggtgaggaagttagaggagatgaaaggaagctcgcctagaagctcgagcccatcgactccatctagtgggactcagccatcgtcaatggatctgtcgtcaccgaggagcatagggaaggtacactgccgttcgatggaacaagtcagggaggagactgagcggaaaggaactttgctagagagacttaataatgtagaggagcaagtgcttaagctgtgttcacagtttgaggaagaagttgaagaagagaggaagagagaagataagacggataaggaaaagaagaccccgaagaagaagaagggattgaggaagctgggttttcgagctgaaatcgatactcctccaccgcgaagaagcgattacctagatttttcttctaggtttctggcggatctcgccaagttctccttattctcttcagctacggcgaaactttctctagctccactcctccctcgccaccatgttttggaagctcacatctctctctgcatcatctcctatgtggagataatattagacaaagaaaatttcacgttggaagagcttcttgatgaggaagagattattcaagaatgcaaggctttgaatagcaggctcattaactttctaagggataaagctcaagtggagcaattattgcggtacattgttgaagaacctccacaggatgctgatagtaaacgtgctttcaagtttccattcatctcttgtgaaatatttacatgtgaaattgatgttattctaaaaactttggtcgaggatgaagagctgatgaacttgcttttttcctttctggaaccaaatcgtcctcatagtgcattgctggcaggctatttcagcaaggttgtcatttgccttatgatcagaaaaactgcagcgcttatgaattatgtaaaagggcatcaaaatgttttctgccagttagttgatttgattgggataacatccatcatggaggttttggttcgcttggttggggctgatgaccaagtctatcccaactttctggatgtgatgcaatggttggctgatagcaatttacttgaaatgatcgtggacaaacttaaaccatctagtcctccggaggttcaggcaaatgcagcagaaacattatgtgcaatttctcggaatgcaccgtcagctttagctacgcagctctctagccctggctacgttgcaaagatatttggtcatgctcttgaagactcgcattcaaaatccggtctagttcattcactttcagtatgcacctctcttctggatccgaggagatctgctgtttcatcttctatgttcaattcttacagaggtcaacatatgttcgagtctcctgtcccagtttccccagaaactattggtgccatgctgcccaaactcaatgacttgcttatgcttctcactgtagcatctgatagcacagtattgcctacaacatatggtgaactgaggcctcctctcggaaagcatcgtctaaagattgtggagttcattgcagttttgttgaaaactagaagtgaagctgcacaaaaggaattagtcagttcaggaacaatcaaaaggacccttgatctgtttttcgagtacccgtacaataatgctctgcatcatcaagtggagagtataatactttcttgtttggaaaacaagagcgatttgatggttaaccatattcttcgagactgcgatctgattggcaaattcctcttgtcggacagggactcaaacctcttaggtgatagccagcccactgtagctgcctccgggaaaaaaaaacctcgtgtcgggtatgtcgggcatatcacaagaatatcaaataaaattggtcagttgagtaacagcaatggccagataaaggcataccttcaggaaaacagcgaatggaatgagtggcaaggtagtgttctgcaggaccgcaacacggttgaaaatgtcaacagatggggatgtgggcgcccaactaccctacaagataggacaagagatagcgatgaggaagacagggattacgatgttgcagctctggccaataacttaagccaagcatttagatacaaaatatatggaaacgatgacaatgaagaggaccacaatgcccttgatagagacgatgatgatgtttacttcgacgatgaatctgctgaagtagtaatttcatccttaagacttggggatgaccaaggaagcttgtttacaaattcgaattggttcacattccaagacgatagattcggcagcacaccctctgacacagcgggttcgaacacgatagacgtggaattgaataaaacctataatgccaacactagcagtagtgacgatgatgaagttgtggttggagaagaagacgatgatctaactggaaacccaaaagacaacgcgttgaacacaactgaaaccaactttcaaatggagagtccactggatttcttcgacttcaacacctcacagaaagctgaagaagcttttgctgaacagccacccgaatgggtcgggtggggagaaccatctgatatgcaagcgagtggcaccggtctgaacccatttatcgatgatgatgatgatgatgacagcaagcacataatgaacctcgacataccaatggctgaggtcaaatctgaatccatgattccaaacgggtcagaaagatcgttatttgagaaggacgtggaatttgtgggagtggaaccagaaggggcagagaaagcgatggagcaagcgatgaaagaagggatagtaggagaagctggagtgatgaagaagaacaaggagatggctgaggactcaaagccggaggaaagttcaggaggagtgaaagagttcaacgataacaactactggaaagtggatcaagaagttggagtgttggaatga

SEQ ID NO: 87259 - protein, 976 aa, Arabidopsis thaliana
  peptide (1)..(976): Ceres Seq. ID no. 12699303
  misc_feature (303)..(664): Pfam Name: SIT4 phosphatase-associated protein Pfam Description: SIT4 phosphatase-associated protein
  misc_feature (152)..(846): Homolog of NCBI NO: 15226390 NR Description: hypothetical protein; protein id: At2g28360.1
  misc_feature (777)..(976): Homolog of NCBI NO: 15226390 NR Description: hypothetical protein; protein id: At2g28360.1
  misc_feature (317)..(670): Homolog of NCBI NO: 15230633 NR Description: putative protein; protein id: At3g45190.1
  misc_feature (669)..(976): Homolog of NCBI NO: 15230633 NR Description: putative protein; protein id: At3g45190.1
  misc_feature (219)..(301): Homolog of NCBI NO: 15230633 NR Description: putative protein; protein id: At3g45190.1
  misc_feature (179)..(929): Homolog of NCBI NO: 38344337 NR Description: OSJNBa0058K23.19 [Oryza sativa (japonica
  misc_feature (317)..(959): Homolog of NCBI NO: 25370579 NR Description: F26G16.7 protein - Arabidopsis thaliana Contains similarity to gb|D21822 ORF from Lilium longiflorum. gb|T03978, gb|R89954, gb|AI995107, gb|T20998, gb|R65384 come from
  misc_feature (182)..(301): Homolog of NCBI NO: 25370579 NR Description: F26G16.7 protein - Arabidopsis thaliana Contains similarity to gb|D21822 ORF from Lilium longiflorum. gb|T03978, gb|R89954, gb|AI995107, gb|T20998, gb|R65384 come from
  misc_feature (317)..(924): Homolog of NCBI NO: 34912146 NR Description: P0712E02.15 [Oryza sativa (japonica
  misc_feature (177)..(364): Homolog of NCBI NO: 34912146 NR Description: P0712E02.15 [Oryza sativa (japonica
MAVVEEPILSRLDRIDFMVRKLEEMKGSSPRSSSPSTPSSGTQPSSMDLSSPRSIGKVHCRSMEQVREETERKGTLLERLNNVEEQVLKLCSQFEEEVEEERKREDKTDKEKKTPKKKKGLRKLGFRAEIDTPPPRRSDYLDFSSRFLADLAKFSLFSSATAKLSLAPLLPRHHVLEAHISLCIISYVEIILDKENFTLEELLDEEEIIQECKALNSRLINFLRDKAQVEQLLRYIVEEPPQDADSKRAFKFPFISCEIFTCEIDVILKTLVEDEELMNLLFSFLEPNRPHSALLAGYFSKVVICLMIRKTAALMNYVKGHQNVFCQLVDLIGITSIMEVLVRLVGADDQVYPNFLDVMQWLADSNLLEMIVDKLKPSSPPEVQANAAETLCAISRNAPSALATQLSSPGYVAKIFGHALEDSHSKSGLVHSLSVCTSLLDPRRSAVSSSMFNSYRGQHMFESPVPVSPETIGAMLPKLNDLLMLLTVASDSTVLPTTYGELRPPLGKHRLKIVEFIAVLLKTRSEAAQKELVSSGTIKRTLDLFFEYPYNNALHHQVESIILSCLENKSDLMVNHILRDCDLIGKFLLSDRDSNLLGDSQPTVAASGKKKPRVGYVGHITRISNKIGQLSNSNGQIKAYLQENSEWNEWQGSVLQDRNTVENVNRWGCGRPTTLQDRTRDSDEEDRDYDVAALANNLSQAFRYKIYGNDDNEEDHNALDRDDDDVYFDDESAEVVISSLRLGDDQGSLFTNSNWFTFQDDRFGSTPSDTAGSNTIDVELNKTYNANTSSSDDDEVVVGEEDDDLTGNPKDNALNTTETNFQMESPLDFFDFNTSQKAEEAFAEQPPEWVGWGEPSDMQASGTGLNPFIDDDDDDDSKHIMNLDIPMAEVKSESMIPNGSERSLFEKDVEFVGVEPEGAEKAMEQAMKEGIVGEAGVMKKNKEMAEDSKPEESSGGVKEFNDNNYWKVDQEVGVLE

SEQ ID NO: 87260 - protein, 959 aa, Arabidopsis thaliana
  peptide (1)..(959): Ceres Seq. ID no. 12699304
  misc_feature (286)..(647): Pfam Name: SIT4 phosphatase-associated protein Pfam Description: SIT4 phosphatase-associated protein
  misc_feature (135)..(829): Homolog of NCBI NO: 15226390 NR Description: hypothetical protein; protein id: At2g28360.1
  misc_feature (760)..(959): Homolog of NCBI NO: 15226390 NR Description: hypothetical protein; protein id: At2g28360.1
  misc_feature (300)..(653): Homolog of NCBI NO: 15230633 NR Description: putative protein; protein id: At3g45190.1
  misc_feature (652)..(959): Homolog of NCBI NO: 15230633 NR Description: putative protein; protein id: At3g45190.1
  misc_feature (202)..(284): Homolog of NCBI NO: 15230633 NR Description: putative protein; protein id: At3g45190.1
  misc_feature (162)..(912): Homolog of NCBI NO: 38344337 NR Description: OSJNBa0058K23.19 [Oryza sativa (japonica
  misc_feature (300)..(942): Homolog of NCBI NO: 25370579 NR Description: F26G16.7 protein - Arabidopsis thaliana Contains similarity to gb|D21822 ORF from Lilium longiflorum. gb|T03978, gb|R89954, gb|AI995107, gb|T20998, gb|R65384 come from
  misc_feature (165)..(284): Homolog of NCBI NO: 25370579 NR Description: F26G16.7 protein - Arabidopsis thaliana Contains similarity to gb|D21822 ORF from Lilium longiflorum. gb|T03978, gb|R89954, gb|AI995107, gb|T20998, gb|R65384 come from
  misc_feature (300)..(907): Homolog of NCBI NO: 34912146 NR Description: P0712E02.15 [Oryza sativa (japonica
  misc_feature (160)..(347): Homolog of NCBI NO: 34912146 NR Description: P0712E02.15 [Oryza sativa (japonica
MVRKLEEMKGSSPRSSSPSTPSSGTQPSSMDLSSPRSIGKVHCRSMEQVREETERKGTLLERLNNVEEQVLKLCSQFEEEVEEERKREDKTDKEKKTPKKKKGLRKLGFRAEIDTPPPRRSDYLDFSSRFLADLAKFSLFSSATAKLSLAPLLPRHHVLEAHISLCIISYVEIILDKENFTLEELLDEEEIIQECKALNSRLINFLRDKAQVEQLLRYIVEEPPQDADSKRAFKFPFISCEIFTCEIDVILKTLVEDEELMNLLFSFLEPNRPHSALLAGYFSKVVICLMIRKTAALMNYVKGHQNVFCQLVDLIGITSIMEVLVRLVGADDQVYPNFLDVMQWLADSNLLEMIVDKLKPSSPPEVQANAAETLCAISRNAPSALATQLSSPGYVAKIFGHALEDSHSKSGLVHSLSVCTSLLDPRRSAVSSSMFNSYRGQHMFESPVPVSPETIGAMLPKLNDLLMLLTVASDSTVLPTTYGELRPPLGKHRLKIVEFIAVLLKTRSEAAQKELVSSGTIKRTLDLFFEYPYNNALHHQVESIILSCLENKSDLMVNHILRDCDLIGKFLLSDRDSNLLGDSQPTVAASGKKKPRVGYVGHITRISNKIGQLSNSNGQIKAYLQENSEWNEWQGSVLQDRNTVENVNRWGCGRPTTLQDRTRDSDEEDRDYDVAALANNLSQAFRYKIYGNDDNEEDHNALDRDDDDVYFDDESAEVVISSLRLGDDQGSLFTNSNWFTFQDDRFGSTPSDTAGSNTIDVELNKTYNANTSSSDDDEVVVGEEDDDLTGNPKDNALNTTETNFQMESPLDFFDFNTSQKAEEAFAEQPPEWVGWGEPSDMQASGTGLNPFIDDDDDDDSKHIMNLDIPMAEVKSESMIPNGSERSLFEKDVEFVGVEPEGAEKAMEQAMKEGIVGEAGVMKKNKEMAEDSKPEESSGGVKEFNDNNYWKVDQEVGVLE

SEQ ID NO: 87261 - protein, 952 aa, Arabidopsis thaliana
  peptide (1)..(952): Ceres Seq. ID no. 12699305
  misc_feature (279)..(640): Pfam Name: SIT4 phosphatase-associated protein Pfam Description: SIT4 phosphatase-associated protein
  misc_feature (128)..(822): Homolog of NCBI NO: 15226390 NR Description: hypothetical protein; protein id: At2g28360.1
  misc_feature (753)..(952): Homolog of NCBI NO: 15226390 NR Description: hypothetical protein; protein id: At2g28360.1
  misc_feature (293)..(646): Homolog of NCBI NO: 15230633 NR Description: putative protein; protein id: At3g45190.1
  misc_feature (645)..(952): Homolog of NCBI NO: 15230633 NR Description: putative protein; protein id: At3g45190.1
  misc_feature (195)..(277): Homolog of NCBI NO: 15230633 NR Description: putative protein; protein id: At3g45190.1
  misc_feature (155)..(905): Homolog of NCBI NO: 38344337 NR Description: OSJNBa0058K23.19 [Oryza sativa (japonica
  misc_feature (293)..(935): Homolog of NCBI NO: 25370579 NR Description: F26G16.7 protein - Arabidopsis thaliana Contains similarity to gb|D21822 ORF from Lilium longiflorum. gb|T03978, gb|R89954, gb|AI995107, gb|T20998, gb|R65384 come from
  misc_feature (158)..(277): Homolog of NCBI NO: 25370579 NR Description: F26G16.7 protein - Arabidopsis thaliana Contains similarity to gb|D21822 ORF from Lilium longiflorum. gb|T03978, gb|R89954, gb|AI995107, gb|T20998, gb|R65384 come from
  misc_feature (293)..(900): Homolog of NCBI NO: 34912146 NR Description: P0712E02.15 [Oryza sativa (japonica
  misc_feature (153)..(340): Homolog of NCBI NO: 34912146 NR Description: P0712E02.15 [Oryza sativa (japonica
MKGSSPRSSSPSTPSSGTQPSSMDLSSPRSIGKVHCRSMEQVREETERKGTLLERLNNVEEQVLKLCSQFEEEVEEERKREDKTDKEKKTPKKKKGLRKLGFRAEIDTPPPRRSDYLDFSSRFLADLAKFSLFSSATAKLSLAPLLPRHHVLEAHISLCIISYVEIILDKENFTLEELLDEEEIIQECKALNSRLINFLRDKAQVEQLLRYIVEEPPQDADSKRAFKFPFISCEIFTCEIDVILKTLVEDEELMNLLFSFLEPNRPHSALLAGYFSKVVICLMIRKTAALMNYVKGHQNVFCQLVDLIGITSIMEVLVRLVGADDQVYPNFLDVMQWLADSNLLEMIVDKLKPSSPPEVQANAAETLCAISRNAPSALATQLSSPGYVAKIFGHALEDSHSKSGLVHSLSVCTSLLDPRRSAVSSSMFNSYRGQHMFESPVPVSPETIGAMLPKLNDLLMLLTVASDSTVLPTTYGELRPPLGKHRLKIVEFIAVLLKTRSEAAQKELVSSGTIKRTLDLFFEYPYNNALHHQVESIILSCLENKSDLMVNHILRDCDLIGKFLLSDRDSNLLGDSQPTVAASGKKKPRVGYVGHITRISNKIGQLSNSNGQIKAYLQENSEWNEWQGSVLQDRNTVENVNRWGCGRPTTLQDRTRDSDEEDRDYDVAALANNLSQAFRYKIYGNDDNEEDHNALDRDDDDVYFDDESAEVVISSLRLGDDQGSLFTNSNWFTFQDDRFGSTPSDTAGSNTIDVELNKTYNANTSSSDDDEVVVGEEDDDLTGNPKDNALNTTETNFQMESPLDFFDFNTSQKAEEAFAEQPPEWVGWGEPSDMQASGTGLNPFIDDDDDDDSKHIMNLDIPMAEVKSESMIPNGSERSLFEKDVEFVGVEPEGAEKAMEQAMKEGIVGEAGVMKKNKEMAEDSKPEESSGGVKEFNDNNYWKVDQEVGVLE

SEQ ID NO: 87262 - DNA, 1107 bp, Arabidopsis thaliana
  misc_feature (1)..(1107): Ceres Seq. ID no. 12699367
  misc_feature: MA Experiment ID: 108573 Result: Up-regulated in Transcription
  misc_feature: MA Experiment 108573 PARAMETER Experiment Name: At_Drought_cDNA_P Parameter: Timepoint (hr) Value: 6
  misc_feature: MA Experiment 108573 PARAMETER Experiment Name: At_Drought_cDNA_P Parameter: Tissue Value: Aerial
  misc_feature: MA Experiment 108573 PARAMETER Experiment Name: At_Drought_cDNA_P Parameter: Treatment Value: Drought vs. No Drought
  misc_feature: MA Experiment ID: 20000180 Result: Up-regulated in Transcription
  misc_feature: MA Experiment 20000180 PARAMETER Experiment Name: At_Germinating_Seeds_P Parameter: Age (hr) Value: 24 vs. 0
  misc_feature: MA Experiment 20000180 PARAMETER Experiment Name: At_Germinating_Seeds_P Parameter: Tissue Value: Germinating Seeds
ccgaaactcgtctgagagaggctctgagattcgatgtcgttcgaggaagaagaagaggaggaaacattcgagcatacacttctcgtggtgcgtgaggtctccgtttacaagatcccgccgcgaaccacatccggcggatacaagtgcggcgaatggcttcaatccgataagatctggtctggtagactccgcgtcgtatcgtgcaaggatcgatgcgagatccgcctcgaggattcgaattccggtgatcttttcgcagcttgttttgtggatcctggacgtagagagaactctgtagagccgtctctcgattcgtctaggtatttcgttctcaggatcgatgacgggagagggaagtatgcgtttatcgggctaggattcgctgagaggaacgaagcgtttgatttcaatgttgcgttatcggatcatgaaaagtacgttaggagggagaaagagaaggagacaggggaaacgagtgagagcgataatcatattgatatccatcctgccgttaatcacagattgaaggaaggtgaaaccataagaatcaacgtgaagccgaaaccaacaacaaatggcactgggatgctctcagctgctctttcaggaacggggaagccaaaacctctagcacttgccccaccccccaaagctgccggagtaaccaggtctcctttacctcctcctccaaacgatcccgtcgcttcaaggattgcatctgatggctgcaaggaatcacgcaggaacgagcctctatctgatctatctcagctcaaaaaatcttccttcaacggcgggatcaggatcgagcaagtcaacaggagctgcatcaggttgggcagctttctgatgaatggagtgtaaaatttaagttattggacaagtccggcttcatcttcttgtgacttgagagcacgagacaatagacaacaatggtggtcagccaacagtctttttgatgtatgttaatggtaagttgatgtgtgtttctttgtaatcctcccacactccctgttttaattatttttcttccttataatcatcgttgttacattatcgattatcatttgtatcactgagatattaatatatacaaaaaggcttttt

SEQ ID NO: 87263 - protein, 276 aa, Arabidopsis thaliana
  peptide (1)..(276): Ceres Seq. ID no. 12699368
  misc_feature (1)..(276): Homolog of NCBI NO: 14596175 NR Description: Unknown protein [Arabidopsis thaliana]
  misc_feature (1)..(250): Homolog of NCBI NO: 18379172 NR Description: Expressed protein; protein id: At1g03900.1, by cDNA: gi_14596174, supported by cDNA: gi_18377527 [Arabidopsis
  misc_feature (1)..(219): Homolog of NCBI NO: 25406749 NR Description: hypothetical protein [imported] - Arabidopsis >gi|4204313|gb|AAD10694.1| Hypothetical protein [Arabidopsis
  misc_feature (7)..(229): Homolog of NCBI NO: 37535352 NR Description: unknown protein [Oryza sativa (japonica
  misc_feature (149)..(248): Homolog of NCBI NO: 25406749 NR Description: hypothetical protein [imported] - Arabidopsis >gi|4204313|gb|AAD10694.1| Hypothetical protein [Arabidopsis
  misc_feature (8)..(224): Homolog of NCBI NO: 8922416 NR Description: hypothetical protein FLJ10420 [Homo sapiens] unnamed protein product [Homo sapiens] hypothetical protein FLJ10420 [Homo sapiens]
  misc_feature (8)..(224): Homolog of NCBI NO: 10435511 NR Description: unnamed protein product [Homo sapiens]
  misc_feature (9)..(224): Homolog of NCBI NO: 27229051 NR Description: RIKEN cDNA 1200016B17 [Mus musculus] unnamed protein product [Mus musculus] unnamed protein product [Mus musculus]
  misc_feature (9)..(244): Homolog of NCBI NO: 34858413 NR Description: similar to RIKEN cDNA 1200016B17 [Rattus
  misc_feature (8)..(217): Homolog of NCBI NO: 13384758 NR Description: RIKEN cDNA 1110005F07 [Mus musculus] unnamed protein product [Mus musculus]
MSFEEEEEEETFEHTLLVVREVSVYKIPPRTTSGGYKCGEWLQSDKIWSGRLRVVSCKDRCEIRLEDSNSGDLFAACFVDPGRRENSVEPSLDSSRYFVLRIDDGRGKYAFIGLGFAERNEAFDFNVALSDHEKYVRREKEKETGETSESDNHIDIHPAVNHRLKEGETIRINVKPKPTTNGTGMLSAALSGTGKPKPLALAPPPKAAGVTRSPLPPPPNDPVASRIASDGCKESRRNEPLSDLSQLKKSSFNGGIRIEQVNRSCIRLGSFLMNGV

SEQ ID NO: 87264 - DNA, 879 bp, Arabidopsis thaliana
  misc_feature (1)..(879): Ceres Seq. ID no. 12699369
  misc_feature: MA Experiment ID: 20000180 Result: Up-regulated in Transcription
  misc_feature: MA Experiment 20000180 PARAMETER Experiment Name: At_Germinating_Seeds_P Parameter: Age (hr) Value: 24 vs. 0
  misc_feature: MA Experiment 20000180 PARAMETER Experiment Name: At_Germinating_Seeds_P Parameter: Tissue Value: Germinating Seeds
  misc_feature: MA Experiment ID: 20000182 Result: Down-regulated in Transcription
  misc_feature: MA Experiment 20000182 PARAMETER Experiment Name: At_2mM_SA_P Parameter: Age (day) Value: 14
  misc_feature: MA Experiment 20000182 PARAMETER Experiment Name: At_2mM_SA_P Parameter: Organism Value: A. thaliana
  misc_feature: MA Experiment 20000182 PARAMETER Experiment Name: At_2mM_SA_P Parameter: Plant Line Value: WS
  misc_feature: MA Experiment 20000182 PARAMETER Experiment Name: At_2mM_SA_P Parameter: Timepoint (hr) Value: 6
  misc_feature: MA Experiment 20000182 PARAMETER Experiment Name: At_2mM_SA_P Parameter: Tissue Value: Aerial
  misc_feature: MA Experiment 20000182 PARAMETER Experiment Name: At_2mM_SA_P Parameter: Treatment Value: 2mM SA vs. No Treatment
  misc_feature: MA Experiment ID: 20000437 Result: Down-regulated in Transcription
  misc_feature: MA Experiment 20000437 PARAMETER Experiment Name: At_Drought_P Parameter: Age (day) Value: 8
  misc_feature: MA Experiment 20000437 PARAMETER Experiment Name: At_Drought_P Parameter: Organism Value: A. thaliana
  misc_feature: MA Experiment 20000437 PARAMETER Experiment Name: At_Drought_P Parameter: Plant Line Value: WS
  misc_feature: MA Experiment 20000437 PARAMETER Experiment Name: At_Drought_P Parameter: Timepoint (hr) Value: 24
  misc_feature: MA Experiment 20000437 PARAMETER Experiment Name: At_Drought_P Parameter: Tissue Value: Whole Plant
  misc_feature: MA Experiment 20000437 PARAMETER Experiment Name: At_Drought_P Parameter: Treatment Value: Drought vs. No Drought
  misc_feature: MA Experiment ID: 20000438 Result: Up-regulated in Transcription
  misc_feature: MA Experiment 20000438 PARAMETER Experiment Name: At_Shoots__P Parameter: Age (day) Value: 14
  misc_feature: MA Experiment 20000438 PARAMETER Experiment Name: At_Shoots__P Parameter: Tissue Value: Shoots vs. Whole Plant
  misc_feature: MA Experiment ID: 20000439 Result: Down-regulated in Transcription
  misc_feature: MA Experiment 20000439 PARAMETER Experiment Name: At_Roots__P Parameter: Age (day) Value: 14 vs. 21
  misc_feature: MA Experiment 20000439 PARAMETER Experiment Name: At_Roots__P Parameter: Organism Value: A. thaliana
  misc_feature: MA Experiment 20000439 PARAMETER Experiment Name: At_Roots__P Parameter: Tissue Value: Roots vs. Whole Plant
  misc_feature: MA Experiment ID: 20001450 Result: Down-regulated in Transcription
  misc_feature: MA Experiment 20001450 PARAMETER Experiment Name: At_Far-red-induction_P Parameter: Age (day) Value: 7
  misc_feature: MA Experiment 20001450 PARAMETER Experiment Name: At_Far-red-induction_P Parameter: Light Value: Far-red vs. White
  misc_feature: MA Experiment 20001450 PARAMETER Experiment Name: At_Far-red-induction_P Parameter: Organism Value: A. thaliana
  misc_feature: MA Experiment 20001450 PARAMETER Experiment Name: At_Far-red-induction_P Parameter: Plant Line Value: Columbia
  misc_feature: MA Experiment 20001450 PARAMETER Experiment Name: At_Far-red-induction_P Parameter: Timepoint (hr) Value: 8
  misc_feature: MA Experiment 20001450 PARAMETER Experiment Name: At_Far-red-induction_P Parameter: Tissue Value: Whole Plant
  misc_feature: MA Experiment ID: 20001757 Result: Up-regulated in Transcription
  misc_feature: MA Experiment 20001757 PARAMETER Experiment Name: At_50mM_NH4NO3_L-to-H_P Parameter: Timepoint (hr) Value: 6
  misc_feature: MA Experiment 20001757 PARAMETER Experiment Name: At_50mM_NH4NO3_L-to-H_P Parameter: Tissue Value: Leaf
  misc_feature: MA Experiment 20001757 PARAMETER Experiment Name: At_50mM_NH4NO3_L-to-H_P Parameter: Treatment Value: 50mM NH4NO3 vs 100mM Mannitol
  misc_feature: MA Experiment ID: 20001905 Result: Down-regulated in Transcription
  misc_feature: MA Experiment 20001905 PARAMETER Experiment Name: At_Drought_Reproduction_P Parameter: Age (day) Value: 40
  misc_feature: MA Experiment 20001905 PARAMETER Experiment Name: At_Drought_Reproduction_P Parameter: Organism Value: A. thaliana
  misc_feature: MA Experiment 20001905 PARAMETER Experiment Name: At_Drought_Reproduction_P Parameter: Plant Line Value: WS
  misc_feature: MA Experiment 20001905 PARAMETER Experiment Name: At_Drought_Reproduction_P Parameter: Timepoint (day) Value: 10
  misc_feature: MA Experiment 20001905 PARAMETER Experiment Name: At_Drought_Reproduction_P Parameter: Tissue Value: Rosettes
  misc_feature: MA Experiment 20001905 PARAMETER Experiment Name: At_Drought_Reproduction_P Parameter: Treatment Value: Drought vs. No Drought
  misc_feature: MA Experiment ID: 20001906 Result: Down-regulated in Transcription
  misc_feature: MA Experiment 20001906 PARAMETER Experiment Name: At_Drought_Reproduction_P Parameter: Age (day) Value: 35
  misc_feature: MA Experiment 20001906 PARAMETER Experiment Name: At_Drought_Reproduction_P Parameter: Organism Value: A. thaliana
  misc_feature: MA Experiment 20001906 PARAMETER Experiment Name: At_Drought_Reproduction_P Parameter: Plant Line Value: WS
  misc_feature: MA Experiment 20001906 PARAMETER Experiment Name: At_Drought_Reproduction_P Parameter: Timepoint (day) Value: 5
  misc_feature: MA Experiment 20001906 PARAMETER Experiment Name: At_Drought_Reproduction_P Parameter: Tissue Value: Siliques
  misc_feature: MA Experiment 20001906 PARAMETER Experiment Name: At_Drought_Reproduction_P Parameter: Treatment Value: Drought vs. No Drought
atggaagcgagaatcatcctcctccgaattcaaatcccttggagcgctaatcgccaattctctcatcctcctttagatttccctcgttttatcagagcttcttcttcctcaacctcacagaagccgaaaacttacgaaggtccgaaaccgaggaagaatttagtagctgatttcatttccaaaaacgatgacttggttcgaagcttaccgatctacgtcgggggcgcttctcttttggccgttctctttaatcggactgtttccggtatcgctcctgttgccgatgctagcagctcacagtctagagcagatctattagcgcttggcttggctgtcaccaatctattgaccggtttagtctggttatcgattcgacctaagtcaataacacctgtaaatccgaaaggtgtggaatgcaaagttgtagaatctgatcttcctgcatcgatggtttccgagttgttatgggcttgggaatctcttaaggtagcaacatgttgtaagtctctagttattgtctacaatggaatttgccttattcaaattgggatggtagctgaatctccagaagataagaaaacagtcatagtaaagaccgataagttgatgcaaggatcggtttacagaggggttatgaaatccaaagcacagagttacttggctaatctttctctttatcctgggagatcagagctgccatttctacctgcaaatacacagccgcttggagataaaggaatcgcagtcattggtggaaatacgattagaggattcacgtcttcagaccaggcttggatttcttcaattggggagaagctagatgcgacactggggagatattttgttgattctgatgagatttccagagtaacagtttga

SEQ ID NO: 87265 - protein, 292 aa, Arabidopsis thaliana
  peptide (1)..(292): Ceres Seq. ID no. 12699370
  misc_feature (1)..(292): Homolog of NCBI NO: 34146872 NR Description: At1g59840 [Arabidopsis thaliana]
  misc_feature (1)..(292): Homolog of NCBI NO: 15218930 NR Description: hypothetical protein; protein id: At1g59840.1
  misc_feature (25)..(279): Homolog of NCBI NO: 38345907 NR Description: OSJNBb0059K02.12 [Oryza sativa (japonica
  misc_feature (65)..(277): Homolog of NCBI NO: 17231313 NR Description: hypothetical protein [Nostoc sp. PCC 7120]
  misc_feature (65)..(277): Homolog of NCBI NO: 23127716 NR Description: hypothetical protein [Nostoc punctiforme]
  misc_feature (65)..(277): Homolog of NCBI NO: 16331001 NR Description: unknown protein [Synechocystis sp. PCC 6803]
  misc_feature (60)..(279): Homolog of NCBI NO: 23039835 NR Description: hypothetical protein [Trichodesmium erythraeum
  misc_feature (62)..(281): Homolog of NCBI NO: 22298227 NR Description: ORF_ID:tll0685~hypothetical protein
  misc_feature (65)..(277): Homolog of NCBI NO: 37523882 NR Description: hypothetical protein gll4313 [Gloeobacter
  misc_feature (80)..(274): Homolog of NCBI NO: 33861422 NR Description: conserved hypothetical protein [Prochlorococcus subsp. pastoris str. CCMP1378] >gi|33633999|emb|CAE19324.1| hypothetical protein [Prochlorococcus marinus subsp. pastoris
MEARIILLRIQIPWSANRQFSHPPLDFPRFIRASSSSTSQKPKTYEGPKPRKNLVADFISKNDDLVRSLPIYVGGASLLAVLFNRTVSGIAPVADASSSQSRADLLALGLAVTNLLTGLVWLSIRPKSITPVNPKGVECKVVESDLPASMVSELLWAWESLKVATCCKSLVIVYNGICLIQIGMVAESPEDKKTVIVKTDKLMQGSVYRGVMKSKAQSYLANLSLYPGRSELPFLPANTQPLGDKGIAVIGGNTIRGFTSSDQAWISSIGEKLDATLGRYFVDSDEISRVTV

SEQ ID NO: 87266 - DNA, 1521 bp, Arabidopsis thaliana
  misc_feature (1)..(1521): Ceres Seq. ID no. 12699412
  misc_feature: MA Experiment ID: 20000179 Result: Up-regulated in Transcription
  misc_feature: MA Experiment 20000179 PARAMETER Experiment Name: At_Germinating_Seeds_P Parameter: Age (hr) Value: 6 vs. 0
  misc_feature: MA Experiment 20000179 PARAMETER Experiment Name: At_Germinating_Seeds_P Parameter: Tissue Value: Germinating Seeds
  misc_feature: MA Experiment ID: 20000227 Result: Down-regulated in Transcription
  misc_feature: MA Experiment 20000227 PARAMETER Experiment Name: At_Root-Tips-vs-Tops_P Parameter: Tissue Value: Root Tips vs. Root Tops
  misc_feature: MA Experiment ID: 20001248 Result: Down-regulated in Transcription
  misc_feature: MA Experiment 20001248 PARAMETER Experiment Name: At_Far-red-induction_P Parameter: Age (day) Value: 7
  misc_feature: MA Experiment 20001248 PARAMETER Experiment Name: At_Far-red-induction_P Parameter: Light Value: Far-red vs. White
  misc_feature: MA Experiment 20001248 PARAMETER Experiment Name: At_Far-red-induction_P Parameter: Organism Value: A. thaliana
  misc_feature: MA Experiment 20001248 PARAMETER Experiment Name: At_Far-red-induction_P Parameter: Plant Line Value: Columbia
  misc_feature: MA Experiment 20001248 PARAMETER Experiment Name: At_Far-red-induction_P Parameter: Timepoint (hr) Value: 4
  misc_feature: MA Experiment 20001248 PARAMETER Experiment Name: At_Far-red-induction_P Parameter: Tissue Value: Whole Plant
atggaacagattttggctctgtttgccatttttcttgcttttgctttctccgggaaatgcagcgacgttttcagcagatctgactaccctgagggattcgtctttggagccggcacttctgcttatcagtgggaaggagctgctgcagaagacggaaggaaacctagcctgtgggacactctttgtcactctcgtgaccaaggtaacggagatatagcatgtgatgggtatcacaagtacaaggatgatgtgaagttgatggtggacactaacttagatgctttcagattctccatctcttggtctaggctaatacctaatggaagagggcctgttaaccaaaagggtctacagttctacaagaacctcatccaagagttagtaagccacggaattgaaccacatgttacactctaccactatgatcatcctcagtctctggaggatgaatatggaggatgcaaagactttactacttatgcagatgtttgcttcagagagtttgggaaccatgtcaaactatggaccacgatcaacgaggctaatatattctctataggaggttacaacgatggggatacaccgcctggtcgttgttccaaaccgagcaaaaactgttcttcagggaactcttccattgaaccatatattgtaggccataatttgttgcttgcgcacgcctctgtttcaagacgatacaaacaaaaatacaaggataagcagggaggttccataggatttagcttattcatattagggcttattcctactacaagctccaaggatgatgccactgcaacccaaagagcccaagatttctacgtcggctggttccttagacctcttttatttggagactatcctgatacaatgaaaagaaccattggatcaagactgccagttttctctgagaaagaatcagaacaagttaaaggctcatgtgactttgtaggagtcatacactatcatgcggcttctgtcactaacatcaaatccaaaccttctctgtccggaaacccggatttctactcatacatggagacagattttggaaaaagtttagattttcagtatgctaatactccatgggctatggaagttgtgctggagtatataaagcagagctatggaaatcctcctgtctacattcttgagagtgctaaattcactttccaatggcaacaaataggtacaccgatgaagcaagattcgcagctgaaacagaaggatataccaagggtggaatacttgcatgcctacattggtggtgtgctcaaatccataaggaatggatcagacacgagaggctacttcgtatggtcatttatggatttatacgagcttctagggggatatgaggttggttttgggttgtacactgtcaatttcagcgatcctcatcgcaagagatctcccaaactctctgcttattggtactctgattttctcaagggtgaatctgcctttcttgattcccaaggcatcaaggaattgcagagcaaatactcttcttccttctag

SEQ ID NO: 87267 - protein, 506 aa, Arabidopsis thaliana
  peptide (1)..(506): Ceres Seq. ID no. 12699413
  misc_feature (1)..(506): Homolog of NCBI NO: 22330338 NR Description: glycosyl hydrolase family 1; protein id:
  misc_feature (1)..(506): Homolog of NCBI NO: 25289447 NR Description: hypothetical protein T2K10.15 [imported] - thaliana >gi|4249391|gb|AAD14488.1|AAD14488 Similar to gi|3249076
  misc_feature (1)..(505): Homolog of NCBI NO: 22328869 NR Description: glycosyl hydrolase family 1; protein id:
  misc_feature (1)..(351): Homolog of NCBI NO: 15219037 NR Description: glycosyl hydrolase family 1; protein id:
  misc_feature (372)..(503): Homolog of NCBI NO: 15219037 NR Description: glycosyl hydrolase family 1; protein id:
  misc_feature (1)..(309): Homolog of NCBI NO: 15219036 NR Description: glycosyl hydrolase family 1; protein id:
  misc_feature (350)..(505): Homolog of NCBI NO: 15219036 NR Description: glycosyl hydrolase family 1; protein id:
  misc_feature (43)..(346): Homolog of NCBI NO: 7435457 NR Description: hypothetical protein T13D8.15 - Arabidopsis >gi|3249077|gb|AAC24061.1| Similar to prunasin hydrolase gb|U50201 from Prunus serotina. ESTs gb|T21225 and gb|AA586305
  misc_feature (349)..(505): Homolog of NCBI NO: 7435457 NR Description: hypothetical protein T13D8.15 - Arabidopsis >gi|3249077|gb|AAC24061.1| Similar to prunasin hydrolase gb|U50201 from Prunus serotina. ESTs gb|T21225 and gb|AA586305
  misc_feature (1)..(372): Homolog of NCBI NO: 11264219 NR Description: glucosidase like protein - Arabidopsis thaliana glucosidase like protein [Arabidopsis thaliana]
MEQILALFAIFLAFAFSGKCSDVFSRSDYPEGFVFGAGTSAYQWEGAAAEDGRKPSLWDTLCHSRDQGNGDIACDGYHKYKDDVKLMVDTNLDAFRFSISWSRLIPNGRGPVNQKGLQFYKNLIQELVSHGIEPHVTLYHYDHPQSLEDEYGGCKDFTTYADVCFREFGNHVKLWTTINEANIFSIGGYNDGDTPPGRCSKPSKNCSSGNSSIEPYIVGHNLLLAHASVSRRYKQKYKDKQGGSIGFSLFILGLIPTTSSKDDATATQRAQDFYVGWFLRPLLFGDYPDTMKRTIGSRLPVFSEKESEQVKGSCDFVGVIHYHAASVTNIKSKPSLSGNPDFYSYMETDFGKSLDFQYANTPWAMEVVLEYIKQSYGNPPVYILESAKFTFQWQQIGTPMKQDSQLKQKDIPRVEYLHAYIGGVLKSIRNGSDTRGYFVWSFMDLYELLGGYEVGFGLYTVNFSDPHRKRSPKLSAYWYSDFLKGESAFLDSQGIKELQSKYSSSF

SEQ ID NO: 87268 - protein, 420 aa, Arabidopsis thaliana
  peptide (1)..(420): Ceres Seq. ID no. 12699414
  misc_feature (1)..(420): Homolog of NCBI NO: 22330338 NR Description: glycosyl hydrolase family 1; protein id:
  misc_feature (1)..(420): Homolog of NCBI NO: 25289447 NR Description: hypothetical protein T2K10.15 [imported] - thaliana >gi|4249391|gb|AAD14488.1|AAD14488 Similar to gi|3249076
  misc_feature (1)..(419): Homolog of NCBI NO: 22328869 NR Description: glycosyl hydrolase family 1; protein id:
  misc_feature (1)..(265): Homolog of NCBI NO: 15219037 NR Description: glycosyl hydrolase family 1; protein id:
  misc_feature (286)..(417): Homolog of NCBI NO: 15219037 NR Description: glycosyl hydrolase family 1; protein id:
  misc_feature (1)..(223): Homolog of NCBI NO: 15219036 NR Description: glycosyl hydrolase family 1; protein id:
  misc_feature (264)..(419): Homolog of NCBI NO: 15219036 NR Description: glycosyl hydrolase family 1; protein id:
  misc_feature (1)..(260): Homolog of NCBI NO: 7435457 NR Description: hypothetical protein T13D8.15 - Arabidopsis >gi|3249077|gb|AAC24061.1| Similar to prunasin hydrolase gb|U50201 from Prunus serotina. ESTs gb|T21225 and gb|AA586305
  misc_feature (263)..(419): Homolog of NCBI NO: 7435457 NR Description: hypothetical protein T13D8.15 - Arabidopsis >gi|3249077|gb|AAC24061.1| Similar to prunasin hydrolase gb|U50201 from Prunus serotina. ESTs gb|T21225 and gb|AA586305
  misc_feature (1)..(286): Homolog of NCBI NO: 11264219 NR Description: glucosidase like protein - Arabidopsis thaliana glucosidase like protein [Arabidopsis thaliana]
MVDTNLDAFRFSISWSRLIPNGRGPVNQKGLQFYKNLIQELVSHGIEPHVTLYHYDHPQSLEDEYGGCKDFTTYADVCFREFGNHVKLWTTINEANIFSIGGYNDGDTPPGRCSKPSKNCSSGNSSIEPYIVGHNLLLAHASVSRRYKQKYKDKQGGSIGFSLFILGLIPTTSSKDDATATQRAQDFYVGWFLRPLLFGDYPDTMKRTIGSRLPVFSEKESEQVKGSCDFVGVIHYHAASVTNIKSKPSLSGNPDFYSYMETDFGKSLDFQYANTPWAMEVVLEYIKQSYGNPPVYILESAKFTFQWQQIGTPMKQDSQLKQKDIPRVEYLHAYIGGVLKSIRNGSDTRGYFVWSFMDLYELLGGYEVGFGLYTVNFSDPHRKRSPKLSAYWYSDFLKGESAFLDSQGIKELQSKYSSSF

SEQ ID NO: 87269 - DNA, 1178 bp, Arabidopsis thaliana
  misc_feature (1)..(1178): Ceres Seq. ID no. 12699476
  misc_feature: MA Experiment ID: 108434 Result: Down-regulated in Transcription
  misc_feature: MA Experiment 108434 PARAMETER Experiment Name: At_Root_Tips_cDNA_P Parameter: Tissue Value: Root Tips
  misc_feature: MA Experiment ID: 108461 Result: Down-regulated in Transcription
  misc_feature: MA Experiment 108461 PARAMETER Experiment Name: At_Germinating_Seeds_cDNA_P Parameter: Age (day) Value: 1 vs. 0
  misc_feature: MA Experiment 108461 PARAMETER Experiment Name: At_Germinating_Seeds_cDNA_P Parameter: Tissue Value: Germinating Seeds
  misc_feature: MA Experiment ID: 108501 Result: Up-regulated in Transcription
  misc_feature: MA Experiment 108501 PARAMETER Experiment Name: At_ap2_floral_buds_cDNA_P Parameter: Plant Line Value: ap2 (Ler.)
  misc_feature: MA Experiment 108501 PARAMETER Experiment Name: At_ap2_floral_buds_cDNA_P Parameter: Tissue Value: Closed Flower
  misc_feature: MA Experiment ID: 20000087 Result: Down-regulated in Transcription
  misc_feature: MA Experiment 20000087 PARAMETER Experiment Name: At_100uM_ABA_Mutants_cDNA_P Parameter: Plant Line Value: WS
  misc_feature: MA Experiment 20000087 PARAMETER Experiment Name: At_100uM_ABA_Mutants_cDNA_P Parameter: Timepoint (hr) Value: 6
  misc_feature: MA Experiment 20000087 PARAMETER Experiment Name: At_100uM_ABA_Mutants_cDNA_P Parameter: Tissue Value: Aerial
  misc_feature: MA Experiment 20000087 PARAMETER Experiment Name: At_100uM_ABA_Mutants_cDNA_P Parameter: Treatment Value: 100uM ABA vs. No Treatment
  misc_feature: MA Experiment ID: 20000185 Result: Up-regulated in Transcription
  misc_feature: MA Experiment 20000185 PARAMETER Experiment Name: At_Roots__P Parameter: Age (day) Value: 7 vs. 21
  misc_feature: MA Experiment 20000185 PARAMETER Experiment Name: At_Roots__P Parameter: Organism Value: A. thaliana
  misc_feature: MA Experiment 20000185 PARAMETER Experiment Name: At_Roots__P Parameter: Tissue Value: Roots vs. Whole Plant
  misc_feature: MA Experiment ID: 20000227 Result: Down-regulated in Transcription
  misc_feature: MA Experiment 20000227 PARAMETER Experiment Name: At_Root-Tips-vs-Tops_P Parameter: Tissue Value: Root Tips vs. Root Tops
  misc_feature: MA Experiment ID: 20000439 Result: Up-regulated in Transcription
  misc_feature: MA Experiment 20000439 PARAMETER Experiment Name: At_Roots__P Parameter: Age (day) Value: 14 vs. 21
  misc_feature: MA Experiment 20000439 PARAMETER Experiment Name: At_Roots__P Parameter: Organism Value: A. thaliana
  misc_feature: MA Experiment 20000439 PARAMETER Experiment Name: At_Roots__P Parameter: Tissue Value: Roots vs. Whole Plant
  misc_feature: MA Experiment ID: 20001904 Result: Up-regulated in Transcription
  misc_feature: MA Experiment 20001904 PARAMETER Experiment Name: At_Drought_Reproduction_P Parameter: Age (day) Value: 37
  misc_feature: MA Experiment 20001904 PARAMETER Experiment Name: At_Drought_Reproduction_P Parameter: Organism Value: A. thaliana
  misc_feature: MA Experiment 20001904 PARAMETER Experiment Name: At_Drought_Reproduction_P Parameter: Plant Line Value: WS
  misc_feature: MA Experiment 20001904 PARAMETER Experiment Name: At_Drought_Reproduction_P Parameter: Timepoint (day) Value: 7
  misc_feature: MA Experiment 20001904 PARAMETER Experiment Name: At_Drought_Reproduction_P Parameter: Tissue Value: Rosettes
  misc_feature: MA Experiment 20001904 PARAMETER Experiment Name: At_Drought_Reproduction_P Parameter: Treatment Value: Drought vs. No Drought
ataaaatccatggctgaagcttgcagagttaggaggatgaagctaggaagccaaggccttgaggtatctgcgcaaggccttggctgcatggccctctccgctcgatacggtgctcccaagccggaaactgacgccatcgctctcctccaccatgctattaactccggtgttactttctttgacacctctgacatgtatggtcctgaaaccaacgagttgctcctcggaaaggctctgaaagatggggtgaaggagaaagtggagcttgcgaccaaatttggattctttatagtagagggggaaatttctgaggtaagaggagatcctgagtatgtaagggcagcgtgtgaggctagtttaaagaggctagatattgcctgcattgatctttattatcagcatcgaatcgatactcgtgtccctatcgaaatcactatgagagaactgaagaagctagttgaagagggtaagataaagtatattggtctgtcagaagcttcagcttcaactatcagaagagcacatgctgttcacccgataactgcggtgcaaatagaatggtccttatggtcgagagacgcggaagaagatatcattcctatctgcagggaacttgggattggaatcgtagcttatagccctctaggaagaggcttcttagcagcaggacccaaacttgctgagaatctggaaaacgatgacttcagaaagactctaccaagattccaacaagaaaacgtagaccacaacaagattctctttgagaaagtttctgcaatggctgagaagaaagggtgcactccagcacaactagccttagcatgggttcatcaccagggagatgatgtttgccccattccaggaaccactaagattgaaaacctcaaccagaacattagagctttgtcagtaaaactcactcctgaagaaatatctgagctcgactcccttgccaaaccagagtctgtgaaaggagaaagatacatggcctcaatgtccaccttcaagaactccaacactccaccgttgtcttcctggaaagccacttaaaaccgcatgagagtttctctagctaaacctactaaaattaatatgctaagggcttgtgtaagcccacaaaaataatatgtaagagtttgtgttgatgttcagagtgttcaatgtataattttctatgc

SEQ ID NO: 87270 - protein, 349 aa, Arabidopsis thaliana
  peptide (1)..(349): Ceres Seq. ID no. 12699477
  misc_feature (4)..(349): Homolog of NCBI NO: 30102704 NR Description: At1g60680 [Arabidopsis thaliana]
  misc_feature (4)..(349): Homolog of NCBI NO: 30696451 NR Description: aldo/keto reductase family [Arabidopsis thaliana]
  misc_feature (4)..(348): Homolog of NCBI NO: 15219786 NR Description: auxin-induced protein, putative; protein id: [Arabidopsis thaliana] >gi|25316215|pir||C96632 hypothetical
  misc_feature (4)..(348): Homolog of NCBI NO: 18406861 NR Description: auxin-induced protein, putative; protein id: supported by cDNA: gi_15912324, supported by cDNA: gi_20466377, by cDNA: gi_6562979 [Arabidopsis thaliana]
  misc_feature (4)..(348): Homolog of NCBI NO: 25316216 NR Description: hypothetical protein F8A5.24 [imported] -
  misc_feature (4)..(348): Homolog of NCBI NO: 6562980 NR Description: auxin-induced atb2 [Arabidopsis thaliana]
  misc_feature (6)..(233): Homolog of NCBI NO: 15219805 NR Description: auxin-induced protein, putative; protein id:
  misc_feature (239)..(348): Homolog of NCBI NO: 15219805 NR Description: auxin-induced protein, putative; protein id:
  misc_feature (4)..(346): Homolog of NCBI NO: 15220214 NR Description: putative auxin-induced protein; protein id:
  misc_feature (10)..(348): Homolog of NCBI NO: 38344997 NR Description: OSJNBa0008A08.11 [Oryza sativa (japonica
IKSMAEACRVRRMKLGSQGLEVSAQGLGCMALSARYGAPKPETDAIALLHHAINSGVTFFDTSDMYGPETNELLLGKALKDGVKEKVELATKFGFFIVEGEISEVRGDPEYVRAACEASLKRLDIACIDLYYQHRIDTRVPIEITMRELKKLVEEGKIKYIGLSEASASTIRRAHAVHPITAVQIEWSLWSRDAEEDIIPICRELGIGIVAYSPLGRGFLAAGPKLAENLENDDFRKTLPRFQQENVDHNKILFEKVSAMAEKKGCTPAQLALAWVHHQGDDVCPIPGTTKIENLNQNIRALSVKLTPEEISELDSLAKPESVKGERYMASMSTFKNSNTPPLSSWKAT

SEQ ID NO: 87271 - protein, 346 aa, Arabidopsis thaliana
  peptide (1)..(346): Ceres Seq. ID no. 12699478
  misc_feature (1)..(346): Homolog of NCBI NO: 30102704 NR Description: At1g60680 [Arabidopsis thaliana]
  misc_feature (1)..(346): Homolog of NCBI NO: 30696451 NR Description: aldo/keto reductase family [Arabidopsis thaliana]
  misc_feature (1)..(345): Homolog of NCBI NO: 15219786 NR Description: auxin-induced protein, putative; protein id: [Arabidopsis thaliana] >gi|25316215|pir||C96632 hypothetical
  misc_feature (1)..(345): Homolog of NCBI NO: 18406861 NR Description: auxin-induced protein, putative; protein id: supported by cDNA: gi_15912324, supported by cDNA: gi_20466377, by cDNA: gi_6562979 [Arabidopsis thaliana]
  misc_feature (1)..(345): Homolog of NCBI NO: 25316216 NR Description: hypothetical protein F8A5.24 [imported] -
  misc_feature (1)..(345): Homolog of NCBI NO: 6562980 NR Description: auxin-induced atb2 [Arabidopsis thaliana]
  misc_feature (3)..(230): Homolog of NCBI NO: 15219805 NR Description: auxin-induced protein, putative; protein id:
  misc_feature (236)..(345): Homolog of NCBI NO: 15219805 NR Description: auxin-induced protein, putative; protein id:
  misc_feature (1)..(343): Homolog of NCBI NO: 15220214 NR Description: putative auxin-induced protein; protein id:
  misc_feature (7)..(345): Homolog of NCBI NO: 38344997 NR Description: OSJNBa0008A08.11 [Oryza sativa (japonica
MAEACRVRRMKLGSQGLEVSAQGLGCMALSARYGAPKPETDAIALLHHAINSGVTFFDTSDMYGPETNELLLGKALKDGVKEKVELATKFGFFIVEGEISEVRGDPEYVRAACEASLKRLDIACIDLYYQHRIDTRVPIEITMRELKKLVEEGKIKYIGLSEASASTIRRAHAVHPITAVQIEWSLWSRDAEEDIIPICRELGIGIVAYSPLGRGFLAAGPKLAENLENDDFRKTLPRFQQENVDHNKILFEKVSAMAEKKGCTPAQLALAWVHHQGDDVCPIPGTTKIENLNQNIRALSVKLTPEEISELDSLAKPESVKGERYMASMSTFKNSNTPPLSSWKAT

SEQ ID NO: 87272 - protein, 337 aa, Arabidopsis thaliana
  peptide (1)..(337): Ceres Seq. ID no. 12699479
  misc_feature (1)..(337): Homolog of NCBI NO: 30102704 NR Description: At1g60680 [Arabidopsis thaliana]
  misc_feature (1)..(337): Homolog of NCBI NO: 30696451 NR Description: aldo/keto reductase family [Arabidopsis thaliana]
  misc_feature (1)..(336): Homolog of NCBI NO: 15219786 NR Description: auxin-induced protein, putative; protein id: [Arabidopsis thaliana] >gi|25316215|pir||C96632 hypothetical
  misc_feature (1)..(336): Homolog of NCBI NO: 18406861 NR Description: auxin-induced protein, putative; protein id: supported by cDNA: gi_15912324, supported by cDNA: gi_20466377, by cDNA: gi_6562979 [Arabidopsis thaliana]
  misc_feature (1)..(336): Homolog of NCBI NO: 25316216 NR Description: hypothetical protein F8A5.24 [imported] -
  misc_feature (1)..(336): Homolog of NCBI NO: 6562980 NR Description: auxin-induced atb2 [Arabidopsis thaliana]
  misc_feature (1)..(221): Homolog of NCBI NO: 15219805 NR Description: auxin-induced protein, putative; protein id:
  misc_feature (227)..(336): Homolog of NCBI NO: 15219805 NR Description: auxin-induced protein, putative; protein id:
  misc_feature (1)..(334): Homolog of NCBI NO: 15220214 NR Description: putative auxin-induced protein; protein id:
  misc_feature (1)..(336): Homolog of NCBI NO: 38344997 NR Description: OSJNBa0008A08.11 [Oryza sativa (japonica
MKLGSQGLEVSAQGLGCMALSARYGAPKPETDAIALLHHAINSGVTFFDTSDMYGPETNELLLGKALKDGVKEKVELATKFGFFIVEGEISEVRGDPEYVRAACEASLKRLDIACIDLYYQHRIDTRVPIEITMRELKKLVEEGKIKYIGLSEASASTIRRAHAVHPITAVQIEWSLWSRDAEEDIIPICRELGIGIVAYSPLGRGFLAAGPKLAENLENDDFRKTLPRFQQENVDHNKILFEKVSAMAEKKGCTPAQLALAWVHHQGDDVCPIPGTTKIENLNQNIRALSVKLTPEEISELDSLAKPESVKGERYMASMSTFKNSNTPPLSSWKAT

SEQ ID NO: 87273 - DNA, 1348 bp, Arabidopsis thaliana
  misc_feature (1)..(1348): Ceres Seq. ID no. 12699484
  misc_feature: MA Experiment ID: 20000173 Result: Down-regulated in Transcription
  misc_feature: MA Experiment 20000173 PARAMETER Experiment Name: At_42deg_Heat_P Parameter: Age (day) Value: 14
  misc_feature: MA Experiment 20000173 PARAMETER Experiment Name: At_42deg_Heat_P Parameter: Organism Value: A. thaliana
  misc_feature: MA Experiment 20000173 PARAMETER Experiment Name: At_42deg_Heat_P Parameter: Plant Line Value: WS
  misc_feature: MA Experiment 20000173 PARAMETER Experiment Name: At_42deg_Heat_P Parameter: Temperature (deg C) Value: 42 vs. 22
  misc_feature: MA Experiment 20000173 PARAMETER Experiment Name: At_42deg_Heat_P Parameter: Timepoint (hr) Value: 6
  misc_feature: MA Experiment 20000173 PARAMETER Experiment Name: At_42deg_Heat_P Parameter: Tissue Value: Aerial
  misc_feature: MA Experiment ID: 20000179 Result: Down-regulated in Transcription
  misc_feature: MA Experiment 20000179 PARAMETER Experiment Name: At_Germinating_Seeds_P Parameter: Age (hr) Value: 6 vs. 0
  misc_feature: MA Experiment 20000179 PARAMETER Experiment Name: At_Germinating_Seeds_P Parameter: Tissue Value: Germinating Seeds
  misc_feature: MA Experiment ID: 20000182 Result: Up-regulated in Transcription
  misc_feature: MA Experiment 20000182 PARAMETER Experiment Name: At_2mM_SA_P Parameter: Age (day) Value: 14
  misc_feature: MA Experiment 20000182 PARAMETER Experiment Name: At_2mM_SA_P Parameter: Organism Value: A. thaliana
  misc_feature: MA Experiment 20000182 PARAMETER Experiment Name: At_2mM_SA_P Parameter: Plant Line Value: WS
  misc_feature: MA Experiment 20000182 PARAMETER Experiment Name: At_2mM_SA_P Parameter: Timepoint (hr) Value: 6
  misc_feature: MA Experiment 20000182 PARAMETER Experiment Name: At_2mM_SA_P Parameter: Tissue Value: Aerial
  misc_feature: MA Experiment 20000182 PARAMETER Experiment Name: At_2mM_SA_P Parameter: Treatment Value: 2mM SA vs. No Treatment
  misc_feature: MA Experiment ID: 20000184 Result: Down-regulated in Transcription
  misc_feature: MA Experiment 20000184 PARAMETER Experiment Name: At_Shoots__P Parameter: Age (day) Value: 7
  misc_feature: MA Experiment 20000184 PARAMETER Experiment Name: At_Shoots__P Parameter: Tissue Value: Shoots vs. Whole Plant
  misc_feature: MA Experiment ID: 20000185 Result: Up-regulated in Transcription
  misc_feature: MA Experiment 20000185 PARAMETER Experiment Name: At_Roots__P Parameter: Age (day) Value: 7 vs. 21
  misc_feature: MA Experiment 20000185 PARAMETER Experiment Name: At_Roots__P Parameter: Organism Value: A. thaliana
  misc_feature: MA Experiment 20000185 PARAMETER Experiment Name: At_Roots__P Parameter: Tissue Value: Roots vs. Whole Plant
  misc_feature: MA Experiment ID: 20000234 Result: Down-regulated in Transcription
  misc_feature: MA Experiment 20000234 PARAMETER Experiment Name: At_Siliques_P Parameter: Age (day) Value: 21
  misc_feature: MA Experiment 20000234 PARAMETER Experiment Name: At_Siliques_P Parameter: Organism Value: A. thaliana
  misc_feature: MA Experiment 20000234 PARAMETER Experiment Name: At_Siliques_P Parameter: Plant Line Value: WS
  misc_feature: MA Experiment 20000234 PARAMETER Experiment Name: At_Siliques_P Parameter: Tissue Value: Less Than 5mm Siliques vs. Whole Plant
  misc_feature: MA Experiment ID: 20000235 Result: Down-regulated in Transcription
  misc_feature: MA Experiment 20000235 PARAMETER Experiment Name: At_Siliques_P Parameter: Age (day) Value: 21
  misc_feature: MA Experiment 20000235 PARAMETER Experiment Name: At_Siliques_P Parameter: Organism Value: A. thaliana
  misc_feature: MA Experiment 20000235 PARAMETER Experiment Name: At_Siliques_P Parameter: Plant Line Value: WS
  misc_feature: MA Experiment 20000235 PARAMETER Experiment Name: At_Siliques_P Parameter: Tissue Value: 5-10mm Siliques vs. Whole Plant
  misc_feature: MA Experiment ID: 20000264 Result: Down-regulated in Transcription
  misc_feature: MA Experiment 20000264 PARAMETER Experiment Name: At_Open_Flower_P Parameter: Age (day) Value: 21
  misc_feature: MA Experiment 20000264 PARAMETER Experiment Name: At_Open_Flower_P Parameter: Plant Line Value: WS
  misc_feature: MA Experiment 20000264 PARAMETER Experiment Name: At_Open_Flower_P Parameter: Tissue Value: Open Flower vs. Whole Plant
  misc_feature: MA Experiment ID: 20000286 Result: Down-regulated in Transcription
  misc_feature: MA Experiment 20000286 PARAMETER Experiment Name: At_Open_Flower_P Parameter: Age (day) Value: 21
  misc_feature: MA Experiment 20000286 PARAMETER Experiment Name: At_Open_Flower_P Parameter: Plant Line Value: WS
  misc_feature: MA Experiment 20000286 PARAMETER Experiment Name: At_Open_Flower_P Parameter: Tissue Value: Half Open vs. Whole Plant
  misc_feature: MA Experiment ID: 20000438 Result: Down-regulated in Transcription
  misc_feature: MA Experiment 20000438 PARAMETER Experiment Name: At_Shoots__P Parameter: Age (day) Value: 14
  misc_feature: MA Experiment 20000438 PARAMETER Experiment Name: At_Shoots__P Parameter: Tissue Value: Shoots vs. Whole Plant
  misc_feature: MA Experiment ID: 20000445 Result: Up-regulated in Transcription
  misc_feature: MA Experiment 20000445 PARAMETER Experiment Name: At_100uM_NAA__P Parameter: Age (day) Value: 14
  misc_feature: MA Experiment 20000445 PARAMETER Experiment Name: At_100uM_NAA__P Parameter: Organism Value: A. thaliana
  misc_feature: MA Experiment 20000445 PARAMETER Experiment Name: At_100uM_NAA__P Parameter: Plant Line Value: WS
  misc_feature: MA Experiment 20000445 PARAMETER Experiment Name: At_100uM_NAA__P Parameter: Timepoint (hr) Value: 6
  misc_feature: MA Experiment 20000445 PARAMETER Experiment Name: At_100uM_NAA__P Parameter: Tissue Value: Aerial
  misc_feature: MA Experiment 20000445 PARAMETER Experiment Name: At_100uM_NAA__P Parameter: Treatment Value: 100uM NAA vs. No Treatment
  misc_feature: MA Experiment ID: 20000453 Result: Up-regulated in Transcription
  misc_feature: MA Experiment 20000453 PARAMETER Experiment Name: At_100uM_ABA_P Parameter: Age (day) Value: 15
  misc_feature: MA Experiment 20000453 PARAMETER Experiment Name: At_100uM_ABA_P Parameter: Organism Value: A. thaliana
  misc_feature: MA Experiment 20000453 PARAMETER Experiment Name: At_100uM_ABA_P Parameter: Plant Line Value: WS
  misc_feature: MA Experiment 20000453 PARAMETER Experiment Name: At_100uM_ABA_P Parameter: Timepoint (hr) Value: 24
  misc_feature: MA Experiment 20000453 PARAMETER Experiment Name: At_100uM_ABA_P Parameter: Tissue Value: Aerial
  misc_feature: MA Experiment 20000453 PARAMETER Experiment Name: At_100uM_ABA_P Parameter: Treatment Value: 100uM ABA vs. No Treatment
  misc_feature: MA Experiment ID: 20000527 Result: Down-regulated in Transcription
  misc_feature: MA Experiment 20000527 PARAMETER Experiment Name: At_10percent_PEG_P Parameter: Age (day) Value: 20
  misc_feature: MA Experiment 20000527 PARAMETER Experiment Name: At_10percent_PEG_P Parameter: Organism Value: A. thaliana
  misc_feature: MA Experiment 20000527 PARAMETER Experiment Name: At_10percent_PEG_P Parameter: Plant Line Value: WS
  misc_feature: MA Experiment 20000527 PARAMETER Experiment Name: At_10percent_PEG_P Parameter: Timepoint (day) Value: 20
  misc_feature: MA Experiment 20000527 PARAMETER Experiment Name: At_10percent_PEG_P Parameter: Tissue Value: Whole Plant
  misc_feature: MA Experiment 20000527 PARAMETER Experiment Name: At_10percent_PEG_P Parameter: Treatment Value: 10percent PEG vs. No Treatment
  misc_feature: MA Experiment ID: 20000576 Result: Down-regulated in Transcription
  misc_feature: MA Experiment 20000576 PARAMETER Experiment Name: At_100uM_ABA_Mutants__P Parameter: Organism Value: A. thaliana
  misc_feature: MA Experiment 20000576 PARAMETER Experiment Name: At_100uM_ABA_Mutants__P Parameter: Plant Line Value: CS23
  misc_feature: MA Experiment 20000576 PARAMETER Experiment Name: At_100uM_ABA_Mutants__P Parameter: Timepoint (hr) Value: 6
  misc_feature: MA Experiment 20000576 PARAMETER Experiment Name: At_100uM_ABA_Mutants__P Parameter: Tissue Value: Whole Plant
  misc_feature: MA Experiment 20000576 PARAMETER Experiment Name: At_100uM_ABA_Mutants__P Parameter: Treatment Value: 1uM ABA vs. No Treatment
  misc_feature: MA Experiment ID: 20000709 Result: Up-regulated in Transcription
  misc_feature: MA Experiment 20000709 PARAMETER Experiment Name: At_15mM_NH4NO3_L-to-H_P Parameter: Age (hr) Value: 14
  misc_feature: MA Experiment 20000709 PARAMETER Experiment Name: At_15mM_NH4NO3_L-to-H_P Parameter: Organism Value: A. thaliana
  misc_feature: MA Experiment 20000709 PARAMETER Experiment Name: At_15mM_NH4NO3_L-to-H_P Parameter: Plant Line Value: WS
  misc_feature: MA Experiment 20000709 PARAMETER Experiment Name: At_15mM_NH4NO3_L-to-H_P Parameter: Timepoint (hr) Value: 4
  misc_feature: MA Experiment 20000709 PARAMETER Experiment Name: At_15mM_NH4NO3_L-to-H_P Parameter: Tissue Value: Aerial
  misc_feature: MA Experiment 20000709 PARAMETER Experiment Name: At_15mM_NH4NO3_L-to-H_P Parameter: Treatment Value: 15mM NH4NO3 vs. 30mM Mannitol
  misc_feature: MA Experiment ID: 20000794 Result: Down-regulated in Transcription
  misc_feature: MA Experiment 20000794 PARAMETER Experiment Name: At_Petals_P Parameter: Age (day) Value: 23-25 days
  misc_feature: MA Experiment 20000794 PARAMETER Experiment Name: At_Petals_P Parameter: Plant Line Value: WS
  misc_feature: MA Experiment 20000794 PARAMETER Experiment Name: At_Petals_P Parameter: Tissue Value: Petals vs. Whole plant
  misc_feature: MA Experiment ID: 20001248 Result: Up-regulated in Transcription
  misc_feature: MA Experiment 20001248 PARAMETER Experiment Name: At_Far-red-induction_P Parameter: Age (day) Value: 7
  misc_feature: MA Experiment 20001248 PARAMETER Experiment Name: At_Far-red-induction_P Parameter: Light Value: Far-red vs. White
  misc_feature: MA Experiment 20001248 PARAMETER Experiment Name: At_Far-red-induction_P Parameter: Organism Value: A. thaliana
  misc_feature: MA Experiment 20001248 PARAMETER Experiment Name: At_Far-red-induction_P Parameter: Plant Line Value: Columbia
  misc_feature: MA Experiment 20001248 PARAMETER Experiment Name: At_Far-red-induction_P Parameter: Timepoint (hr) Value: 4
  misc_feature: MA Experiment 20001248 PARAMETER Experiment Name: At_Far-red-induction_P Parameter: Tissue Value: Whole Plant
  misc_feature: MA Experiment ID: 20001451 Result: Down-regulated in Transcription
  misc_feature: MA Experiment 20001451 PARAMETER Experiment Name: At_Far-red-induction_P Parameter: Age (day) Value: 7
  misc_feature: MA Experiment 20001451 PARAMETER Experiment Name: At_Far-red-induction_P Parameter: Light Value: Far-red vs. White
  misc_feature: MA Experiment 20001451 PARAMETER Experiment Name: At_Far-red-induction_P Parameter: Organism Value: A. thaliana
  misc_feature: MA Experiment 20001451 PARAMETER Experiment Name: At_Far-red-induction_P Parameter: Plant Line Value: Columbia
  misc_feature: MA Experiment 20001451 PARAMETER Experiment Name: At_Far-red-induction_P Parameter: Timepoint (hr) Value: 24
  misc_feature: MA Experiment 20001451 PARAMETER Experiment Name: At_Far-red-induction_P Parameter: Tissue Value: Whole Plant
  misc_feature: MA Experiment ID: 20001554 Result: Down-regulated in Transcription
  misc_feature: MA Experiment 20001554 PARAMETER Experiment Name: At_Drought_Soil_Dry_P Parameter: Age (day) Value: 21
  misc_feature: MA Experiment 20001554 PARAMETER Experiment Name: At_Drought_Soil_Dry_P Parameter: Organism Value: A. thaliana
  misc_feature: MA Experiment 20001554 PARAMETER Experiment Name: At_Drought_Soil_Dry_P Parameter: Plant Line Value: WS
  misc_feature: MA Experiment 20001554 PARAMETER Experiment Name: At_Drought_Soil_Dry_P Parameter: Post Timepoint (hr) Value: None
  misc_feature: MA Experiment 20001554 PARAMETER Experiment Name: At_Drought_Soil_Dry_P Parameter: Post-Treatment Value: None
  misc_feature: MA Experiment 20001554 PARAMETER Experiment Name: At_Drought_Soil_Dry_P Parameter: Timepoint (day) Value: 7
  misc_feature: MA Experiment 20001554 PARAMETER Experiment Name: At_Drought_Soil_Dry_P Parameter: Treatment Value: Drought vs. No Drought
  misc_feature: MA Experiment ID: 20001557 Result: Up-regulated in Transcription
  misc_feature: MA Experiment 20001557 PARAMETER Experiment Name: At_Drought_Soil_Dry_P Parameter: Age (day) Value: 27
  misc_feature: MA Experiment 20001557 PARAMETER Experiment Name: At_Drought_Soil_Dry_P Parameter: Organism Value: A. thaliana
  misc_feature: MA Experiment 20001557 PARAMETER Experiment Name: At_Drought_Soil_Dry_P Parameter: Plant Line Value: WS
  misc_feature: MA Experiment 20001557 PARAMETER Experiment Name: At_Drought_Soil_Dry_P Parameter: Post Timepoint (hr) Value: 3
  misc_feature: MA Experiment 20001557 PARAMETER Experiment Name: At_Drought_Soil_Dry_P Parameter: Post-Treatment Value: Re-Water vs. No Drought
  misc_feature: MA Experiment 20001557 PARAMETER Experiment Name: At_Drought_Soil_Dry_P Parameter: Timepoint (day) Value: 13
  misc_feature: MA Experiment 20001557 PARAMETER Experiment Name: At_Drought_Soil_Dry_P Parameter: Treatment Value: Drought vs. No Drought
agacaagtcaagagagagagatagttctgacttctgacagagactcatggcggaagcttgcggagtgagaaggattaagctaggaagccaaggccttgaggtatcggcgcaaggtcttggttgcatgggtctctctgctttctacggtactcccaagccggaaaccgaagctatcgctctcatccaccacgccattcactccggcgtcactttccttgacacctccgatatctacggtcctgagaccaacgagcttctcctcagcaaggctctcaaggatggggtgagagaaaaagtggaacttgcgaccaaatatggaatcaggtatgcagaggggaaagtagagtttaagggagatcctgcttatgtaagagctgcgtgtgaggctagtttaatgcgagtagatgttgcctgcattgatctctattatcagcatcgaattgatactcgtgtccctatcgaaatcactattggagagctgaagaagctagttgaagaaggtaaaataaagtatatcggtttgtctgaagcttcagcttcaactatcagaagagcacatgctgttcacccgataaccgctctgcaaatagaatggtccttatggtcgagagacgtggaagaagatataattccaacctgcagggaacttgggattggaattgttgcttacagtcctctgggacgaggtttctttgcttcaggacccaagcttgttgagaacctagacaataatgacgtcagaaagactctaccaagattccaacaggaaaacttagaccacaacaagattctctttgagaaggtttctgcaatgtctgagaagaaaggatgcactcctgcacaactagcccttgcatgggttcatcaccagggagatgatgtttgccccatcccaggaaccactaagattgaaaacctcaaccagaacattggagctttatcagtgaaacttactcccgaagagatgtctgagctcgaatcccttgcacaaccaggttttgtgaaaggagaaagatccattagcatcctgaccacgttcaaaaactctgagactccaccattgtcttcttggaaagccgcttaaaatcgtctgagtttctctgattgttgtggggttcatgtcatttaagtggtctaagttatgtcagctagatcaaggtaataaaagtgctgtgtcttcgagagtggattatggtaggttcattcccagggaaagccaaaactatcaagggttgatgcctttaagagtaaataatgtatagagttccccaagtgagaacttcaatttacatttcatacattttgaccaaactctataaagaaagttatgtttagactttttttttgc

SEQ ID NO: 87274 - protein, 345 aa, Arabidopsis thaliana
  peptide (1)..(345): Ceres Seq. ID no. 12699485
  misc_feature (1)..(345): Homolog of NCBI NO: 25316216 NR Description: hypothetical protein F8A5.24 [imported] -
  misc_feature (1)..(345): Homolog of NCBI NO: 18406861 NR Description: auxin-induced protein, putative; protein id: supported by cDNA: gi_15912324, supported by cDNA: gi_20466377, by cDNA: gi_6562979 [Arabidopsis thaliana]
  misc_feature (1)..(345): Homolog of NCBI NO: 6562980 NR Description: auxin-induced atb2 [Arabidopsis thaliana]
  misc_feature (1)..(344): Homolog of NCBI NO: 15219786 NR Description: auxin-induced protein, putative; protein id: [Arabidopsis thaliana] >gi|25316215|pir||C96632 hypothetical
  misc_feature (1)..(342): Homolog of NCBI NO: 15220214 NR Description: putative auxin-induced protein; protein id:
  misc_feature (3)..(231): Homolog of NCBI NO: 15219805 NR Description: auxin-induced protein, putative; protein id:
  misc_feature (235)..(344): Homolog of NCBI NO: 15219805 NR Description: auxin-induced protein, putative; protein id:
  misc_feature (7)..(344): Homolog of NCBI NO: 38344997 NR Description: OSJNBa0008A08.11 [Oryza sativa (japonica
  misc_feature (1)..(342): Homolog of NCBI NO: 25316213 NR Description: hypothetical protein [imported] - Arabidopsis
  misc_feature (7)..(344): Homolog of NCBI NO: 7447933 NR Description: auxin-induced protein - common sunflower
MAEACGVRRIKLGSQGLEVSAQGLGCMGLSAFYGTPKPETEAIALIHHAIHSGVTFLDTSDIYGPETNELLLSKALKDGVREKVELATKYGIRYAEGKVEFKGDPAYVRAACEASLMRVDVACIDLYYQHRIDTRVPIEITIGELKKLVEEGKIKYIGLSEASASTIRRAHAVHPITALQIEWSLWSRDVEEDIIPTCRELGIGIVAYSPLGRGFFASGPKLVENLDNNDVRKTLPRFQQENLDHNKILFEKVSAMSEKKGCTPAQLALAWVHHQGDDVCPIPGTTKIENLNQNIGALSVKLTPEEMSELESLAQPGFVKGERSISILTTFKNSETPPLSSWKAA

SEQ ID NO: 87275 - protein, 319 aa, Arabidopsis thaliana
  peptide (1)..(319): Ceres Seq. ID no. 12699486
  misc_feature (1)..(319): Homolog of NCBI NO: 25316216 NR Description: hypothetical protein F8A5.24 [imported] -
  misc_feature (1)..(319): Homolog of NCBI NO: 18406861 NR Description: auxin-induced protein, putative; protein id: supported by cDNA: gi_15912324, supported by cDNA: gi_20466377, by cDNA: gi_6562979 [Arabidopsis thaliana]
  misc_feature (1)..(319): Homolog of NCBI NO: 6562980 NR Description: auxin-induced atb2 [Arabidopsis thaliana]
  misc_feature (1)..(318): Homolog of NCBI NO: 15219786 NR Description: auxin-induced protein, putative; protein id: [Arabidopsis thaliana] >gi|25316215|pir||C96632 hypothetical
  misc_feature (1)..(316): Homolog of NCBI NO: 15220214 NR Description: putative auxin-induced protein; protein id:
  misc_feature (1)..(205): Homolog of NCBI NO: 15219805 NR Description: auxin-induced protein, putative; protein id:
  misc_feature (209)..(318): Homolog of NCBI NO: 15219805 NR Description: auxin-induced protein, putative; protein id:
  misc_feature (1)..(318): Homolog of NCBI NO: 38344997 NR Description: OSJNBa0008A08.11 [Oryza sativa (japonica
  misc_feature (1)..(316): Homolog of NCBI NO: 25316213 NR Description: hypothetical protein [imported] - Arabidopsis
  misc_feature (1)..(318): Homolog of NCBI NO: 7447933 NR Description: auxin-induced protein - common sunflower
MGLSAFYGTPKPETEAIALIHHAIHSGVTFLDTSDIYGPETNELLLSKALKDGVREKVELATKYGIRYAEGKVEFKGDPAYVRAACEASLMRVDVACIDLYYQHRIDTRVPIEITIGELKKLVEEGKIKYIGLSEASASTIRRAHAVHPITALQIEWSLWSRDVEEDIIPTCRELGIGIVAYSPLGRGFFASGPKLVENLDNNDVRKTLPRFQQENLDHNKILFEKVSAMSEKKGCTPAQLALAWVHHQGDDVCPIPGTTKIENLNQNIGALSVKLTPEEMSELESLAQPGFVKGERSISILTTFKNSETPPLSSWKAA

SEQ ID NO: 87276 - protein, 229 aa, Arabidopsis thaliana
  peptide (1)..(229): Ceres Seq. ID no. 12699487
  misc_feature (1)..(229): Homolog of NCBI NO: 25316216 NR Description: hypothetical protein F8A5.24 [imported] -
  misc_feature (1)..(229): Homolog of NCBI NO: 18406861 NR Description: auxin-induced protein, putative; protein id: supported by cDNA: gi_15912324, supported by cDNA: gi_20466377, by cDNA: gi_6562979 [Arabidopsis thaliana]
  misc_feature (1)..(229): Homolog of NCBI NO: 6562980 NR Description: auxin-induced atb2 [Arabidopsis thaliana]
  misc_feature (1)..(228): Homolog of NCBI NO: 15219786 NR Description: auxin-induced protein, putative; protein id: [Arabidopsis thaliana] >gi|25316215|pir||C96632 hypothetical
  misc_feature (1)..(226): Homolog of NCBI NO: 15220214 NR Description: putative auxin-induced protein; protein id:
  misc_feature (1)..(115): Homolog of NCBI NO: 15219805 NR Description: auxin-induced protein, putative; protein id:
  misc_feature (119)..(228): Homolog of NCBI NO: 15219805 NR Description: auxin-induced protein, putative; protein id:
  misc_feature (1)..(228): Homolog of NCBI NO: 38344997 NR Description: OSJNBa0008A08.11 [Oryza sativa (japonica
  misc_feature (1)..(226): Homolog of NCBI NO: 25316213 NR Description: hypothetical protein [imported] - Arabidopsis
  misc_feature (1)..(228): Homolog of NCBI NO: 7447933 NR Description: auxin-induced protein - common sunflower
MRVDVACIDLYYQHRIDTRVPIEITIGELKKLVEEGKIKYIGLSEASASTIRRAHAVHPITALQIEWSLWSRDVEEDIIPTCRELGIGIVAYSPLGRGFFASGPKLVENLDNNDVRKTLPRFQQENLDHNKILFEKVSAMSEKKGCTPAQLALAWVHHQGDDVCPIPGTTKIENLNQNIGALSVKLTPEEMSELESLAQPGFVKGERSISILTTFKNSETPPLSSWKAA

SEQ ID NO: 87277 - DNA, 860 bp, Arabidopsis thaliana
  misc_feature (1)..(860): Ceres Seq. ID no. 12699545
  misc_feature: MA Experiment ID: 20000227 Result: Down-regulated in Transcription
  misc_feature: MA Experiment 20000227 PARAMETER Experiment Name: At_Root-Tips-vs-Tops_P Parameter: Tissue Value: Root Tips vs. Root Tops
  misc_feature: MA Experiment ID: 20000439 Result: Down-regulated in Transcription
  misc_feature: MA Experiment 20000439 PARAMETER Experiment Name: At_Roots__P Parameter: Age (day) Value: 14 vs. 21
  misc_feature: MA Experiment 20000439 PARAMETER Experiment Name: At_Roots__P Parameter: Organism Value: A. thaliana
  misc_feature: MA Experiment 20000439 PARAMETER Experiment Name: At_Roots__P Parameter: Tissue Value: Roots vs. Whole Plant
  misc_feature: MA Experiment ID: 20000794 Result: Down-regulated in Transcription
  misc_feature: MA Experiment 20000794 PARAMETER Experiment Name: At_Petals_P Parameter: Age (day) Value: 23-25 days
  misc_feature: MA Experiment 20000794 PARAMETER Experiment Name: At_Petals_P Parameter: Plant Line Value: WS
  misc_feature: MA Experiment 20000794 PARAMETER Experiment Name: At_Petals_P Parameter: Tissue Value: Petals vs. Whole plant
  misc_feature: MA Experiment ID: 20001557 Result: Down-regulated in Transcription
  misc_feature: MA Experiment 20001557 PARAMETER Experiment Name: At_Drought_Soil_Dry_P Parameter: Age (day) Value: 27
  misc_feature: MA Experiment 20001557 PARAMETER Experiment Name: At_Drought_Soil_Dry_P Parameter: Organism Value: A. thaliana
  misc_feature: MA Experiment 20001557 PARAMETER Experiment Name: At_Drought_Soil_Dry_P Parameter: Plant Line Value: WS
  misc_feature: MA Experiment 20001557 PARAMETER Experiment Name: At_Drought_Soil_Dry_P Parameter: Post Timepoint (hr) Value: 3
  misc_feature: MA Experiment 20001557 PARAMETER Experiment Name: At_Drought_Soil_Dry_P Parameter: Post-Treatment Value: Re-Water vs. No Drought
  misc_feature: MA Experiment 20001557 PARAMETER Experiment Name: At_Drought_Soil_Dry_P Parameter: Timepoint (day) Value: 13
  misc_feature: MA Experiment 20001557 PARAMETER Experiment Name: At_Drought_Soil_Dry_P Parameter: Treatment Value: Drought vs. No Drought
gcacagtatgttttttgacttcttcgcgtcggcgatattatccagaaacagtagtgtcgaagaagaagaagaagaagaaggagagattctgagtttagggttttgtttgtgttgcttcgaattgagcagctatggcttccgtgttgctacttcttctggtgttcgtgtttgatctcattgcttttggtcttgctgttgctgcagagcaacgaagaaccacctggcaaatttctagagaatcaagagatttgagctactgtgtgtatgacaaggacatagcaacgggtctcggagtcggttctttcttggtcttattagcgagtcagctcttaataatggtggcgagccgatgtttatgctgtggaagagcattgacaccaagtggttcaagatcttgggcaatttttctcttcatcaccacctgggttttcttcttcatagcacaagtgtgtttacttgctggctctgtacgaaacgcttaccatacaaagtaccgtgtctactttggtaacacttccccttcttgtcgatcactgaggaaaggcgtgtttggggctggagcagcattcatagtgctcacggggattgtctccgagctttactatgtgaccctttcgagggccaaagactttcaaccttcaagagatcccggtatccgaatgagtagcctgtagaacttacacctgctttgtagatttagaatagttatgttcattgttgttatcatcttactatcttaggtcattgttgttatgattttaatagtatggaggaaactaacattattttcaatttcttaaaatatatgtacctatcaaaaacgatagattgaaaacaataaagaaccataaagttgatat

SEQ ID NO: 87278 - protein, 180 aa, Arabidopsis thaliana; identical to SEQ ID NO: 36058
  peptide (1)..(180): Ceres Seq. ID no. 12699546
  misc_feature (1)..(180): Homolog of NCBI NO: 18407003 NR Description: Expressed protein; protein id: At1g61065.1, by cDNA: 25888., supported by cDNA: gi_16930460, supported by gi_19310518 [Arabidopsis thaliana]
  misc_feature (1)..(180): Homolog of NCBI NO: 21554630 NR Description: unknown [Arabidopsis thaliana]
  misc_feature (1)..(179): Homolog of NCBI NO: 38016521 NR Description: fiber protein Fb34 [Gossypium barbadense]
  misc_feature (1)..(158): Homolog of NCBI NO: 18416991 NR Description: Expressed protein; protein id: At4g27435.1, by cDNA: gi_15809977, supported by cDNA: gi_17981656 [Arabidopsis >gi|15809978|gb|AAL06916.1| At4g27438 [Arabidopsis thaliana]
  misc_feature (1)..(170): Homolog of NCBI NO: 18400781 NR Description: expressed protein; protein id: At3g15480.1, by cDNA: 22328., supported by cDNA: gi_15982922, supported by gi_19699225 [Arabidopsis thaliana] >gi|7021733|gb|AAF35414.1|
  misc_feature (1)..(166): Homolog of NCBI NO: 34394069 NR Description: unknown protein [Oryza sativa (japonica
  misc_feature (1)..(166): Homolog of NCBI NO: 18404242 NR Description: expressed protein; protein id: At1g52910.1, by cDNA: 21921. [Arabidopsis thaliana] >gi|25405613|pir||D96570
  misc_feature (1)..(165): Homolog of NCBI NO: 38344206 NR Description: OSJNBa0064G10.22 [Oryza sativa (japonica
  misc_feature (3)..(178): Homolog of NCBI NO: 22748411 NR Description: hypothetical protein [Oryza sativa (japonica
  misc_feature (2)..(179): Homolog of NCBI NO: 18391509 NR Description: expressed protein; protein id: At1g13380.1, by cDNA: 5232. [Arabidopsis thaliana] Unknown Protein [Arabidopsis thaliana]

SEQ ID NO: 87279 - protein, 112 aa, Arabidopsis thaliana; identical to SEQ ID NO: 36059
  peptide (1)..(112): Ceres Seq. ID no. 12699547
  misc_feature (1)..(112): Homolog of NCBI NO: 18407003 NR Description: Expressed protein; protein id: At1g61065.1, by cDNA: 25888., supported by cDNA: gi_16930460, supported by gi_19310518 [Arabidopsis thaliana]
  misc_feature (1)..(112): Homolog of NCBI NO: 21554630 NR Description: unknown [Arabidopsis thaliana]
  misc_feature (1)..(111): Homolog of NCBI NO: 38016521 NR Description: fiber protein Fb34 [Gossypium barbadense]
  misc_feature (1)..(90): Homolog of NCBI NO: 18416991 NR Description: Expressed protein; protein id: At4g27435.1, by cDNA: gi_15809977, supported by cDNA: gi_17981656 [Arabidopsis >gi|15809978|gb|AAL06916.1| At4g27438 [Arabidopsis thaliana]
  misc_feature (1)..(102): Homolog of NCBI NO: 18400781 NR Description: expressed protein; protein id: At3g15480.1, by cDNA: 22328., supported by cDNA: gi_15982922, supported by gi_19699225 [Arabidopsis thaliana] >gi|7021733|gb|AAF35414.1|
  misc_feature (1)..(98): Homolog of NCBI NO: 34394069 NR Description: unknown protein [Oryza sativa (japonica
  misc_feature (1)..(98): Homolog of NCBI NO: 18404242 NR Description: expressed protein; protein id: At1g52910.1, by cDNA: 21921. [Arabidopsis thaliana] >gi|25405613|pir||D96570
  misc_feature (1)..(97): Homolog of NCBI NO: 38344206 NR Description: OSJNBa0064G10.22 [Oryza sativa (japonica
  misc_feature (1)..(110): Homolog of NCBI NO: 22748411 NR Description: hypothetical protein [Oryza sativa (japonica
  misc_feature (1)..(111): Homolog of NCBI NO: 18391509 NR Description: expressed protein; protein id: At1g13380.1, by cDNA: 5232. [Arabidopsis thaliana] Unknown Protein [Arabidopsis thaliana]

SEQ ID NO: 87280 - DNA, 1014 bp, Arabidopsis thaliana
  misc_feature (1)..(1014): Ceres Seq. ID no. 12699575
  misc_feature: MA Experiment ID: 20000496 Result: Up-regulated in Transcription
  misc_feature: MA Experiment 20000496 PARAMETER Experiment Name: At_Guard_Cells_P Parameter: Harvest Date Value: 7/19/2002
  misc_feature: MA Experiment 20000496 PARAMETER Experiment Name: At_Guard_Cells_P Parameter: Organism Value: Canola
  misc_feature: MA Experiment 20000496 PARAMETER Experiment Name: At_Guard_Cells_P Parameter: Tissue Value: Guard Cells vs. Leaves
atgactaaatctcatgtcattttctctgcctccatcgctctctttctcctactctccatctcgcatttcccgggagctctctctcaatccaataaagattgccaatcaaaatccaactactcatgtatagacaaaaacaaagcattagatctcaaactcttatcaatcttctcaattctcatcactagtctaatcggtgtttgcctcccgttctttgcccgatcaattcccgctttccaacccgagaaatctcacttcctcatcgtaaaatctttcgcctccggaatcatcctttccactggtttcatgcatgtcttgcctgattctttcgagatgctttcatctccttgtcttaacgataacccctggcacaagtttcctttcgccggctttgtagccatgatgtctgccgtgttcacgctcatggttgactctattaccaccagcgtcttcaccaagtcaggaaggaaagatctacgtgctgacgtagcatccgttgagactcctgaccaagagatagggcacgtacagcttctgcggtatcgtattcttgcaatcgtattggagctaggaatagtggtgcagtcgatagtgataggactatcggtaggagacactaacaatacttgcaccatcaaaggactcgtcgctgcgctttgcttccatcaaatgttcgaaggcatgggtctcggcggttgcatccttcaggcggagtacgggtgggttaaaaaggcggtgatggctttcttttttgcggtgacgacgccttttggagtggttctagggatggcactatctaaaacatacaaagagaatagccctgaatcgcttataacagttgggttgctcaacgcttcctcggcaggactactcatctacatggctttagttgaccttctagctgccgattttatgggtcaaaaaatgcaaaggagcatcaagcttcaattaaagtcatatgctgccgttttgcttggtgctggtggcatgtccgtcatggccaagtgggcttga

SEQ ID NO: 87281 - protein, 337 aa, Arabidopsis thaliana
  peptide (1)..(337): Ceres Seq. ID no. 12699576
  misc_feature (1)..(178): Homolog of NCBI NO: 15221659 NR Description: iron-regulated transporter protein, putative; id: At1g31260.1 [Arabidopsis thaliana]
  misc_feature (170)..(337): Homolog of NCBI NO: 15221659 NR Description: iron-regulated transporter protein, putative; id: At1g31260.1 [Arabidopsis thaliana]
  misc_feature (165)..(337): Homolog of NCBI NO: 4836773 NR Description: iron-regulated transporter 2 [Lycopersicon
  misc_feature (14)..(176): Homolog of NCBI NO: 4836773 NR Description: iron-regulated transporter 2 [Lycopersicon
  misc_feature (2)..(173): Homolog of NCBI NO: 27549575 NR Description: root iron transporter protein IRT1 [Malus
  misc_feature (177)..(337): Homolog of NCBI NO: 27549575 NR Description: root iron transporter protein IRT1 [Malus
  misc_feature (165)..(337): Homolog of NCBI NO: 4836771 NR Description: iron-regulated transporter 1 [Lycopersicon
  misc_feature (12)..(153): Homolog of NCBI NO: 4836771 NR Description: iron-regulated transporter 1 [Lycopersicon
  misc_feature (28)..(337): Homolog of NCBI NO: 7488829 NR Description: probable Fe(II) transport protein, root - garden >gi|3153889|gb|AAC17441.1| root iron transporter protein [Pisum
  misc_feature (12)..(337): Homolog of NCBI NO: 22328811 NR Description: Fe(II) transport protein; protein id: supported by cDNA: gi_1353265 [Arabidopsis thaliana]
MTKSHVIFSASIALFLLLSISHFPGALSQSNKDCQSKSNYSCIDKNKALDLKLLSIFSILITSLIGVCLPFFARSIPAFQPEKSHFLIVKSFASGIILSTGFMHVLPDSFEMLSSPCLNDNPWHKFPFAGFVAMMSAVFTLMVDSITTSVFTKSGRKDLRADVASVETPDQEIGHVQLLRYRILAIVLELGIVVQSIVIGLSVGDTNNTCTIKGLVAALCFHQMFEGMGLGGCILQAEYGWVKKAVMAFFFAVTTPFGVVLGMALSKTYKENSPESLITVGLLNASSAGLLIYMALVDLLAADFMGQKMQRSIKLQLKSYAAVLLGAGGMSVMAKWA

SEQ ID NO: 87282 - protein, 235 aa, Arabidopsis thaliana
  peptide (1)..(235): Ceres Seq. ID no. 12699577
  misc_feature (1)..(76): Homolog of NCBI NO: 15221659 NR Description: iron-regulated transporter protein, putative; id: At1g31260.1 [Arabidopsis thaliana]
  misc_feature (68)..(235): Homolog of NCBI NO: 15221659 NR Description: iron-regulated transporter protein, putative; id: At1g31260.1 [Arabidopsis thaliana]
  misc_feature (63)..(235): Homolog of NCBI NO: 4836773 NR Description: iron-regulated transporter 2 [Lycopersicon
  misc_feature (1)..(74): Homolog of NCBI NO: 4836773 NR Description: iron-regulated transporter 2 [Lycopersicon
  misc_feature (1)..(71): Homolog of NCBI NO: 27549575 NR Description: root iron transporter protein IRT1 [Malus
  misc_feature (75)..(235): Homolog of NCBI NO: 27549575 NR Description: root iron transporter protein IRT1 [Malus
  misc_feature (63)..(235): Homolog of NCBI NO: 4836771 NR Description: iron-regulated transporter 1 [Lycopersicon
  misc_feature (1)..(51): Homolog of NCBI NO: 4836771 NR Description: iron-regulated transporter 1 [Lycopersicon
  misc_feature (1)..(235): Homolog of NCBI NO: 7488829 NR Description: probable Fe(II) transport protein, root - garden >gi|3153889|gb|AAC17441.1| root iron transporter protein [Pisum
  misc_feature (1)..(235): Homolog of NCBI NO: 22328811 NR Description: Fe(II) transport protein; protein id: supported by cDNA: gi_1353265 [Arabidopsis thaliana]
MHVLPDSFEMLSSPCLNDNPWHKFPFAGFVAMMSAVFTLMVDSITTSVFTKSGRKDLRADVASVETPDQEIGHVQLLRYRILAIVLELGIVVQSIVIGLSVGDTNNTCTIKGLVAALCFHQMFEGMGLGGCILQAEYGWVKKAVMAFFFAVTTPFGVVLGMALSKTYKENSPESLITVGLLNASSAGLLIYMALVDLLAADFMGQKMQRSIKLQLKSYAAVLLGAGGMSVMAKWA

SEQ ID NO: 87283 - protein, 226 aa, Arabidopsis thaliana
  peptide (1)..(226): Ceres Seq. ID no. 12699578
  misc_feature (1)..(67): Homolog of NCBI NO: 15221659 NR Description: iron-regulated transporter protein, putative; id: At1g31260.1 [Arabidopsis thaliana]
  misc_feature (59)..(226): Homolog of NCBI NO: 15221659 NR Description: iron-regulated transporter protein, putative; id: At1g31260.1 [Arabidopsis thaliana]
  misc_feature (54)..(226): Homolog of NCBI NO: 4836773 NR Description: iron-regulated transporter 2 [Lycopersicon
  misc_feature (1)..(65): Homolog of NCBI NO: 4836773 NR Description: iron-regulated transporter 2 [Lycopersicon
  misc_feature (1)..(62): Homolog of NCBI NO: 27549575 NR Description: root iron transporter protein IRT1 [Malus
  misc_feature (66)..(226): Homolog of NCBI NO: 27549575 NR Description: root iron transporter protein IRT1 [Malus
  misc_feature (54)..(226): Homolog of NCBI NO: 4836771 NR Description: iron-regulated transporter 1 [Lycopersicon
  misc_feature (1)..(42): Homolog of NCBI NO: 4836771 NR Description: iron-regulated transporter 1 [Lycopersicon
  misc_feature (1)..(226): Homolog of NCBI NO: 7488829 NR Description: probable Fe(II) transport protein, root - garden >gi|3153889|gb|AAC17441.1| root iron transporter protein [Pisum
  misc_feature (1)..(226): Homolog of NCBI NO: 22328811 NR Description: Fe(II) transport protein; protein id: supported by cDNA: gi_1353265 [Arabidopsis thaliana]
MLSSPCLNDNPWHKFPFAGFVAMMSAVFTLMVDSITTSVFTKSGRKDLRADVASVETPDQEIGHVQLLRYRILAIVLELGIVVQSIVIGLSVGDTNNTCTIKGLVAALCFHQMFEGMGLGGCILQAEYGWVKKAVMAFFFAVTTPFGVVLGMALSKTYKENSPESLITVGLLNASSAGLLIYMALVDLLAADFMGQKMQRSIKLQLKSYAAVLLGAGGMSVMAKWA

SEQ ID NO: 87284 - DNA, 819 bp, Arabidopsis thaliana
  misc_feature (1)..(819): Ceres Seq. ID no. 12699587
  misc_feature: MA Experiment ID: 108595 Result: Down-regulated in Transcription
  misc_feature: MA Experiment 108595 PARAMETER Experiment Name: At_Ler-pi_Ovule_cDNA_P Parameter: Plant Line Value: null
  misc_feature: MA Experiment ID: 20000179 Result: Up-regulated in Transcription
  misc_feature: MA Experiment 20000179 PARAMETER Experiment Name: At_Germinating_Seeds_P Parameter: Age (hr) Value: 6 vs. 0
  misc_feature: MA Experiment 20000179 PARAMETER Experiment Name: At_Germinating_Seeds_P Parameter: Tissue Value: Germinating Seeds
  misc_feature: MA Experiment ID: 20000180 Result: Up-regulated in Transcription
  misc_feature: MA Experiment 20000180 PARAMETER Experiment Name: At_Germinating_Seeds_P Parameter: Age (hr) Value: 24 vs. 0
  misc_feature: MA Experiment 20000180 PARAMETER Experiment Name: At_Germinating_Seeds_P Parameter: Tissue Value: Germinating Seeds
  misc_feature: MA Experiment ID: 20000185 Result: Down-regulated in Transcription
  misc_feature: MA Experiment 20000185 PARAMETER Experiment Name: At_Roots__P Parameter: Age (day) Value: 7 vs. 21
  misc_feature: MA Experiment 20000185 PARAMETER Experiment Name: At_Roots__P Parameter: Organism Value: A. thaliana
  misc_feature: MA Experiment 20000185 PARAMETER Experiment Name: At_Roots__P Parameter: Tissue Value: Roots vs. Whole Plant
  misc_feature: MA Experiment ID: 20000269 Result: Down-regulated in Transcription
  misc_feature: MA Experiment 20000269 PARAMETER Experiment Name: At_1mM_KNO3_L-vs-H_Roots_P Parameter: Age (day) Value: 7,10,12
  misc_feature: MA Experiment 20000269 PARAMETER Experiment Name: At_1mM_KNO3_L-vs-H_Roots_P Parameter: Organism Value: A. thaliana
  misc_feature: MA Experiment 20000269 PARAMETER Experiment Name: At_1mM_KNO3_L-vs-H_Roots_P Parameter: Plant Line Value: WS
  misc_feature: MA Experiment 20000269 PARAMETER Experiment Name: At_1mM_KNO3_L-vs-H_Roots_P Parameter: Timepoint (day) Value: 7,10,12
  misc_feature: MA Experiment 20000269 PARAMETER Experiment Name: At_1mM_KNO3_L-vs-H_Roots_P Parameter: Tissue Value: Roots
  misc_feature: MA Experiment 20000269 PARAMETER Experiment Name: At_1mM_KNO3_L-vs-H_Roots_P Parameter: Treatment Value: 1mM KNO3 vs. 50mM KNO3
  misc_feature: MA Experiment ID: 20000439 Result: Down-regulated in Transcription
  misc_feature: MA Experiment 20000439 PARAMETER Experiment Name: At_Roots__P Parameter: Age (day) Value: 14 vs. 21
  misc_feature: MA Experiment 20000439 PARAMETER Experiment Name: At_Roots__P Parameter: Organism Value: A. thaliana
  misc_feature: MA Experiment 20000439 PARAMETER Experiment Name: At_Roots__P Parameter: Tissue Value: Roots vs. Whole Plant
  misc_feature: MA Experiment ID: 20000794 Result: Down-regulated in Transcription
  misc_feature: MA Experiment 20000794 PARAMETER Experiment Name: At_Petals_P Parameter: Age (day) Value: 23-25 days
  misc_feature: MA Experiment 20000794 PARAMETER Experiment Name: At_Petals_P Parameter: Plant Line Value: WS
  misc_feature: MA Experiment 20000794 PARAMETER Experiment Name: At_Petals_P Parameter: Tissue Value: Petals vs. Whole plant
  misc_feature: MA Experiment ID: 20001905 Result: Down-regulated in Transcription
  misc_feature: MA Experiment 20001905 PARAMETER Experiment Name: At_Drought_Reproduction_P Parameter: Age (day) Value: 40
  misc_feature: MA Experiment 20001905 PARAMETER Experiment Name: At_Drought_Reproduction_P Parameter: Organism Value: A. thaliana
  misc_feature: MA Experiment 20001905 PARAMETER Experiment Name: At_Drought_Reproduction_P Parameter: Plant Line Value: WS
  misc_feature: MA Experiment 20001905 PARAMETER Experiment Name: At_Drought_Reproduction_P Parameter: Timepoint (day) Value: 10
  misc_feature: MA Experiment 20001905 PARAMETER Experiment Name: At_Drought_Reproduction_P Parameter: Tissue Value: Rosettes
  misc_feature: MA Experiment 20001905 PARAMETER Experiment Name: At_Drought_Reproduction_P Parameter: Treatment Value: Drought vs. No Drought
agaaccctagaattcgaaatctccaaagaacccgacaaagcgccatgtcgctcactatcccggcgaatctcgttctcaacccgagatctaacaaatctctcactcaatccgtacctaaatcctccgcaagattcgtctgctccgatgacaaatcctcctcctccacacctcaatccatgaaagctttctccgccgccgtcgccctctcttccatcctcctctctgctcctatgccagctgtcgctgatatctcaggtttgactccttgcaaggactcaaaacagttcgctaaaagagagaagcaacagatcaagaagcttgaatcttctcttaagctctacgctcctgaatctgcccctgctcttgctctcaatgctcagatcgagaaaaccaaacgcaggttcgacaactacgggaagtacggattgttatgcgggtcagacggtttaccgcacttgatagtgaacggagaccagcggcattggggagagttcattactccagggattcttttcctctacattgctggatggatcgggtgggttggaagaagctacttaatagctattagtggtgagaagaaacccgcgatgaaagagatcatcatcgatgttcctttggctagtcggatcatcttccgtggtttcatttggcccgttgctgcctacagagagtttctcaatggtgatctcattgctaaggatgtttaaaaagggaacttgttttctgcttttgtgttactctctctaatctctttgttttccattgtacttattgaaaaacaatgcattgtcgaaaaccttataaaatttggattgc

SEQ ID NO: 87285 - protein, 235 aa, Arabidopsis thaliana
  peptide (1)..(235): Ceres Seq. ID no. 12699588
  misc_feature (61)..(235): Pfam Name: Photosystem I reaction centre subunit III Pfam Description: Photosystem I reaction centre subunit III
  misc_feature (15)..(235): Homolog of NCBI NO: 15221681 NR Description: photosystem I subunit III precursor, putative; id: At1g31330.1, supported by cDNA: 40329., supported by cDNA: supported by cDNA: gi_15081655, supported by cDNA:
  misc_feature (15)..(235): Homolog of NCBI NO: 15450361 NR Description: At1g31330/T19E23_1 [Arabidopsis thaliana]
  misc_feature (15)..(235): Homolog of NCBI NO: 5734518 NR Description: photosystem I subunit III precursor [Arabidopsis >gi|21593588|gb|AAM65555.1| photosystem I subunit III precursor,
  misc_feature (15)..(235): Homolog of NCBI NO: 8954295 NR Description: photosystem I reaction center subunit III [Vigna
  misc_feature (15)..(231): Homolog of NCBI NO: 30013659 NR Description: putative photosystem I subunit III precursor
  misc_feature (15)..(231): Homolog of NCBI NO: 1172664 NR Description: Photosystem I reaction centre subunit III,
  misc_feature (14)..(234): Homolog of NCBI NO: 548604 NR Description: Photosystem I reaction centre subunit III,
  misc_feature (52)..(234): Homolog of NCBI NO: 3885892 NR Description: photosystem-1 F subunit precursor [Oryza sativa]
  misc_feature (52)..(234): Homolog of NCBI NO: 34897038 NR Description: photosystem-1 F subunit precursor [Oryza sativa
  misc_feature (15)..(231): Homolog of NCBI NO: 131187 NR Description: Photosystem I reaction centre subunit III,
NPRIRNLQRTRQSAMSLTIPANLVLNPRSNKSLTQSVPKSSARFVCSDDKSSSSTPQSMKAFSAAVALSSILLSAPMPAVADISGLTPCKDSKQFAKREKQQIKKLESSLKLYAPESAPALALNAQIEKTKRRFDNYGKYGLLCGSDGLPHLIVNGDQRHWGEFITPGILFLYIAGWIGWVGRSYLIAISGEKKPAMKEIIIDVPLASRIIFRGFIWPVAAYREFLNGDLIAKDV

SEQ ID NO: 87286 - protein, 221 aa, Arabidopsis thaliana; identical to SEQ ID NO: 40468
  peptide (1)..(221): Ceres Seq. ID no. 12699589
  misc_feature (47)..(221): Pfam Name: Photosystem I reaction centre subunit III Pfam Description: Photosystem I reaction centre subunit III
  misc_feature (1)..(221): Homolog of NCBI NO: 15221681 NR Description: photosystem I subunit III precursor, putative; id: At1g31330.1, supported by cDNA: 40329., supported by cDNA: supported by cDNA: gi_15081655, supported by cDNA:
  misc_feature (1)..(221): Homolog of NCBI NO: 15450361 NR Description: At1g31330/T19E23_1 [Arabidopsis thaliana]
  misc_feature (1)..(221): Homolog of NCBI NO: 5734518 NR Description: photosystem I subunit III precursor [Arabidopsis >gi|21593588|gb|AAM65555.1| photosystem I subunit III precursor,
  misc_feature (1)..(221): Homolog of NCBI NO: 8954295 NR Description: photosystem I reaction center subunit III [Vigna
  misc_feature (1)..(217): Homolog of NCBI NO: 30013659 NR Description: putative photosystem I subunit III precursor
  misc_feature (1)..(217): Homolog of NCBI NO: 1172664 NR Description: Photosystem I reaction centre subunit III,
  misc_feature (1)..(220): Homolog of NCBI NO: 548604 NR Description: Photosystem I reaction centre subunit III,
  misc_feature (38)..(220): Homolog of NCBI NO: 3885892 NR Description: photosystem-1 F subunit precursor [Oryza sativa]
  misc_feature (38)..(220): Homolog of NCBI NO: 34897038 NR Description: photosystem-1 F subunit precursor [Oryza sativa
  misc_feature (1)..(217): Homolog of NCBI NO: 131187 NR Description: Photosystem I reaction centre subunit III,

SEQ ID NO: 87287 - protein, 177 aa, Arabidopsis thaliana; identical to SEQ ID NO: 25335
  peptide (1)..(177): Ceres Seq. ID no. 12699590
  misc_feature (3)..(177): Pfam Name: Photosystem I reaction centre subunit III Pfam Description: Photosystem I reaction centre subunit III
  misc_feature (1)..(177): Homolog of NCBI NO: 15221681 NR Description: photosystem I subunit III precursor, putative; id: At1g31330.1, supported by cDNA: 40329., supported by cDNA: supported by cDNA: gi_15081655, supported by cDNA:
  misc_feature (1)..(177): Homolog of NCBI NO: 15450361 NR Description: At1g31330/T19E23_1 [Arabidopsis thaliana]
  misc_feature (1)..(177): Homolog of NCBI NO: 5734518 NR Description: photosystem I subunit III precursor [Arabidopsis >gi|21593588|gb|AAM65555.1| photosystem I subunit III precursor,
  misc_feature (1)..(177): Homolog of NCBI NO: 8954295 NR Description: photosystem I reaction center subunit III [Vigna
  misc_feature (1)..(173): Homolog of NCBI NO: 30013659 NR Description: putative photosystem I subunit III precursor
  misc_feature (1)..(173): Homolog of NCBI NO: 1172664 NR Description: Photosystem I reaction centre subunit III,
  misc_feature (1)..(176): Homolog of NCBI NO: 548604 NR Description: Photosystem I reaction centre subunit III,
  misc_feature (1)..(176): Homolog of NCBI NO: 3885892 NR Description: photosystem-1 F subunit precursor [Oryza sativa]
  misc_feature (1)..(176): Homolog of NCBI NO: 34897038 NR Description: photosystem-1 F subunit precursor [Oryza sativa
  misc_feature (1)..(173): Homolog of NCBI NO: 131187 NR Description: Photosystem I reaction centre subunit III,

SEQ ID NO: 87288 - DNA, 1185 bp, Arabidopsis thaliana
  misc_feature (1)..(1185): Ceres Seq. ID no. 12699623
  misc_feature: MA Experiment ID: 20000314 Result: Down-regulated in Transcription
  misc_feature: MA Experiment 20000314 PARAMETER Experiment Name: At_14day_Shoots-Roots_Sub_P Parameter: Age (day) Value: 14
  misc_feature: MA Experiment 20000314 PARAMETER Experiment Name: At_14day_Shoots-Roots_Sub_P Parameter: Organism Value: A. thaliana
  misc_feature: MA Experiment 20000314 PARAMETER Experiment Name: At_14day_Shoots-Roots_Sub_P Parameter: Plant Line Value: WS
  misc_feature: MA Experiment 20000314 PARAMETER Experiment Name: At_14day_Shoots-Roots_Sub_P Parameter: Tissue Value: Roots vs. Whole Plant
  misc_feature: MA Experiment ID: 20000315 Result: Down-regulated in Transcription
  misc_feature: MA Experiment 20000315 PARAMETER Experiment Name: At_14day_Shoots-Roots_Sub_P Parameter: Age (day) Value: 14
  misc_feature: MA Experiment 20000315 PARAMETER Experiment Name: At_14day_Shoots-Roots_Sub_P Parameter: Organism Value: A. thaliana
  misc_feature: MA Experiment 20000315 PARAMETER Experiment Name: At_14day_Shoots-Roots_Sub_P Parameter: Plant Line Value: WS
  misc_feature: MA Experiment 20000315 PARAMETER Experiment Name: At_14day_Shoots-Roots_Sub_P Parameter: Tissue Value: Shoots vs. Whole Plant
  misc_feature: MA Experiment ID: 20000355 Result: Up-regulated in Transcription
  misc_feature: MA Experiment 20000355 PARAMETER Experiment Name: At_Siliques_Sub_P Parameter: Age (day) Value: 21
  misc_feature: MA Experiment 20000355 PARAMETER Experiment Name: At_Siliques_Sub_P Parameter: Organism Value: A. thaliana
  misc_feature: MA Experiment 20000355 PARAMETER Experiment Name: At_Siliques_Sub_P Parameter: Plant Line Value: WS
  misc_feature: MA Experiment 20000355 PARAMETER Experiment Name: At_Siliques_Sub_P Parameter: Tissue Value: Less Than 5mm Siliques vs. Whole Plant
  misc_feature: MA Experiment ID: 20000440 Result: Up-regulated in Transcription
  misc_feature: MA Experiment 20000440 PARAMETER Experiment Name: At_Closed-Flower__Sub_P Parameter: Tissue Value: Closed Flower vs. Whole Plant
atggcgtcgctagattctcatgtgttgatgaaactaggtagcctctttttatctactctttttgtttctatcgtaagctcggaatcgcagtgccggaacttcgagtcgatcatcagtttcggcgattcgattgccgacactggaaacttgctaggtctctcagatcataacaatcttcctatgagcgcgtttccaccgtacggagaaactttcttccaccacccaaccggtcgtttctctgacggtcgcctcatcattgacttcatcgctgaatttttggggcttccttatgtgcctccttacttcggatctacaaatggaaactttgagaaaggagttaattttgccgtagcctcagcaactgcattggaaagttcttttctagaagagaaaggataccattgtcctcacaacttcagtttaggagttcagcttaagatcttcaagcagagcttaccaaatctatgtggcttaccatcagattgtagagatatgattggaaatgctttgattctcatgggagagattggagctaatgattacaatttcccattcttccaactcagaccattggacgaggtcaaagagcttgttccgttggtgattagtactatttcttctgcgattacggagttgattggtatgggaggaagaacatttctggtgcccggagggttccctctcggatgctcagtagcatttttgacattacaccaaacatcaaacatggaagaatatgatcctttaacaggatgtttgaaatggctgaacaagtttggagaataccacagtgagcagcttcaggaagaactcaacagactcaggaagcttaaccctcacgtcaacatcatatatgctgactactacaatgcttcattgcgccttggccgagaaccaagtaaatacggattcataaacagacacttgtcagcttgttgcggtgtaggagggccgtacaacttcaacttaagtagaagttgtgggagtgtaggagtggaagcttgtagtgatccttcaaagtatgtggcctgggatggccttcatatgactgaggctgcacacaaatcgatggctgatggattagtcaaaggaccatatgcgattcctcctttcgattggtcatgtctcagctcaatgattaagaagaaggaagtcgttggaaacacaatattctttgatgaatag

SEQ ID NO: 87289 - protein, 394 aa, Arabidopsis thaliana
  peptide (1)..(394): Ceres Seq. ID no. 12699624
  misc_feature (37)..(361): Pfam Name: GDSL-like Lipase/Acylhydrolase Pfam Description: GDSL-like Lipase/Acylhydrolase
  misc_feature (1)..(394): Homolog of NCBI NO: 12322540 NR Description: unknown protein [Arabidopsis thaliana]
  misc_feature (1)..(394): Homolog of NCBI NO: 12597843 NR Description: lipase, putative [Arabidopsis thaliana]
  misc_feature (1)..(394): Homolog of NCBI NO: 30692564 NR Description: lipase, putative [Arabidopsis thaliana]
  misc_feature (1)..(389): Homolog of NCBI NO: 10764858 NR Description: F1K23.17 [Arabidopsis thaliana]
  misc_feature (1)..(385): Homolog of NCBI NO: 21593234 NR Description: lipase, putative [Arabidopsis thaliana]
  misc_feature (1)..(385): Homolog of NCBI NO: 15218731 NR Description: lipase, putative; protein id: At1g28600.1, by cDNA: 37307., supported by cDNA: gi_14326569 [Arabidopsis >gi|14326570|gb|AAK60329.1|AF385739_1 At1g28600/F1K23_6
  misc_feature (1)..(394): Homolog of NCBI NO: 10764858 NR Description: F1K23.17 [Arabidopsis thaliana]
  misc_feature (1)..(394): Homolog of NCBI NO: 15218728 NR Description: lipase, putative; protein id: At1g28590.1
  misc_feature (1)..(381): Homolog of NCBI NO: 15218725 NR Description: lipase, putative; protein id: At1g28580.1, by cDNA: gi_13605564, supported by cDNA: gi_15027914, supported cDNA: gi_18491140, supported by cDNA: gi_19310790 [Arabidopsis
  misc_feature (1)..(384): Homolog of NCBI NO: 25336243 NR Description: pnrotein F1K23.16 [imported] - Arabidopsis >gi|10764857|gb|AAG22835.1|AC007508_11 F1K23.16 [Arabidopsis
MASLDSHVLMKLGSLFLSTLFVSIVSSESQCRNFESIISFGDSIADTGNLLGLSDHNNLPMSAFPPYGETFFHHPTGRFSDGRLIIDFIAEFLGLPYVPPYFGSTNGNFEKGVNFAVASATALESSFLEEKGYHCPHNFSLGVQLKIFKQSLPNLCGLPSDCRDMIGNALILMGEIGANDYNFPFFQLRPLDEVKELVPLVISTISSAITELIGMGGRTFLVPGGFPLGCSVAFLTLHQTSNMEEYDPLTGCLKWLNKFGEYHSEQLQEELNRLRKLNPHVNIIYADYYNASLRLGREPSKYGFINRHLSACCGVGGPYNFNLSRSCGSVGVEACSDPSKYVAWDGLHMTEAAHKSMADGLVKGPYAIPPFDWSCLSSMIKKKEVVGNTIFFDE

SEQ ID NO: 87290 - protein, 385 aa, Arabidopsis thaliana
  peptide (1)..(385): Ceres Seq. ID no. 12699625
  misc_feature (28)..(352): Pfam Name: GDSL-like Lipase/Acylhydrolase Pfam Description: GDSL-like Lipase/Acylhydrolase
  misc_feature (1)..(385): Homolog of NCBI NO: 12322540 NR Description: unknown protein [Arabidopsis thaliana]
  misc_feature (1)..(385): Homolog of NCBI NO: 12597843 NR Description: lipase, putative [Arabidopsis thaliana]
  misc_feature (1)..(385): Homolog of NCBI NO: 30692564 NR Description: lipase, putative [Arabidopsis thaliana]
  misc_feature (1)..(380): Homolog of NCBI NO: 10764858 NR Description: F1K23.17 [Arabidopsis thaliana]
  misc_feature (1)..(376): Homolog of NCBI NO: 21593234 NR Description: lipase, putative [Arabidopsis thaliana]
  misc_feature (1)..(376): Homolog of NCBI NO: 15218731 NR Description: lipase, putative; protein id: At1g28600.1, by cDNA: 37307., supported by cDNA: gi_14326569 [Arabidopsis >gi|14326570|gb|AAK60329.1|AF385739_1 At1g28600/F1K23_6
  misc_feature (1)..(385): Homolog of NCBI NO: 10764858 NR Description: F1K23.17 [Arabidopsis thaliana]
  misc_feature (1)..(385): Homolog of NCBI NO: 15218728 NR Description: lipase, putative; protein id: At1g28590.1
  misc_feature (1)..(372): Homolog of NCBI NO: 15218725 NR Description: lipase, putative; protein id: At1g28580.1, by cDNA: gi_13605564, supported by cDNA: gi_15027914, supported cDNA: gi_18491140, supported by cDNA: gi_19310790 [Arabidopsis
  misc_feature (1)..(375): Homolog of NCBI NO: 25336243 NR Description: pnrotein F1K23.16 [imported] - Arabidopsis >gi|10764857|gb|AAG22835.1|AC007508_11 F1K23.16 [Arabidopsis
MKLGSLFLSTLFVSIVSSESQCRNFESIISFGDSIADTGNLLGLSDHNNLPMSAFPPYGETFFHHPTGRFSDGRLIIDFIAEFLGLPYVPPYFGSTNGNFEKGVNFAVASATALESSFLEEKGYHCPHNFSLGVQLKIFKQSLPNLCGLPSDCRDMIGNALILMGEIGANDYNFPFFQLRPLDEVKELVPLVISTISSAITELIGMGGRTFLVPGGFPLGCSVAFLTLHQTSNMEEYDPLTGCLKWLNKFGEYHSEQLQEELNRLRKLNPHVNIIYADYYNASLRLGREPSKYGFINRHLSACCGVGGPYNFNLSRSCGSVGVEACSDPSKYVAWDGLHMTEAAHKSMADGLVKGPYAIPPFDWSCLSSMIKKKEVVGNTIFFDE

SEQ ID NO: 87291 - protein, 334 aa, Arabidopsis thaliana
  peptide (1)..(334): Ceres Seq. ID no. 12699626
  misc_feature (1)..(301): Pfam Name: GDSL-like Lipase/Acylhydrolase Pfam Description: GDSL-like Lipase/Acylhydrolase
  misc_feature (1)..(334): Homolog of NCBI NO: 12322540 NR Description: unknown protein [Arabidopsis thaliana]
  misc_feature (1)..(334): Homolog of NCBI NO: 12597843 NR Description: lipase, putative [Arabidopsis thaliana]
  misc_feature (1)..(334): Homolog of NCBI NO: 30692564 NR Description: lipase, putative [Arabidopsis thaliana]
  misc_feature (1)..(329): Homolog of NCBI NO: 10764858 NR Description: F1K23.17 [Arabidopsis thaliana]
  misc_feature (1)..(325): Homolog of NCBI NO: 21593234 NR Description: lipase, putative [Arabidopsis thaliana]
  misc_feature (1)..(325): Homolog of NCBI NO: 15218731 NR Description: lipase, putative; protein id: At1g28600.1, by cDNA: 37307., supported by cDNA: gi_14326569 [Arabidopsis >gi|14326570|gb|AAK60329.1|AF385739_1 At1g28600/F1K23_6
  misc_feature (1)..(334): Homolog of NCBI NO: 10764858 NR Description: F1K23.17 [Arabidopsis thaliana]
  misc_feature (1)..(334): Homolog of NCBI NO: 15218728 NR Description: lipase, putative; protein id: At1g28590.1
  misc_feature (1)..(321): Homolog of NCBI NO: 15218725 NR Description: lipase, putative; protein id: At1g28580.1, by cDNA: gi_13605564, supported by cDNA: gi_15027914, supported cDNA: gi_18491140, supported by cDNA: gi_19310790 [Arabidopsis
  misc_feature (1)..(324): Homolog of NCBI NO: 25336243 NR Description: pnrotein F1K23.16 [imported] - Arabidopsis >gi|10764857|gb|AAG22835.1|AC007508_11 F1K23.16 [Arabidopsis
MSAFPPYGETFFHHPTGRFSDGRLIIDFIAEFLGLPYVPPYFGSTNGNFEKGVNFAVASATALESSFLEEKGYHCPHNFSLGVQLKIFKQSLPNLCGLPSDCRDMIGNALILMGEIGANDYNFPFFQLRPLDEVKELVPLVISTISSAITELIGMGGRTFLVPGGFPLGCSVAFLTLHQTSNMEEYDPLTGCLKWLNKFGEYHSEQLQEELNRLRKLNPHVNIIYADYYNASLRLGREPSKYGFINRHLSACCGVGGPYNFNLSRSCGSVGVEACSDPSKYVAWDGLHMTEAAHKSMADGLVKGPYAIPPFDWSCLSSMIKKKEVVGNTIFFDE

SEQ ID NO: 87292 - DNA, 1068 bp, Arabidopsis thaliana
  misc_feature (1)..(1068): Ceres Seq. ID no. 12699678
  misc_feature: MA Experiment ID: 20001910 Result: Up-regulated in Transcription
  misc_feature: MA Experiment 20001910 PARAMETER Experiment Name: At_Drought_Reproduction_P Parameter: Age (day) Value: 37
  misc_feature: MA Experiment 20001910 PARAMETER Experiment Name: At_Drought_Reproduction_P Parameter: Organism Value: A. thaliana
  misc_feature: MA Experiment 20001910 PARAMETER Experiment Name: At_Drought_Reproduction_P Parameter: Plant Line Value: WS
  misc_feature: MA Experiment 20001910 PARAMETER Experiment Name: At_Drought_Reproduction_P Parameter: Timepoint (day) Value: 7
  misc_feature: MA Experiment 20001910 PARAMETER Experiment Name: At_Drought_Reproduction_P Parameter: Tissue Value: Flowers
  misc_feature: MA Experiment 20001910 PARAMETER Experiment Name: At_Drought_Reproduction_P Parameter: Treatment Value: Drought vs. No Drought
atgaagaaatgtgagtttttgattgattcaagtaaacgagcagtggtaatagtgttgattggattaggggcatgggctattgtttccattacacctccacctcctaagagatgcggaaccccaggtggaccgcctattaccgcccctaggatacgtctcagcgatggccgttatttagcctatgaagaacatggagttagtagacaaaatgccactttcaagatcgtctttatccatgcattctcgacatttaggcgtgacgctgttatcgccaaccgtgttcgccctggctttctcgagaaaaatggcatctacgtggtttcatatgatcgacctggttatggagagagcgatcctcactcgagtcgcaatgaaaagactttagctcatgacgttgaacaacttgctgaccaactacaacttggttccaaattttacgtggttggatactcaatgggaggtcaagccgtttggggtgttctcaaatacattcctcacaggctcgcaggagcgacactgctttgtcctgtgaccaactcatggtggccgagtttcccagatagtttgacatgggagctatggaacaaacaatcaaaatccgaaaggttttcgatgctcattactcatcacactccatggctactctactggtggaacaatcaaaagctattttcaacaacagctgtgatgcaatcaagccccaatatgttctctcctcaagatcttgcactactgcccaaactcgccgcaagggtgtcttacaagaaccaaacaacacaacaagggacacacgaatcacttgaccgagacctgattgttggatttgggaaatggagttttgaccctatgaagatcgagaatccgttccctaagggtgaaggttcggtacatatgtggcaaggggatgatgatcggctcgtcccgatacaactacaaaggatcattgctcagaaactaacttggatcaagtatcatgagattccaggtgctggtcatatttttccgatggctgatgggatggcagaaactatcttaaaagaactcttgcctattcctcaatcatcttaa

SEQ ID NO: 87293 - protein, 355 aa, Arabidopsis thaliana
  peptide (1)..(355): Ceres Seq. ID no. 12699679
  misc_feature (104)..(346): Pfam Name: alpha/beta hydrolase fold Pfam Description: alpha/beta hydrolase fold
  misc_feature (14)..(355): Homolog of NCBI NO: 11357595 NR Description: hypothetical protein F24B22.200 - Arabidopsis (fragment) >gi|6822070|emb|CAB70998.1| putative protein
  misc_feature (14)..(355): Homolog of NCBI NO: 15232465 NR Description: putative protein (fragment); protein id:
  misc_feature (29)..(349): Homolog of NCBI NO: 18404095 NR Description: expressed protein; protein id: At2g36290.1, by cDNA: 5167. [Arabidopsis thaliana] >gi|25408458|pir||H84778
  misc_feature (29)..(349): Homolog of NCBI NO: 28416665 NR Description: At2g36290 [Arabidopsis thaliana]
  misc_feature (14)..(349): Homolog of NCBI NO: 21537089 NR Description: unknown [Arabidopsis thaliana]
  misc_feature (14)..(349): Homolog of NCBI NO: 18410575 NR Description: expressed protein; protein id: At1g74280.1, by cDNA: 119889. [Arabidopsis thaliana] >gi|25406331|pir||C96771
  misc_feature (16)..(349): Homolog of NCBI NO: 21592662 NR Description: unknown [Arabidopsis thaliana]
  misc_feature (16)..(349): Homolog of NCBI NO: 18410582 NR Description: expressed protein; protein id: At1g74300.1, by cDNA: 31039. [Arabidopsis thaliana] >gi|25406334|pir||E96771
  misc_feature (12)..(349): Homolog of NCBI NO: 38346334 NR Description: OSJNBa0073L04.5 [Oryza sativa (japonica
  misc_feature (19)..(348): Homolog of NCBI NO: 37536162 NR Description: putative alpha/beta hydrolase [Oryza sativa
MKKCEFLIDSSKRAVVIVLIGLGAWAIVSITPPPPKRCGTPGGPPITAPRIRLSDGRYLAYEEHGVSRQNATFKIVFIHAFSTFRRDAVIANRVRPGFLEKNGIYVVSYDRPGYGESDPHSSRNEKTLAHDVEQLADQLQLGSKFYVVGYSMGGQAVWGVLKYIPHRLAGATLLCPVTNSWWPSFPDSLTWELWNKQSKSERFSMLITHHTPWLLYWWNNQKLFSTTAVMQSSPNMFSPQDLALLPKLAARVSYKNQTTQQGTHESLDRDLIVGFGKWSFDPMKIENPFPKGEGSVHMWQGDDDRLVPIQLQRIIAQKLTWIKYHEIPGAGHIFPMADGMAETILKELLPIPQSS

SEQ ID NO: 87294 - protein, 204 aa, Arabidopsis thaliana; identical to SEQ ID NO: 75219
  peptide (1)..(204): Ceres Seq. ID no. 12699680
  misc_feature (1)..(195): Pfam Name: alpha/beta hydrolase fold Pfam Description: alpha/beta hydrolase fold
  misc_feature (1)..(204): Homolog of NCBI NO: 11357595 NR Description: hypothetical protein F24B22.200 - Arabidopsis (fragment) >gi|6822070|emb|CAB70998.1| putative protein
  misc_feature (1)..(204): Homolog of NCBI NO: 15232465 NR Description: putative protein (fragment); protein id:
  misc_feature (1)..(198): Homolog of NCBI NO: 18404095 NR Description: expressed protein; protein id: At2g36290.1, by cDNA: 5167. [Arabidopsis thaliana] >gi|25408458|pir||H84778
  misc_feature (1)..(198): Homolog of NCBI NO: 28416665 NR Description: At2g36290 [Arabidopsis thaliana]
  misc_feature (1)..(198): Homolog of NCBI NO: 21537089 NR Description: unknown [Arabidopsis thaliana]
  misc_feature (1)..(198): Homolog of NCBI NO: 18410575 NR Description: expressed protein; protein id: At1g74280.1, by cDNA: 119889. [Arabidopsis thaliana] >gi|25406331|pir||C96771
  misc_feature (1)..(198): Homolog of NCBI NO: 21592662 NR Description: unknown [Arabidopsis thaliana]
  misc_feature (1)..(198): Homolog of NCBI NO: 18410582 NR Description: expressed protein; protein id: At1g74300.1, by cDNA: 31039. [Arabidopsis thaliana] >gi|25406334|pir||E96771
  misc_feature (1)..(198): Homolog of NCBI NO: 38346334 NR Description: OSJNBa0073L04.5 [Oryza sativa (japonica
  misc_feature (1)..(197): Homolog of NCBI NO: 37536162 NR Description: putative alpha/beta hydrolase [Oryza sativa

SEQ ID NO: 87295 - DNA, 1464 bp, Arabidopsis thaliana
  misc_feature (1)..(1464): Ceres Seq. ID no. 12699707
  misc_feature: MA Experiment ID: 20000265 Result: Up-regulated in Transcription
  misc_feature: MA Experiment 20000265 PARAMETER Experiment Name: At_Open_Flower_P Parameter: Age (day) Value: 21
  misc_feature: MA Experiment 20000265 PARAMETER Experiment Name: At_Open_Flower_P Parameter: Plant Line Value: WS
  misc_feature: MA Experiment 20000265 PARAMETER Experiment Name: At_Open_Flower_P Parameter: Tissue Value: Closed Flower vs. Whole Plant
atggaaagcgaagcagcagcgactgttcaagccaccaggccgagaagagcacctaggactccggtgacagccattttgacggataagagaagacggaaacctaagagcaacaacgagtctcagttaccatttttgctacagcagagtcaaaaggccaccgttgacgacacttactctcagtggaagactcttcttcccattctctatgattcgtttgttaatcataccctcgtctggccctctctctcttgcagatgggggccacagcttgagcaagcaggttctaagactcaacgtctctatctctcggaacaaacgaatggcagtgtgcctaatactttggtcatagccaattgcgaaactgttaataggcagcttaatgaaaaggcacactctccatttgtgaagaagtacaagaccatcatccaccctggagaggtcaacagaattagggaactccctcaaaatagcaagattgtagctactcacaccgacagtcctgatattctcatttggaacactgagactcaaccagaccggtatgctgtgcttggagctccagattctcgtccagatttgttactaattgggcaccaggatgatgctgaatttgctcttgcaatgtgcccaaccgaaccttttgttctctctggaggcaaggacaagtccgttattttgtggaatatccaagaccatatcacaatggctggttcggattccaaatcccctggatccagcttcaagcagactggtgaaggtagtgataaaactggtggtccttctgttggccctcgaggcatatataatggccacaaagatactgttgaagacgtggcattctgtccatctagtgcacaagaattctgcagtgttggtgacgattcttgccttatgctatgggacgcaagaactggcactagtcctgccatgaaggttgagaaggcacatgatgctgatcttcactgtgtcgattggaatcctcatgacaataatctgatcctgactgggtcagcagataacactgtccgtgtgtttgaccgccgaaaccttacctcaaatggagttggttcacctgtttacaaatttgaaggccacagagctgctgttctttgtgttcagtggtctcctgataaatcatctgtttttgggagttctgcagaagatggtctcttgaacatatgggattgtgatagggttggcaagaagtctgagcgtgcaaccaaaactcctgatgggcttttcttccagcatgctggtcacagggacaaagtggtcgacttccactggagcctattgaacccttggactattgtcagtgtttctgataattgtgagagtatcggtggaggtggtacattgcagatatggcggatgagtgacttgatttacagaccggaagatgaagtcctgacagagctagagaaattcaagtcacatgttttcacatgtacctccaagtcttga

SEQ ID NO: 87296 - protein, 487 aa, Arabidopsis thaliana [sequence omitted]

SEQ ID NO: 87297 - protein, 280 aa, Arabidopsis thaliana; identical to SEQ ID NO: 69730
  peptide (1)..(280): Ceres Seq. ID no. 12699709
  misc_feature (1)..(280): Homolog of NCBI NO: 15233674 NR Description: WD-40 repeat - like protein; protein id:
  misc_feature (1)..(279): Homolog of NCBI NO: 30680701 NR Description: WD-40 repeat protein (MSI4) [Arabidopsis thaliana]
  misc_feature (1)..(279): Homolog of NCBI NO: 20197482 NR Description: putative WD-40 repeat protein, MSI4 [Arabidopsis
  misc_feature (1)..(279): Homolog of NCBI NO: 2599092 NR Description: WD-40 repeat protein MSI4 [Arabidopsis thaliana]
  misc_feature (1)..(280): Homolog of NCBI NO: 21898564 NR Description: nucleosome/chromatin assembly factor group C [Zea
  misc_feature (1)..(280): Homolog of NCBI NO: 14550114 NR Description: nucleosome/chromatin assembly factor C [Zea mays]
  misc_feature (1)..(280): Homolog of NCBI NO: 9716495 NR Description: WD-repeat protein RBAP1 [Zea mays]
  misc_feature (1)..(280): Homolog of NCBI NO: 34910476 NR Description: putative WD-repeat protein RBAP1 [Oryza sativa
  misc_feature (1)..(277): Homolog of NCBI NO: 5701955 NR Description: X1 protein [Silene latifolia]
  misc_feature (1)..(277): Homolog of NCBI NO: 17902570 NR Description: putative WD-repeat protein [Silene latifolia]

SEQ ID NO: 87298 - protein, 253 aa, Arabidopsis thaliana; identical to SEQ ID NO: 69731
  peptide (1)..(253): Ceres Seq. ID no. 12699710
  misc_feature (1)..(253): Homolog of NCBI NO: 15233674 NR Description: WD-40 repeat - like protein; protein id:
  misc_feature (1)..(252): Homolog of NCBI NO: 30680701 NR Description: WD-40 repeat protein (MSI4) [Arabidopsis thaliana]
  misc_feature (1)..(252): Homolog of NCBI NO: 20197482 NR Description: putative WD-40 repeat protein, MSI4 [Arabidopsis
  misc_feature (1)..(252): Homolog of NCBI NO: 2599092 NR Description: WD-40 repeat protein MSI4 [Arabidopsis thaliana]
  misc_feature (1)..(253): Homolog of NCBI NO: 21898564 NR Description: nucleosome/chromatin assembly factor group C [Zea
  misc_feature (1)..(253): Homolog of NCBI NO: 14550114 NR Description: nucleosome/chromatin assembly factor C [Zea mays]
  misc_feature (1)..(253): Homolog of NCBI NO: 9716495 NR Description: WD-repeat protein RBAP1 [Zea mays]
  misc_feature (1)..(253): Homolog of NCBI NO: 34910476 NR Description: putative WD-repeat protein RBAP1 [Oryza sativa
  misc_feature (1)..(250): Homolog of NCBI NO: 5701955 NR Description: X1 protein [Silene latifolia]
  misc_feature (1)..(250): Homolog of NCBI NO: 17902570 NR Description: putative WD-repeat protein [Silene latifolia]

SEQ ID NO: 87299 - DNA, 1202 bp, Arabidopsis thaliana
  misc_feature (1)..(1202): Ceres Seq. ID no. 12699759
  misc_feature: MA Experiment ID: 108461 Result: Up-regulated in Transcription
  misc_feature: MA Experiment 108461 PARAMETER Experiment Name: At_Germinating_Seeds_cDNA_P Parameter: Age (day) Value: 1 vs. 0
  misc_feature: MA Experiment 108461 PARAMETER Experiment Name: At_Germinating_Seeds_cDNA_P Parameter: Tissue Value: Germinating Seeds
  misc_feature: MA Experiment ID: 108462 Result: Up-regulated in Transcription
  misc_feature: MA Experiment 108462 PARAMETER Experiment Name: At_Germinating_Seeds_cDNA_P Parameter: Age (day) Value: 2 vs. 0
  misc_feature: MA Experiment 108462 PARAMETER Experiment Name: At_Germinating_Seeds_cDNA_P Parameter: Tissue Value: Germinating Seeds
  misc_feature: MA Experiment ID: 108463 Result: Up-regulated in Transcription
  misc_feature: MA Experiment 108463 PARAMETER Experiment Name: At_Germinating_Seeds_cDNA_P Parameter: Age (day) Value: 3 vs. 0
  misc_feature: MA Experiment 108463 PARAMETER Experiment Name: At_Germinating_Seeds_cDNA_P Parameter: Tissue Value: Germinating Seeds
  misc_feature: MA Experiment ID: 108464 Result: Up-regulated in Transcription
  misc_feature: MA Experiment 108464 PARAMETER Experiment Name: At_Germinating_Seeds_cDNA_P Parameter: Age (day) Value: 4 vs. 0
  misc_feature: MA Experiment 108464 PARAMETER Experiment Name: At_Germinating_Seeds_cDNA_P Parameter: Tissue Value: Germinating Seeds
  misc_feature: MA Experiment ID: 108501 Result: Down-regulated in Transcription
  misc_feature: MA Experiment 108501 PARAMETER Experiment Name: At_ap2_floral_buds_cDNA_P Parameter: Plant Line Value: ap2 (Ler.)
  misc_feature: MA Experiment 108501 PARAMETER Experiment Name: At_ap2_floral_buds_cDNA_P Parameter: Tissue Value: Closed Flower
  misc_feature: MA Experiment ID: 20000314 Result: Up-regulated in Transcription
  misc_feature: MA Experiment 20000314 PARAMETER Experiment Name: At_14day_Shoots-Roots_Sub_P Parameter: Age (day) Value: 14
  misc_feature: MA Experiment 20000314 PARAMETER Experiment Name: At_14day_Shoots-Roots_Sub_P Parameter: Organism Value: A. thaliana
  misc_feature: MA Experiment 20000314 PARAMETER Experiment Name: At_14day_Shoots-Roots_Sub_P Parameter: Plant Line Value: WS
  misc_feature: MA Experiment 20000314 PARAMETER Experiment Name: At_14day_Shoots-Roots_Sub_P Parameter: Tissue Value: Roots vs. Whole Plant
  misc_feature: MA Experiment ID: 20000315 Result: Up-regulated in Transcription
  misc_feature: MA Experiment 20000315 PARAMETER Experiment Name: At_14day_Shoots-Roots_Sub_P Parameter: Age (day) Value: 14
  misc_feature: MA Experiment 20000315 PARAMETER Experiment Name: At_14day_Shoots-Roots_Sub_P Parameter: Organism Value: A. thaliana
  misc_feature: MA Experiment 20000315 PARAMETER Experiment Name: At_14day_Shoots-Roots_Sub_P Parameter: Plant Line Value: WS
  misc_feature: MA Experiment 20000315 PARAMETER Experiment Name: At_14day_Shoots-Roots_Sub_P Parameter: Tissue Value: Shoots vs. Whole Plant
  misc_feature: MA Experiment ID: 20000327 Result: Up-regulated in Transcription
  misc_feature: MA Experiment 20000327 PARAMETER Experiment Name: At_42deg_Heat_Sub_P Parameter: Age (day) Value: 14
  misc_feature: MA Experiment 20000327 PARAMETER Experiment Name: At_42deg_Heat_Sub_P Parameter: Organism Value: A. thaliana
  misc_feature: MA Experiment 20000327 PARAMETER Experiment Name: At_42deg_Heat_Sub_P Parameter: Plant Line Value: WS
  misc_feature: MA Experiment 20000327 PARAMETER Experiment Name: At_42deg_Heat_Sub_P Parameter: Temperature (deg C) Value: 42 vs. 22
  misc_feature: MA Experiment 20000327 PARAMETER Experiment Name: At_42deg_Heat_Sub_P Parameter: Timepoint (hr) Value: 1
  misc_feature: MA Experiment 20000327 PARAMETER Experiment Name: At_42deg_Heat_Sub_P Parameter: Tissue Value: Aerial
aatttaaatttctctttctatctactataaaaagtgactctctaagaactccaaagattagaacattgaattgaattagccatggagaagaatacttctcaaaccatcttctccaacttttttcttctccttctcctttcttcatgtgtctctgctcagctccggacaggtttctaccagaactcatgtccgaacgtggaaaccattgtacgtaacgctgtccgtcagaaattccagcagactttcgttaccgctccggccactcttcgcctcttcttccacgattgcttcgttcgtggatgtgatgcgtcaataatgatagcatcaccatcggagagagaccatccagatgacatgtcattggccggagacggattcgacacggtggtgaaggcgaagcaagccgttgatagcaatcccaattgccgcaacaaagtctcatgtgctgacattttggctctcgccactcgtgaagtcgtcgttttgaccggaggaccaagctacccggtggagctagggaggagagatggcagaatctccacgaaggccagcgttcaaagccaattgcctcagcccgagtttaacctaaaccagctcaacggcatgtttagccgtcacggcctctctcaaaccgatatgattgccctctcaggagcacacactataggatttgcacattgtggaaaaatgtcaaagagaatatacaattttagccctacaacacgtatcgacccgagtataaaccgtggatacgtggttcagcttaagcaaatgtgcccgatcggtgtcgacgtaagaatcgcaatcaacatggatccgaccagtccacgtactttcgataatgcttatttcaagaatctccaacaaggaaagggtttgttcacgtcagatcaaatcttgttcacagatcaacggtcaagatctacagttaattcgtttgccaatagtgaaggagcttttagacaagctttcatcacagcgatcacgaagttaggtcgggttggtgttttgactggtaatgctggtgagattcgaagggattgttcacgtgtcaattagtgtgatttgaggttttctttcttttattccttaaagaggatttttttttttaataataaaatttaatttcttgttgtcaaaataaggagttcataagtgtgaaacatggaaacttaaattaataagatgggtttatttcgttg

SEQ ID NO: 87300 - protein, 325 aa, Arabidopsis thaliana; identical to SEQ ID NO: 42846
  peptide (1)..(325): Ceres Seq. ID no. 12699760
  misc_feature (43)..(289): Pfam Name: Peroxidase Pfam Description: Peroxidase
  misc_feature (1)..(325): Homolog of NCBI NO: 15234648 NR Description: peroxidase, putative; protein id: At4g30170.1, by cDNA: 152094., supported by cDNA: gi_13878042, supported by gi_17104672 [Arabidopsis thaliana]
  misc_feature (6)..(325): Homolog of NCBI NO: 1620369 NR Description: peroxidase ATP22a [Arabidopsis thaliana]
  misc_feature (6)..(325): Homolog of NCBI NO: 15224266 NR Description: peroxidase, putative; protein id: At2g18980.1 thaliana] >gi|25453203|sp|Q96518|PE16_ARATH Peroxidase 16 (Atperox P16) (ATP22a) >gi|7433071|pir||T01626 peroxidase (EC
  misc_feature (9)..(322): Homolog of NCBI NO: 4138647 NR Description: peroxidase [Trifolium repens]
  misc_feature (1)..(325): Homolog of NCBI NO: 15235600 NR Description: peroxidase, putative; protein id: At4g37530.1, by cDNA: gi_18874553 [Arabidopsis thaliana] Peroxidase 51 precursor (Atperox P51) (ATP37)
  misc_feature (17)..(325): Homolog of NCBI NO: 14485511 NR Description: putative peroxidase [Solanum tuberosum]
  misc_feature (1)..(325): Homolog of NCBI NO: 17979440 NR Description: putative peroxidase [Arabidopsis thaliana]
  misc_feature (16)..(325): Homolog of NCBI NO: 28629828 NR Description: peroxidase 1 [Artemisia annua]
  misc_feature (15)..(325): Homolog of NCBI NO: 15235597 NR Description: peroxidase, putative; protein id: At4g37520.1, by cDNA: 2583., supported by cDNA: gi_17065479, supported by gi_20148496 [Arabidopsis thaliana]
  misc_feature (15)..(325): Homolog of NCBI NO: 21554605 NR Description: peroxidase, prxr2 [Arabidopsis thaliana]

SEQ ID NO: 87301 - protein, 247 aa, Arabidopsis thaliana; identical to SEQ ID NO: 42847
  peptide (1)..(247): Ceres Seq. ID no. 12699761
  misc_feature (1)..(211): Pfam Name: Peroxidase Pfam Description: Peroxidase
  misc_feature (1)..(247): Homolog of NCBI NO: 15234648 NR Description: peroxidase, putative; protein id: At4g30170.1, by cDNA: 152094., supported by cDNA: gi_13878042, supported by gi_17104672 [Arabidopsis thaliana]
  misc_feature (1)..(247): Homolog of NCBI NO: 1620369 NR Description: peroxidase ATP22a [Arabidopsis thaliana]
  misc_feature (1)..(247): Homolog of NCBI NO: 15224266 NR Description: peroxidase, putative; protein id: At2g18980.1 thaliana] >gi|25453203|sp|Q96518|PE16_ARATH Peroxidase 16 (Atperox P16) (ATP22a) >gi|7433071|pir||T01626 peroxidase (EC
  misc_feature (1)..(244): Homolog of NCBI NO: 4138647 NR Description: peroxidase [Trifolium repens]
  misc_feature (1)..(247): Homolog of NCBI NO: 15235600 NR Description: peroxidase, putative; protein id: At4g37530.1, by cDNA: gi_18874553 [Arabidopsis thaliana] Peroxidase 51 precursor (Atperox P51) (ATP37)
  misc_feature (1)..(247): Homolog of NCBI NO: 14485511 NR Description: putative peroxidase [Solanum tuberosum]
  misc_feature (1)..(247): Homolog of NCBI NO: 17979440 NR Description: putative peroxidase [Arabidopsis thaliana]
  misc_feature (1)..(247): Homolog of NCBI NO: 28629828 NR Description: peroxidase 1 [Artemisia annua]
  misc_feature (1)..(247): Homolog of NCBI NO: 15235597 NR Description: peroxidase, putative; protein id: At4g37520.1, by cDNA: 2583., supported by cDNA: gi_17065479, supported by gi_20148496 [Arabidopsis thaliana]
  misc_feature (1)..(247): Homolog of NCBI NO: 21554605 NR Description: peroxidase, prxr2 [Arabidopsis thaliana]

SEQ ID NO: 87302 - protein, 234 aa, Arabidopsis thaliana; identical to SEQ ID NO: 42848
  peptide (1)..(234): Ceres Seq. ID no. 12699762
  misc_feature (1)..(198): Pfam Name: Peroxidase Pfam Description: Peroxidase
  misc_feature (1)..(234): Homolog of NCBI NO: 15234648 NR Description: peroxidase, putative; protein id: At4g30170.1, by cDNA: 152094., supported by cDNA: gi_13878042, supported by gi_17104672 [Arabidopsis thaliana]
  misc_feature (1)..(234): Homolog of NCBI NO: 1620369 NR Description: peroxidase ATP22a [Arabidopsis thaliana]
  misc_feature (1)..(234): Homolog of NCBI NO: 15224266 NR Description: peroxidase, putative; protein id: At2g18980.1 thaliana] >gi|25453203|sp|Q96518|PE16_ARATH Peroxidase 16 (Atperox P16) (ATP22a) >gi|7433071|pir||T01626 peroxidase (EC
  misc_feature (1)..(231): Homolog of NCBI NO: 4138647 NR Description: peroxidase [Trifolium repens]
  misc_feature (1)..(234): Homolog of NCBI NO: 15235600 NR Description: peroxidase, putative; protein id: At4g37530.1, by cDNA: gi_18874553 [Arabidopsis thaliana] Peroxidase 51 precursor (Atperox P51) (ATP37)
  misc_feature (1)..(234): Homolog of NCBI NO: 14485511 NR Description: putative peroxidase [Solanum tuberosum]
  misc_feature (1)..(234): Homolog of NCBI NO: 17979440 NR Description: putative peroxidase [Arabidopsis thaliana]
  misc_feature (1)..(234): Homolog of NCBI NO: 28629828 NR Description: peroxidase 1 [Artemisia annua]
  misc_feature (1)..(234): Homolog of NCBI NO: 15235597 NR Description: peroxidase, putative; protein id: At4g37520.1, by cDNA: 2583., supported by cDNA: gi_17065479, supported by gi_20148496 [Arabidopsis thaliana]
  misc_feature (1)..(234): Homolog of NCBI NO: 21554605 NR Description: peroxidase, prxr2 [Arabidopsis thaliana]

SEQ ID NO: 87303 - DNA, 992 bp, Arabidopsis thaliana
  misc_feature (1)..(992): Ceres Seq. ID no. 12699808
  misc_feature: MA Experiment ID: 108434 Result: Down-regulated in Transcription
  misc_feature: MA Experiment 108434 PARAMETER Experiment Name: At_Root_Tips_cDNA_P Parameter: Tissue Value: Root Tips
  misc_feature: MA Experiment ID: 108572 Result: Up-regulated in Transcription
  misc_feature: MA Experiment 108572 PARAMETER Experiment Name: At_Drought_cDNA_P Parameter: Timepoint (hr) Value: 1
  misc_feature: MA Experiment 108572 PARAMETER Experiment Name: At_Drought_cDNA_P Parameter: Tissue Value: Aerial
  misc_feature: MA Experiment 108572 PARAMETER Experiment Name: At_Drought_cDNA_P Parameter: Treatment Value: Drought vs. No Drought
  misc_feature: MA Experiment ID: 108574 Result: Up-regulated in Transcription
  misc_feature: MA Experiment 108574 PARAMETER Experiment Name: At_Wounding__cDNA_P Parameter: Timepoint (hr) Value: 1
  misc_feature: MA Experiment 108574 PARAMETER Experiment Name: At_Wounding__cDNA_P Parameter: Tissue Value: Aerial
  misc_feature: MA Experiment 108574 PARAMETER Experiment Name: At_Wounding__cDNA_P Parameter: Treatment Value: Wounding vs. No Wounding
  misc_feature: MA Experiment ID: 108577 Result: Down-regulated in Transcription
  misc_feature: MA Experiment 108577 PARAMETER Experiment Name: At_42deg_Heat_cDNA_P Parameter: Temperature (deg C) Value: 42 vs. 22
  misc_feature: MA Experiment 108577 PARAMETER Experiment Name: At_42deg_Heat_cDNA_P Parameter: Timepoint (hr) Value: 6
  misc_feature: MA Experiment 108577 PARAMETER Experiment Name: At_42deg_Heat_cDNA_P Parameter: Tissue Value: Aerial
  misc_feature: MA Experiment ID: 108579 Result: Up-regulated in Transcription
  misc_feature: MA Experiment 108579 PARAMETER Experiment Name: At_4deg_Cold_cDNA_P Parameter: Temperature (deg C) Value: 4 vs. 22
  misc_feature: MA Experiment 108579 PARAMETER Experiment Name: At_4deg_Cold_cDNA_P Parameter: Timepoint (hr) Value: 6
  misc_feature: MA Experiment 108579 PARAMETER Experiment Name: At_4deg_Cold_cDNA_P Parameter: Tissue Value: Aerial
  misc_feature: MA Experiment ID: 20000111 Result: Down-regulated in Transcription
  misc_feature: MA Experiment 20000111 PARAMETER Experiment Name: At_42deg_Heat_cDNA_P Parameter: Temperature (deg C) Value: 42 vs. 22
  misc_feature: MA Experiment 20000111 PARAMETER Experiment Name: At_42deg_Heat_cDNA_P Parameter: Timepoint (hr) Value: 6
  misc_feature: MA Experiment 20000111 PARAMETER Experiment Name: At_42deg_Heat_cDNA_P Parameter: Tissue Value: Aerial
  misc_feature: MA Experiment ID: 20000112 Result: Down-regulated in Transcription
  misc_feature: MA Experiment 20000112 PARAMETER Experiment Name: At_42deg_Heat_cDNA_P Parameter: Temperature (deg C) Value: 42 vs. 22
  misc_feature: MA Experiment 20000112 PARAMETER Experiment Name: At_42deg_Heat_cDNA_P Parameter: Timepoint (hr) Value: 2
  misc_feature: MA Experiment 20000112 PARAMETER Experiment Name: At_42deg_Heat_cDNA_P Parameter: Tissue Value: Aerial
  misc_feature: MA Experiment ID: 20000113 Result: Down-regulated in Transcription
  misc_feature: MA Experiment 20000113 PARAMETER Experiment Name: At_42deg_Heat_cDNA_P Parameter: Temperature (deg C) Value: 42 vs. 22
  misc_feature: MA Experiment 20000113 PARAMETER Experiment Name: At_42deg_Heat_cDNA_P Parameter: Timepoint (hr) Value: 8
  misc_feature: MA Experiment 20000113 PARAMETER Experiment Name: At_42deg_Heat_cDNA_P Parameter: Tissue Value: Aerial
  misc_feature: MA Experiment ID: 20000173 Result: Down-regulated in Transcription
  misc_feature: MA Experiment 20000173 PARAMETER Experiment Name: At_42deg_Heat_P Parameter: Age (day) Value: 14
  misc_feature: MA Experiment 20000173 PARAMETER Experiment Name: At_42deg_Heat_P Parameter: Organism Value: A. thaliana
  misc_feature: MA Experiment 20000173 PARAMETER Experiment Name: At_42deg_Heat_P Parameter: Plant Line Value: WS
  misc_feature: MA Experiment 20000173 PARAMETER Experiment Name: At_42deg_Heat_P Parameter: Temperature (deg C) Value: 42 vs. 22
  misc_feature: MA Experiment 20000173 PARAMETER Experiment Name: At_42deg_Heat_P Parameter: Timepoint (hr) Value: 6
  misc_feature: MA Experiment 20000173 PARAMETER Experiment Name: At_42deg_Heat_P Parameter: Tissue Value: Aerial
  misc_feature: MA Experiment ID: 20000184 Result: Down-regulated in Transcription
  misc_feature: MA Experiment 20000184 PARAMETER Experiment Name: At_Shoots__P Parameter: Age (day) Value: 7
  misc_feature: MA Experiment 20000184 PARAMETER Experiment Name: At_Shoots__P Parameter: Tissue Value: Shoots vs. Whole Plant
  misc_feature: MA Experiment ID: 20000211 Result: Up-regulated in Transcription
  misc_feature: MA Experiment 20000211 PARAMETER Experiment Name: At_0.001percent_MeJA__P Parameter: Age (day) Value: 14
  misc_feature: MA Experiment 20000211 PARAMETER Experiment Name: At_0.001percent_MeJA__P Parameter: Organism Value: A. thaliana
  misc_feature: MA Experiment 20000211 PARAMETER Experiment Name: At_0.001percent_MeJA__P Parameter: Plant Line Value: WS
  misc_feature: MA Experiment 20000211 PARAMETER Experiment Name: At_0.001percent_MeJA__P Parameter: Timepoint (hr) Value: 1
  misc_feature: MA Experiment 20000211 PARAMETER Experiment Name: At_0.001percent_MeJA__P Parameter: Tissue Value: Aerial
  misc_feature: MA Experiment 20000211 PARAMETER Experiment Name: At_0.001percent_MeJA__P Parameter: Treatment Value: 0.001percent MeJA vs. No Treatment
  misc_feature: MA Experiment ID: 20000224 Result: Up-regulated in Transcription
  misc_feature: MA Experiment ID: 20000234 Result: Down-regulated in Transcription
  misc_feature: MA Experiment 20000234 PARAMETER Experiment Name: At_Siliques_P Parameter: Age (day) Value: 21
  misc_feature: MA Experiment 20000234 PARAMETER Experiment Name: At_Siliques_P Parameter: Organism Value: A. thaliana
  misc_feature: MA Experiment 20000234 PARAMETER Experiment Name: At_Siliques_P Parameter: Plant Line Value: WS
  misc_feature: MA Experiment 20000234 PARAMETER Experiment Name: At_Siliques_P Parameter: Tissue Value: Less Than 5mm Siliques vs. Whole Plant
  misc_feature: MA Experiment ID: 20000235 Result: Down-regulated in Transcription
  misc_feature: MA Experiment 20000235 PARAMETER Experiment Name: At_Siliques_P Parameter: Age (day) Value: 21
  misc_feature: MA Experiment 20000235 PARAMETER Experiment Name: At_Siliques_P Parameter: Organism Value: A. thaliana
  misc_feature: MA Experiment 20000235 PARAMETER Experiment Name: At_Siliques_P Parameter: Plant Line Value: WS
  misc_feature: MA Experiment 20000235 PARAMETER Experiment Name: At_Siliques_P Parameter: Tissue Value: 5-10mm Siliques vs. Whole Plant
  misc_feature: MA Experiment ID: 20000264 Result: Down-regulated in Transcription
  misc_feature: MA Experiment 20000264 PARAMETER Experiment Name: At_Open_Flower_P Parameter: Age (day) Value: 21
  misc_feature: MA Experiment 20000264 PARAMETER Experiment Name: At_Open_Flower_P Parameter: Plant Line Value: WS
  misc_feature: MA Experiment 20000264 PARAMETER Experiment Name: At_Open_Flower_P Parameter: Tissue Value: Open Flower vs. Whole Plant
  misc_feature: MA Experiment ID: 20000265 Result: Down-regulated in Transcription
  misc_feature: MA Experiment 20000265 PARAMETER Experiment Name: At_Open_Flower_P Parameter: Age (day) Value: 21
  misc_feature: MA Experiment 20000265 PARAMETER Experiment Name: At_Open_Flower_P Parameter: Plant Line Value: WS
  misc_feature: MA Experiment 20000265 PARAMETER Experiment Name: At_Open_Flower_P Parameter: Tissue Value: Closed Flower vs. Whole Plant
  misc_feature: MA Experiment ID: 20000286 Result: Down-regulated in Transcription
  misc_feature: MA Experiment 20000286 PARAMETER Experiment Name: At_Open_Flower_P Parameter: Age (day) Value: 21
  misc_feature: MA Experiment 20000286 PARAMETER Experiment Name: At_Open_Flower_P Parameter: Plant Line Value: WS
  misc_feature: MA Experiment 20000286 PARAMETER Experiment Name: At_Open_Flower_P Parameter: Tissue Value: Half Open vs. Whole Plant
  misc_feature: MA Experiment ID: 20000308 Result: Up-regulated in Transcription
  misc_feature: MA Experiment 20000308 PARAMETER Experiment Name: At_100mM_NaCl__P Parameter: Age (day) Value: 17
  misc_feature: MA Experiment 20000308 PARAMETER Experiment Name: At_100mM_NaCl__P Parameter: Organism Value: A. thaliana
  misc_feature: MA Experiment 20000308 PARAMETER Experiment Name: At_100mM_NaCl__P Parameter: Plant Line Value: WS
  misc_feature: MA Experiment 20000308 PARAMETER Experiment Name: At_100mM_NaCl__P Parameter: Timepoint (hr) Value: 72
  misc_feature: MA Experiment 20000308 PARAMETER Experiment Name: At_100mM_NaCl__P Parameter: Tissue Value: Whole Plant
  misc_feature: MA Experiment 20000308 PARAMETER Experiment Name: At_100mM_NaCl__P Parameter: Treatment Value: 100mM NaCl vs. No Treatment
  misc_feature: MA Experiment ID: 20000438 Result: Down-regulated in Transcription
  misc_feature: MA Experiment 20000438 PARAMETER Experiment Name: At_Shoots__P Parameter: Age (day) Value: 14
  misc_feature: MA Experiment 20000438 PARAMETER Experiment Name: At_Shoots__P Parameter: Tissue Value: Shoots vs. Whole Plant
  misc_feature: MA Experiment ID: 20000527 Result: Down-regulated in Transcription
  misc_feature: MA Experiment 20000527 PARAMETER Experiment Name: At_10percent_PEG_P Parameter: Age (day) Value: 20
  misc_feature: MA Experiment 20000527 PARAMETER Experiment Name: At_10percent_PEG_P Parameter: Organism Value: A. thaliana
  misc_feature: MA Experiment 20000527 PARAMETER Experiment Name: At_10percent_PEG_P Parameter: Plant Line Value: WS
  misc_feature: MA Experiment 20000527 PARAMETER Experiment Name: At_10percent_PEG_P Parameter: Timepoint (day) Value: 20
  misc_feature: MA Experiment 20000527 PARAMETER Experiment Name: At_10percent_PEG_P Parameter: Tissue Value: Whole Plant
  misc_feature: MA Experiment 20000527 PARAMETER Experiment Name: At_10percent_PEG_P Parameter: Treatment Value: 10percent PEG vs. No Treatment
  misc_feature: MA Experiment ID: 20000794 Result: Down-regulated in Transcription
  misc_feature: MA Experiment 20000794 PARAMETER Experiment Name: At_Petals_P Parameter: Age (day) Value: 23-25 days
  misc_feature: MA Experiment 20000794 PARAMETER Experiment Name: At_Petals_P Parameter: Plant Line Value: WS
  misc_feature: MA Experiment 20000794 PARAMETER Experiment Name: At_Petals_P Parameter: Tissue Value: Petals vs. Whole plant
  misc_feature: MA Experiment ID: 20001248 Result: Down-regulated in Transcription
  misc_feature: MA Experiment 20001248 PARAMETER Experiment Name: At_Far-red-induction_P Parameter: Age (day) Value: 7
  misc_feature: MA Experiment 20001248 PARAMETER Experiment Name: At_Far-red-induction_P Parameter: Light Value: Far-red vs. White
  misc_feature: MA Experiment 20001248 PARAMETER Experiment Name: At_Far-red-induction_P Parameter: Organism Value: A. thaliana
  misc_feature: MA Experiment 20001248 PARAMETER Experiment Name: At_Far-red-induction_P Parameter: Plant Line Value: Columbia
  misc_feature: MA Experiment 20001248 PARAMETER Experiment Name: At_Far-red-induction_P Parameter: Timepoint (hr) Value: 4
  misc_feature: MA Experiment 20001248 PARAMETER Experiment Name: At_Far-red-induction_P Parameter: Tissue Value: Whole Plant
  misc_feature: MA Experiment ID: 20001450 Result: Down-regulated in Transcription
  misc_feature: MA Experiment 20001450 PARAMETER Experiment Name: At_Far-red-induction_P Parameter: Age (day) Value: 7
  misc_feature: MA Experiment 20001450 PARAMETER Experiment Name: At_Far-red-induction_P Parameter: Light Value: Far-red vs. White
  misc_feature: MA Experiment 20001450 PARAMETER Experiment Name: At_Far-red-induction_P Parameter: Organism Value: A. thaliana
  misc_feature: MA Experiment 20001450 PARAMETER Experiment Name: At_Far-red-induction_P Parameter: Plant Line Value: Columbia
  misc_feature: MA Experiment 20001450 PARAMETER Experiment Name: At_Far-red-induction_P Parameter: Timepoint (hr) Value: 8
  misc_feature: MA Experiment 20001450 PARAMETER Experiment Name: At_Far-red-induction_P Parameter: Tissue Value: Whole Plant
  misc_feature: MA Experiment ID: 20001451 Result: Down-regulated in Transcription
  misc_feature: MA Experiment 20001451 PARAMETER Experiment Name: At_Far-red-induction_P Parameter: Age (day) Value: 7
  misc_feature: MA Experiment 20001451 PARAMETER Experiment Name: At_Far-red-induction_P Parameter: Light Value: Far-red vs. White
  misc_feature: MA Experiment 20001451 PARAMETER Experiment Name: At_Far-red-induction_P Parameter: Organism Value: A. thaliana
  misc_feature: MA Experiment 20001451 PARAMETER Experiment Name: At_Far-red-induction_P Parameter: Plant Line Value: Columbia
  misc_feature: MA Experiment 20001451 PARAMETER Experiment Name: At_Far-red-induction_P Parameter: Timepoint (hr) Value: 24
  misc_feature: MA Experiment 20001451 PARAMETER Experiment Name: At_Far-red-induction_P Parameter: Tissue Value: Whole Plant
actgctctatttctcaatctctctcctaaatcaatcaatctttgtattttcatttagccagaacaaaaaaaatggtggagcaaaagagatacgctctgtttctagcgactttggactcagagttcgtgaagaaaacttacggaggataccacaacgtgttcgtgacgacgttcggagacgaaggagagcattgggactcctttagagtcgtcagcggagagtttcctgacgagaaagatctggagaaatacgatggcttcgttatcagcggaagctctcacgatgcctttgagaatgatgattggatccttaagctctgtgatattgtcaagaaaattgatgagatgaagaagaaaattcttggcatctgctttggtcatcagatcatagccagggtaaggggaggaacagtcggaagagcaaagaagggaccagaacttaaacttggagacataaccatcgtcaaggatgcgattacgcctggaagttacttcggaaacgagattcctgatagcatagcgatcatcaaatgtcaccaggacgaagtgttggtgctgcccgaaactgctaaagtgcttgcgtattccaagaactacgaggtggagatgtattcgattgaggatcatttgttctgtatccaaggacatcctgagtataacaaagagattctcttcgagattgttgatcgtgttcttgctctaggctacgtcaagcaagaatttgctgatgcggctaaggcaacgatggagaataggggagcagacaggaagctttgggagacgatttgcaagaacttcctcaaaggcagagttccaactaactagtttcactcccaaattatctatttggctcttgtcatattgaaacaatttgtggatttatgatcttgctttatttttattcaatgtataacgacatattaatctcggcgtgacttatttgtgttataccagttgataaatgaataagaagaacctaagctatttaaagcc

SEQ ID NO: 87304 - protein, 250 aa, Arabidopsis thaliana; identical to SEQ ID NO: 24278
  peptide (1)..(250): Ceres Seq. ID no. 12699809
  misc_feature (1)..(250): Homolog of NCBI NO: 15234763 NR Description: putative protein; protein id: At4g30530.1, by cDNA: 37987., supported by cDNA: gi_15294151, supported by gi_20147268 [Arabidopsis thaliana] >gi|25407655|pir||B85357
  misc_feature (1)..(250): Homolog of NCBI NO: 21593315 NR Description: defense-related protein [Arabidopsis thaliana]
  misc_feature (1)..(250): Homolog of NCBI NO: 14009290 NR Description: defense-related protein [Brassica carinata]
  misc_feature (3)..(246): Homolog of NCBI NO: 15224079 NR Description: unknown protein; protein id: At2g23970.1
  misc_feature (1)..(245): Homolog of NCBI NO: 15234767 NR Description: putative protein; protein id: At4g30550.1, by cDNA: 29388., supported by cDNA: gi_17381293 [Arabidopsis >gi|25407659|pir||D85357 hypothetical protein AT4g30550
  misc_feature (1)..(245): Homolog of NCBI NO: 17381294 NR Description: AT4g30550/F17I23_110 [Arabidopsis thaliana]
  misc_feature (1)..(217): Homolog of NCBI NO: 15224078 NR Description: unknown protein; protein id: At2g23960.1
  misc_feature (1)..(245): Homolog of NCBI NO: 21555885 NR Description: unknown [Arabidopsis thaliana]
  misc_feature (1)..(246): Homolog of NCBI NO: 15234765 NR Description: putative protein; protein id: At4g30540.1
  misc_feature (7)..(250): Homolog of NCBI NO: 13174241 NR Description: putative glutamine synthetase [Oryza sativa]

SEQ ID NO: 87305 - protein, 159 aa, Arabidopsis thaliana; identical to SEQ ID NO: 24279
  peptide (1)..(159): Ceres Seq. ID no. 12699810
  misc_feature (1)..(159): Homolog of NCBI NO: 15234763 NR Description: putative protein; protein id: At4g30530.1, by cDNA: 37987., supported by cDNA: gi_15294151, supported by gi_20147268 [Arabidopsis thaliana] >gi|25407655|pir||B85357
  misc_feature (1)..(159): Homolog of NCBI NO: 21593315 NR Description: defense-related protein [Arabidopsis thaliana]
  misc_feature (1)..(159): Homolog of NCBI NO: 14009290 NR Description: defense-related protein [Brassica carinata]
  misc_feature (1)..(155): Homolog of NCBI NO: 15224079 NR Description: unknown protein; protein id: At2g23970.1
  misc_feature (1)..(154): Homolog of NCBI NO: 15234767 NR Description: putative protein; protein id: At4g30550.1, by cDNA: 29388., supported by cDNA: gi_17381293 [Arabidopsis >gi|25407659|pir||D85357 hypothetical protein AT4g30550
  misc_feature (1)..(154): Homolog of NCBI NO: 17381294 NR Description: AT4g30550/F17I23_110 [Arabidopsis thaliana]
  misc_feature (1)..(126): Homolog of NCBI NO: 15224078 NR Description: unknown protein; protein id: At2g23960.1
  misc_feature (1)..(154): Homolog of NCBI NO: 21555885 NR Description: unknown [Arabidopsis thaliana]
  misc_feature (1)..(155): Homolog of NCBI NO: 15234765 NR Description: putative protein; protein id: At4g30540.1
  misc_feature (1)..(159): Homolog of NCBI NO: 13174241 NR Description: putative glutamine synthetase [Oryza sativa]

SEQ ID NO: 87306 - DNA, 1440 bp, Arabidopsis thaliana
  misc_feature (1)..(1440): Ceres Seq. ID no. 12699845
  misc_feature: MA Experiment ID: 20000171 Result: Up-regulated in Transcription
  misc_feature: MA Experiment 20000171 PARAMETER Experiment Name: At_42deg_Heat_P Parameter: Age (day) Value: 14
  misc_feature: MA Experiment 20000171 PARAMETER Experiment Name: At_42deg_Heat_P Parameter: Organism Value: A. thaliana
  misc_feature: MA Experiment 20000171 PARAMETER Experiment Name: At_42deg_Heat_P Parameter: Plant Line Value: WS
  misc_feature: MA Experiment 20000171 PARAMETER Experiment Name: At_42deg_Heat_P Parameter: Temperature (deg C) Value: 42 vs. 22
  misc_feature: MA Experiment 20000171 PARAMETER Experiment Name: At_42deg_Heat_P Parameter: Timepoint (hr) Value: 1
  misc_feature: MA Experiment 20000171 PARAMETER Experiment Name: At_42deg_Heat_P Parameter: Tissue Value: Aerial
  misc_feature: MA Experiment ID: 20000173 Result: Up-regulated in Transcription
  misc_feature: MA Experiment 20000173 PARAMETER Experiment Name: At_42deg_Heat_P Parameter: Age (day) Value: 14
  misc_feature: MA Experiment 20000173 PARAMETER Experiment Name: At_42deg_Heat_P Parameter: Organism Value: A. thaliana
  misc_feature: MA Experiment 20000173 PARAMETER Experiment Name: At_42deg_Heat_P Parameter: Plant Line Value: WS
  misc_feature: MA Experiment 20000173 PARAMETER Experiment Name: At_42deg_Heat_P Parameter: Temperature (deg C) Value: 42 vs. 22
  misc_feature: MA Experiment 20000173 PARAMETER Experiment Name: At_42deg_Heat_P Parameter: Timepoint (hr) Value: 6
  misc_feature: MA Experiment 20000173 PARAMETER Experiment Name: At_42deg_Heat_P Parameter: Tissue Value: Aerial
  misc_feature: MA Experiment ID: 20000179 Result: Down-regulated in Transcription
  misc_feature: MA Experiment 20000179 PARAMETER Experiment Name: At_Germinating_Seeds_P Parameter: Age (hr) Value: 6 vs. 0
  misc_feature: MA Experiment 20000179 PARAMETER Experiment Name: At_Germinating_Seeds_P Parameter: Tissue Value: Germinating Seeds
  misc_feature: MA Experiment ID: 20000227 Result: Down-regulated in Transcription
  misc_feature: MA Experiment 20000227 PARAMETER Experiment Name: At_Root-Tips-vs-Tops_P Parameter: Tissue Value: Root Tips vs. Root Tops
  misc_feature: MA Experiment ID: 20000437 Result: Up-regulated in Transcription
  misc_feature: MA Experiment 20000437 PARAMETER Experiment Name: At_Drought_P Parameter: Age (day) Value: 8
  misc_feature: MA Experiment 20000437 PARAMETER Experiment Name: At_Drought_P Parameter: Organism Value: A. thaliana
  misc_feature: MA Experiment 20000437 PARAMETER Experiment Name: At_Drought_P Parameter: Plant Line Value: WS
  misc_feature: MA Experiment 20000437 PARAMETER Experiment Name: At_Drought_P Parameter: Timepoint (hr) Value: 24
  misc_feature: MA Experiment 20000437 PARAMETER Experiment Name: At_Drought_P Parameter: Tissue Value: Whole Plant
  misc_feature: MA Experiment 20000437 PARAMETER Experiment Name: At_Drought_P Parameter: Treatment Value: Drought vs. No Drought
  misc_feature: MA Experiment ID: 20001905 Result: Up-regulated in Transcription
  misc_feature: MA Experiment 20001905 PARAMETER Experiment Name: At_Drought_Reproduction_P Parameter: Age (day) Value: 40
  misc_feature: MA Experiment 20001905 PARAMETER Experiment Name: At_Drought_Reproduction_P Parameter: Organism Value: A. thaliana
  misc_feature: MA Experiment 20001905 PARAMETER Experiment Name: At_Drought_Reproduction_P Parameter: Plant Line Value: WS
  misc_feature: MA Experiment 20001905 PARAMETER Experiment Name: At_Drought_Reproduction_P Parameter: Timepoint (day) Value: 10
  misc_feature: MA Experiment 20001905 PARAMETER Experiment Name: At_Drought_Reproduction_P Parameter: Tissue Value: Rosettes
  misc_feature: MA Experiment 20001905 PARAMETER Experiment Name: At_Drought_Reproduction_P Parameter: Treatment Value: Drought vs. No Drought
atggtggaaatgaggaaatctggaggtttaagaccggagtctgaatcggcggccaggtgccgagatgagctaccggtgaaattggagattgctgaagatgatttagaagaagagcatggtcctctcaacaaacgatctaggttatggagtcctgggacaagctcatcgacaatggcaccagctaagtataacccgcttgatgagccgagtcctcttggattgagtcttaagaagagtccatctttgttggagttgattcagatgaagataacgcattgtggtgatcctaaagcagctgaaacgttgaaagctggtgcacttggctctggaagtattgagaagctgaaagcttctaactttcctgcttcgcttttgaagatcgggcagtgggagtataaatcgaggtatgaaggtgatttggtggcaaagtgttactttgctaaacacaaacttgtttgggaagtgttggaacaaggtcttaagagtaaaatcgagatccagtggtcagatattatggctttgaaggcaaactgtcctgaagacggacctggaactttgactctcgtgcttgctagacagcccttatttttccgggaaacaaacccacagcctagaaagcataccttgtggcaggcgacatcagatttcactgatggccaagccagcatgaacaggcagcattttctgcaatgtgctcaagggataatgaacaaacattttgaaaagctcgttcaatgtgatcatcgtctgttccatctaagccgacagccggagatagctattgactctccctactttgatgcacggcaatctatttttgaggatccaagtccttcgatctctgggactcagaatttagcatctcctgttggggctcagtcatcatctgagcatatgtatctgtctcatgaagcaccatcacccagctcagtgatagatgctcgtgcaaatgaaggaattggggatcagataaaagtacctggactacaccaatctatgtcagtgagcgatttcgttggacttctctctgattctgctggtggaagtcatccggaacatatggagaaatttgagatcatgaaacagcagttgctaagtgataatatccagttcgaggcaccagatgagaagtctctcatgccaagggttaactctttattcaacctcttgtacaaggatcccaacgtcgctgcaaactcacagctcaataccgaaatgtcggttggattgaagtctgaacccaagggaattgtttctgacaacaacaacaacaacaacaacaacaacagagttcttgatacagcttctagcagcaaaccacagggtatgttaaggaaagactcattcagcgatttgctattacacctcccccggatcacatccttgccaaagttcttgtccaacatttcagaagaagatggtgatgcatataatagataa

SEQ ID NO: 87307 - protein, 479 aa, Arabidopsis thaliana
  peptide (1)..(479): Ceres Seq. ID no. 12699846
  misc_feature (80)..(321): Homolog of NCBI NO: 15234853 NR Description: putative protein; protein id: At4g30780.1
  misc_feature (303)..(479): Homolog of NCBI NO: 15234853 NR Description: putative protein; protein id: At4g30780.1
  misc_feature (1)..(473): Homolog of NCBI NO: 25371341 NR Description: hypothetical protein At2g24100 [imported] - thaliana >gi|14596217|gb|AAK68836.1| Unknown protein [Arabidopsis >gi|15809913|gb|AAL06884.1| At2g24100/F27D4.1 [Arabidopsis
  misc_feature (4)..(473): Homolog of NCBI NO: 18400458 NR Description: expressed protein; protein id: At2g24100.1 thaliana] >gi|20197500|gb|AAD03372.2| expressed protein
  misc_feature (1)..(124): Homolog of NCBI NO: 15234853 NR Description: putative protein; protein id: At4g30780.1
  misc_feature (326)..(444): Homolog of NCBI NO: 15234853 NR Description: putative protein; protein id: At4g30780.1
  misc_feature (278)..(345): Homolog of NCBI NO: 15234853 NR Description: putative protein; protein id: At4g30780.1
  misc_feature (113)..(275): Homolog of NCBI NO: 20218825 NR Description: hypothetical protein [Pinus pinaster]
  misc_feature (72)..(268): Homolog of NCBI NO: 25405713 NR Description: hypothetical protein F20D21.12 [imported] - thaliana >gi|4585974|gb|AAD25610.1|AC005287_12 Hypothetical
  misc_feature (66)..(267): Homolog of NCBI NO: 15230043 NR Description: unknown protein; protein id: At3g05770.1 thaliana] >gi|6714390|gb|AAF26079.1|AC012393_5 unknown protein
MVEMRKSGGLRPESESAARCRDELPVKLEIAEDDLEEEHGPLNKRSRLWSPGTSSSTMAPAKYNPLDEPSPLGLSLKKSPSLLELIQMKITHCGDPKAAETLKAGALGSGSIEKLKASNFPASLLKIGQWEYKSRYEGDLVAKCYFAKHKLVWEVLEQGLKSKIEIQWSDIMALKANCPEDGPGTLTLVLARQPLFFRETNPQPRKHTLWQATSDFTDGQASMNRQHFLQCAQGIMNKHFEKLVQCDHRLFHLSRQPEIAIDSPYFDARQSIFEDPSPSISGTQNLASPVGAQSSSEHMYLSHEAPSPSSVIDARANEGIGDQIKVPGLHQSMSVSDFVGLLSDSAGGSHPEHMEKFEIMKQQLLSDNIQFEAPDEKSLMPRVNSLFNLLYKDPNVAANSQLNTEMSVGLKSEPKGIVSDNNNNNNNNNRVLDTASSSKPQGMLRKDSFSDLLLHLPRITSLPKFLSNISEEDGDAYNR

SEQ ID NO: 87308 - protein, 476 aa, Arabidopsis thaliana
  peptide (1)..(476): Ceres Seq. ID no. 12699847
  misc_feature (77)..(318): Homolog of NCBI NO: 15234853 NR Description: putative protein; protein id: At4g30780.1
  misc_feature (300)..(476): Homolog of NCBI NO: 15234853 NR Description: putative protein; protein id: At4g30780.1
  misc_feature (1)..(470): Homolog of NCBI NO: 25371341 NR Description: hypothetical protein At2g24100 [imported] - thaliana >gi|14596217|gb|AAK68836.1| Unknown protein [Arabidopsis >gi|15809913|gb|AAL06884.1| At2g24100/F27D4.1 [Arabidopsis
  misc_feature (1)..(470): Homolog of NCBI NO: 18400458 NR Description: expressed protein; protein id: At2g24100.1 thaliana] >gi|20197500|gb|AAD03372.2| expressed protein
  misc_feature (1)..(121): Homolog of NCBI NO: 15234853 NR Description: putative protein; protein id: At4g30780.1
  misc_feature (323)..(441): Homolog of NCBI NO: 15234853 NR Description: putative protein; protein id: At4g30780.1
  misc_feature (275)..(342): Homolog of NCBI NO: 15234853 NR Description: putative protein; protein id: At4g30780.1
  misc_feature (110)..(272): Homolog of NCBI NO: 20218825 NR Description: hypothetical protein [Pinus pinaster]
  misc_feature (69)..(265): Homolog of NCBI NO: 25405713 NR Description: hypothetical protein F20D21.12 [imported] - thaliana >gi|4585974|gb|AAD25610.1|AC005287_12 Hypothetical
  misc_feature (63)..(264): Homolog of NCBI NO: 15230043 NR Description: unknown protein; protein id: At3g05770.1 thaliana] >gi|6714390|gb|AAF26079.1|AC012393_5 unknown protein
MRKSGGLRPESESAARCRDELPVKLEIAEDDLEEEHGPLNKRSRLWSPGTSSSTMAPAKYNPLDEPSPLGLSLKKSPSLLELIQMKITHCGDPKAAETLKAGALGSGSIEKLKASNFPASLLKIGQWEYKSRYEGDLVAKCYFAKHKLVWEVLEQGLKSKIEIQWSDIMALKANCPEDGPGTLTLVLARQPLFFRETNPQPRKHTLWQATSDFTDGQASMNRQHFLQCAQGIMNKHFEKLVQCDHRLFHLSRQPEIAIDSPYFDARQSIFEDPSPSISGTQNLASPVGAQSSSEHMYLSHEAPSPSSVIDARANEGIGDQIKVPGLHQSMSVSDFVGLLSDSAGGSHPEHMEKFEIMKQQLLSDNIQFEAPDEKSLMPRVNSLFNLLYKDPNVAANSQLNTEMSVGLKSEPKGIVSDNNNNNNNNNRVLDTASSSKPQGMLRKDSFSDLLLHLPRITSLPKFLSNISEEDGDAYNR

SEQ ID NO: 87309 - protein, 422 aa, Arabidopsis thaliana
  peptide (1)..(422): Ceres Seq. ID no. 12699848
  misc_feature (23)..(264): Homolog of NCBI NO: 15234853 NR Description: putative protein; protein id: At4g30780.1
  misc_feature (246)..(422): Homolog of NCBI NO: 15234853 NR Description: putative protein; protein id: At4g30780.1
  misc_feature (1)..(416): Homolog of NCBI NO: 25371341 NR Description: hypothetical protein At2g24100 [imported] - thaliana >gi|14596217|gb|AAK68836.1| Unknown protein [Arabidopsis >gi|15809913|gb|AAL06884.1| At2g24100/F27D4.1 [Arabidopsis
  misc_feature (1)..(416): Homolog of NCBI NO: 18400458 NR Description: expressed protein; protein id: At2g24100.1 thaliana] >gi|20197500|gb|AAD03372.2| expressed protein
  misc_feature (1)..(67): Homolog of NCBI NO: 15234853 NR Description: putative protein; protein id: At4g30780.1
  misc_feature (269)..(387): Homolog of NCBI NO: 15234853 NR Description: putative protein; protein id: At4g30780.1
  misc_feature (221)..(288): Homolog of NCBI NO: 15234853 NR Description: putative protein; protein id: At4g30780.1
  misc_feature (56)..(218): Homolog of NCBI NO: 20218825 NR Description: hypothetical protein [Pinus pinaster]
  misc_feature (15)..(211): Homolog of NCBI NO: 25405713 NR Description: hypothetical protein F20D21.12 [imported] - thaliana >gi|4585974|gb|AAD25610.1|AC005287_12 Hypothetical
  misc_feature (9)..(210): Homolog of NCBI NO: 15230043 NR Description: unknown protein; protein id: At3g05770.1 thaliana] >gi|6714390|gb|AAF26079.1|AC012393_5 unknown protein
MAPAKYNPLDEPSPLGLSLKKSPSLLELIQMKITHCGDPKAAETLKAGALGSGSIEKLKASNFPASLLKIGQWEYKSRYEGDLVAKCYFAKHKLVWEVLEQGLKSKIEIQWSDIMALKANCPEDGPGTLTLVLARQPLFFRETNPQPRKHTLWQATSDFTDGQASMNRQHFLQCAQGIMNKHFEKLVQCDHRLFHLSRQPEIAIDSPYFDARQSIFEDPSPSISGTQNLASPVGAQSSSEHMYLSHEAPSPSSVIDARANEGIGDQIKVPGLHQSMSVSDFVGLLSDSAGGSHPEHMEKFEIMKQQLLSDNIQFEAPDEKSLMPRVNSLFNLLYKDPNVAANSQLNTEMSVGLKSEPKGIVSDNNNNNNNNNRVLDTASSSKPQGMLRKDSFSDLLLHLPRITSLPKFLSNISEEDGDAYNR

SEQ ID NO: 87310 - DNA, 938 bp, Arabidopsis thaliana
  misc_feature (1)..(938): Ceres Seq. ID no. 12699907
  misc_feature: MA Experiment ID: 108577 Result: Up-regulated in Transcription
  misc_feature: MA Experiment 108577 PARAMETER Experiment Name: At_42deg_Heat_cDNA_P Parameter: Temperature (deg C) Value: 42 vs. 22
  misc_feature: MA Experiment 108577 PARAMETER Experiment Name: At_42deg_Heat_cDNA_P Parameter: Timepoint (hr) Value: 6
  misc_feature: MA Experiment 108577 PARAMETER Experiment Name: At_42deg_Heat_cDNA_P Parameter: Tissue Value: Aerial
  misc_feature: MA Experiment ID: 108595 Result: Down-regulated in Transcription
  misc_feature: MA Experiment 108595 PARAMETER Experiment Name: At_Ler-pi_Ovule_cDNA_P Parameter: Plant Line Value: null
  misc_feature: MA Experiment ID: 20000185 Result: Down-regulated in Transcription
  misc_feature: MA Experiment 20000185 PARAMETER Experiment Name: At_Roots__P Parameter: Age (day) Value: 7 vs. 21
  misc_feature: MA Experiment 20000185 PARAMETER Experiment Name: At_Roots__P Parameter: Organism Value: A. thaliana
  misc_feature: MA Experiment 20000185 PARAMETER Experiment Name: At_Roots__P Parameter: Tissue Value: Roots vs. Whole Plant
  misc_feature: MA Experiment ID: 20000438 Result: Up-regulated in Transcription
  misc_feature: MA Experiment 20000438 PARAMETER Experiment Name: At_Shoots__P Parameter: Age (day) Value: 14
  misc_feature: MA Experiment 20000438 PARAMETER Experiment Name: At_Shoots__P Parameter: Tissue Value: Shoots vs. Whole Plant
  misc_feature: MA Experiment ID: 20001247 Result: Up-regulated in Transcription
  misc_feature: MA Experiment 20001247 PARAMETER Experiment Name: At_Far-red-induction_P Parameter: Age (day) Value: 7
  misc_feature: MA Experiment 20001247 PARAMETER Experiment Name: At_Far-red-induction_P Parameter: Light Value: Far-red vs. White
  misc_feature: MA Experiment 20001247 PARAMETER Experiment Name: At_Far-red-induction_P Parameter: Organism Value: A. thaliana
  misc_feature: MA Experiment 20001247 PARAMETER Experiment Name: At_Far-red-induction_P Parameter: Plant Line Value: Columbia
  misc_feature: MA Experiment 20001247 PARAMETER Experiment Name: At_Far-red-induction_P Parameter: Timepoint (hr) Value: 1
  misc_feature: MA Experiment 20001247 PARAMETER Experiment Name: At_Far-red-induction_P Parameter: Tissue Value: Whole Plant
  misc_feature: MA Experiment ID: 20001248 Result: Down-regulated in Transcription
  misc_feature: MA Experiment 20001248 PARAMETER Experiment Name: At_Far-red-induction_P Parameter: Age (day) Value: 7
  misc_feature: MA Experiment 20001248 PARAMETER Experiment Name: At_Far-red-induction_P Parameter: Light Value: Far-red vs. White
  misc_feature: MA Experiment 20001248 PARAMETER Experiment Name: At_Far-red-induction_P Parameter: Organism Value: A. thaliana
  misc_feature: MA Experiment 20001248 PARAMETER Experiment Name: At_Far-red-induction_P Parameter: Plant Line Value: Columbia
  misc_feature: MA Experiment 20001248 PARAMETER Experiment Name: At_Far-red-induction_P Parameter: Timepoint (hr) Value: 4
  misc_feature: MA Experiment 20001248 PARAMETER Experiment Name: At_Far-red-induction_P Parameter: Tissue Value: Whole Plant
  misc_feature: MA Experiment ID: 20001557 Result: Down-regulated in Transcription
  misc_feature: MA Experiment 20001557 PARAMETER Experiment Name: At_Drought_Soil_Dry_P Parameter: Age (day) Value: 27
  misc_feature: MA Experiment 20001557 PARAMETER Experiment Name: At_Drought_Soil_Dry_P Parameter: Organism Value: A. thaliana
  misc_feature: MA Experiment 20001557 PARAMETER Experiment Name: At_Drought_Soil_Dry_P Parameter: Plant Line Value: WS
  misc_feature: MA Experiment 20001557 PARAMETER Experiment Name: At_Drought_Soil_Dry_P Parameter: Post Timepoint (hr) Value: 3
  misc_feature: MA Experiment 20001557 PARAMETER Experiment Name: At_Drought_Soil_Dry_P Parameter: Post-Treatment Value: Re-Water vs. No Drought
  misc_feature: MA Experiment 20001557 PARAMETER Experiment Name: At_Drought_Soil_Dry_P Parameter: Timepoint (day) Value: 13
  misc_feature: MA Experiment 20001557 PARAMETER Experiment Name: At_Drought_Soil_Dry_P Parameter: Treatment Value: Drought vs. No Drought
  misc_feature: MA Experiment ID: 20001560 Result: Down-regulated in Transcription
  misc_feature: MA Experiment 20001560 PARAMETER Experiment Name: At_Drought_Soil_Dry_P Parameter: Age (day) Value: 28
  misc_feature: MA Experiment 20001560 PARAMETER Experiment Name: At_Drought_Soil_Dry_P Parameter: Organism Value: A. thaliana
  misc_feature: MA Experiment 20001560 PARAMETER Experiment Name: At_Drought_Soil_Dry_P Parameter: Plant Line Value: WS
  misc_feature: MA Experiment 20001560 PARAMETER Experiment Name: At_Drought_Soil_Dry_P Parameter: Post Timepoint (hr) Value: None
  misc_feature: MA Experiment 20001560 PARAMETER Experiment Name: At_Drought_Soil_Dry_P Parameter: Post-Treatment Value: None
  misc_feature: MA Experiment 20001560 PARAMETER Experiment Name: At_Drought_Soil_Dry_P Parameter: Timepoint (day) Value: 14
  misc_feature: MA Experiment 20001560 PARAMETER Experiment Name: At_Drought_Soil_Dry_P Parameter: Treatment Value: Drought vs. No Drought
  misc_feature: MA Experiment ID: 20001905 Result: Down-regulated in Transcription
  misc_feature: MA Experiment 20001905 PARAMETER Experiment Name: At_Drought_Reproduction_P Parameter: Age (day) Value: 40
  misc_feature: MA Experiment 20001905 PARAMETER Experiment Name: At_Drought_Reproduction_P Parameter: Organism Value: A. thaliana
  misc_feature: MA Experiment 20001905 PARAMETER Experiment Name: At_Drought_Reproduction_P Parameter: Plant Line Value: WS
  misc_feature: MA Experiment 20001905 PARAMETER Experiment Name: At_Drought_Reproduction_P Parameter: Timepoint (day) Value: 10
  misc_feature: MA Experiment 20001905 PARAMETER Experiment Name: At_Drought_Reproduction_P Parameter: Tissue Value: Rosettes
  misc_feature: MA Experiment 20001905 PARAMETER Experiment Name: At_Drought_Reproduction_P Parameter: Treatment Value: Drought vs. No Drought
  misc_feature: MA Experiment ID: 20001911 Result: Up-regulated in Transcription
  misc_feature: MA Experiment 20001911 PARAMETER Experiment Name: At_Drought_Reproduction_P Parameter: Age (day) Value: 40
  misc_feature: MA Experiment 20001911 PARAMETER Experiment Name: At_Drought_Reproduction_P Parameter: Organism Value: A. thaliana
  misc_feature: MA Experiment 20001911 PARAMETER Experiment Name: At_Drought_Reproduction_P Parameter: Plant Line Value: WS
  misc_feature: MA Experiment 20001911 PARAMETER Experiment Name: At_Drought_Reproduction_P Parameter: Timepoint (day) Value: 10
  misc_feature: MA Experiment 20001911 PARAMETER Experiment Name: At_Drought_Reproduction_P Parameter: Tissue Value: Flowers
  misc_feature: MA Experiment 20001911 PARAMETER Experiment Name: At_Drought_Reproduction_P Parameter: Treatment Value: Drought vs. No Drought
aaaaacattactcccgaagaagcccaaattgacgacaggcgttagtggcgattggcgatggcagctcctgcggtggaggcaaccgtcgcaagtgctctccgctctgtgattcttagagctcgtaaggcggcggagcaagtaggaagagatgccgagcgggtcagggtccttccagtctccaagactaaacccgtctcacttatccgccaaatctacgacgcaggtcaccgttgcttcggcgagaattacgttcaagaaatcatcgataaagctccacagcttccggaagatatagagtggcatttcgtggggcatttacagagcaacaaagccaaaacgctattgactggagtcccaaatttggcaatggttcatggtgtggatggagaaaaggtagcaaatcatctagatcgagctgtttcaaatcttgggagacatccactaaaggttttggtccaagtgaacacaagcggagaagtttctaaatctggaatcgaaccttctagcgttgtagagctagcaagacatgtgaaacatcactgtccaaatctggtattctccggattaatgactattgggatgcctgattatacgtctaccccagagaacttcaggacactttcaaactgtagagctgatgtatgcaaggcacttggaatggctgaggatcaatttgaactgtccatgggcatgtctggtgacttcgagctagcgattgagatgggaagcaccaatgtgagggttggttccaccattttcggaccaagagagtaccccaagaaaacaacttagctactatgctcaaacacttgttgtaaaattcatgtataatgttattttgtcgattattttaaacaattttattcttcattgataaacttaggtgtattcacaaagttactttatagaaaattagaaatcaatacattgttaagggc

SEQ ID NO: 87311 - protein, 244 aa, Arabidopsis thaliana
  peptide (1)..(244): Ceres Seq. ID no. 12699908
  misc_feature (9)..(239): Pfam Name: Alanine racemase, N-terminal domain Pfam Description: Alanine racemase, N-terminal domain
  misc_feature (1)..(244): Homolog of NCBI NO: 18416879 NR Description: putative Proline synthetase associated protein; id: At4g26860.1, supported by cDNA: 11679., supported by cDNA:
  misc_feature (1)..(244): Homolog of NCBI NO: 14030629 NR Description: AT4g26860/F10M23_200 [Arabidopsis thaliana] AT4g26860/F10M23_200 [Arabidopsis thaliana] putative proline synthetase associated protein [Arabidopsis
  misc_feature (1)..(186): Homolog of NCBI NO: 7445224 NR Description: hypothetical protein F10M23.200 - Arabidopsis >gi|4455209|emb|CAB36532.1| putative Proline synthetase protein [Arabidopsis thaliana] >gi|7269539|emb|CAB79541.1|
  misc_feature (192)..(244): Homolog of NCBI NO: 7445224 NR Description: hypothetical protein F10M23.200 - Arabidopsis >gi|4455209|emb|CAB36532.1| putative Proline synthetase protein [Arabidopsis thaliana] >gi|7269539|emb|CAB79541.1|
  misc_feature (1)..(242): Homolog of NCBI NO: 30682530 NR Description: Proline synthetase associated protein -related
  misc_feature (1)..(242): Homolog of NCBI NO: 18391333 NR Description: putative Proline synthetase associated protein; id: At1g11930.1, supported by cDNA: gi_16226281 [Arabidopsis >gi|16226282|gb|AAL16123.1|AF428291_1 At1g11930/F12F1_20
  misc_feature (16)..(242): Homolog of NCBI NO: 11359716 NR Description: conserved hypothetical protein [imported] - major >gi|6066445|emb|CAB58387.1| possible proline synthetase
  misc_feature (1)..(244): Homolog of NCBI NO: 6005842 NR Description: proline synthetase co-transcribed homolog; proline
  misc_feature (7)..(242): Homolog of NCBI NO: 16930823 NR Description: proline synthetase co-transcribed [Mus musculus]
  misc_feature (96)..(220): Homolog of NCBI NO: 19386824 NR Description: B1147A04.19 [Oryza sativa (japonica
MAAPAVEATVASALRSVILRARKAAEQVGRDAERVRVLPVSKTKPVSLIRQIYDAGHRCFGENYVQEIIDKAPQLPEDIEWHFVGHLQSNKAKTLLTGVPNLAMVHGVDGEKVANHLDRAVSNLGRHPLKVLVQVNTSGEVSKSGIEPSSVVELARHVKHHCPNLVFSGLMTIGMPDYTSTPENFRTLSNCRADVCKALGMAEDQFELSMGMSGDFELAIEMGSTNVRVGSTIFGPREYPKKTT

SEQ ID NO: 87312 - protein, 141 aa, Arabidopsis thaliana; identical to SEQ ID NO: 28737
  peptide (1)..(141): Ceres Seq. ID no. 12699909
  misc_feature (1)..(136): Pfam Name: Alanine racemase, N-terminal domain Pfam Description: Alanine racemase, N-terminal domain
  misc_feature (1)..(141): Homolog of NCBI NO: 18416879 NR Description: putative Proline synthetase associated protein; id: At4g26860.1, supported by cDNA: 11679., supported by cDNA:
  misc_feature (1)..(141): Homolog of NCBI NO: 14030629 NR Description: AT4g26860/F10M23_200 [Arabidopsis thaliana] AT4g26860/F10M23_200 [Arabidopsis thaliana] putative proline synthetase associated protein [Arabidopsis
  misc_feature (1)..(83): Homolog of NCBI NO: 7445224 NR Description: hypothetical protein F10M23.200 - Arabidopsis >gi|4455209|emb|CAB36532.1| putative Proline synthetase protein [Arabidopsis thaliana] >gi|7269539|emb|CAB79541.1|
  misc_feature (89)..(141): Homolog of NCBI NO: 7445224 NR Description: hypothetical protein F10M23.200 - Arabidopsis >gi|4455209|emb|CAB36532.1| putative Proline synthetase protein [Arabidopsis thaliana] >gi|7269539|emb|CAB79541.1|
  misc_feature (1)..(139): Homolog of NCBI NO: 30682530 NR Description: Proline synthetase associated protein -related
  misc_feature (1)..(139): Homolog of NCBI NO: 18391333 NR Description: putative Proline synthetase associated protein; id: At1g11930.1, supported by cDNA: gi_16226281 [Arabidopsis >gi|16226282|gb|AAL16123.1|AF428291_1 At1g11930/F12F1_20
  misc_feature (1)..(139): Homolog of NCBI NO: 11359716 NR Description: conserved hypothetical protein [imported] - major >gi|6066445|emb|CAB58387.1| possible proline synthetase
  misc_feature (1)..(141): Homolog of NCBI NO: 6005842 NR Description: proline synthetase co-transcribed homolog; proline
  misc_feature (1)..(139): Homolog of NCBI NO: 16930823 NR Description: proline synthetase co-transcribed [Mus musculus]
  misc_feature (1)..(117): Homolog of NCBI NO: 19386824 NR Description: B1147A04.19 [Oryza sativa (japonica

SEQ ID NO: 87313 - DNA, 1254 bp, Arabidopsis thaliana
  misc_feature (1)..(1254): Ceres Seq. ID no. 12699925
  misc_feature: MA Experiment ID: 20000794 Result: Up-regulated in Transcription
  misc_feature: MA Experiment 20000794 PARAMETER Experiment Name: At_Petals_P Parameter: Age (day) Value: 23-25 days
  misc_feature: MA Experiment 20000794 PARAMETER Experiment Name: At_Petals_P Parameter: Plant Line Value: WS
  misc_feature: MA Experiment 20000794 PARAMETER Experiment Name: At_Petals_P Parameter: Tissue Value: Petals vs. Whole plant
atggaagaaaagctgccaaaatcgctcaagaatctcgatttgaatacgaatcgtggtcgtggaccagagaataagattcttgtttcagcttatgtatcttcgtcacgtaagcctcgctttcgacaatctttcttttctcgagctcggttaaaattgggttctgagaatggattactgaatttgggtctaagcatggctggtggaatgtctccactgaaatcaaaacctccatctcttgtgagctcatgtcttggtgttattgggaagcatttggaggatatgattcgttgtttagctgaaatctctgttatatttcctgcagacatcaagtgttttcttctttcaagctgtttagtactatatccatttgctaatcaaaggcatactcatgtgcaacagatgtcgattgcagcaattgctagaagaaaaaagctgctggatgatgatgtgattatctgtttggctgacagttcctgggaaattctagatgttagcggttcagatgttacgaattttggcttagctaaagtggcagaaatctgcaaatctctccgagctgtggacattagctctggtcttgctggttctttagtttggggcttctgtatgttggataagtggtgctcccggtgcaacaaaatctcatccatgggcgtcttagagcttgtacaacactgcagatcattggagactcttagatgcgggggatgcccaagcagtgagtccacggcacgcagatctttgagtatttttaagccaaacttgagtaatgttgaaggagaaacatgggaagaaatagacacttcagagattggccatggtggtcaatcattgcgttggcttgtttggccacgaattgataaggattcactggagatgttatcctcggagtgtccaagaatagtggtaaatcccaagccatcacttgtcgcgtacagagcagacgaggttcctcgagaagcactaccagatgttgcactggacgaaccatttgtcaaagatattgatcctaagacgtgggttgttactggagttgtgcagaagcccacatctttcccgttaagcaatgaactgtcaatagcagagaagttcagactagcatttgcagagagagatgcaagaatggcccctaaacgtgcaaagaatgcaaggcaacgtcaacgtcgtgctgagagggattggatgatgtcaagcgacgaagccaaagcaatggtttttgcatcaaaggctaccagatctttgcacaagagttaa

SEQ ID NO: 87314 - protein, 417 aa, Arabidopsis thaliana
  peptide (1)..(417): Ceres Seq. ID no. 12699926
  misc_feature (1)..(417): Homolog of NCBI NO: 7485340 NR Description: hypothetical protein F10M23.320 - Arabidopsis >gi|4455221|emb|CAB36544.1| putative protein [Arabidopsis >gi|7269551|emb|CAB79553.1| putative protein [Arabidopsis
  misc_feature (209)..(417): Homolog of NCBI NO: 30687441 NR Description: expressed protein [Arabidopsis thaliana]
  misc_feature (58)..(190): Homolog of NCBI NO: 30687441 NR Description: expressed protein [Arabidopsis thaliana]
  misc_feature (53)..(110): Homolog of NCBI NO: 30687441 NR Description: expressed protein [Arabidopsis thaliana]
MEEKLPKSLKNLDLNTNRGRGPENKILVSAYVSSSRKPRFRQSFFSRARLKLGSENGLLNLGLSMAGGMSPLKSKPPSLVSSCLGVIGKHLEDMIRCLAEISVIFPADIKCFLLSSCLVLYPFANQRHTHVQQMSIAAIARRKKLLDDDVIICLADSSWEILDVSGSDVTNFGLAKVAEICKSLRAVDISSGLAGSLVWGFCMLDKWCSRCNKISSMGVLELVQHCRSLETLRCGGCPSSESTARRSLSIFKPNLSNVEGETWEEIDTSEIGHGGQSLRWLVWPRIDKDSLEMLSSECPRIVVNPKPSLVAYRADEVPREALPDVALDEPFVKDIDPKTWVVTGVVQKPTSFPLSNELSIAEKFRLAFAERDARMAPKRAKNARQRQRRAERDWMMSSDEAKAMVFASKATRSLHKS

SEQ ID NO: 87315 - protein, 353 aa, Arabidopsis thaliana
  peptide (1)..(353): Ceres Seq. ID no. 12699927
  misc_feature (1)..(353): Homolog of NCBI NO: 7485340 NR Description: hypothetical protein F10M23.320 - Arabidopsis >gi|4455221|emb|CAB36544.1| putative protein [Arabidopsis >gi|7269551|emb|CAB79553.1| putative protein [Arabidopsis
  misc_feature (145)..(353): Homolog of NCBI NO: 30687441 NR Description: expressed protein [Arabidopsis thaliana]
  misc_feature (1)..(126): Homolog of NCBI NO: 30687441 NR Description: expressed protein [Arabidopsis thaliana]
  misc_feature (1)..(46): Homolog of NCBI NO: 30687441 NR Description: expressed protein [Arabidopsis thaliana]
MAGGMSPLKSKPPSLVSSCLGVIGKHLEDMIRCLAEISVIFPADIKCFLLSSCLVLYPFANQRHTHVQQMSIAAIARRKKLLDDDVIICLADSSWEILDVSGSDVTNFGLAKVAEICKSLRAVDISSGLAGSLVWGFCMLDKWCSRCNKISSMGVLELVQHCRSLETLRCGGCPSSESTARRSLSIFKPNLSNVEGETWEEIDTSEIGHGGQSLRWLVWPRIDKDSLEMLSSECPRIVVNPKPSLVAYRADEVPREALPDVALDEPFVKDIDPKTWVVTGVVQKPTSFPLSNELSIAEKFRLAFAERDARMAPKRAKNARQRQRRAERDWMMSSDEAKAMVFASKATRSLHKS

SEQ ID NO: 87316 - protein, 349 aa, Arabidopsis thaliana
  peptide (1)..(349): Ceres Seq. ID no. 12699928
  misc_feature (1)..(349): Homolog of NCBI NO: 7485340 NR Description: hypothetical protein F10M23.320 - Arabidopsis >gi|4455221|emb|CAB36544.1| putative protein [Arabidopsis >gi|7269551|emb|CAB79553.1| putative protein [Arabidopsis
  misc_feature (141)..(349): Homolog of NCBI NO: 30687441 NR Description: expressed protein [Arabidopsis thaliana]
  misc_feature (1)..(122): Homolog of NCBI NO: 30687441 NR Description: expressed protein [Arabidopsis thaliana]
  misc_feature (1)..(42): Homolog of NCBI NO: 30687441 NR Description: expressed protein [Arabidopsis thaliana]
MSPLKSKPPSLVSSCLGVIGKHLEDMIRCLAEISVIFPADIKCFLLSSCLVLYPFANQRHTHVQQMSIAAIARRKKLLDDDVIICLADSSWEILDVSGSDVTNFGLAKVAEICKSLRAVDISSGLAGSLVWGFCMLDKWCSRCNKISSMGVLELVQHCRSLETLRCGGCPSSESTARRSLSIFKPNLSNVEGETWEEIDTSEIGHGGQSLRWLVWPRIDKDSLEMLSSECPRIVVNPKPSLVAYRADEVPREALPDVALDEPFVKDIDPKTWVVTGVVQKPTSFPLSNELSIAEKFRLAFAERDARMAPKRAKNARQRQRRAERDWMMSSDEAKAMVFASKATRSLHKS

SEQ ID NO: 87317 - DNA, 1455 bp, Arabidopsis thaliana
  misc_feature (1)..(1455): Ceres Seq. ID no. 12700026
  misc_feature: MA Experiment ID: 20000171 Result: Down-regulated in Transcription
  misc_feature: MA Experiment 20000171 PARAMETER Experiment Name: At_42deg_Heat_P Parameter: Age (day) Value: 14
  misc_feature: MA Experiment 20000171 PARAMETER Experiment Name: At_42deg_Heat_P Parameter: Organism Value: A. thaliana
  misc_feature: MA Experiment 20000171 PARAMETER Experiment Name: At_42deg_Heat_P Parameter: Plant Line Value: WS
  misc_feature: MA Experiment 20000171 PARAMETER Experiment Name: At_42deg_Heat_P Parameter: Temperature (deg C) Value: 42 vs. 22
  misc_feature: MA Experiment 20000171 PARAMETER Experiment Name: At_42deg_Heat_P Parameter: Timepoint (hr) Value: 1
  misc_feature: MA Experiment 20000171 PARAMETER Experiment Name: At_42deg_Heat_P Parameter: Tissue Value: Aerial
  misc_feature: MA Experiment ID: 20000182 Result: Up-regulated in Transcription
  misc_feature: MA Experiment 20000182 PARAMETER Experiment Name: At_2mM_SA_P Parameter: Age (day) Value: 14
  misc_feature: MA Experiment 20000182 PARAMETER Experiment Name: At_2mM_SA_P Parameter: Organism Value: A. thaliana
  misc_feature: MA Experiment 20000182 PARAMETER Experiment Name: At_2mM_SA_P Parameter: Plant Line Value: WS
  misc_feature: MA Experiment 20000182 PARAMETER Experiment Name: At_2mM_SA_P Parameter: Timepoint (hr) Value: 6
  misc_feature: MA Experiment 20000182 PARAMETER Experiment Name: At_2mM_SA_P Parameter: Tissue Value: Aerial
  misc_feature: MA Experiment 20000182 PARAMETER Experiment Name: At_2mM_SA_P Parameter: Treatment Value: 2mM SA vs. No Treatment
  misc_feature: MA Experiment ID: 20000265 Result: Down-regulated in Transcription
  misc_feature: MA Experiment 20000265 PARAMETER Experiment Name: At_Open_Flower_P Parameter: Age (day) Value: 21
  misc_feature: MA Experiment 20000265 PARAMETER Experiment Name: At_Open_Flower_P Parameter: Plant Line Value: WS
  misc_feature: MA Experiment 20000265 PARAMETER Experiment Name: At_Open_Flower_P Parameter: Tissue Value: Closed Flower vs. Whole Plant
  misc_feature: MA Experiment ID: 20000460 Result: Down-regulated in Transcription
  misc_feature: MA Experiment 20000460 PARAMETER Experiment Name: At_10percent_PEG_P Parameter: Age (day) Value: 12
  misc_feature: MA Experiment 20000460 PARAMETER Experiment Name: At_10percent_PEG_P Parameter: Organism Value: A. thaliana
  misc_feature: MA Experiment 20000460 PARAMETER Experiment Name: At_10percent_PEG_P Parameter: Plant Line Value: WS
  misc_feature: MA Experiment 20000460 PARAMETER Experiment Name: At_10percent_PEG_P Parameter: Timepoint (day) Value: 12
  misc_feature: MA Experiment 20000460 PARAMETER Experiment Name: At_10percent_PEG_P Parameter: Tissue Value: Whole Plant
  misc_feature: MA Experiment 20000460 PARAMETER Experiment Name: At_10percent_PEG_P Parameter: Treatment Value: 10percent PEG vs. No Treatment
  misc_feature: MA Experiment ID: 20000527 Result: Down-regulated in Transcription
  misc_feature: MA Experiment 20000527 PARAMETER Experiment Name: At_10percent_PEG_P Parameter: Age (day) Value: 20
  misc_feature: MA Experiment 20000527 PARAMETER Experiment Name: At_10percent_PEG_P Parameter: Organism Value: A. thaliana
  misc_feature: MA Experiment 20000527 PARAMETER Experiment Name: At_10percent_PEG_P Parameter: Plant Line Value: WS
  misc_feature: MA Experiment 20000527 PARAMETER Experiment Name: At_10percent_PEG_P Parameter: Timepoint (day) Value: 20
  misc_feature: MA Experiment 20000527 PARAMETER Experiment Name: At_10percent_PEG_P Parameter: Tissue Value: Whole Plant
  misc_feature: MA Experiment 20000527 PARAMETER Experiment Name: At_10percent_PEG_P Parameter: Treatment Value: 10percent PEG vs. No Treatment
  misc_feature: MA Experiment ID: 20001554 Result: Down-regulated in Transcription
  misc_feature: MA Experiment 20001554 PARAMETER Experiment Name: At_Drought_Soil_Dry_P Parameter: Age (day) Value: 21
  misc_feature: MA Experiment 20001554 PARAMETER Experiment Name: At_Drought_Soil_Dry_P Parameter: Organism Value: A. thaliana
  misc_feature: MA Experiment 20001554 PARAMETER Experiment Name: At_Drought_Soil_Dry_P Parameter: Plant Line Value: WS
  misc_feature: MA Experiment 20001554 PARAMETER Experiment Name: At_Drought_Soil_Dry_P Parameter: Post Timepoint (hr) Value: None
  misc_feature: MA Experiment 20001554 PARAMETER Experiment Name: At_Drought_Soil_Dry_P Parameter: Post-Treatment Value: None
  misc_feature: MA Experiment 20001554 PARAMETER Experiment Name: At_Drought_Soil_Dry_P Parameter: Timepoint (day) Value: 7
  misc_feature: MA Experiment 20001554 PARAMETER Experiment Name: At_Drought_Soil_Dry_P Parameter: Treatment Value: Drought vs. No Drought
  misc_feature: MA Experiment ID: 20001557 Result: Down-regulated in Transcription
  misc_feature: MA Experiment 20001557 PARAMETER Experiment Name: At_Drought_Soil_Dry_P Parameter: Age (day) Value: 27
  misc_feature: MA Experiment 20001557 PARAMETER Experiment Name: At_Drought_Soil_Dry_P Parameter: Organism Value: A. thaliana
  misc_feature: MA Experiment 20001557 PARAMETER Experiment Name: At_Drought_Soil_Dry_P Parameter: Plant Line Value: WS
  misc_feature: MA Experiment 20001557 PARAMETER Experiment Name: At_Drought_Soil_Dry_P Parameter: Post Timepoint (hr) Value: 3
  misc_feature: MA Experiment 20001557 PARAMETER Experiment Name: At_Drought_Soil_Dry_P Parameter: Post-Treatment Value: Re-Water vs. No Drought
  misc_feature: MA Experiment 20001557 PARAMETER Experiment Name: At_Drought_Soil_Dry_P Parameter: Timepoint (day) Value: 13
  misc_feature: MA Experiment 20001557 PARAMETER Experiment Name: At_Drought_Soil_Dry_P Parameter: Treatment Value: Drought vs. No Drought
  misc_feature: MA Experiment ID: 20001904 Result: Down-regulated in Transcription
  misc_feature: MA Experiment 20001904 PARAMETER Experiment Name: At_Drought_Reproduction_P Parameter: Age (day) Value: 37
  misc_feature: MA Experiment 20001904 PARAMETER Experiment Name: At_Drought_Reproduction_P Parameter: Organism Value: A. thaliana
  misc_feature: MA Experiment 20001904 PARAMETER Experiment Name: At_Drought_Reproduction_P Parameter: Plant Line Value: WS
  misc_feature: MA Experiment 20001904 PARAMETER Experiment Name: At_Drought_Reproduction_P Parameter: Timepoint (day) Value: 7
  misc_feature: MA Experiment 20001904 PARAMETER Experiment Name: At_Drought_Reproduction_P Parameter: Tissue Value: Rosettes
  misc_feature: MA Experiment 20001904 PARAMETER Experiment Name: At_Drought_Reproduction_P Parameter: Treatment Value: Drought vs. No Drought
atgggttgctacagcagtaagaacctaaaacaatcaaaaagaaccattcttgagaaaccattcgttgacatcggaaaggtttacatcctcggggatgaattgggtcaaggccaattcggtataactcgaaaatgcgttgagaagacttcaggtaagacttacgcctgcaagaccattctcaagacgaatctaaagagtagagaagatgaagaagccgtgaagagagagattcgtatcatgaagcatttgtctggagaaccgaacattgttgagttcaagaaagcttacgaggacagagattctgtacatattgttatggaatattgtggtggtggagagttattcaaaaagatcgaagctttgtccaaagatggaaagtcttactccgagaaagaagctgttgaaatcattaggccgattgtgaatgttgtcaagaattgtcattacatgggtgtgatgcttcgtgatctaaagcctgagaatttcttgctctccagtaccgataagaatgctacggtcaaagctatcgacttcgggtgttctgttttcattgaagaaggagaagtacaccggaaattcgctgggagtgcttactacattgctcctgaagtgttacagggaaaatacggtaaagaagcggacatttggagtgcagggattatattgtacatcctactctgcggcaaacctccctttgtgacagaacctgaggcacagatgttctctgagataaagagtgccaaaatcgacgttgacagcgaatcatggaagtttatagatgtgaaggcaaaacatcttgtcaataggatgcttaacagaaaccccaaggaacgaatctctgctgcagaggttcttggacatccttggatgaaagacggagaagcttcagataagcctattgatggcgttgttttatctcgattgaagcaatttcgagatatgaacaagctaaagaaagtagctctaaaggttattgcagcaaatctatcggaagaggaaatcaaaggtcttaaaacactgttcaccaacattgataccgacaaaagtggcacaatcactcttgaagaactcaaaacaggtcttactagacttggatctaacctctctaaaaccgaagtggagcaactcatggaagctgctgatgtggatggtaatggaacaatcgacatagacgagtttatctctgccacgatgcatagatatagattggatagagatgatcatgtgtaccaagcattccaacactttgacaaagacaatgacgggcacataaccaaggaagagttggagatggcaatgaaagagcatggtgtgggagatgaagttagcatcaaacaaatcataaccgaagttgataccgataatgatgggaaaataaactttgaggaattccgcacaatgatgagaagtggcagcagcttgcagccacaaagggagcttcttccgatcaagtga

SEQ ID NO: 87318 - protein, 484 aa, Arabidopsis thaliana
  peptide (1)..(484): Ceres Seq. ID no. 12700027
  misc_feature (28)..(290): Pfam Name: Protein kinase domain Pfam Description: Protein kinase domain
  misc_feature (285)..(484): Homolog of NCBI NO: 22328350 NR Description: similar to calcium-dependent protein kinase -
  misc_feature (1)..(186): Homolog of NCBI NO: 22328350 NR Description: similar to calcium-dependent protein kinase -
  misc_feature (1)..(455): Homolog of NCBI NO: 5706728 NR Description: contains similarity to eukaryotic protein kinase
  misc_feature (15)..(482): Homolog of NCBI NO: 15234435 NR Description: putative calcium dependent protein kinase; id: At4g04720.1, supported by cDNA: gi_15292914 [Arabidopsis >gi|25287682|pir||D85059 probable calcium dependent protein
  misc_feature (15)..(482): Homolog of NCBI NO: 15292915 NR Description: putative calcium dependent protein kinase
  misc_feature (15)..(484): Homolog of NCBI NO: 15234656 NR Description: calcium-dependent protein kinase - like protein; id: At4g21940.1, supported by cDNA: gi_17104578 [Arabidopsis
  misc_feature (16)..(480): Homolog of NCBI NO: 19171502 NR Description: calcium-dependent protein kinase [Lycopersicon
  misc_feature (16)..(477): Homolog of NCBI NO: 7428009 NR Description: calcium-dependent protein kinase (EC 2.7.1.-) 1 -
  misc_feature (10)..(478): Homolog of NCBI NO: 23616997 NR Description: CDP2_ORYSA Calcium-dependent protein kinase
  misc_feature (9)..(475): Homolog of NCBI NO: 13561063 NR Description: protein kinase [Medicago sativa]
MGCYSSKNLKQSKRTILEKPFVDIGKVYILGDELGQGQFGITRKCVEKTSGKTYACKTILKTNLKSREDEEAVKREIRIMKHLSGEPNIVEFKKAYEDRDSVHIVMEYCGGGELFKKIEALSKDGKSYSEKEAVEIIRPIVNVVKNCHYMGVMLRDLKPENFLLSSTDKNATVKAIDFGCSVFIEEGEVHRKFAGSAYYIAPEVLQGKYGKEADIWSAGIILYILLCGKPPFVTEPEAQMFSEIKSAKIDVDSESWKFIDVKAKHLVNRMLNRNPKERISAAEVLGHPWMKDGEASDKPIDGVVLSRLKQFRDMNKLKKVALKVIAANLSEEEIKGLKTLFTNIDTDKSGTITLEELKTGLTRLGSNLSKTEVEQLMEAADVDGNGTIDIDEFISATMHRYRLDRDDHVYQAFQHFDKDNDGHITKEELEMAMKEHGVGDEVSIKQIITEVDTDNDGKINFEEFRTMMRSGSSLQPQRELLPIK

SEQ ID NO: 87319 - protein, 405 aa, Arabidopsis thaliana
  peptide (1)..(405): Ceres Seq. ID no. 12700028
  misc_feature (1)..(211): Pfam Name: Protein kinase domain Pfam Description: Protein kinase domain
  misc_feature (206)..(405): Homolog of NCBI NO: 22328350 NR Description: similar to calcium-dependent protein kinase -
  misc_feature (1)..(107): Homolog of NCBI NO: 22328350 NR Description: similar to calcium-dependent protein kinase -
  misc_feature (1)..(376): Homolog of NCBI NO: 5706728 NR Description: contains similarity to eukaryotic protein kinase
  misc_feature (1)..(403): Homolog of NCBI NO: 15234435 NR Description: putative calcium dependent protein kinase; id: At4g04720.1, supported by cDNA: gi_15292914 [Arabidopsis >gi|25287682|pir||D85059 probable calcium dependent protein
  misc_feature (1)..(403): Homolog of NCBI NO: 15292915 NR Description: putative calcium dependent protein kinase
  misc_feature (1)..(405): Homolog of NCBI NO: 15234656 NR Description: calcium-dependent protein kinase - like protein; id: At4g21940.1, supported by cDNA: gi_17104578 [Arabidopsis
  misc_feature (1)..(401): Homolog of NCBI NO: 19171502 NR Description: calcium-dependent protein kinase [Lycopersicon
  misc_feature (1)..(398): Homolog of NCBI NO: 7428009 NR Description: calcium-dependent protein kinase (EC 2.7.1.-) 1 -
  misc_feature (1)..(399): Homolog of NCBI NO: 23616997 NR Description: CDP2_ORYSA Calcium-dependent protein kinase
  misc_feature (1)..(396): Homolog of NCBI NO: 13561063 NR Description: protein kinase [Medicago sativa]
MKHLSGEPNIVEFKKAYEDRDSVHIVMEYCGGGELFKKIEALSKDGKSYSEKEAVEIIRPIVNVVKNCHYMGVMLRDLKPENFLLSSTDKNATVKAIDFGCSVFIEEGEVHRKFAGSAYYIAPEVLQGKYGKEADIWSAGIILYILLCGKPPFVTEPEAQMFSEIKSAKIDVDSESWKFIDVKAKHLVNRMLNRNPKERISAAEVLGHPWMKDGEASDKPIDGVVLSRLKQFRDMNKLKKVALKVIAANLSEEEIKGLKTLFTNIDTDKSGTITLEELKTGLTRLGSNLSKTEVEQLMEAADVDGNGTIDIDEFISATMHRYRLDRDDHVYQAFQHFDKDNDGHITKEELEMAMKEHGVGDEVSIKQIITEVDTDNDGKINFEEFRTMMRSGSSLQPQRELLPIK

SEQ ID NO: 87320 - protein, 379 aa, Arabidopsis thaliana
  peptide (1)..(379): Ceres Seq. ID no. 12700029
  misc_feature (1)..(185): Pfam Name: Protein kinase domain Pfam Description: Protein kinase domain
  misc_feature (180)..(379): Homolog of NCBI NO: 22328350 NR Description: similar to calcium-dependent protein kinase -
  misc_feature (1)..(81): Homolog of NCBI NO: 22328350 NR Description: similar to calcium-dependent protein kinase -
  misc_feature (1)..(350): Homolog of NCBI NO: 5706728 NR Description: contains similarity to eukaryotic protein kinase
  misc_feature (1)..(377): Homolog of NCBI NO: 15234435 NR Description: putative calcium dependent protein kinase; id: At4g04720.1, supported by cDNA: gi_15292914 [Arabidopsis >gi|25287682|pir||D85059 probable calcium dependent protein
  misc_feature (1)..(377): Homolog of NCBI NO: 15292915 NR Description: putative calcium dependent protein kinase
  misc_feature (1)..(379): Homolog of NCBI NO: 15234656 NR Description: calcium-dependent protein kinase - like protein; id: At4g21940.1, supported by cDNA: gi_17104578 [Arabidopsis
  misc_feature (1)..(375): Homolog of NCBI NO: 19171502 NR Description: calcium-dependent protein kinase [Lycopersicon
  misc_feature (1)..(372): Homolog of NCBI NO: 7428009 NR Description: calcium-dependent protein kinase (EC 2.7.1.-) 1 -
  misc_feature (1)..(373): Homolog of NCBI NO: 23616997 NR Description: CDP2_ORYSA Calcium-dependent protein kinase
  misc_feature (1)..(370): Homolog of NCBI NO: 13561063 NR Description: protein kinase [Medicago sativa]
MEYCGGGELFKKIEALSKDGKSYSEKEAVEIIRPIVNVVKNCHYMGVMLRDLKPENFLLSSTDKNATVKAIDFGCSVFIEEGEVHRKFAGSAYYIAPEVLQGKYGKEADIWSAGIILYILLCGKPPFVTEPEAQMFSEIKSAKIDVDSESWKFIDVKAKHLVNRMLNRNPKERISAAEVLGHPWMKDGEASDKPIDGVVLSRLKQFRDMNKLKKVALKVIAANLSEEEIKGLKTLFTNIDTDKSGTITLEELKTGLTRLGSNLSKTEVEQLMEAADVDGNGTIDIDEFISATMHRYRLDRDDHVYQAFQHFDKDNDGHITKEELEMAMKEHGVGDEVSIKQIITEVDTDNDGKINFEEFRTMMRSGSSLQPQRELLPIK

SEQ ID NO: 87321 - DNA, 1458 bp, Arabidopsis thaliana
  misc_feature (1)..(1458): Ceres Seq. ID no. 12700030
  misc_feature: MA Experiment ID: 20000179 Result: Up-regulated in Transcription
  misc_feature: MA Experiment 20000179 PARAMETER Experiment Name: At_Germinating_Seeds_P Parameter: Age (hr) Value: 6 vs. 0
  misc_feature: MA Experiment 20000179 PARAMETER Experiment Name: At_Germinating_Seeds_P Parameter: Tissue Value: Germinating Seeds
atgggttgcttcagcagtaaggagctacaacaatcgaaaagaaccattcttgagaaacctttagttgacatcacaaagatttatatcctcggggaggaattgggtagaggtaatttcggtctaacccgaaagtgcgttgagaaatctacaggtaagacattcgcctgcaaaaccattctcaagacaaagctaaaggacgaagaatgtgaagaagacgtgaagagagagattcggattatgaagcaattgtctggagaaccaaacattgtcgagttcaagaatgcttacgaggacaaagattctgtacatattgttatggaatattgtggtggtggagagttatacgacaagatcctagctttgtacgatgttgggaagtcttactcggagaaagaagctgctggaatcattaggtcgattgtgaatgttgtgaagaattgccattacatgggtgtgatgcatcgtgatctaaagcctgagaatttcttgcttacgagtaacgatgacaatgctacggtcaaagttattgactttgggtgttctgtgttcattgaagaaggaaaagtataccaggatttagctgggagtgattactacattgctcctgaagtgttacagggaaattacggtaaagaagcggacatttggagtgcagggattatattatacatcctactctgtggcaaatctccctttgtgaaagaacctgagggacagatgttcaatgagattaagagtttggaaatcgactacagcgaggaaccatggcctcttagagattcaagggcaatacatcttgtcaagaggatgcttgatagaaaccccaaggaacgaatctctgctgcagaggttcttggacatccttggatgaaagaaggagaagcttcggataagcctattgatggcgttgttttatcccgtttgaagagatttcgagatgcgaacaagtttaagaaggtagttctaaagtttattgcagcaaatctatcagaagaggaaatcaaaggtcttaagacactgttcaccaacatagatactgacaaaagtggaaatattactcttgaagaactcaaaacaggtcttactagacttggatctaacctctctaaaaccgaagtggagcaactcatggaagctgctgatatggatggtaatggaacaatcgacatagacgagtttatttctgcaacgatgcatagatacaaattggatagagatgaacatgtgtacaaagcattccaacactttgacaaagacaacgacgggcacataacgaaggaagagttggagatggcgatgaaggaggatggtgcgggagatgaaggtagcatcaaacaaatcatagccgatgctgataccgataatgatggaaaaataaactttgaggaattccgcacaatgatgagaactgagagcagcttgcagccagaaggggaacttcttccgatcatcaattga

SEQ ID NO: 87322 - protein, 485 aa, Arabidopsis thaliana
  peptide (1)..(485): Ceres Seq. ID no. 12700031
  misc_feature (28)..(290): Pfam Name: Protein kinase domain Pfam Description: Protein kinase domain
  misc_feature (1)..(455): Homolog of NCBI NO: 5706728 NR Description: contains similarity to eukaryotic protein kinase
  misc_feature (285)..(483): Homolog of NCBI NO: 22328350 NR Description: similar to calcium-dependent protein kinase -
  misc_feature (1)..(186): Homolog of NCBI NO: 22328350 NR Description: similar to calcium-dependent protein kinase -
  misc_feature (15)..(482): Homolog of NCBI NO: 15234435 NR Description: putative calcium dependent protein kinase; id: At4g04720.1, supported by cDNA: gi_15292914 [Arabidopsis >gi|25287682|pir||D85059 probable calcium dependent protein
  misc_feature (15)..(482): Homolog of NCBI NO: 15292915 NR Description: putative calcium dependent protein kinase
  misc_feature (15)..(483): Homolog of NCBI NO: 15234656 NR Description: calcium-dependent protein kinase - like protein; id: At4g21940.1, supported by cDNA: gi_17104578 [Arabidopsis
  misc_feature (16)..(480): Homolog of NCBI NO: 19171502 NR Description: calcium-dependent protein kinase [Lycopersicon
  misc_feature (16)..(477): Homolog of NCBI NO: 7428009 NR Description: calcium-dependent protein kinase (EC 2.7.1.-) 1 -
  misc_feature (15)..(482): Homolog of NCBI NO: 15234441 NR Description: putative calcium dependent protein kinase; id: At4g04740.1, supported by cDNA: gi_16648906, supported by gi_20148456 [Arabidopsis thaliana] >gi|25287683|pir||F85059
  misc_feature (1)..(286): Homolog of NCBI NO: 15234430 NR Description: putative calcium dependent protein kinase; id: At4g04700.1 [Arabidopsis thaliana]
MGCFSSKELQQSKRTILEKPLVDITKIYILGEELGRGNFGLTRKCVEKSTGKTFACKTILKTKLKDEECEEDVKREIRIMKQLSGEPNIVEFKNAYEDKDSVHIVMEYCGGGELYDKILALYDVGKSYSEKEAAGIIRSIVNVVKNCHYMGVMHRDLKPENFLLTSNDDNATVKVIDFGCSVFIEEGKVYQDLAGSDYYIAPEVLQGNYGKEADIWSAGIILYILLCGKSPFVKEPEGQMFNEIKSLEIDYSEEPWPLRDSRAIHLVKRMLDRNPKERISAAEVLGHPWMKEGEASDKPIDGVVLSRLKRFRDANKFKKVVLKFIAANLSEEEIKGLKTLFTNIDTDKSGNITLEELKTGLTRLGSNLSKTEVEQLMEAADMDGNGTIDIDEFISATMHRYKLDRDEHVYKAFQHFDKDNDGHITKEELEMAMKEDGAGDEGSIKQIIADADTDNDGKINFEEFRTMMRTESSLQPEGELLPIIN

SEQ ID NO: 87323 - protein, 406 aa, Arabidopsis thaliana
  peptide (1)..(406): Ceres Seq. ID no. 12700032
  misc_feature (1)..(211): Pfam Name: Protein kinase domain Pfam Description: Protein kinase domain
  misc_feature (1)..(376): Homolog of NCBI NO: 5706728 NR Description: contains similarity to eukaryotic protein kinase
  misc_feature (206)..(404): Homolog of NCBI NO: 22328350 NR Description: similar to calcium-dependent protein kinase -
  misc_feature (1)..(107): Homolog of NCBI NO: 22328350 NR Description: similar to calcium-dependent protein kinase -
  misc_feature (1)..(403): Homolog of NCBI NO: 15234435 NR Description: putative calcium dependent protein kinase; id: At4g04720.1, supported by cDNA: gi_15292914 [Arabidopsis >gi|25287682|pir||D85059 probable calcium dependent protein
  misc_feature (1)..(403): Homolog of NCBI NO: 15292915 NR Description: putative calcium dependent protein kinase
  misc_feature (1)..(404): Homolog of NCBI NO: 15234656 NR Description: calcium-dependent protein kinase - like protein; id: At4g21940.1, supported by cDNA: gi_17104578 [Arabidopsis
  misc_feature (1)..(401): Homolog of NCBI NO: 19171502 NR Description: calcium-dependent protein kinase [Lycopersicon
  misc_feature (1)..(398): Homolog of NCBI NO: 7428009 NR Description: calcium-dependent protein kinase (EC 2.7.1.-) 1 -
  misc_feature (1)..(403): Homolog of NCBI NO: 15234441 NR Description: putative calcium dependent protein kinase; id: At4g04740.1, supported by cDNA: gi_16648906, supported by gi_20148456 [Arabidopsis thaliana] >gi|25287683|pir||F85059
  misc_feature (1)..(207): Homolog of NCBI NO: 15234430 NR Description: putative calcium dependent protein kinase; id: At4g04700.1 [Arabidopsis thaliana]
MKQLSGEPNIVEFKNAYEDKDSVHIVMEYCGGGELYDKILALYDVGKSYSEKEAAGIIRSIVNVVKNCHYMGVMHRDLKPENFLLTSNDDNATVKVIDFGCSVFIEEGKVYQDLAGSDYYIAPEVLQGNYGKEADIWSAGIILYILLCGKSPFVKEPEGQMFNEIKSLEIDYSEEPWPLRDSRAIHLVKRMLDRNPKERISAAEVLGHPWMKEGEASDKPIDGVVLSRLKRFRDANKFKKVVLKFIAANLSEEEIKGLKTLFTNIDTDKSGNITLEELKTGLTRLGSNLSKTEVEQLMEAADMDGNGTIDIDEFISATMHRYKLDRDEHVYKAFQHFDKDNDGHITKEELEMAMKEDGAGDEGSIKQIIADADTDNDGKINFEEFRTMMRTESSLQPEGELLPIIN

SEQ ID NO: 87324 - protein, 380 aa, Arabidopsis thaliana
  peptide (1)..(380): Ceres Seq. ID no. 12700033
  misc_feature (1)..(185): Pfam Name: Protein kinase domain Pfam Description: Protein kinase domain
  misc_feature (1)..(350): Homolog of NCBI NO: 5706728 NR Description: contains similarity to eukaryotic protein kinase
  misc_feature (180)..(378): Homolog of NCBI NO: 22328350 NR Description: similar to calcium-dependent protein kinase -
  misc_feature (1)..(81): Homolog of NCBI NO: 22328350 NR Description: similar to calcium-dependent protein kinase -
  misc_feature (1)..(377): Homolog of NCBI NO: 15234435 NR Description: putative calcium dependent protein kinase; id: At4g04720.1, supported by cDNA: gi_15292914 [Arabidopsis >gi|25287682|pir||D85059 probable calcium dependent protein
  misc_feature (1)..(377): Homolog of NCBI NO: 15292915 NR Description: putative calcium dependent protein kinase
  misc_feature (1)..(378): Homolog of NCBI NO: 15234656 NR Description: calcium-dependent protein kinase - like protein; id: At4g21940.1, supported by cDNA: gi_17104578 [Arabidopsis
  misc_feature (1)..(375): Homolog of NCBI NO: 19171502 NR Description: calcium-dependent protein kinase [Lycopersicon
  misc_feature (1)..(372): Homolog of NCBI NO: 7428009 NR Description: calcium-dependent protein kinase (EC 2.7.1.-) 1 -
  misc_feature (1)..(377): Homolog of NCBI NO: 15234441 NR Description: putative calcium dependent protein kinase; id: At4g04740.1, supported by cDNA: gi_16648906, supported by gi_20148456 [Arabidopsis thaliana] >gi|25287683|pir||F85059
  misc_feature (1)..(181): Homolog of NCBI NO: 15234430 NR Description: putative calcium dependent protein kinase; id: At4g04700.1 [Arabidopsis thaliana]
MEYCGGGELYDKILALYDVGKSYSEKEAAGIIRSIVNVVKNCHYMGVMHRDLKPENFLLTSNDDNATVKVIDFGCSVFIEEGKVYQDLAGSDYYIAPEVLQGNYGKEADIWSAGIILYILLCGKSPFVKEPEGQMFNEIKSLEIDYSEEPWPLRDSRAIHLVKRMLDRNPKERISAAEVLGHPWMKEGEASDKPIDGVVLSRLKRFRDANKFKKVVLKFIAANLSEEEIKGLKTLFTNIDTDKSGNITLEELKTGLTRLGSNLSKTEVEQLMEAADMDGNGTIDIDEFISATMHRYKLDRDEHVYKAFQHFDKDNDGHITKEELEMAMKEDGAGDEGSIKQIIADADTDNDGKINFEEFRTMMRTESSLQPEGELLPIIN

SEQ ID NO: 87325 - DNA, 1493 bp, Arabidopsis thaliana
  misc_feature (1)..(1493): Ceres Seq. ID no. 12700063
  misc_feature: MA Experiment ID: 20000496 Result: Down-regulated in Transcription
  misc_feature: MA Experiment 20000496 PARAMETER Experiment Name: At_Guard_Cells_P Parameter: Harvest Date Value: 7/19/2002
  misc_feature: MA Experiment 20000496 PARAMETER Experiment Name: At_Guard_Cells_P Parameter: Organism Value: Canola
  misc_feature: MA Experiment 20000496 PARAMETER Experiment Name: At_Guard_Cells_P Parameter: Tissue Value: Guard Cells vs. Leaves
aaaatccctaaaagttttgggggaaagaagaaagaaggaagacgatgatgatgctcagaatccgaagcagagatggactggagagagtcacagcggagggagctcatatcactgtttcccagctcaaaaccttgatcgcggatcagcttcagatccctctccataagcagaccttatccaccaatcgtgatctcctcctcgccaaaactcccgctgatctactcgccttcaccgacctcacggacccaaacctccccctctcctctctcaacctcggccatggctctatgctctacctcgcctacgatggcgagcgctccattcctggagctcctcccgttactcctgccggatccttcgggaggaagatgaccgtcgatgacttgatcgcccgccagatgcgcgtcactcgtcaggagacgtctcactgcgactccgtctccttcgatcgcgatgccgccaacgctttccagcactacgtcaatgagtctctagcttttgccgtcaagcgcggcggctttatgtacggcaccgtcaccgaggaaggacaggtggaagttgatttcatttacgagccgccccagcaaggcacggaggctaatcttattctgatgagagatgctgatgaagagaagcgcgtggacgcaatcgccatgggcttggggatgaggagggtcggtttcatttttaaccagaccgtggtgcaggacaagactgaatacactctgtccaacgccgaggtgctacaggcggcggagcttcacgccgagagcgagctgaaggagtgggtcacggcggtggtgaagcttgaggtgaatgaggatggtggcgccgatgtccatttcgaggcgtttcaaatgagtgatatgtgcatcaggctgttcaaggaagagtggttcgagacggagattatgccggacgatgatccaaagctctctaagatgaagaaggaggtggttgttggtgtgaaggatcttaaggaggtagataacgatttcttcctcgttctcgtcaggatcttggatcaccaggggcctctgtcatcaacattcccaatagagaaccggagcagtcgagcaacgatgcgggctctaaaaacacatctggaccgggcaaagagcttgccgttggtgaagaagatgtcagattttcatctgcttctctttgtggctcagtttctggacgtgtcatcggacgtccctgctttagccgagtgtgtgcgtctgcagtcgcctgtcccagagggctatgcgttgctcatcgaatcaatggccaacacttgttaatttttgtgtcattgttttttggttcttgatacagtatatcatgttcgttttatggtccagaaaatcttttttactagttgacaaatgaaaaatctctagtgtactcgtgatgtatttgattcaagtttgggggttaatttaagttatcaacaacttgtagaaacaaagttaattcacagagtaataaatcattctaataggtatgct

SEQ ID NO: 87326 - protein, 413 aa, Arabidopsis thaliana
  peptide (1)..(413): Ceres Seq. ID no. 12700064
  misc_feature (156)..(410): Pfam Name: NPL4 family Pfam Description: NPL4 family
  misc_feature (1)..(413): Homolog of NCBI NO: 18407495 NR Description: expressed protein; protein id: At2g47970.1, by cDNA: 7887. [Arabidopsis thaliana] >gi|25344175|pir||G84921
  misc_feature (1)..(412): Homolog of NCBI NO: 15229360 NR Description: putative protein; protein id: At3g63000.1, by cDNA: gi_14334781, supported by cDNA: gi_15810646 [Arabidopsis
  misc_feature (2)..(410): Homolog of NCBI NO: 34914854 NR Description: P0416G11.10 [Oryza sativa (japonica
  misc_feature (275)..(329): Homolog of NCBI NO: 34905848 NR Description: P0483G10.28 [Oryza sativa (japonica
MMMLRIRSRDGLERVTAEGAHITVSQLKTLIADQLQIPLHKQTLSTNRDLLLAKTPADLLAFTDLTDPNLPLSSLNLGHGSMLYLAYDGERSIPGAPPVTPAGSFGRKMTVDDLIARQMRVTRQETSHCDSVSFDRDAANAFQHYVNESLAFAVKRGGFMYGTVTEEGQVEVDFIYEPPQQGTEANLILMRDADEEKRVDAIAMGLGMRRVGFIFNQTVVQDKTEYTLSNAEVLQAAELHAESELKEWVTAVVKLEVNEDGGADVHFEAFQMSDMCIRLFKEEWFETEIMPDDDPKLSKMKKEVVVGVKDLKEVDNDFFLVLVRILDHQGPLSSTFPIENRSSRATMRALKTHLDRAKSLPLVKKMSDFHLLLFVAQFLDVSSDVPALAECVRLQSPVPEGYALLIESMANTC

SEQ ID NO: 87327 - protein, 412 aa, Arabidopsis thaliana
  peptide (1)..(412): Ceres Seq. ID no. 12700065
  misc_feature (155)..(409): Pfam Name: NPL4 family Pfam Description: NPL4 family
  misc_feature (1)..(412): Homolog of NCBI NO: 18407495 NR Description: expressed protein; protein id: At2g47970.1, by cDNA: 7887. [Arabidopsis thaliana] >gi|25344175|pir||G84921
  misc_feature (1)..(411): Homolog of NCBI NO: 15229360 NR Description: putative protein; protein id: At3g63000.1, by cDNA: gi_14334781, supported by cDNA: gi_15810646 [Arabidopsis
  misc_feature (1)..(409): Homolog of NCBI NO: 34914854 NR Description: P0416G11.10 [Oryza sativa (japonica
  misc_feature (274)..(328): Homolog of NCBI NO: 34905848 NR Description: P0483G10.28 [Oryza sativa (japonica
MMLRIRSRDGLERVTAEGAHITVSQLKTLIADQLQIPLHKQTLSTNRDLLLAKTPADLLAFTDLTDPNLPLSSLNLGHGSMLYLAYDGERSIPGAPPVTPAGSFGRKMTVDDLIARQMRVTRQETSHCDSVSFDRDAANAFQHYVNESLAFAVKRGGFMYGTVTEEGQVEVDFIYEPPQQGTEANLILMRDADEEKRVDAIAMGLGMRRVGFIFNQTVVQDKTEYTLSNAEVLQAAELHAESELKEWVTAVVKLEVNEDGGADVHFEAFQMSDMCIRLFKEEWFETEIMPDDDPKLSKMKKEVVVGVKDLKEVDNDFFLVLVRILDHQGPLSSTFPIENRSSRATMRALKTHLDRAKSLPLVKKMSDFHLLLFVAQFLDVSSDVPALAECVRLQSPVPEGYALLIESMANTC

SEQ ID NO: 87328 - protein, 411 aa, Arabidopsis thaliana
  peptide (1)..(411): Ceres Seq. ID no. 12700066
  misc_feature (154)..(408): Pfam Name: NPL4 family Pfam Description: NPL4 family
  misc_feature (1)..(411): Homolog of NCBI NO: 18407495 NR Description: expressed protein; protein id: At2g47970.1, by cDNA: 7887. [Arabidopsis thaliana] >gi|25344175|pir||G84921
  misc_feature (1)..(410): Homolog of NCBI NO: 15229360 NR Description: putative protein; protein id: At3g63000.1, by cDNA: gi_14334781, supported by cDNA: gi_15810646 [Arabidopsis
  misc_feature (1)..(408): Homolog of NCBI NO: 34914854 NR Description: P0416G11.10 [Oryza sativa (japonica
  misc_feature (273)..(327): Homolog of NCBI NO: 34905848 NR Description: P0483G10.28 [Oryza sativa (japonica
MLRIRSRDGLERVTAEGAHITVSQLKTLIADQLQIPLHKQTLSTNRDLLLAKTPADLLAFTDLTDPNLPLSSLNLGHGSMLYLAYDGERSIPGAPPVTPAGSFGRKMTVDDLIARQMRVTRQETSHCDSVSFDRDAANAFQHYVNESLAFAVKRGGFMYGTVTEEGQVEVDFIYEPPQQGTEANLILMRDADEEKRVDAIAMGLGMRRVGFIFNQTVVQDKTEYTLSNAEVLQAAELHAESELKEWVTAVVKLEVNEDGGADVHFEAFQMSDMCIRLFKEEWFETEIMPDDDPKLSKMKKEVVVGVKDLKEVDNDFFLVLVRILDHQGPLSSTFPIENRSSRATMRALKTHLDRAKSLPLVKKMSDFHLLLFVAQFLDVSSDVPALAECVRLQSPVPEGYALLIESMANTC

SEQ ID NO: 87329 - DNA, 1515 bp, Arabidopsis thaliana
  misc_feature (1)..(1515): Ceres Seq. ID no. 12700109
  misc_feature: MA Experiment ID: 20000440 Result: Up-regulated in Transcription
  misc_feature: MA Experiment 20000440 PARAMETER Experiment Name: At_Closed-Flower__Sub_P Parameter: Tissue Value: Closed Flower vs. Whole Plant
atggatccgatcagttttcaatccaaggctcaagaggtttcacgattctccgagaattctaaccctaacttcgtctcacactcgactccactcgagaaaccgagtaaatcttctgcgcagaagaatccgaaatggaagcctaatcctgttccggcggttttctcaccacggaatcggatcagagagaggaggttcgtggtggtgaagaagaattcaaggaaggagaagaatgattccgcgtctgtggattgcaaatgtggagctaagaccatttccaatatgaagaaatgtgtctgtatagcatacgaaactctacgggcgtcacaggaagagttcttcaacaatcgaagagaatccgtatcagaaattggagaatccagccagaatttggaggatggaaatgaacaagtcgaatttggagattctgatgaaactagggtttctttgatgaagaggagaagagaaaaagtattggaagaagcgagaatgagtatacctgaatttggtaaagtgatgcatctagttaaagcttttgagaagcttacttgcttcccactttcgaaggtaacttctaaggaagaagaagatcagattaagcaacctttgaaatgggaattgcctggaatgagccagcctaagtgttcagaatctgagacagatcaattcacttggagttcttcattctatccatcatctggtttgatcttaacagctacgaatctaggactagaacaacctcatgcctcagtttcttcatcatgggacaatagtgtttcaagtctcaactcaaatggtggccggaggggcagaagaaatagcttcgaatcctctgcttcaatgggaagtagaagatcaacgaagaagcagatcaaagtcacttctctgaagccatttaaactcagaactgaggaacggggacgaatgaaagaagaagagtttgcaaagaagctacacgagatgacgttggagaaagcaaaaaagagaatccccatagctcaaggtcttccctggacaactgatgaacctgagaatctggttaagcctcatgtgaaagatatcacgataccagtagacttaaagctccattccgacattcgagcagtagaacgtgcagaatttgattaccagtttctcgttatgacctcaactttgaatctacacaagcagagtcttttttgtggatcttgtatgataaaatccagcattgtctcattgtatcaggttactgagaaaataaacctagtcgagcaatacaaaacagaaagagaacgccaacaaaagctagcagaagaagaagagatacgaaggctgaggaaagagttggtccctaaggcacaaccaatgccatactttgatcgaccattcattcccaaaaggtcgaacaagcacccgacggtacctcgagatcccaagtttaatataccgcaacacaagaagataagatgctgcagtacatcgtcttggagtgacactggatcttacatgagcgacctcttataccaacaagacctctaa

SEQ ID NO: 87330 - protein, 504 aa, Arabidopsis thaliana
  peptide (1)..(504): Ceres Seq. ID no. 12700110
  misc_feature (1)..(389): Homolog of NCBI NO: 15232025 NR Description: hypothetical protein; protein id: At3g01015.1
  misc_feature (406)..(504): Homolog of NCBI NO: 15232025 NR Description: hypothetical protein; protein id: At3g01015.1
  misc_feature (2)..(388): Homolog of NCBI NO: 30685394 NR Description: expressed protein [Arabidopsis thaliana]
  misc_feature (406)..(501): Homolog of NCBI NO: 30685394 NR Description: expressed protein [Arabidopsis thaliana]
  misc_feature (2)..(388): Homolog of NCBI NO: 11358122 NR Description: hypothetical protein T20K14_120 - Arabidopsis >gi|9755806|emb|CAC01750.1| putative protein [Arabidopsis
  misc_feature (406)..(501): Homolog of NCBI NO: 11358122 NR Description: hypothetical protein T20K14_120 - Arabidopsis >gi|9755806|emb|CAC01750.1| putative protein [Arabidopsis
  misc_feature (293)..(474): Homolog of NCBI NO: 25406742 NR Description: hypothetical protein [imported] - Arabidopsis >gi|4204309|gb|AAD10690.1| Hypothetical protein [Arabidopsis
MDPISFQSKAQEVSRFSENSNPNFVSHSTPLEKPSKSSAQKNPKWKPNPVPAVFSPRNRIRERRFVVVKKNSRKEKNDSASVDCKCGAKTISNMKKCVCIAYETLRASQEEFFNNRRESVSEIGESSQNLEDGNEQVEFGDSDETRVSLMKRRREKVLEEARMSIPEFGKVMHLVKAFEKLTCFPLSKVTSKEEEDQIKQPLKWELPGMSQPKCSESETDQFTWSSSFYPSSGLILTATNLGLEQPHASVSSSWDNSVSSLNSNGGRRGRRNSFESSASMGSRRSTKKQIKVTSLKPFKLRTEERGRMKEEEFAKKLHEMTLEKAKKRIPIAQGLPWTTDEPENLVKPHVKDITIPVDLKLHSDIRAVERAEFDYQFLVMTSTLNLHKQSLFCGSCMIKSSIVSLYQVTEKINLVEQYKTERERQQKLAEEEEIRRLRKELVPKAQPMPYFDRPFIPKRSNKHPTVPRDPKFNIPQHKKIRCCSTSSWSDTGSYMSDLLYQQDL

SEQ ID NO: 87331 - protein, 411 aa, Arabidopsis thaliana
  peptide (1)..(411): Ceres Seq. ID no. 12700111
  misc_feature (1)..(296): Homolog of NCBI NO: 15232025 NR Description: hypothetical protein; protein id: At3g01015.1
  misc_feature (313)..(411): Homolog of NCBI NO: 15232025 NR Description: hypothetical protein; protein id: At3g01015.1
  misc_feature (1)..(295): Homolog of NCBI NO: 30685394 NR Description: expressed protein [Arabidopsis thaliana]
  misc_feature (313)..(408): Homolog of NCBI NO: 30685394 NR Description: expressed protein [Arabidopsis thaliana]
  misc_feature (1)..(295): Homolog of NCBI NO: 11358122 NR Description: hypothetical protein T20K14_120 - Arabidopsis >gi|9755806|emb|CAC01750.1| putative protein [Arabidopsis
  misc_feature (313)..(408): Homolog of NCBI NO: 11358122 NR Description: hypothetical protein T20K14_120 - Arabidopsis >gi|9755806|emb|CAC01750.1| putative protein [Arabidopsis
  misc_feature (200)..(381): Homolog of NCBI NO: 25406742 NR Description: hypothetical protein [imported] - Arabidopsis >gi|4204309|gb|AAD10690.1| Hypothetical protein [Arabidopsis
MKKCVCIAYETLRASQEEFFNNRRESVSEIGESSQNLEDGNEQVEFGDSDETRVSLMKRRREKVLEEARMSIPEFGKVMHLVKAFEKLTCFPLSKVTSKEEEDQIKQPLKWELPGMSQPKCSESETDQFTWSSSFYPSSGLILTATNLGLEQPHASVSSSWDNSVSSLNSNGGRRGRRNSFESSASMGSRRSTKKQIKVTSLKPFKLRTEERGRMKEEEFAKKLHEMTLEKAKKRIPIAQGLPWTTDEPENLVKPHVKDITIPVDLKLHSDIRAVERAEFDYQFLVMTSTLNLHKQSLFCGSCMIKSSIVSLYQVTEKINLVEQYKTERERQQKLAEEEEIRRLRKELVPKAQPMPYFDRPFIPKRSNKHPTVPRDPKFNIPQHKKIRCCSTSSWSDTGSYMSDLLYQQDL

SEQ ID NO: 87332 - protein, 355 aa, Arabidopsis thaliana
  peptide (1)..(355): Ceres Seq. ID no. 12700112
  misc_feature (1)..(240): Homolog of NCBI NO: 15232025 NR Description: hypothetical protein; protein id: At3g01015.1
  misc_feature (257)..(355): Homolog of NCBI NO: 15232025 NR Description: hypothetical protein; protein id: At3g01015.1
  misc_feature (1)..(239): Homolog of NCBI NO: 30685394 NR Description: expressed protein [Arabidopsis thaliana]
  misc_feature (257)..(352): Homolog of NCBI NO: 30685394 NR Description: expressed protein [Arabidopsis thaliana]
  misc_feature (1)..(239): Homolog of NCBI NO: 11358122 NR Description: hypothetical protein T20K14_120 - Arabidopsis >gi|9755806|emb|CAC01750.1| putative protein [Arabidopsis
  misc_feature (257)..(352): Homolog of NCBI NO: 11358122 NR Description: hypothetical protein T20K14_120 - Arabidopsis >gi|9755806|emb|CAC01750.1| putative protein [Arabidopsis
  misc_feature (144)..(325): Homolog of NCBI NO: 25406742 NR Description: hypothetical protein [imported] - Arabidopsis >gi|4204309|gb|AAD10690.1| Hypothetical protein [Arabidopsis
MKRRREKVLEEARMSIPEFGKVMHLVKAFEKLTCFPLSKVTSKEEEDQIKQPLKWELPGMSQPKCSESETDQFTWSSSFYPSSGLILTATNLGLEQPHASVSSSWDNSVSSLNSNGGRRGRRNSFESSASMGSRRSTKKQIKVTSLKPFKLRTEERGRMKEEEFAKKLHEMTLEKAKKRIPIAQGLPWTTDEPENLVKPHVKDITIPVDLKLHSDIRAVERAEFDYQFLVMTSTLNLHKQSLFCGSCMIKSSIVSLYQVTEKINLVEQYKTERERQQKLAEEEEIRRLRKELVPKAQPMPYFDRPFIPKRSNKHPTVPRDPKFNIPQHKKIRCCSTSSWSDTGSYMSDLLYQQDL

SEQ ID NO: 87333 - DNA, 489 bp, Arabidopsis thaliana
  misc_feature (1)..(489): Ceres Seq. ID no. 12700113
  misc_feature: MA Experiment ID: 20001910 Result: Up-regulated in Transcription
  misc_feature: MA Experiment 20001910 PARAMETER Experiment Name: At_Drought_Reproduction_P Parameter: Age (day) Value: 37
  misc_feature: MA Experiment 20001910 PARAMETER Experiment Name: At_Drought_Reproduction_P Parameter: Organism Value: A. thaliana
  misc_feature: MA Experiment 20001910 PARAMETER Experiment Name: At_Drought_Reproduction_P Parameter: Plant Line Value: WS
  misc_feature: MA Experiment 20001910 PARAMETER Experiment Name: At_Drought_Reproduction_P Parameter: Timepoint (day) Value: 7
  misc_feature: MA Experiment 20001910 PARAMETER Experiment Name: At_Drought_Reproduction_P Parameter: Tissue Value: Flowers
  misc_feature: MA Experiment 20001910 PARAMETER Experiment Name: At_Drought_Reproduction_P Parameter: Treatment Value: Drought vs. No Drought
atgatgctaaggcaaacgtcgagaaaggcttacctagggttacaggcgtctcctctagggttaggtcgtcgattataccacgagaatgtaatcgaccactttgaaaaccctagaaacgttggctccttcaacaggaatgaccctaacgttggcacgggattggtaggagctcctgcctgcggagacctcatgagcctccagattaaggtcgatgattcaggtcagatcattgatactcgattcaagacctttggctgtggctccgctatcgcctcatcttccgttgcttctgaatggatcaagggcaaaaccttagacgaagttatgaccatcaagaacgcggaaatcgctaagcatcttaggttgccaccggtaaagctacattgcagtatgcttgcagaggacgctatcaagtccgcggtcagagactacaaggagaagcaagcaaagactaatgctgctgctgcagaagaaaccgtcaaggcctga

SEQ ID NO: 87334 - protein, 162 aa, Arabidopsis thaliana; identical to SEQ ID NO: 71777
  peptide (1)..(162): Ceres Seq. ID no. 12700114
  misc_feature (25)..(151): Pfam Name: NifU-like N terminal domain Pfam Description: NifU-like N terminal domain
  misc_feature (1)..(162): Homolog of NCBI NO: 15232028 NR Description: unknown protein; protein id: At3g01020.1 thaliana] >gi|6714486|gb|AAF26172.1|AC008261_29 unknown protein
  misc_feature (1)..(162): Homolog of NCBI NO: 15235569 NR Description: nifU-like protein; protein id: At4g22220.1, by cDNA: 8156., supported by cDNA: gi_13605506, supported by
  misc_feature (2)..(162): Homolog of NCBI NO: 21595581 NR Description: nifU-like protein [Arabidopsis thaliana]
  misc_feature (2)..(157): Homolog of NCBI NO: 15233385 NR Description: putative NifU-like metallocluster assembly
  misc_feature (21)..(156): Homolog of NCBI NO: 16798388 NR Description: iron-sulfur cluster assembly protein IscU
  misc_feature (8)..(162): Homolog of NCBI NO: 34912076 NR Description: putative nifU-like protein [Oryza sativa
  misc_feature (14)..(158): Homolog of NCBI NO: 11545707 NR Description: ISCU2 [Homo sapiens]
  misc_feature (14)..(148): Homolog of NCBI NO: 20381021 NR Description: RIKEN cDNA 2310020H20 gene [Mus musculus]
  misc_feature (14)..(148): Homolog of NCBI NO: 27666566 NR Description: similar to RIKEN cDNA 2310020H20 gene [Mus
  misc_feature (14)..(148): Homolog of NCBI NO: 21313484 NR Description: RIKEN cDNA 2310020H20 [Mus musculus] unnamed protein product [Mus musculus] unnamed protein product [Mus musculus]

SEQ ID NO: 87335 - protein, 161 aa, Arabidopsis thaliana; identical to SEQ ID NO: 71778
  peptide (1)..(161): Ceres Seq. ID no. 12700115
  misc_feature (24)..(150): Pfam Name: NifU-like N terminal domain Pfam Description: NifU-like N terminal domain
  misc_feature (1)..(161): Homolog of NCBI NO: 15232028 NR Description: unknown protein; protein id: At3g01020.1 thaliana] >gi|6714486|gb|AAF26172.1|AC008261_29 unknown protein
  misc_feature (1)..(161): Homolog of NCBI NO: 15235569 NR Description: nifU-like protein; protein id: At4g22220.1, by cDNA: 8156., supported by cDNA: gi_13605506, supported by
  misc_feature (1)..(161): Homolog of NCBI NO: 21595581 NR Description: nifU-like protein [Arabidopsis thaliana]
  misc_feature (1)..(156): Homolog of NCBI NO: 15233385 NR Description: putative NifU-like metallocluster assembly
  misc_feature (20)..(155): Homolog of NCBI NO: 16798388 NR Description: iron-sulfur cluster assembly protein IscU
  misc_feature (7)..(161): Homolog of NCBI NO: 34912076 NR Description: putative nifU-like protein [Oryza sativa
  misc_feature (13)..(157): Homolog of NCBI NO: 11545707 NR Description: ISCU2 [Homo sapiens]
  misc_feature (13)..(147): Homolog of NCBI NO: 20381021 NR Description: RIKEN cDNA 2310020H20 gene [Mus musculus]
  misc_feature (13)..(147): Homolog of NCBI NO: 21313484 NR Description: RIKEN cDNA 2310020H20 [Mus musculus] unnamed protein product [Mus musculus] unnamed protein product [Mus musculus]
  misc_feature (13)..(147): Homolog of NCBI NO: 27666566 NR Description: similar to RIKEN cDNA 2310020H20 gene [Mus

SEQ ID NO: 87336 - protein, 99 aa, Arabidopsis thaliana
  peptide (1)..(99): Ceres Seq. ID no. 12700116
  misc_feature (1)..(88): Pfam Name: NifU-like N terminal domain Pfam Description: NifU-like N terminal domain
  misc_feature (1)..(99): Homolog of NCBI NO: 15232028 NR Description: unknown protein; protein id: At3g01020.1 thaliana] >gi|6714486|gb|AAF26172.1|AC008261_29 unknown protein
  misc_feature (1)..(99): Homolog of NCBI NO: 15235569 NR Description: nifU-like protein; protein id: At4g22220.1, by cDNA: 8156., supported by cDNA: gi_13605506, supported by
  misc_feature (1)..(99): Homolog of NCBI NO: 21595581 NR Description: nifU-like protein [Arabidopsis thaliana]
  misc_feature (1)..(94): Homolog of NCBI NO: 15233385 NR Description: putative NifU-like metallocluster assembly
  misc_feature (1)..(93): Homolog of NCBI NO: 16798388 NR Description: iron-sulfur cluster assembly protein IscU
  misc_feature (1)..(99): Homolog of NCBI NO: 34912076 NR Description: putative nifU-like protein [Oryza sativa
  misc_feature (1)..(95): Homolog of NCBI NO: 11545707 NR Description: ISCU2 [Homo sapiens]
  misc_feature (1)..(85): Homolog of NCBI NO: 20381021 NR Description: RIKEN cDNA 2310020H20 gene [Mus musculus]
  misc_feature (1)..(85): Homolog of NCBI NO: 21313484 NR Description: RIKEN cDNA 2310020H20 [Mus musculus] unnamed protein product [Mus musculus] unnamed protein product [Mus musculus]
  misc_feature (1)..(85): Homolog of NCBI NO: 27666566 NR Description: similar to RIKEN cDNA 2310020H20 gene [Mus
MSLQIKVDDSGQIIDTRFKTFGCGSAIASSSVASEWIKGKTLDEVMTIKNAEIAKHLRLPPVKLHCSMLAEDAIKSAVRDYKEKQAKTNAAAAEETVKA

SEQ ID NO: 87337 - DNA, 1602 bp, Arabidopsis thaliana
  misc_feature (1)..(1602): Ceres Seq. ID no. 12700121
  misc_feature: MA Experiment ID: 20000184 Result: Down-regulated in Transcription
  misc_feature: MA Experiment 20000184 PARAMETER Experiment Name: At_Shoots__P Parameter: Age (day) Value: 7
  misc_feature: MA Experiment 20000184 PARAMETER Experiment Name: At_Shoots__P Parameter: Tissue Value: Shoots vs. Whole Plant
  misc_feature: MA Experiment ID: 20000437 Result: Up-regulated in Transcription
  misc_feature: MA Experiment 20000437 PARAMETER Experiment Name: At_Drought_P Parameter: Age (day) Value: 8
  misc_feature: MA Experiment 20000437 PARAMETER Experiment Name: At_Drought_P Parameter: Organism Value: A. thaliana
  misc_feature: MA Experiment 20000437 PARAMETER Experiment Name: At_Drought_P Parameter: Plant Line Value: WS
  misc_feature: MA Experiment 20000437 PARAMETER Experiment Name: At_Drought_P Parameter: Timepoint (hr) Value: 24
  misc_feature: MA Experiment 20000437 PARAMETER Experiment Name: At_Drought_P Parameter: Tissue Value: Whole Plant
  misc_feature: MA Experiment 20000437 PARAMETER Experiment Name: At_Drought_P Parameter: Treatment Value: Drought vs. No Drought
  misc_feature: MA Experiment ID: 20000495 Result: Down-regulated in Transcription
  misc_feature: MA Experiment 20000495 PARAMETER Experiment Name: At_Guard_Cells_P Parameter: Harvest Date Value: 8/2/2002
  misc_feature: MA Experiment 20000495 PARAMETER Experiment Name: At_Guard_Cells_P Parameter: Organism Value: A. thaliana
  misc_feature: MA Experiment 20000495 PARAMETER Experiment Name: At_Guard_Cells_P Parameter: Tissue Value: Guard Cells vs. Leaves
  misc_feature: MA Experiment ID: 20000496 Result: Down-regulated in Transcription
  misc_feature: MA Experiment 20000496 PARAMETER Experiment Name: At_Guard_Cells_P Parameter: Harvest Date Value: 7/19/2002
  misc_feature: MA Experiment 20000496 PARAMETER Experiment Name: At_Guard_Cells_P Parameter: Organism Value: Canola
  misc_feature: MA Experiment 20000496 PARAMETER Experiment Name: At_Guard_Cells_P Parameter: Tissue Value: Guard Cells vs. Leaves
  misc_feature: MA Experiment ID: 20001451 Result: Down-regulated in Transcription
  misc_feature: MA Experiment 20001451 PARAMETER Experiment Name: At_Far-red-induction_P Parameter: Age (day) Value: 7
  misc_feature: MA Experiment 20001451 PARAMETER Experiment Name: At_Far-red-induction_P Parameter: Light Value: Far-red vs. White
  misc_feature: MA Experiment 20001451 PARAMETER Experiment Name: At_Far-red-induction_P Parameter: Organism Value: A. thaliana
  misc_feature: MA Experiment 20001451 PARAMETER Experiment Name: At_Far-red-induction_P Parameter: Plant Line Value: Columbia
  misc_feature: MA Experiment 20001451 PARAMETER Experiment Name: At_Far-red-induction_P Parameter: Timepoint (hr) Value: 24
  misc_feature: MA Experiment 20001451 PARAMETER Experiment Name: At_Far-red-induction_P Parameter: Tissue Value: Whole Plant
  misc_feature: MA Experiment ID: 20001905 Result: Up-regulated in Transcription
  misc_feature: MA Experiment 20001905 PARAMETER Experiment Name: At_Drought_Reproduction_P Parameter: Age (day) Value: 40
  misc_feature: MA Experiment 20001905 PARAMETER Experiment Name: At_Drought_Reproduction_P Parameter: Organism Value: A. thaliana
  misc_feature: MA Experiment 20001905 PARAMETER Experiment Name: At_Drought_Reproduction_P Parameter: Plant Line Value: WS
  misc_feature: MA Experiment 20001905 PARAMETER Experiment Name: At_Drought_Reproduction_P Parameter: Timepoint (day) Value: 10
  misc_feature: MA Experiment 20001905 PARAMETER Experiment Name: At_Drought_Reproduction_P Parameter: Tissue Value: Rosettes
  misc_feature: MA Experiment 20001905 PARAMETER Experiment Name: At_Drought_Reproduction_P Parameter: Treatment Value: Drought vs. No Drought
  misc_feature: Pfam Name: Glyco_transf_8 Pfam Description: Glycosyl transferase family 8
atgcagcttcacatatcgcctagcatgagaagcattacgatatcgagcagcaatgagtttattgatttgatgaagatcaaagtcgcagctcgtcacatctcttaccgaactctcttccacactatcttaatcctcgctttcttgttaccttttgttttcatcctaaccgctgttgttacccttgaaggtgtcaacaagtgctcctcttttgattgtttcgggaggcggctaggaccacgtcttcttggtaggatagatgattcagagcagagactagttagagatttttacaaaattctaaatgaagtaagcactcaagaaattccagatggtttaaagcttccagagtcttttagtcaactggtttcggatatgaagaacaaccactatgatgctaaaacatttgccctcgtatttcgagctatggtagagaagtttgaaagggatttaagggaatccaaatttgcagaactcatgaacaagcactttgctgcaagttcaattccaaaaggaattcactgtctctctttaagactaaccgatgaatattcctccaatgctcatgcccggagacagcttccttccccggagcttctccctgttctctcagacaatgcttaccaccattttgttctagctacagataatatcttagctgcatcggttgtggtctcatctgctgttcaatcatcttcaaaacccgagaaaattgtcttccatgttatcacagacaagaaaacctatgcgggtatgcattcttggtttgcactcaattctgttgctcctgcgattgttgaagtgaaaagcgttcatcagtttgattggttaacaagagagaatgttccagttcttgaagctgtggaaagccataacagtatcagaaattattaccatgggaatcatattgctggtgcaaacctcagcgaaacaacccctcgaacatttgcttcgaaactgcagtcaagaagtcccaaatacatatctttgctcaaccatcttagaatatatctaccagagctttttccgaacttagacaaggtagtgttcttagatgatgatatagtgatacagaaagatttatctccgctttgggatattgaccttaacgggaaggttaatggagctgtggagacttgtcgaggagaagacgtatgggttatgtcaaagcgtcttaggaactacttcaatttttctcacccgctcatcgcaaagcatttagatcccgaagaatgtgcttgggcttatggaatgaatatctttgatctacggacttggaggaagacaaatatcagagaaacgtatcattcttggcttaaagagaatctgaagtcgaatctaacaatgtggaaacttggaacattgcctcctgctctaatagcatttaaaggtcatgttcagccaatagattcctcttggcatatgcttggattaggttatcagagcaagaccaacttagaaaatgcgaagaaagctgcagtgattcattacaatggccaatcaaagccgtggcttgagataggtttcgagcatctcagaccattctggacaaaatatgttaactactccaatgatttcattaagaattgtcatatcttggaatag

SEQ ID NO: 87338 - protein, 533 aa, Arabidopsis thaliana
  peptide (1)..(533): Ceres Seq. ID no. 12700122
  misc_feature: Pfam Name: Glyco_transf_8 Pfam Description: Glycosyl transferase family 8
  misc_feature (1)..(533): Homolog of NCBI NO: 30678270 NR Description: glycosyltransferase family 8 [Arabidopsis
  misc_feature (24)..(533): Homolog of NCBI NO: 6714484 NR Description: unknown protein [Arabidopsis thaliana]
  misc_feature (1)..(533): Homolog of NCBI NO: 30685369 NR Description: glycosyltransferase family 8 [Arabidopsis >gi|26452322|dbj|BAC43247.1| unknown protein [Arabidopsis
  misc_feature (1)..(533): Homolog of NCBI NO: 11358133 NR Description: hypothetical protein T20K14_80 - Arabidopsis >gi|9755802|emb|CAC01746.1| putative protein [Arabidopsis
  misc_feature (1)..(531): Homolog of NCBI NO: 15239707 NR Description: putative protein; protein id: At5g54690.1 thaliana] >gi|10176796|dbj|BAB09935.1| contains similarity to
  misc_feature (28)..(532): Homolog of NCBI NO: 22331857 NR Description: putative protein; protein id: At3g58790.1, by cDNA: gi_20466463 [Arabidopsis thaliana] putative protein [Arabidopsis thaliana]
  misc_feature (28)..(532): Homolog of NCBI NO: 11358146 NR Description: hypothetical protein T20N10.140 - Arabidopsis >gi|7630074|emb|CAB88296.1| putative protein [Arabidopsis
  misc_feature (93)..(530): Homolog of NCBI NO: 18399484 NR Description: Expressed protein; protein id: At2g20810.1, by cDNA: gi_14334691, supported by cDNA: gi_16323393 [Arabidopsis >gi|14334692|gb|AAK59524.1| unknown protein [Arabidopsis
  misc_feature (164)..(530): Homolog of NCBI NO: 15230806 NR Description: glycosyl transferase, putative; protein id: supported by cDNA: gi_20466216 [Arabidopsis thaliana] Glycosyltransferase QUASIMODO1 >gi|9294170|dbj|BAB02072.1|
  misc_feature (104)..(533): Homolog of NCBI NO: 7485958 NR Description: hypothetical protein F22I13.40 - Arabidopsis >gi|4539335|emb|CAB37483.1| putative protein [Arabidopsis >gi|7270811|emb|CAB80492.1| putative protein [Arabidopsis
MQLHISPSMRSITISSSNEFIDLMKIKVAARHISYRTLFHTILILAFLLPFVFILTAVVTLEGVNKCSSFDCFGRRLGPRLLGRIDDSEQRLVRDFYKILNEVSTQEIPDGLKLPESFSQLVSDMKNNHYDAKTFALVFRAMVEKFERDLRESKFAELMNKHFAASSIPKGIHCLSLRLTDEYSSNAHARRQLPSPELLPVLSDNAYHHFVLATDNILAASVVVSSAVQSSSKPEKIVFHVITDKKTYAGMHSWFALNSVAPAIVEVKSVHQFDWLTRENVPVLEAVESHNSIRNYYHGNHIAGANLSETTPRTFASKLQSRSPKYISLLNHLRIYLPELFPNLDKVVFLDDDIVIQKDLSPLWDIDLNGKVNGAVETCRGEDVWVMSKRLRNYFNFSHPLIAKHLDPEECAWAYGMNIFDLRTWRKTNIRETYHSWLKENLKSNLTMWKLGTLPPALIAFKGHVQPIDSSWHMLGLGYQSKTNLENAKKAAVIHYNGQSKPWLEIGFEHLRPFWTKYVNYSNDFIKNCHILE

SEQ ID NO: 87339 - protein, 525 aa, Arabidopsis thaliana
  peptide (1)..(525): Ceres Seq. ID no. 12700123
  misc_feature: Pfam Name: Glyco_transf_8 Pfam Description: Glycosyl transferase family 8
  misc_feature (1)..(525): Homolog of NCBI NO: 30678270 NR Description: glycosyltransferase family 8 [Arabidopsis
  misc_feature (16)..(525): Homolog of NCBI NO: 6714484 NR Description: unknown protein [Arabidopsis thaliana]
  misc_feature (1)..(525): Homolog of NCBI NO: 30685369 NR Description: glycosyltransferase family 8 [Arabidopsis >gi|26452322|dbj|BAC43247.1| unknown protein [Arabidopsis
  misc_feature (1)..(525): Homolog of NCBI NO: 11358133 NR Description: hypothetical protein T20K14_80 - Arabidopsis >gi|9755802|emb|CAC01746.1| putative protein [Arabidopsis
  misc_feature (1)..(523): Homolog of NCBI NO: 15239707 NR Description: putative protein; protein id: At5g54690.1 thaliana] >gi|10176796|dbj|BAB09935.1| contains similarity to
  misc_feature (20)..(524): Homolog of NCBI NO: 22331857 NR Description: putative protein; protein id: At3g58790.1, by cDNA: gi_20466463 [Arabidopsis thaliana] putative protein [Arabidopsis thaliana]
  misc_feature (20)..(524): Homolog of NCBI NO: 11358146 NR Description: hypothetical protein T20N10.140 - Arabidopsis >gi|7630074|emb|CAB88296.1| putative protein [Arabidopsis
  misc_feature (85)..(522): Homolog of NCBI NO: 18399484 NR Description: Expressed protein; protein id: At2g20810.1, by cDNA: gi_14334691, supported by cDNA: gi_16323393 [Arabidopsis >gi|14334692|gb|AAK59524.1| unknown protein [Arabidopsis
  misc_feature (156)..(522): Homolog of NCBI NO: 15230806 NR Description: glycosyl transferase, putative; protein id: supported by cDNA: gi_20466216 [Arabidopsis thaliana] Glycosyltransferase QUASIMODO1 >gi|9294170|dbj|BAB02072.1|
  misc_feature (96)..(525): Homolog of NCBI NO: 7485958 NR Description: hypothetical protein F22I13.40 - Arabidopsis >gi|4539335|emb|CAB37483.1| putative protein [Arabidopsis >gi|7270811|emb|CAB80492.1| putative protein [Arabidopsis
MRSITISSSNEFIDLMKIKVAARHISYRTLFHTILILAFLLPFVFILTAVVTLEGVNKCSSFDCFGRRLGPRLLGRIDDSEQRLVRDFYKILNEVSTQEIPDGLKLPESFSQLVSDMKNNHYDAKTFALVFRAMVEKFERDLRESKFAELMNKHFAASSIPKGIHCLSLRLTDEYSSNAHARRQLPSPELLPVLSDNAYHHFVLATDNILAASVVVSSAVQSSSKPEKIVFHVITDKKTYAGMHSWFALNSVAPAIVEVKSVHQFDWLTRENVPVLEAVESHNSIRNYYHGNHIAGANLSETTPRTFASKLQSRSPKYISLLNHLRIYLPELFPNLDKVVFLDDDIVIQKDLSPLWDIDLNGKVNGAVETCRGEDVWVMSKRLRNYFNFSHPLIAKHLDPEECAWAYGMNIFDLRTWRKTNIRETYHSWLKENLKSNLTMWKLGTLPPALIAFKGHVQPIDSSWHMLGLGYQSKTNLENAKKAAVIHYNGQSKPWLEIGFEHLRPFWTKYVNYSNDFIKNCHILE

SEQ ID NO: 87340 - protein, 510 aa, Arabidopsis thaliana; identical to SEQ ID NO: 72184
  peptide (1)..(510): Ceres Seq. ID no. 12700124
  misc_feature: Pfam Name: Glyco_transf_8 Pfam Description: Glycosyl transferase family 8
  misc_feature (1)..(510): Homolog of NCBI NO: 30678270 NR Description: glycosyltransferase family 8 [Arabidopsis
  misc_feature (1)..(510): Homolog of NCBI NO: 6714484 NR Description: unknown protein [Arabidopsis thaliana]
  misc_feature (1)..(510): Homolog of NCBI NO: 30685369 NR Description: glycosyltransferase family 8 [Arabidopsis >gi|26452322|dbj|BAC43247.1| unknown protein [Arabidopsis
  misc_feature (1)..(510): Homolog of NCBI NO: 11358133 NR Description: hypothetical protein T20K14_80 - Arabidopsis >gi|9755802|emb|CAC01746.1| putative protein [Arabidopsis
  misc_feature (1)..(508): Homolog of NCBI NO: 15239707 NR Description: putative protein; protein id: At5g54690.1 thaliana] >gi|10176796|dbj|BAB09935.1| contains similarity to
  misc_feature (5)..(509): Homolog of NCBI NO: 22331857 NR Description: putative protein; protein id: At3g58790.1, by cDNA: gi_20466463 [Arabidopsis thaliana] putative protein [Arabidopsis thaliana]
  misc_feature (5)..(509): Homolog of NCBI NO: 11358146 NR Description: hypothetical protein T20N10.140 - Arabidopsis >gi|7630074|emb|CAB88296.1| putative protein [Arabidopsis
  misc_feature (70)..(507): Homolog of NCBI NO: 18399484 NR Description: Expressed protein; protein id: At2g20810.1, by cDNA: gi_14334691, supported by cDNA: gi_16323393 [Arabidopsis >gi|14334692|gb|AAK59524.1| unknown protein [Arabidopsis
  misc_feature (141)..(507): Homolog of NCBI NO: 15230806 NR Description: glycosyl transferase, putative; protein id: supported by cDNA: gi_20466216 [Arabidopsis thaliana] Glycosyltransferase QUASIMODO1 >gi|9294170|dbj|BAB02072.1|
  misc_feature (81)..(510): Homolog of NCBI NO: 7485958 NR Description: hypothetical protein F22I13.40 - Arabidopsis >gi|4539335|emb|CAB37483.1| putative protein [Arabidopsis >gi|7270811|emb|CAB80492.1| putative protein [Arabidopsis

SEQ ID NO: 87341 - DNA, 4119 bp, Arabidopsis thaliana
  misc_feature (1)..(4119): Ceres Seq. ID no. 12700172
  misc_feature: MA Experiment ID: 20000173 Result: Down-regulated in Transcription
  misc_feature: MA Experiment 20000173 PARAMETER Experiment Name: At_42deg_Heat_P Parameter: Age (day) Value: 14
  misc_feature: MA Experiment 20000173 PARAMETER Experiment Name: At_42deg_Heat_P Parameter: Organism Value: A. thaliana
  misc_feature: MA Experiment 20000173 PARAMETER Experiment Name: At_42deg_Heat_P Parameter: Plant Line Value: WS
  misc_feature: MA Experiment 20000173 PARAMETER Experiment Name: At_42deg_Heat_P Parameter: Temperature (deg C) Value: 42 vs. 22
  misc_feature: MA Experiment 20000173 PARAMETER Experiment Name: At_42deg_Heat_P Parameter: Timepoint (hr) Value: 6
  misc_feature: MA Experiment 20000173 PARAMETER Experiment Name: At_42deg_Heat_P Parameter: Tissue Value: Aerial
  misc_feature: MA Experiment ID: 20000184 Result: Down-regulated in Transcription
  misc_feature: MA Experiment 20000184 PARAMETER Experiment Name: At_Shoots__P Parameter: Age (day) Value: 7
  misc_feature: MA Experiment 20000184 PARAMETER Experiment Name: At_Shoots__P Parameter: Tissue Value: Shoots vs. Whole Plant
  misc_feature: MA Experiment ID: 20000794 Result: Up-regulated in Transcription
  misc_feature: MA Experiment 20000794 PARAMETER Experiment Name: At_Petals_P Parameter: Age (day) Value: 23-25 days
  misc_feature: MA Experiment 20000794 PARAMETER Experiment Name: At_Petals_P Parameter: Plant Line Value: WS
  misc_feature: MA Experiment 20000794 PARAMETER Experiment Name: At_Petals_P Parameter: Tissue Value: Petals vs. Whole plant
atgaagcggataagagatgatgtatatgcctctgggtctcaatttagacgtcctcttggttcttctcgaggccaattatgtggacaatctccggtccacggcagtggtgacaccgaagaagaagaagaaggagggagccggagagtctctcagaaattgacaaccaatgatgcgttgtcgtacctgagggaagtaaaagagatgtttcaagatcaacgcgagaaatatgacaggttcctcgaggttatgaaagattttaaggctcaaagaaccgacacaggcggtgtgatcgcaagagttaaggaattgtttaagggacataataatttgatttatggattcaacacctttttgcctaagggatatgaaattacgcttattgaggaagacgacgctctgccaaagaagactgttgaattcgaacaagccatcaattttgtgaataaaattaagatgcgattcaagcacgatgaacatgtctataaatctttcttggaaatcttgaatatgtaccgaaaggagaacaaggaaattaaagaggtgtacaacgaggtatctattctttttcaaggccacttggatttgcttgaacagtttactaggtttttgccagcgtctttgccatctcattcagcagcgcagcatagccggagtcaggctcaacagtacagcgaccgaggatcagaccctcctctacttcatcaaatgcaagtggaaaaggaacgccgacgagaaagggctgttgctctccgcggtgattatagtgttgaacgttatgaccttaatgatgataaaacgatggtgaagattcaaagagagcagcggaagcgccttgataaggagaacagggcaaggagaggccgtgatttggacgatagagaagcaggtcaagataacctacaccattttccagagaaaagaaagtcgtccagaagagctgaagctcttgaagcatattctggttctgcttcacattctgagaaagacaatttgaaaagtatgtacaaacaagcattcgttttctgtgagaaagtcaaggatagactatgcagccaagatgattatcagacattcttgaagtgcctcaatatttttagcaatggaataatccaaaggaaggatctgcaaaacttggtttctgatcttcttgggaaatttcctgatctgatggatgagttcaaccagttcttcgagcggtgtgagagtattactgatggatttcagcgtcttgctggtgttatgagcaaaaaattatttagcagcgaagaacagttatccaggccaatgaaggtggaagagaaagaaagtgaacacaagcctgaactcgaggctgtgaaggaaactgagcaatgcaagaaggagtacatgggaaaatctattcaagagctcgatctctctgattgcgagtgttgcactcctagctaccggcttctgcctgcggattatccgataccaattgcgagtcagagatcggagctaggagctgaggttttaaatgatcattgggtatctgtcacttccggaagtgaagattattcttttaagcacatgcgcagaaaccaatatgaagagagcttgttcagatgcgaagatgatagatttgagttggacatgttgctggaatctgtgagctctgcggccagaagtgcagaaagtttgttgaacatcatcacagagaagaaaataagtttttctggctccttcaggatcgaagaccattttacggccctaaatttaaggtgtattgagcgactttatggcgaccatggtcttgacgtgatagacatattaaataagaatccagccactgcacttcctgtaatcctaactcgtttaaagcagaaacaaggtgaatggaagaaatgccgtgacgattttgataaggtctgggcgaacgtatatgcaaaaaaccattacaagtcacttgatcaccgcagcttctacttcaagcaacaagattcaaagaacttgagtgcaaaatcattgttggctgaaattaaggagctgaaagagaagtctcagaatgatgatgatgttctgttgtctatttctgctggttacagacaacctataaatcctaatcttgaatatgagtatttgaacagagctattcatgaagacatgttcaaagtagtccagttttcatgtgaggagttatgttctacaaaagaacagctcagtaaagttctgaggctttgggaaaatttcctggaggcagtgctgggtgttcctcccagggccaagggcacagatcttgttgaagatgttgtaataaaccccaagactctcgatgtgaatcacagcacatctcctaacggggaggctgctgtgagttctggaggagacacagcaaggttggcttctaggaaacttaaatctgctgccaatggagatgagaattcttcatctgggacattcaaacatgggataggtttgttaaataaagattcgacagggaaagaaaatcttgaagatgttgaaatagctaacagagatggtgttgcctgctctgctgtgaaacctcagaaagaacaagaaactggaaatgaagccgagaaaaggtttggaaaacctatcccaatggatattagcgaaagagcagccatctcgagtatatcaatcccaagtggggcagaaaacaatcattgtgtagtaggcaaggaagttttgccaggtgcacatgagattcaagccaaaccaagcgacaccctcactgatattcatcatgatgtagatagcattgaaactgttcattcgactcagggaggtgatgttggcaattcgatagttttggcaaatggattaaggtcagattcttctaaaggtactaggaattctgatgatcccgaaggtccctccagaaatgagaaagaggaaggtgaactgtcacctaatggtgattttgaagacaactttggtgtttacaaagatcatggggtgaagtccacatccaaaccagagaattcagcagaggctgaagtagaggcagatgctgaagtagagaatgaggacgatgctgacgatgttgatagtgaaaatgcttccgaggcatctggaactgaatctggtggcgacgtatgttctcaggacgaagatagagaggaggagaatggtgagcatgatgagatcgatggtaaagctgagagtgaaggagaagcggagggaatggatccacatctcttagaaggagaaagtgagctgcttccacagtcagaacgtgttctcttatccgtcagacccctttcaaagcatgtcgcagcagttttatgcgatgagagaacaaaagatctccaagttttctatgggaatgacgacttttatgttctttttaggcttcaccaaatcctgtacgagagaattttgtatgcaaaaaggaattgctcaggcggtgaactgaaatcgaaaaacttaaaggataccaatgccggagatccttatgcgaggtttatgagggttttgtatggtttgctagatggatcagctgaaaataccaagtttgaggatgagtgcagagctataattggaaaccaatcatatgtgttattcacgttggacaaactgatttacagattggttaagcagcttcaagctattgtagccgatgaaatggacaacaagctgcttcagttgtatgagtatgagaaatcccggaaaccaggaagggttatcgactcagtgtattatgaaaatgttagggtcctcgttcacgaggaaaatatttaccggttggaatgttcatccttgccttcacgtttatctatccagcttatggataacataatcgagaagccagaagcatatgcagtttctatggatcccacatttgcaagttatatgcaaactgagttgctttccgtctcatcaggaaagaaagaggagggacatgacattgtattacaaaggaacctcaccgggttgtatgatctctgtaaagctatggaaggtgtcgaagtagtaaatggcttggaatgcaagatgtcttgctcttcttacaagatcgcgtacgtattggacacagaggattacttccacaggaagaagaagaaaaagaagactgaacagttatggcaacgtaacaaggtgagagtagaaaggttccataggtttctctcagcttaa

SEQ ID NO: 87342 - protein, 1372 aa, Arabidopsis thaliana
  peptide (1)..(1372): Ceres Seq. ID no. 12700173
  misc_feature (73)..(119): Pfam Name: Paired amphipathic helix repeat Pfam Description: Paired amphipathic helix repeat
  misc_feature (20)..(1083): Homolog of NCBI NO: 34894158 NR Description: putative co-repressor protein [Oryza sativa
  misc_feature (979)..(1336): Homolog of NCBI NO: 34894158 NR Description: putative co-repressor protein [Oryza sativa
  misc_feature (44)..(1301): Homolog of NCBI NO: 15221694 NR Description: hypothetical protein; protein id: At1g24190.1
  misc_feature (942)..(1301): Homolog of NCBI NO: 9945050 NR Description: Similar to Arabidopsis chromosome I BAC genomic
  misc_feature (443)..(777): Homolog of NCBI NO: 9945050 NR Description: Similar to Arabidopsis chromosome I BAC genomic
  misc_feature (42)..(243): Homolog of NCBI NO: 9945050 NR Description: Similar to Arabidopsis chromosome I BAC genomic
  misc_feature (954)..(1371): Homolog of NCBI NO: 15218525 NR Description: unknown protein; protein id: At1g10450.1
  misc_feature (454)..(845): Homolog of NCBI NO: 15218525 NR Description: unknown protein; protein id: At1g10450.1
  misc_feature (37)..(310): Homolog of NCBI NO: 15218525 NR Description: unknown protein; protein id: At1g10450.1
  misc_feature (954)..(1337): Homolog of NCBI NO: 25402600 NR Description: protein T10O24.5 [imported] - Arabidopsis >gi|5091536|gb|AAD39565.1|AC007067_5 T10O24.5 [Arabidopsis
MKRIRDDVYASGSQFRRPLGSSRGQLCGQSPVHGSGDTEEEEEGGSRRVSQKLTTNDALSYLREVKEMFQDQREKYDRFLEVMKDFKAQRTDTGGVIARVKELFKGHNNLIYGFNTFLPKGYEITLIEEDDALPKKTVEFEQAINFVNKIKMRFKHDEHVYKSFLEILNMYRKENKEIKEVYNEVSILFQGHLDLLEQFTRFLPASLPSHSAAQHSRSQAQQYSDRGSDPPLLHQMQVEKERRRERAVALRGDYSVERYDLNDDKTMVKIQREQRKRLDKENRARRGRDLDDREAGQDNLHHFPEKRKSSRRAEALEAYSGSASHSEKDNLKSMYKQAFVFCEKVKDRLCSQDDYQTFLKCLNIFSNGIIQRKDLQNLVSDLLGKFPDLMDEFNQFFERCESITDGFQRLAGVMSKKLFSSEEQLSRPMKVEEKESEHKPELEAVKETEQCKKEYMGKSIQELDLSDCECCTPSYRLLPADYPIPIASQRSELGAEVLNDHWVSVTSGSEDYSFKHMRRNQYEESLFRCEDDRFELDMLLESVSSAARSAESLLNIITEKKISFSGSFRIEDHFTALNLRCIERLYGDHGLDVIDILNKNPATALPVILTRLKQKQGEWKKCRDDFDKVWANVYAKNHYKSLDHRSFYFKQQDSKNLSAKSLLAEIKELKEKSQNDDDVLLSISAGYRQPINPNLEYEYLNRAIHEDMFKVVQFSCEELCSTKEQLSKVLRLWENFLEAVLGVPPRAKGTDLVEDVVINPKTLDVNHSTSPNGEAAVSSGGDTARLASRKLKSAANGDENSSSGTFKHGIGLLNKDSTGKENLEDVEIANRDGVACSAVKPQKEQETGNEAEKRFGKPIPMDISERAAISSISIPSGAENNHCVVGKEVLPGAHEIQAKPSDTLTDIHHDVDSIETVHSTQGGDVGNSIVLANGLRSDSSKGTRNSDDPEGPSRNEKEEGELSPNGDFEDNFGVYKDHGVKSTSKPENSAEAEVEADAEVENEDDADDVDSENASEASGTESGGDVCSQDEDREEENGEHDEIDGKAESEGEAEGMDPHLLEGESELLPQSERVLLSVRPLSKHVAAVLCDERTKDLQVFYGNDDFYVLFRLHQILYERILYAKRNCSGGELKSKNLKDTNAGDPYARFMRVLYGLLDGSAENTKFEDECRAIIGNQSYVLFTLDKLIYRLVKQLQAIVADEMDNKLLQLYEYEKSRKPGRVIDSVYYENVRVLVHEENIYRLECSSLPSRLSIQLMDNIIEKPEAYAVSMDPTFASYMQTELLSVSSGKKEEGHDIVLQRNLTGLYDLCKAMEGVEVVNGLECKMSCSSYKIAYVLDTEDYFHRKKKKKKTEQLWQRNKVRVERFHRFLSA

SEQ ID NO: 87343 - protein, 1305 aa, Arabidopsis thaliana
  peptide (1)..(1305): Ceres Seq. ID no. 12700174
  misc_feature (6)..(52): Pfam Name: Paired amphipathic helix repeat Pfam Description: Paired amphipathic helix repeat
  misc_feature (1)..(1016): Homolog of NCBI NO: 34894158 NR Description: putative co-repressor protein [Oryza sativa
  misc_feature (912)..(1269): Homolog of NCBI NO: 34894158 NR Description: putative co-repressor protein [Oryza sativa
  misc_feature (1)..(1234): Homolog of NCBI NO: 15221694 NR Description: hypothetical protein; protein id: At1g24190.1
  misc_feature (875)..(1234): Homolog of NCBI NO: 9945050 NR Description: Similar to Arabidopsis chromosome I BAC genomic
  misc_feature (376)..(710): Homolog of NCBI NO: 9945050 NR Description: Similar to Arabidopsis chromosome I BAC genomic
  misc_feature (1)..(176): Homolog of NCBI NO: 9945050 NR Description: Similar to Arabidopsis chromosome I BAC genomic
  misc_feature (887)..(1304): Homolog of NCBI NO: 15218525 NR Description: unknown protein; protein id: At1g10450.1
  misc_feature (387)..(778): Homolog of NCBI NO: 15218525 NR Description: unknown protein; protein id: At1g10450.1
  misc_feature (1)..(243): Homolog of NCBI NO: 15218525 NR Description: unknown protein; protein id: At1g10450.1
  misc_feature (887)..(1270): Homolog of NCBI NO: 25402600 NR Description: protein T10O24.5 [imported] - Arabidopsis >gi|5091536|gb|AAD39565.1|AC007067_5 T10O24.5 [Arabidopsis
MFQDQREKYDRFLEVMKDFKAQRTDTGGVIARVKELFKGHNNLIYGFNTFLPKGYEITLIEEDDALPKKTVEFEQAINFVNKIKMRFKHDEHVYKSFLEILNMYRKENKEIKEVYNEVSILFQGHLDLLEQFTRFLPASLPSHSAAQHSRSQAQQYSDRGSDPPLLHQMQVEKERRRERAVALRGDYSVERYDLNDDKTMVKIQREQRKRLDKENRARRGRDLDDREAGQDNLHHFPEKRKSSRRAEALEAYSGSASHSEKDNLKSMYKQAFVFCEKVKDRLCSQDDYQTFLKCLNIFSNGIIQRKDLQNLVSDLLGKFPDLMDEFNQFFERCESITDGFQRLAGVMSKKLFSSEEQLSRPMKVEEKESEHKPELEAVKETEQCKKEYMGKSIQELDLSDCECCTPSYRLLPADYPIPIASQRSELGAEVLNDHWVSVTSGSEDYSFKHMRRNQYEESLFRCEDDRFELDMLLESVSSAARSAESLLNIITEKKISFSGSFRIEDHFTALNLRCIERLYGDHGLDVIDILNKNPATALPVILTRLKQKQGEWKKCRDDFDKVWANVYAKNHYKSLDHRSFYFKQQDSKNLSAKSLLAEIKELKEKSQNDDDVLLSISAGYRQPINPNLEYEYLNRAIHEDMFKVVQFSCEELCSTKEQLSKVLRLWENFLEAVLGVPPRAKGTDLVEDVVINPKTLDVNHSTSPNGEAAVSSGGDTARLASRKLKSAANGDENSSSGTFKHGIGLLNKDSTGKENLEDVEIANRDGVACSAVKPQKEQETGNEAEKRFGKPIPMDISERAAISSISIPSGAENNHCVVGKEVLPGAHEIQAKPSDTLTDIHHDVDSIETVHSTQGGDVGNSIVLANGLRSDSSKGTRNSDDPEGPSRNEKEEGELSPNGDFEDNFGVYKDHGVKSTSKPENSAEAEVEADAEVENEDDADDVDSENASEASGTESGGDVCSQDEDREEENGEHDEIDGKAESEGEAEGMDPHLLEGESELLPQSERVLLSVRPLSKHVAAVLCDERTKDLQVFYGNDDFYVLFRLHQILYERILYAKRNCSGGELKSKNLKDTNAGDPYARFMRVLYGLLDGSAENTKFEDECRAIIGNQSYVLFTLDKLIYRLVKQLQAIVADEMDNKLLQLYEYEKSRKPGRVIDSVYYENVRVLVHEENIYRLECSSLPSRLSIQLMDNIIEKPEAYAVSMDPTFASYMQTELLSVSSGKKEEGHDIVLQRNLTGLYDLCKAMEGVEVVNGLECKMSCSSYKIAYVLDTEDYFHRKKKKKKTEQLWQRNKVRVERFHRFLSA

SEQ ID NO: 87344 - protein, 1290 aa, Arabidopsis thaliana
  peptide (1)..(1290): Ceres Seq. ID no. 12700175
  misc_feature (1)..(37): Pfam Name: Paired amphipathic helix repeat Pfam Description: Paired amphipathic helix repeat
  misc_feature (1)..(1001): Homolog of NCBI NO: 34894158 NR Description: putative co-repressor protein [Oryza sativa
  misc_feature (897)..(1254): Homolog of NCBI NO: 34894158 NR Description: putative co-repressor protein [Oryza sativa
  misc_feature (1)..(1219): Homolog of NCBI NO: 15221694 NR Description: hypothetical protein; protein id: At1g24190.1
  misc_feature (860)..(1219): Homolog of NCBI NO: 9945050 NR Description: Similar to Arabidopsis chromosome I BAC genomic
  misc_feature (361)..(695): Homolog of NCBI NO: 9945050 NR Description: Similar to Arabidopsis chromosome I BAC genomic
  misc_feature (1)..(161): Homolog of NCBI NO: 9945050 NR Description: Similar to Arabidopsis chromosome I BAC genomic
  misc_feature (872)..(1289): Homolog of NCBI NO: 15218525 NR Description: unknown protein; protein id: At1g10450.1
  misc_feature (372)..(763): Homolog of NCBI NO: 15218525 NR Description: unknown protein; protein id: At1g10450.1
  misc_feature (1)..(228): Homolog of NCBI NO: 15218525 NR Description: unknown protein; protein id: At1g10450.1
  misc_feature (872)..(1255): Homolog of NCBI NO: 25402600 NR Description: protein T10O24.5 [imported] - Arabidopsis >gi|5091536|gb|AAD39565.1|AC007067_5 T10O24.5 [Arabidopsis
MKDFKAQRTDTGGVIARVKELFKGHNNLIYGFNTFLPKGYEITLIEEDDALPKKTVEFEQAINFVNKIKMRFKHDEHVYKSFLEILNMYRKENKEIKEVYNEVSILFQGHLDLLEQFTRFLPASLPSHSAAQHSRSQAQQYSDRGSDPPLLHQMQVEKERRRERAVALRGDYSVERYDLNDDKTMVKIQREQRKRLDKENRARRGRDLDDREAGQDNLHHFPEKRKSSRRAEALEAYSGSASHSEKDNLKSMYKQAFVFCEKVKDRLCSQDDYQTFLKCLNIFSNGIIQRKDLQNLVSDLLGKFPDLMDEFNQFFERCESITDGFQRLAGVMSKKLFSSEEQLSRPMKVEEKESEHKPELEAVKETEQCKKEYMGKSIQELDLSDCECCTPSYRLLPADYPIPIASQRSELGAEVLNDHWVSVTSGSEDYSFKHMRRNQYEESLFRCEDDRFELDMLLESVSSAARSAESLLNIITEKKISFSGSFRIEDHFTALNLRCIERLYGDHGLDVIDILNKNPATALPVILTRLKQKQGEWKKCRDDFDKVWANVYAKNHYKSLDHRSFYFKQQDSKNLSAKSLLAEIKELKEKSQNDDDVLLSISAGYRQPINPNLEYEYLNRAIHEDMFKVVQFSCEELCSTKEQLSKVLRLWENFLEAVLGVPPRAKGTDLVEDVVINPKTLDVNHSTSPNGEAAVSSGGDTARLASRKLKSAANGDENSSSGTFKHGIGLLNKDSTGKENLEDVEIANRDGVACSAVKPQKEQETGNEAEKRFGKPIPMDISERAAISSISIPSGAENNHCVVGKEVLPGAHEIQAKPSDTLTDIHHDVDSIETVHSTQGGDVGNSIVLANGLRSDSSKGTRNSDDPEGPSRNEKEEGELSPNGDFEDNFGVYKDHGVKSTSKPENSAEAEVEADAEVENEDDADDVDSENASEASGTESGGDVCSQDEDREEENGEHDEIDGKAESEGEAEGMDPHLLEGESELLPQSERVLLSVRPLSKHVAAVLCDERTKDLQVFYGNDDFYVLFRLHQILYERILYAKRNCSGGELKSKNLKDTNAGDPYARFMRVLYGLLDGSAENTKFEDECRAIIGNQSYVLFTLDKLIYRLVKQLQAIVADEMDNKLLQLYEYEKSRKPGRVIDSVYYENVRVLVHEENIYRLECSSLPSRLSIQLMDNIIEKPEAYAVSMDPTFASYMQTELLSVSSGKKEEGHDIVLQRNLTGLYDLCKAMEGVEVVNGLECKMSCSSYKIAYVLDTEDYFHRKKKKKKTEQLWQRNKVRVERFHRFLSA

SEQ ID NO: 87345 - DNA, 1566 bp, Arabidopsis thaliana
  misc_feature (1)..(1566): Ceres Seq. ID no. 12700205
  misc_feature: MA Experiment ID: 20000166 Result: Up-regulated in Transcription
  misc_feature: MA Experiment 20000166 PARAMETER Experiment Name: At_100uM_ABA_P Parameter: Age (day) Value: 14
  misc_feature: MA Experiment 20000166 PARAMETER Experiment Name: At_100uM_ABA_P Parameter: Organism Value: A. thaliana
  misc_feature: MA Experiment 20000166 PARAMETER Experiment Name: At_100uM_ABA_P Parameter: Plant Line Value: WS
  misc_feature: MA Experiment 20000166 PARAMETER Experiment Name: At_100uM_ABA_P Parameter: Timepoint (hr) Value: 1
  misc_feature: MA Experiment 20000166 PARAMETER Experiment Name: At_100uM_ABA_P Parameter: Tissue Value: Aerial
  misc_feature: MA Experiment 20000166 PARAMETER Experiment Name: At_100uM_ABA_P Parameter: Treatment Value: 100uM ABA vs. No Treatment
  misc_feature: MA Experiment ID: 20000185 Result: Up-regulated in Transcription
  misc_feature: MA Experiment 20000185 PARAMETER Experiment Name: At_Roots__P Parameter: Age (day) Value: 7 vs. 21
  misc_feature: MA Experiment 20000185 PARAMETER Experiment Name: At_Roots__P Parameter: Organism Value: A. thaliana
  misc_feature: MA Experiment 20000185 PARAMETER Experiment Name: At_Roots__P Parameter: Tissue Value: Roots vs. Whole Plant
  misc_feature: MA Experiment ID: 20000227 Result: Down-regulated in Transcription
  misc_feature: MA Experiment 20000227 PARAMETER Experiment Name: At_Root-Tips-vs-Tops_P Parameter: Tissue Value: Root Tips vs. Root Tops
  misc_feature: MA Experiment ID: 20000439 Result: Up-regulated in Transcription
  misc_feature: MA Experiment 20000439 PARAMETER Experiment Name: At_Roots__P Parameter: Age (day) Value: 14 vs. 21
  misc_feature: MA Experiment 20000439 PARAMETER Experiment Name: At_Roots__P Parameter: Organism Value: A. thaliana
  misc_feature: MA Experiment 20000439 PARAMETER Experiment Name: At_Roots__P Parameter: Tissue Value: Roots vs. Whole Plant
  misc_feature: MA Experiment ID: 20000460 Result: Up-regulated in Transcription
  misc_feature: MA Experiment 20000460 PARAMETER Experiment Name: At_10percent_PEG_P Parameter: Age (day) Value: 12
  misc_feature: MA Experiment 20000460 PARAMETER Experiment Name: At_10percent_PEG_P Parameter: Organism Value: A. thaliana
  misc_feature: MA Experiment 20000460 PARAMETER Experiment Name: At_10percent_PEG_P Parameter: Plant Line Value: WS
  misc_feature: MA Experiment 20000460 PARAMETER Experiment Name: At_10percent_PEG_P Parameter: Timepoint (day) Value: 12
  misc_feature: MA Experiment 20000460 PARAMETER Experiment Name: At_10percent_PEG_P Parameter: Tissue Value: Whole Plant
  misc_feature: MA Experiment 20000460 PARAMETER Experiment Name: At_10percent_PEG_P Parameter: Treatment Value: 10percent PEG vs. No Treatment
  misc_feature: MA Experiment ID: 20000495 Result: Up-regulated in Transcription
  misc_feature: MA Experiment 20000495 PARAMETER Experiment Name: At_Guard_Cells_P Parameter: Harvest Date Value: 8/2/2002
  misc_feature: MA Experiment 20000495 PARAMETER Experiment Name: At_Guard_Cells_P Parameter: Organism Value: A. thaliana
  misc_feature: MA Experiment 20000495 PARAMETER Experiment Name: At_Guard_Cells_P Parameter: Tissue Value: Guard Cells vs. Leaves
  misc_feature: MA Experiment ID: 20000794 Result: Up-regulated in Transcription
  misc_feature: MA Experiment 20000794 PARAMETER Experiment Name: At_Petals_P Parameter: Age (day) Value: 23-25 days
  misc_feature: MA Experiment 20000794 PARAMETER Experiment Name: At_Petals_P Parameter: Plant Line Value: WS
  misc_feature: MA Experiment 20000794 PARAMETER Experiment Name: At_Petals_P Parameter: Tissue Value: Petals vs. Whole plant
  misc_feature: MA Experiment ID: 20001451 Result: Down-regulated in Transcription
  misc_feature: MA Experiment 20001451 PARAMETER Experiment Name: At_Far-red-induction_P Parameter: Age (day) Value: 7
  misc_feature: MA Experiment 20001451 PARAMETER Experiment Name: At_Far-red-induction_P Parameter: Light Value: Far-red vs. White
  misc_feature: MA Experiment 20001451 PARAMETER Experiment Name: At_Far-red-induction_P Parameter: Organism Value: A. thaliana
  misc_feature: MA Experiment 20001451 PARAMETER Experiment Name: At_Far-red-induction_P Parameter: Plant Line Value: Columbia
  misc_feature: MA Experiment 20001451 PARAMETER Experiment Name: At_Far-red-induction_P Parameter: Timepoint (hr) Value: 24
  misc_feature: MA Experiment 20001451 PARAMETER Experiment Name: At_Far-red-induction_P Parameter: Tissue Value: Whole Plant
  misc_feature: MA Experiment ID: 20001554 Result: Up-regulated in Transcription
  misc_feature: MA Experiment 20001554 PARAMETER Experiment Name: At_Drought_Soil_Dry_P Parameter: Age (day) Value: 21
  misc_feature: MA Experiment 20001554 PARAMETER Experiment Name: At_Drought_Soil_Dry_P Parameter: Organism Value: A. thaliana
  misc_feature: MA Experiment 20001554 PARAMETER Experiment Name: At_Drought_Soil_Dry_P Parameter: Plant Line Value: WS
  misc_feature: MA Experiment 20001554 PARAMETER Experiment Name: At_Drought_Soil_Dry_P Parameter: Post Timepoint (hr) Value: None
  misc_feature: MA Experiment 20001554 PARAMETER Experiment Name: At_Drought_Soil_Dry_P Parameter: Post-Treatment Value: None
  misc_feature: MA Experiment 20001554 PARAMETER Experiment Name: At_Drought_Soil_Dry_P Parameter: Timepoint (day) Value: 7
  misc_feature: MA Experiment 20001554 PARAMETER Experiment Name: At_Drought_Soil_Dry_P Parameter: Treatment Value: Drought vs. No Drought
atggatttagaacagaagacaagaggacttagcaagtcatgtgcccttctcatagtgattgcgggaatggagagatatgcattcaaaggagttgcatcaaacttagtgacatatctaacagatgtagtgaagatgagtaattcaagagcagccaaaactgttaacacttgggctggtttcacttctatgttgcctctcttctctgctcctttggctgatacttattgggacagattcttcaccatccttgcttcttcttccgtctactttgtgggactagtgggattgacatggacggcatttgctgggtcacgttcagctactaagactatctcttcttactttctctactcttcactatgtcttgtctcaatcggtttaggcgtcttaaacccttctcttcaagcctttggtgcagaccaactcgaccacgacctcgataagaatttcgatctttcctcgggtgatcaaaaggacgcgaaagctacccgaaagactcagtttttccaattgtggtactttggcgtctgcaccggcagccttatgggtgtcacagtcatggcttatattcaagacacttttggttgggttctcggtttcgccattcctggtatcgtgatattcctgtcgattttggtgttcatgtcgggttgtggaatttatgtttatgctccgggcgcccgtctgaagaagaaaacaactactacaccttttgagaagattcttaaattcattaaagggagagtagtgaagcagagaaatgacgagagctcgaaaacggttttctctggaattgataatgttaagttagtgattcgccttttccccatatggatgatgcttctcatgttcgcggttatcttccagctaccagcaacctttttcaccaaacaaggtgtgactatgaagagaaacattgggtccaacttcaaaatcccacctgcaaccctgcaaagcacgatcacattatcaatcatcctgcttatgccattatatgataagattttgatacctattaccaagagaatcaagaaaaacggtacaggtatctctgtgatggagagaatgggagtcggaatgtttctatccatcattgccattgttattgcggcaatagtcgaaaggaaaagactagccataagccaaaagatgaagactttacctgattatgatccagaaaccgtcccactgagcatcttctggctgctgcctcagtacatcctcttgggaatctcagatatattcacagtcgttgggatgcaagagtttttctacagtgaggttcctgtaagaatgagaacaatgggatttgctctctacacaagtgtttttggtgttggaagctttgtgagcgccgcactgatctcaattgtcgaggcttactcgagctcaacaggtgaccgacaaaactggtttgcagatgatatgtcggaagctcggcttgacaaatactactggcttcttgctcttacaagtacaataagctttgtagtctacatatttctatgcaagtttttcaagagtagcagtgatcaaggcgatgaaaaagaagaagcccctaaatga

SEQ ID NO: 87346 - protein, 521 aa, Arabidopsis thaliana
  peptide (1)..(521): Ceres Seq. ID no. 12700206
  misc_feature (79)..(254): Pfam Name: POT family Pfam Description: POT family
  misc_feature (254)..(521): Homolog of NCBI NO: 15232096 NR Description: putative peptide transporter; protein id: [Arabidopsis thaliana] >gi|6094559|gb|AAF03501.1|AC010676_11
  misc_feature (1)..(254): Homolog of NCBI NO: 15232096 NR Description: putative peptide transporter; protein id: [Arabidopsis thaliana] >gi|6094559|gb|AAF03501.1|AC010676_11
  misc_feature (256)..(515): Homolog of NCBI NO: 15242171 NR Description: oligopeptide transporter -like protein; protein At5g14940.1 [Arabidopsis thaliana] >gi|11358595|pir||T51439
  misc_feature (5)..(249): Homolog of NCBI NO: 15242171 NR Description: oligopeptide transporter -like protein; protein At5g14940.1 [Arabidopsis thaliana] >gi|11358595|pir||T51439
  misc_feature (265)..(508): Homolog of NCBI NO: 30687920 NR Description: oligopeptide transporter -related [Arabidopsis
  misc_feature (12)..(224): Homolog of NCBI NO: 30687920 NR Description: oligopeptide transporter -related [Arabidopsis
  misc_feature (228)..(506): Homolog of NCBI NO: 18086410 NR Description: At1g72120/F28P5_2 [Arabidopsis thaliana]
  misc_feature (1)..(241): Homolog of NCBI NO: 18086410 NR Description: At1g72120/F28P5_2 [Arabidopsis thaliana]
  misc_feature (265)..(508): Homolog of NCBI NO: 25402970 NR Description: Similar to peptide transporter [imported] - thaliana >gi|6587835|gb|AAF18524.1|AC006551_10 Similar to peptide
  misc_feature (12)..(224): Homolog of NCBI NO: 25402970 NR Description: Similar to peptide transporter [imported] - thaliana >gi|6587835|gb|AAF18524.1|AC006551_10 Similar to peptide
MDLEQKTRGLSKSCALLIVIAGMERYAFKGVASNLVTYLTDVVKMSNSRAAKTVNTWAGFTSMLPLFSAPLADTYWDRFFTILASSSVYFVGLVGLTWTAFAGSRSATKTISSYFLYSSLCLVSIGLGVLNPSLQAFGADQLDHDLDKNFDLSSGDQKDAKATRKTQFFQLWYFGVCTGSLMGVTVMAYIQDTFGWVLGFAIPGIVIFLSILVFMSGCGIYVYAPGARLKKKTTTTPFEKILKFIKGRVVKQRNDESSKTVFSGIDNVKLVIRLFPIWMMLLMFAVIFQLPATFFTKQGVTMKRNIGSNFKIPPATLQSTITLSIILLMPLYDKILIPITKRIKKNGTGISVMERMGVGMFLSIIAIVIAAIVERKRLAISQKMKTLPDYDPETVPLSIFWLLPQYILLGISDIFTVVGMQEFFYSEVPVRMRTMGFALYTSVFGVGSFVSAALISIVEAYSSSTGDRQNWFADDMSEARLDKYYWLLALTSTISFVVYIFLCKFFKSSSDQGDEKEEAPK

SEQ ID NO: 87347 - protein, 499 aa, Arabidopsis thaliana
  peptide (1)..(499): Ceres Seq. ID no. 12700207
  misc_feature (57)..(232): Pfam Name: POT family Pfam Description: POT family
  misc_feature (232)..(499): Homolog of NCBI NO: 15232096 NR Description: putative peptide transporter; protein id: [Arabidopsis thaliana] >gi|6094559|gb|AAF03501.1|AC010676_11
  misc_feature (1)..(232): Homolog of NCBI NO: 15232096 NR Description: putative peptide transporter; protein id: [Arabidopsis thaliana] >gi|6094559|gb|AAF03501.1|AC010676_11
  misc_feature (234)..(493): Homolog of NCBI NO: 15242171 NR Description: oligopeptide transporter -like protein; protein At5g14940.1 [Arabidopsis thaliana] >gi|11358595|pir||T51439
  misc_feature (1)..(227): Homolog of NCBI NO: 15242171 NR Description: oligopeptide transporter -like protein; protein At5g14940.1 [Arabidopsis thaliana] >gi|11358595|pir||T51439
  misc_feature (243)..(486): Homolog of NCBI NO: 30687920 NR Description: oligopeptide transporter -related [Arabidopsis
  misc_feature (1)..(202): Homolog of NCBI NO: 30687920 NR Description: oligopeptide transporter -related [Arabidopsis
  misc_feature (206)..(484): Homolog of NCBI NO: 18086410 NR Description: At1g72120/F28P5_2 [Arabidopsis thaliana]
  misc_feature (1)..(219): Homolog of NCBI NO: 18086410 NR Description: At1g72120/F28P5_2 [Arabidopsis thaliana]
  misc_feature (243)..(486): Homolog of NCBI NO: 25402970 NR Description: Similar to peptide transporter [imported] - thaliana >gi|6587835|gb|AAF18524.1|AC006551_10 Similar to peptide
  misc_feature (1)..(202): Homolog of NCBI NO: 25402970 NR Description: Similar to peptide transporter [imported] - thaliana >gi|6587835|gb|AAF18524.1|AC006551_10 Similar to peptide
MERYAFKGVASNLVTYLTDVVKMSNSRAAKTVNTWAGFTSMLPLFSAPLADTYWDRFFTILASSSVYFVGLVGLTWTAFAGSRSATKTISSYFLYSSLCLVSIGLGVLNPSLQAFGADQLDHDLDKNFDLSSGDQKDAKATRKTQFFQLWYFGVCTGSLMGVTVMAYIQDTFGWVLGFAIPGIVIFLSILVFMSGCGIYVYAPGARLKKKTTTTPFEKILKFIKGRVVKQRNDESSKTVFSGIDNVKLVIRLFPIWMMLLMFAVIFQLPATFFTKQGVTMKRNIGSNFKIPPATLQSTITLSIILLMPLYDKILIPITKRIKKNGTGISVMERMGVGMFLSIIAIVIAAIVERKRLAISQKMKTLPDYDPETVPLSIFWLLPQYILLGISDIFTVVGMQEFFYSEVPVRMRTMGFALYTSVFGVGSFVSAALISIVEAYSSSTGDRQNWFADDMSEARLDKYYWLLALTSTISFVVYIFLCKFFKSSSDQGDEKEEAPK

SEQ ID NO: 87348 - protein, 477 aa, Arabidopsis thaliana
  peptide (1)..(477): Ceres Seq. ID no. 12700208
  misc_feature (35)..(210): Pfam Name: POT family Pfam Description: POT family
  misc_feature (210)..(477): Homolog of NCBI NO: 15232096 NR Description: putative peptide transporter; protein id: [Arabidopsis thaliana] >gi|6094559|gb|AAF03501.1|AC010676_11
  misc_feature (1)..(210): Homolog of NCBI NO: 15232096 NR Description: putative peptide transporter; protein id: [Arabidopsis thaliana] >gi|6094559|gb|AAF03501.1|AC010676_11
  misc_feature (212)..(471): Homolog of NCBI NO: 15242171 NR Description: oligopeptide transporter -like protein; protein At5g14940.1 [Arabidopsis thaliana] >gi|11358595|pir||T51439
  misc_feature (1)..(205): Homolog of NCBI NO: 15242171 NR Description: oligopeptide transporter -like protein; protein At5g14940.1 [Arabidopsis thaliana] >gi|11358595|pir||T51439
  misc_feature (221)..(464): Homolog of NCBI NO: 30687920 NR Description: oligopeptide transporter -related [Arabidopsis
  misc_feature (1)..(180): Homolog of NCBI NO: 30687920 NR Description: oligopeptide transporter -related [Arabidopsis
  misc_feature (184)..(462): Homolog of NCBI NO: 18086410 NR Description: At1g72120/F28P5_2 [Arabidopsis thaliana]
  misc_feature (1)..(197): Homolog of NCBI NO: 18086410 NR Description: At1g72120/F28P5_2 [Arabidopsis thaliana]
  misc_feature (221)..(464): Homolog of NCBI NO: 25402970 NR Description: Similar to peptide transporter [imported] - thaliana >gi|6587835|gb|AAF18524.1|AC006551_10 Similar to peptide
  misc_feature (1)..(180): Homolog of NCBI NO: 25402970 NR Description: Similar to peptide transporter [imported] - thaliana >gi|6587835|gb|AAF18524.1|AC006551_10 Similar to peptide
MSNSRAAKTVNTWAGFTSMLPLFSAPLADTYWDRFFTILASSSVYFVGLVGLTWTAFAGSRSATKTISSYFLYSSLCLVSIGLGVLNPSLQAFGADQLDHDLDKNFDLSSGDQKDAKATRKTQFFQLWYFGVCTGSLMGVTVMAYIQDTFGWVLGFAIPGIVIFLSILVFMSGCGIYVYAPGARLKKKTTTTPFEKILKFIKGRVVKQRNDESSKTVFSGIDNVKLVIRLFPIWMMLLMFAVIFQLPATFFTKQGVTMKRNIGSNFKIPPATLQSTITLSIILLMPLYDKILIPITKRIKKNGTGISVMERMGVGMFLSIIAIVIAAIVERKRLAISQKMKTLPDYDPETVPLSIFWLLPQYILLGISDIFTVVGMQEFFYSEVPVRMRTMGFALYTSVFGVGSFVSAALISIVEAYSSSTGDRQNWFADDMSEARLDKYYWLLALTSTISFVVYIFLCKFFKSSSDQGDEKEEAPK

SEQ ID NO: 87349 - DNA, 1453 bp, Arabidopsis thaliana
  misc_feature (1)..(1453): Ceres Seq. ID no. 12700221
  misc_feature: MA Experiment ID: 108573 Result: Up-regulated in Transcription
  misc_feature: MA Experiment 108573 PARAMETER Experiment Name: At_Drought_cDNA_P Parameter: Timepoint (hr) Value: 6
  misc_feature: MA Experiment 108573 PARAMETER Experiment Name: At_Drought_cDNA_P Parameter: Tissue Value: Aerial
  misc_feature: MA Experiment 108573 PARAMETER Experiment Name: At_Drought_cDNA_P Parameter: Treatment Value: Drought vs. No Drought
  misc_feature: MA Experiment ID: 20001247 Result: Up-regulated in Transcription
  misc_feature: MA Experiment 20001247 PARAMETER Experiment Name: At_Far-red-induction_P Parameter: Age (day) Value: 7
  misc_feature: MA Experiment 20001247 PARAMETER Experiment Name: At_Far-red-induction_P Parameter: Light Value: Far-red vs. White
  misc_feature: MA Experiment 20001247 PARAMETER Experiment Name: At_Far-red-induction_P Parameter: Organism Value: A. thaliana
  misc_feature: MA Experiment 20001247 PARAMETER Experiment Name: At_Far-red-induction_P Parameter: Plant Line Value: Columbia
  misc_feature: MA Experiment 20001247 PARAMETER Experiment Name: At_Far-red-induction_P Parameter: Timepoint (hr) Value: 1
  misc_feature: MA Experiment 20001247 PARAMETER Experiment Name: At_Far-red-induction_P Parameter: Tissue Value: Whole Plant
  misc_feature: MA Experiment ID: 20001560 Result: Down-regulated in Transcription
  misc_feature: MA Experiment 20001560 PARAMETER Experiment Name: At_Drought_Soil_Dry_P Parameter: Age (day) Value: 28
  misc_feature: MA Experiment 20001560 PARAMETER Experiment Name: At_Drought_Soil_Dry_P Parameter: Organism Value: A. thaliana
  misc_feature: MA Experiment 20001560 PARAMETER Experiment Name: At_Drought_Soil_Dry_P Parameter: Plant Line Value: WS
  misc_feature: MA Experiment 20001560 PARAMETER Experiment Name: At_Drought_Soil_Dry_P Parameter: Post Timepoint (hr) Value: None
  misc_feature: MA Experiment 20001560 PARAMETER Experiment Name: At_Drought_Soil_Dry_P Parameter: Post-Treatment Value: None
  misc_feature: MA Experiment 20001560 PARAMETER Experiment Name: At_Drought_Soil_Dry_P Parameter: Timepoint (day) Value: 14
  misc_feature: MA Experiment 20001560 PARAMETER Experiment Name: At_Drought_Soil_Dry_P Parameter: Treatment Value: Drought vs. No Drought
attattattccactctctctctctagactctgaattagctcattcttgcctccaaacaaatattcctgacagaccagaccactcgtaagacagaccaaaccctaaactaaaagcatccacgttctttgtttttgtattgatggtctgatctcatatccatggagatggagaatcaccgccccggcagtttcacctacatgggccgcaaattcagcgatttaagtctcaacgatgactcctctgctttcagcgattgtaacagcgacagatccggcgaattccccactgcttcctccgagagccgtcgtctcctcctctcttgcgcctctgagaattccgatgatctcatcaatcatctcgtgtcgcatcttgattcctcctattcgatcgatgagcagaagcaagctgctatggagatcaggctcttatccaagaacaaacctgagaatcggatcaaaatcgccaaggccggtgcgattaagccgttgatttctctgatctcttcttcggatcttcagcttcaggagtatggtgtcactgcaatcttgaatctatctctctgcgacgagaacaaagagtcgattgcttcttccggtgcgattaagccgcttgtcagggctttgaaaatgggaacaccgactgctaaagagaacgctgcttgtgctctgctccgtctatcgcagatcgaggagaacaaagtcgccatcgggagatccggagcgattcctctgttggtgaaccttctagaaacaggcggattcagagcgaagaaggacgcgtcgacggctctgtactcgttgtgctcagctaaagagaacaaaatcagagccgtgcaatcgggaattatgaagccgcttgttgaattgatggcggatttcggatcaaacatggtggataaatcggcgtttgtgatgagtctgttaatgtcggtgccggaatcgaaaccggcgattgtggaggaaggaggagttccggtgctggtggagatagtagaggtgggaacacagagacagaaagagatggctgtgtcgatattgctacagctttgtgaggagagtgttgtgtatagaacaatggtggctagagaaggagcgatacctccgctagtggctctgtcgcaggcaggaacaagtcgagctaagcaaaaggctgaggcgttgattgagcttctaaggcaaccaagatccattagtaatggtggtgctagatcatcgtcccaactctgatgtgagcttttcttatttatctttttttaccacactctttcttcgtcttttactgttaatgcgagggtgtatacaaacaaccagaaaaaaaaggggggaaaaggaaactgtaaatagtttgtgtagaaaattagtgggcttgttgtaatttatcttgagtttggcttttcttttctttttgtgatccatttcataaatttcggtttggttttaacagatttctcatt

SEQ ID NO: 87350 - protein, 355 aa, Arabidopsis thaliana
  peptide (1)..(355): Ceres Seq. ID no. 12700222
  misc_feature (135)..(175): Pfam Name: Armadillo/beta-catenin-like repeat Pfam Description: Armadillo/beta-catenin-like repeat
  misc_feature (1)..(355): Homolog of NCBI NO: 18395805 NR Description: expressed protein; protein id: At3g01400.1, by cDNA: 34582., supported by cDNA: gi_16226453 [Arabidopsis >gi|6692260|gb|AAF24610.1|AC010870_3 unknown protein [Arabidopsis
  misc_feature (1)..(355): Homolog of NCBI NO: 21592960 NR Description: unknown [Arabidopsis thaliana]
  misc_feature (1)..(355): Homolog of NCBI NO: 16226454 NR Description: AT3g01400/T13O15_4 [Arabidopsis thaliana]
  misc_feature (3)..(342): Homolog of NCBI NO: 15237730 NR Description: putative protein; protein id: At5g58680.1, by cDNA: 105025. [Arabidopsis thaliana]
  misc_feature (3)..(342): Homolog of NCBI NO: 26452835 NR Description: unknown protein [Arabidopsis thaliana]
  misc_feature (32)..(342): Homolog of NCBI NO: 8843789 NR Description: phosphoinositide-specific phospholipase C-line
  misc_feature (18)..(345): Homolog of NCBI NO: 34393600 NR Description: arm repeat-containing protein-like protein [Oryza
  misc_feature (52)..(342): Homolog of NCBI NO: 26452478 NR Description: unknown protein [Arabidopsis thaliana]
  misc_feature (35)..(348): Homolog of NCBI NO: 28974687 NR Description: arm repeat-containing protein [Nicotiana tabacum]
  misc_feature (47)..(350): Homolog of NCBI NO: 34393717 NR Description: arm repeat containing protein homolog-like [Oryza
MEMENHRPGSFTYMGRKFSDLSLNDDSSAFSDCNSDRSGEFPTASSESRRLLLSCASENSDDLINHLVSHLDSSYSIDEQKQAAMEIRLLSKNKPENRIKIAKAGAIKPLISLISSSDLQLQEYGVTAILNLSLCDENKESIASSGAIKPLVRALKMGTPTAKENAACALLRLSQIEENKVAIGRSGAIPLLVNLLETGGFRAKKDASTALYSLCSAKENKIRAVQSGIMKPLVELMADFGSNMVDKSAFVMSLLMSVPESKPAIVEEGGVPVLVEIVEVGTQRQKEMAVSILLQLCEESVVYRTMVAREGAIPPLVALSQAGTSRAKQKAEALIELLRQPRSISNGGARSSSQL

SEQ ID NO: 87351 - protein, 353 aa, Arabidopsis thaliana
  peptide (1)..(353): Ceres Seq. ID no. 12700223
  misc_feature (133)..(173): Pfam Name: Armadillo/beta-catenin-like repeat Pfam Description: Armadillo/beta-catenin-like repeat
  misc_feature (1)..(353): Homolog of NCBI NO: 18395805 NR Description: expressed protein; protein id: At3g01400.1, by cDNA: 34582., supported by cDNA: gi_16226453 [Arabidopsis >gi|6692260|gb|AAF24610.1|AC010870_3 unknown protein [Arabidopsis
  misc_feature (1)..(353): Homolog of NCBI NO: 21592960 NR Description: unknown [Arabidopsis thaliana]
  misc_feature (1)..(353): Homolog of NCBI NO: 16226454 NR Description: AT3g01400/T13O15_4 [Arabidopsis thaliana]
  misc_feature (1)..(340): Homolog of NCBI NO: 15237730 NR Description: putative protein; protein id: At5g58680.1, by cDNA: 105025. [Arabidopsis thaliana]
  misc_feature (1)..(340): Homolog of NCBI NO: 26452835 NR Description: unknown protein [Arabidopsis thaliana]
  misc_feature (30)..(340): Homolog of NCBI NO: 8843789 NR Description: phosphoinositide-specific phospholipase C-line
  misc_feature (16)..(343): Homolog of NCBI NO: 34393600 NR Description: arm repeat-containing protein-like protein [Oryza
  misc_feature (50)..(340): Homolog of NCBI NO: 26452478 NR Description: unknown protein [Arabidopsis thaliana]
  misc_feature (33)..(346): Homolog of NCBI NO: 28974687 NR Description: arm repeat-containing protein [Nicotiana tabacum]
  misc_feature (45)..(348): Homolog of NCBI NO: 34393717 NR Description: arm repeat containing protein homolog-like [Oryza
MENHRPGSFTYMGRKFSDLSLNDDSSAFSDCNSDRSGEFPTASSESRRLLLSCASENSDDLINHLVSHLDSSYSIDEQKQAAMEIRLLSKNKPENRIKIAKAGAIKPLISLISSSDLQLQEYGVTAILNLSLCDENKESIASSGAIKPLVRALKMGTPTAKENAACALLRLSQIEENKVAIGRSGAIPLLVNLLETGGFRAKKDASTALYSLCSAKENKIRAVQSGIMKPLVELMADFGSNMVDKSAFVMSLLMSVPESKPAIVEEGGVPVLVEIVEVGTQRQKEMAVSILLQLCEESVVYRTMVAREGAIPPLVALSQAGTSRAKQKAEALIELLRQPRSISNGGARSSSQL

SEQ ID NO: 87352 - protein, 342 aa, Arabidopsis thaliana
  peptide (1)..(342): Ceres Seq. ID no. 12700224
  misc_feature (122)..(162): Pfam Name: Armadillo/beta-catenin-like repeat Pfam Description: Armadillo/beta-catenin-like repeat
  misc_feature (1)..(342): Homolog of NCBI NO: 18395805 NR Description: expressed protein; protein id: At3g01400.1, by cDNA: 34582., supported by cDNA: gi_16226453 [Arabidopsis >gi|6692260|gb|AAF24610.1|AC010870_3 unknown protein [Arabidopsis
  misc_feature (1)..(342): Homolog of NCBI NO: 21592960 NR Description: unknown [Arabidopsis thaliana]
  misc_feature (1)..(342): Homolog of NCBI NO: 16226454 NR Description: AT3g01400/T13O15_4 [Arabidopsis thaliana]
  misc_feature (1)..(329): Homolog of NCBI NO: 15237730 NR Description: putative protein; protein id: At5g58680.1, by cDNA: 105025. [Arabidopsis thaliana]
  misc_feature (1)..(329): Homolog of NCBI NO: 26452835 NR Description: unknown protein [Arabidopsis thaliana]
  misc_feature (19)..(329): Homolog of NCBI NO: 8843789 NR Description: phosphoinositide-specific phospholipase C-line
  misc_feature (5)..(332): Homolog of NCBI NO: 34393600 NR Description: arm repeat-containing protein-like protein [Oryza
  misc_feature (39)..(329): Homolog of NCBI NO: 26452478 NR Description: unknown protein [Arabidopsis thaliana]
  misc_feature (22)..(335): Homolog of NCBI NO: 28974687 NR Description: arm repeat-containing protein [Nicotiana tabacum]
  misc_feature (34)..(337): Homolog of NCBI NO: 34393717 NR Description: arm repeat containing protein homolog-like [Oryza
MGRKFSDLSLNDDSSAFSDCNSDRSGEFPTASSESRRLLLSCASENSDDLINHLVSHLDSSYSIDEQKQAAMEIRLLSKNKPENRIKIAKAGAIKPLISLISSSDLQLQEYGVTAILNLSLCDENKESIASSGAIKPLVRALKMGTPTAKENAACALLRLSQIEENKVAIGRSGAIPLLVNLLETGGFRAKKDASTALYSLCSAKENKIRAVQSGIMKPLVELMADFGSNMVDKSAFVMSLLMSVPESKPAIVEEGGVPVLVEIVEVGTQRQKEMAVSILLQLCEESVVYRTMVAREGAIPPLVALSQAGTSRAKQKAEALIELLRQPRSISNGGARSSSQL

SEQ ID NO: 87353 - DNA, 842 bp, Arabidopsis thaliana
  misc_feature (1)..(842): Ceres Seq. ID no. 12700233
  misc_feature: MA Experiment ID: 108435 Result: Down-regulated in Transcription
  misc_feature: MA Experiment 108435 PARAMETER Experiment Name: At_stm_Mutants_cDNA_P Parameter: Plant Line Value: wt Landsburg vs stm
  misc_feature: MA Experiment 108435 PARAMETER Experiment Name: At_stm_Mutants_cDNA_P Parameter: Tissue Value: Shoot Apical Meristem Region
  misc_feature: MA Experiment ID: 108461 Result: Up-regulated in Transcription
  misc_feature: MA Experiment 108461 PARAMETER Experiment Name: At_Germinating_Seeds_cDNA_P Parameter: Age (day) Value: 1 vs. 0
  misc_feature: MA Experiment 108461 PARAMETER Experiment Name: At_Germinating_Seeds_cDNA_P Parameter: Tissue Value: Germinating Seeds
  misc_feature: MA Experiment ID: 108462 Result: Up-regulated in Transcription
  misc_feature: MA Experiment 108462 PARAMETER Experiment Name: At_Germinating_Seeds_cDNA_P Parameter: Age (day) Value: 2 vs. 0
  misc_feature: MA Experiment 108462 PARAMETER Experiment Name: At_Germinating_Seeds_cDNA_P Parameter: Tissue Value: Germinating Seeds
  misc_feature: MA Experiment ID: 108463 Result: Up-regulated in Transcription
  misc_feature: MA Experiment 108463 PARAMETER Experiment Name: At_Germinating_Seeds_cDNA_P Parameter: Age (day) Value: 3 vs. 0
  misc_feature: MA Experiment 108463 PARAMETER Experiment Name: At_Germinating_Seeds_cDNA_P Parameter: Tissue Value: Germinating Seeds
  misc_feature: MA Experiment ID: 108464 Result: Up-regulated in Transcription
  misc_feature: MA Experiment 108464 PARAMETER Experiment Name: At_Germinating_Seeds_cDNA_P Parameter: Age (day) Value: 4 vs. 0
  misc_feature: MA Experiment 108464 PARAMETER Experiment Name: At_Germinating_Seeds_cDNA_P Parameter: Tissue Value: Germinating Seeds
  misc_feature: MA Experiment ID: 108469 Result: Down-regulated in Transcription
  misc_feature: MA Experiment ID: 108561 Result: Down-regulated in Transcription
  misc_feature: MA Experiment 108561 PARAMETER Experiment Name: At_100uM_ABA_cDNA_P Parameter: Timepoint (hr) Value: 6
  misc_feature: MA Experiment 108561 PARAMETER Experiment Name: At_100uM_ABA_cDNA_P Parameter: Tissue Value: Aerial
  misc_feature: MA Experiment 108561 PARAMETER Experiment Name: At_100uM_ABA_cDNA_P Parameter: Treatment Value: 100uM ABA vs. No Treatment
  misc_feature: MA Experiment ID: 108573 Result: Down-regulated in Transcription
  misc_feature: MA Experiment 108573 PARAMETER Experiment Name: At_Drought_cDNA_P Parameter: Timepoint (hr) Value: 6
  misc_feature: MA Experiment 108573 PARAMETER Experiment Name: At_Drought_cDNA_P Parameter: Tissue Value: Aerial
  misc_feature: MA Experiment 108573 PARAMETER Experiment Name: At_Drought_cDNA_P Parameter: Treatment Value: Drought vs. No Drought
  misc_feature: MA Experiment ID: 108579 Result: Up-regulated in Transcription
  misc_feature: MA Experiment 108579 PARAMETER Experiment Name: At_4deg_Cold_cDNA_P Parameter: Temperature (deg C) Value: 4 vs. 22
  misc_feature: MA Experiment 108579 PARAMETER Experiment Name: At_4deg_Cold_cDNA_P Parameter: Timepoint (hr) Value: 6
  misc_feature: MA Experiment 108579 PARAMETER Experiment Name: At_4deg_Cold_cDNA_P Parameter: Tissue Value: Aerial
  misc_feature: MA Experiment ID: 108585 Result: Down-regulated in Transcription
  misc_feature: MA Experiment 108585 PARAMETER Experiment Name: At_5mM_NaNP_cDNA_P Parameter: Timepoint (hr) Value: 6
  misc_feature: MA Experiment 108585 PARAMETER Experiment Name: At_5mM_NaNP_cDNA_P Parameter: Tissue Value: Aerial
  misc_feature: MA Experiment 108585 PARAMETER Experiment Name: At_5mM_NaNP_cDNA_P Parameter: Treatment Value: null
  misc_feature: MA Experiment ID: 108595 Result: Down-regulated in Transcription
  misc_feature: MA Experiment 108595 PARAMETER Experiment Name: At_Ler-pi_Ovule_cDNA_P Parameter: Plant Line Value: null
  misc_feature: MA Experiment ID: 108605 Result: Down-regulated in Transcription
  misc_feature: MA Experiment 108605 PARAMETER Experiment Name: At_100uM_ABA_cDNA_P Parameter: Timepoint (hr) Value: 6
  misc_feature: MA Experiment 108605 PARAMETER Experiment Name: At_100uM_ABA_cDNA_P Parameter: Tissue Value: Aerial
  misc_feature: MA Experiment 108605 PARAMETER Experiment Name: At_100uM_ABA_cDNA_P Parameter: Treatment Value: 100uM ABA vs. No Treatment
  misc_feature: MA Experiment ID: 108607 Result: Down-regulated in Transcription
  misc_feature: MA Experiment 108607 PARAMETER Experiment Name: At_100uM_ABA_cDNA_P Parameter: Timepoint (hr) Value: 4
  misc_feature: MA Experiment 108607 PARAMETER Experiment Name: At_100uM_ABA_cDNA_P Parameter: Tissue Value: Aerial
  misc_feature: MA Experiment 108607 PARAMETER Experiment Name: At_100uM_ABA_cDNA_P Parameter: Treatment Value: 100uM ABA vs. No Treatment
  misc_feature: MA Experiment ID: 20000069 Result: Down-regulated in Transcription
  misc_feature: MA Experiment 20000069 PARAMETER Experiment Name: At_100uM_ABA_Mutants_cDNA_P Parameter: Plant Line Value: CS23
  misc_feature: MA Experiment 20000069 PARAMETER Experiment Name: At_100uM_ABA_Mutants_cDNA_P Parameter: Timepoint (hr) Value: 6
  misc_feature: MA Experiment 20000069 PARAMETER Experiment Name: At_100uM_ABA_Mutants_cDNA_P Parameter: Tissue Value: Aerial
  misc_feature: MA Experiment 20000069 PARAMETER Experiment Name: At_100uM_ABA_Mutants_cDNA_P Parameter: Treatment Value: 100uM ABA vs. No Treatment
  misc_feature: MA Experiment ID: 20000070 Result: Down-regulated in Transcription
  misc_feature: MA Experiment 20000070 PARAMETER Experiment Name: At_100uM_ABA_Mutants_cDNA_P Parameter: Plant Line Value: CS24
  misc_feature: MA Experiment 20000070 PARAMETER Experiment Name: At_100uM_ABA_Mutants_cDNA_P Parameter: Timepoint (hr) Value: 6
  misc_feature: MA Experiment 20000070 PARAMETER Experiment Name: At_100uM_ABA_Mutants_cDNA_P Parameter: Tissue Value: Aerial
  misc_feature: MA Experiment 20000070 PARAMETER Experiment Name: At_100uM_ABA_Mutants_cDNA_P Parameter: Treatment Value: 100uM ABA vs. No Treatment
  misc_feature: MA Experiment ID: 20000071 Result: Down-regulated in Transcription
  misc_feature: MA Experiment 20000071 PARAMETER Experiment Name: At_100uM_ABA_Mutants_cDNA_P Parameter: Plant Line Value: CS8104
  misc_feature: MA Experiment 20000071 PARAMETER Experiment Name: At_100uM_ABA_Mutants_cDNA_P Parameter: Timepoint (hr) Value: 6
  misc_feature: MA Experiment 20000071 PARAMETER Experiment Name: At_100uM_ABA_Mutants_cDNA_P Parameter: Tissue Value: Aerial
  misc_feature: MA Experiment 20000071 PARAMETER Experiment Name: At_100uM_ABA_Mutants_cDNA_P Parameter: Treatment Value: 100uM ABA vs. No Treatment
  misc_feature: MA Experiment ID: 20000086 Result: Down-regulated in Transcription
  misc_feature: MA Experiment 20000086 PARAMETER Experiment Name: At_100uM_ABA_Mutants_cDNA_P Parameter: Plant Line Value: CS22
  misc_feature: MA Experiment 20000086 PARAMETER Experiment Name: At_100uM_ABA_Mutants_cDNA_P Parameter: Timepoint (hr) Value: 6
  misc_feature: MA Experiment 20000086 PARAMETER Experiment Name: At_100uM_ABA_Mutants_cDNA_P Parameter: Tissue Value: Aerial
  misc_feature: MA Experiment 20000086 PARAMETER Experiment Name: At_100uM_ABA_Mutants_cDNA_P Parameter: Treatment Value: 100uM ABA vs. No Treatment
  misc_feature: MA Experiment ID: 20000087 Result: Down-regulated in Transcription
  misc_feature: MA Experiment 20000087 PARAMETER Experiment Name: At_100uM_ABA_Mutants_cDNA_P Parameter: Plant Line Value: WS
  misc_feature: MA Experiment 20000087 PARAMETER Experiment Name: At_100uM_ABA_Mutants_cDNA_P Parameter: Timepoint (hr) Value: 6
  misc_feature: MA Experiment 20000087 PARAMETER Experiment Name: At_100uM_ABA_Mutants_cDNA_P Parameter: Tissue Value: Aerial
  misc_feature: MA Experiment 20000087 PARAMETER Experiment Name: At_100uM_ABA_Mutants_cDNA_P Parameter: Treatment Value: 100uM ABA vs. No Treatment
  misc_feature: MA Experiment ID: 20000088 Result: Down-regulated in Transcription
  misc_feature: MA Experiment 20000088 PARAMETER Experiment Name: At_100uM_ABA_Mutants_cDNA_P Parameter: Plant Line Value: Landsberg
  misc_feature: MA Experiment 20000088 PARAMETER Experiment Name: At_100uM_ABA_Mutants_cDNA_P Parameter: Timepoint (hr) Value: 6
  misc_feature: MA Experiment 20000088 PARAMETER Experiment Name: At_100uM_ABA_Mutants_cDNA_P Parameter: Tissue Value: Aerial
  misc_feature: MA Experiment 20000088 PARAMETER Experiment Name: At_100uM_ABA_Mutants_cDNA_P Parameter: Treatment Value: 100uM ABA vs. No Treatment
  misc_feature: MA Experiment ID: 20000090 Result: Down-regulated in Transcription
  misc_feature: MA Experiment ID: 20000117 Result: Down-regulated in Transcription
  misc_feature: MA Experiment 20000117 PARAMETER Experiment Name: At_100uM_ABA_Mutants_cDNA_P Parameter: Plant Line Value: Columbia
  misc_feature: MA Experiment 20000117 PARAMETER Experiment Name: At_100uM_ABA_Mutants_cDNA_P Parameter: Timepoint (hr) Value: 6
  misc_feature: MA Experiment 20000117 PARAMETER Experiment Name: At_100uM_ABA_Mutants_cDNA_P Parameter: Tissue Value: Aerial
  misc_feature: MA Experiment 20000117 PARAMETER Experiment Name: At_100uM_ABA_Mutants_cDNA_P Parameter: Treatment Value: 100uM ABA vs. No Treatment
  misc_feature: MA Experiment ID: 20000169 Result: Down-regulated in Transcription
  misc_feature: MA Experiment 20000169 PARAMETER Experiment Name: At_100uM_ABA_P Parameter: Age (day) Value: 14
  misc_feature: MA Experiment 20000169 PARAMETER Experiment Name: At_100uM_ABA_P Parameter: Organism Value: A. thaliana
  misc_feature: MA Experiment 20000169 PARAMETER Experiment Name: At_100uM_ABA_P Parameter: Plant Line Value: WS
  misc_feature: MA Experiment 20000169 PARAMETER Experiment Name: At_100uM_ABA_P Parameter: Timepoint (hr) Value: 6
  misc_feature: MA Experiment 20000169 PARAMETER Experiment Name: At_100uM_ABA_P Parameter: Tissue Value: Aerial
  misc_feature: MA Experiment 20000169 PARAMETER Experiment Name: At_100uM_ABA_P Parameter: Treatment Value: 100uM ABA vs. No Treatment
  misc_feature: MA Experiment ID: 20000182 Result: Down-regulated in Transcription
  misc_feature: MA Experiment 20000182 PARAMETER Experiment Name: At_2mM_SA_P Parameter: Age (day) Value: 14
  misc_feature: MA Experiment 20000182 PARAMETER Experiment Name: At_2mM_SA_P Parameter: Organism Value: A. thaliana
  misc_feature: MA Experiment 20000182 PARAMETER Experiment Name: At_2mM_SA_P Parameter: Plant Line Value: WS
  misc_feature: MA Experiment 20000182 PARAMETER Experiment Name: At_2mM_SA_P Parameter: Timepoint (hr) Value: 6
  misc_feature: MA Experiment 20000182 PARAMETER Experiment Name: At_2mM_SA_P Parameter: Tissue Value: Aerial
  misc_feature: MA Experiment 20000182 PARAMETER Experiment Name: At_2mM_SA_P Parameter: Treatment Value: 2mM SA vs. No Treatment
  misc_feature: MA Experiment ID: 20000185 Result: Down-regulated in Transcription
  misc_feature: MA Experiment 20000185 PARAMETER Experiment Name: At_Roots__P Parameter: Age (day) Value: 7 vs. 21
  misc_feature: MA Experiment 20000185 PARAMETER Experiment Name: At_Roots__P Parameter: Organism Value: A. thaliana
  misc_feature: MA Experiment 20000185 PARAMETER Experiment Name: At_Roots__P Parameter: Tissue Value: Roots vs. Whole Plant
  misc_feature: MA Experiment ID: 20000224 Result: Up-regulated in Transcription
  misc_feature: MA Experiment ID: 20000436 Result: Down-regulated in Transcription
  misc_feature: MA Experiment 20000436 PARAMETER Experiment Name: At_Drought_P Parameter: Age (day) Value: 7
  misc_feature: MA Experiment 20000436 PARAMETER Experiment Name: At_Drought_P Parameter: Organism Value: A. thaliana
  misc_feature: MA Experiment 20000436 PARAMETER Experiment Name: At_Drought_P Parameter: Plant Line Value: WS
  misc_feature: MA Experiment 20000436 PARAMETER Experiment Name: At_Drought_P Parameter: Timepoint (hr) Value: 12
  misc_feature: MA Experiment 20000436 PARAMETER Experiment Name: At_Drought_P Parameter: Tissue Value: Whole Plant
  misc_feature: MA Experiment 20000436 PARAMETER Experiment Name: At_Drought_P Parameter: Treatment Value: Drought vs. No Drought
  misc_feature: MA Experiment ID: 20000437 Result: Down-regulated in Transcription
  misc_feature: MA Experiment 20000437 PARAMETER Experiment Name: At_Drought_P Parameter: Age (day) Value: 8
  misc_feature: MA Experiment 20000437 PARAMETER Experiment Name: At_Drought_P Parameter: Organism Value: A. thaliana
  misc_feature: MA Experiment 20000437 PARAMETER Experiment Name: At_Drought_P Parameter: Plant Line Value: WS
  misc_feature: MA Experiment 20000437 PARAMETER Experiment Name: At_Drought_P Parameter: Timepoint (hr) Value: 24
  misc_feature: MA Experiment 20000437 PARAMETER Experiment Name: At_Drought_P Parameter: Tissue Value: Whole Plant
  misc_feature: MA Experiment 20000437 PARAMETER Experiment Name: At_Drought_P Parameter: Treatment Value: Drought vs. No Drought
  misc_feature: MA Experiment ID: 20000439 Result: Down-regulated in Transcription
  misc_feature: MA Experiment 20000439 PARAMETER Experiment Name: At_Roots__P Parameter: Age (day) Value: 14 vs. 21
  misc_feature: MA Experiment 20000439 PARAMETER Experiment Name: At_Roots__P Parameter: Organism Value: A. thaliana
  misc_feature: MA Experiment 20000439 PARAMETER Experiment Name: At_Roots__P Parameter: Tissue Value: Roots vs. Whole Plant
  misc_feature: MA Experiment ID: 20000495 Result: Down-regulated in Transcription
  misc_feature: MA Experiment 20000495 PARAMETER Experiment Name: At_Guard_Cells_P Parameter: Harvest Date Value: 8/2/2002
  misc_feature: MA Experiment 20000495 PARAMETER Experiment Name: At_Guard_Cells_P Parameter: Organism Value: A. thaliana
  misc_feature: MA Experiment 20000495 PARAMETER Experiment Name: At_Guard_Cells_P Parameter: Tissue Value: Guard Cells vs. Leaves
  misc_feature: MA Experiment ID: 20000527 Result: Up-regulated in Transcription
  misc_feature: MA Experiment 20000527 PARAMETER Experiment Name: At_10percent_PEG_P Parameter: Age (day) Value: 20
  misc_feature: MA Experiment 20000527 PARAMETER Experiment Name: At_10percent_PEG_P Parameter: Organism Value: A. thaliana
  misc_feature: MA Experiment 20000527 PARAMETER Experiment Name: At_10percent_PEG_P Parameter: Plant Line Value: WS
  misc_feature: MA Experiment 20000527 PARAMETER Experiment Name: At_10percent_PEG_P Parameter: Timepoint (day) Value: 20
  misc_feature: MA Experiment 20000527 PARAMETER Experiment Name: At_10percent_PEG_P Parameter: Tissue Value: Whole Plant
  misc_feature: MA Experiment 20000527 PARAMETER Experiment Name: At_10percent_PEG_P Parameter: Treatment Value: 10percent PEG vs. No Treatment
  misc_feature: MA Experiment ID: 20000794 Result: Down-regulated in Transcription
  misc_feature: MA Experiment 20000794 PARAMETER Experiment Name: At_Petals_P Parameter: Age (day) Value: 23-25 days
  misc_feature: MA Experiment 20000794 PARAMETER Experiment Name: At_Petals_P Parameter: Plant Line Value: WS
  misc_feature: MA Experiment 20000794 PARAMETER Experiment Name: At_Petals_P Parameter: Tissue Value: Petals vs. Whole plant
  misc_feature: MA Experiment ID: 20001247 Result: Down-regulated in Transcription
  misc_feature: MA Experiment 20001247 PARAMETER Experiment Name: At_Far-red-induction_P Parameter: Age (day) Value: 7
  misc_feature: MA Experiment 20001247 PARAMETER Experiment Name: At_Far-red-induction_P Parameter: Light Value: Far-red vs. White
  misc_feature: MA Experiment 20001247 PARAMETER Experiment Name: At_Far-red-induction_P Parameter: Organism Value: A. thaliana
  misc_feature: MA Experiment 20001247 PARAMETER Experiment Name: At_Far-red-induction_P Parameter: Plant Line Value: Columbia
  misc_feature: MA Experiment 20001247 PARAMETER Experiment Name: At_Far-red-induction_P Parameter: Timepoint (hr) Value: 1
  misc_feature: MA Experiment 20001247 PARAMETER Experiment Name: At_Far-red-induction_P Parameter: Tissue Value: Whole Plant
  misc_feature: MA Experiment ID: 20001248 Result: Down-regulated in Transcription
  misc_feature: MA Experiment 20001248 PARAMETER Experiment Name: At_Far-red-induction_P Parameter: Age (day) Value: 7
  misc_feature: MA Experiment 20001248 PARAMETER Experiment Name: At_Far-red-induction_P Parameter: Light Value: Far-red vs. White
  misc_feature: MA Experiment 20001248 PARAMETER Experiment Name: At_Far-red-induction_P Parameter: Organism Value: A. thaliana
  misc_feature: MA Experiment 20001248 PARAMETER Experiment Name: At_Far-red-induction_P Parameter: Plant Line Value: Columbia
  misc_feature: MA Experiment 20001248 PARAMETER Experiment Name: At_Far-red-induction_P Parameter: Timepoint (hr) Value: 4
  misc_feature: MA Experiment 20001248 PARAMETER Experiment Name: At_Far-red-induction_P Parameter: Tissue Value: Whole Plant
  misc_feature: MA Experiment ID: 20001450 Result: Down-regulated in Transcription
  misc_feature: MA Experiment 20001450 PARAMETER Experiment Name: At_Far-red-induction_P Parameter: Age (day) Value: 7
  misc_feature: MA Experiment 20001450 PARAMETER Experiment Name: At_Far-red-induction_P Parameter: Light Value: Far-red vs. White
  misc_feature: MA Experiment 20001450 PARAMETER Experiment Name: At_Far-red-induction_P Parameter: Organism Value: A. thaliana
  misc_feature: MA Experiment 20001450 PARAMETER Experiment Name: At_Far-red-induction_P Parameter: Plant Line Value: Columbia
  misc_feature: MA Experiment 20001450 PARAMETER Experiment Name: At_Far-red-induction_P Parameter: Timepoint (hr) Value: 8
  misc_feature: MA Experiment 20001450 PARAMETER Experiment Name: At_Far-red-induction_P Parameter: Tissue Value: Whole Plant
  misc_feature: MA Experiment ID: 20001905 Result: Down-regulated in Transcription
  misc_feature: MA Experiment 20001905 PARAMETER Experiment Name: At_Drought_Reproduction_P Parameter: Age (day) Value: 40
  misc_feature: MA Experiment 20001905 PARAMETER Experiment Name: At_Drought_Reproduction_P Parameter: Organism Value: A. thaliana
  misc_feature: MA Experiment 20001905 PARAMETER Experiment Name: At_Drought_Reproduction_P Parameter: Plant Line Value: WS
  misc_feature: MA Experiment 20001905 PARAMETER Experiment Name: At_Drought_Reproduction_P Parameter: Timepoint (day) Value: 10
  misc_feature: MA Experiment 20001905 PARAMETER Experiment Name: At_Drought_Reproduction_P Parameter: Tissue Value: Rosettes
  misc_feature: MA Experiment 20001905 PARAMETER Experiment Name: At_Drought_Reproduction_P Parameter: Treatment Value: Drought vs. No Drought
  misc_feature: MA Experiment ID: 20001906 Result: Down-regulated in Transcription
  misc_feature: MA Experiment 20001906 PARAMETER Experiment Name: At_Drought_Reproduction_P Parameter: Age (day) Value: 35
  misc_feature: MA Experiment 20001906 PARAMETER Experiment Name: At_Drought_Reproduction_P Parameter: Organism Value: A. thaliana
  misc_feature: MA Experiment 20001906 PARAMETER Experiment Name: At_Drought_Reproduction_P Parameter: Plant Line Value: WS
  misc_feature: MA Experiment 20001906 PARAMETER Experiment Name: At_Drought_Reproduction_P Parameter: Timepoint (day) Value: 5
  misc_feature: MA Experiment 20001906 PARAMETER Experiment Name: At_Drought_Reproduction_P Parameter: Tissue Value: Siliques
  misc_feature: MA Experiment 20001906 PARAMETER Experiment Name: At_Drought_Reproduction_P Parameter: Treatment Value: Drought vs. No Drought
  misc_feature: MA Experiment ID: 20001908 Result: Down-regulated in Transcription
  misc_feature: MA Experiment 20001908 PARAMETER Experiment Name: At_Drought_Reproduction_P Parameter: Age (day) Value: 40
  misc_feature: MA Experiment 20001908 PARAMETER Experiment Name: At_Drought_Reproduction_P Parameter: Organism Value: A. thaliana
  misc_feature: MA Experiment 20001908 PARAMETER Experiment Name: At_Drought_Reproduction_P Parameter: Plant Line Value: WS
  misc_feature: MA Experiment 20001908 PARAMETER Experiment Name: At_Drought_Reproduction_P Parameter: Timepoint (day) Value: 10
  misc_feature: MA Experiment 20001908 PARAMETER Experiment Name: At_Drought_Reproduction_P Parameter: Tissue Value: Siliques
  misc_feature: MA Experiment 20001908 PARAMETER Experiment Name: At_Drought_Reproduction_P Parameter: Treatment Value: Drought vs. No Drought
acaagaacagaggctgacacctaaagcttactctctaactgcaatggctcacttcatagacctcaacagtctcaccaacactttaccgtctcttccgaaactacccgagagtcgtaaaaccgggaaatccagcgggtttgcttgcaggagaactgaagaatttcaagaaccggattcggtacagatcacaagacggatgacattaggatttgctgtctcaataggtcttaccggaattctcggcgaaaataatgtttccttggcacaagacaatgggttttggattgatggtcctcttccaattcctcctatttacaacaatatcgtgaatgagaagacgggaacgagaacattcataaagaaaggagtgtatgtagcggatatcgggacgaaaggaagaatgtatagagttaaaaagaatgcttttgatctcttggcaatggaggatttgatcggaccagatactttaaactatgtgaaaaagtacttgaggcttaaatccacatttttgttttacgatttcgacaatctcatctctgctgctgcctctgaagacaagcaacctctcactgatttagccaacagattgttcgacaatttcgaaaagcttgaagatgcagctaagacgaagaacttagcagagacggaatcgtgttataaagatacaaagtttcttcttcaagaggtaatgaccagaatggcatgatcctggttcggtttataccggtttacttgctattgatgatcctacatggttgataactctgtggtcataaattgtaatctttgcggaaaaatattgagatctagtaatcaaaaaaaaaaaatgtaatgtatagacc

SEQ ID NO: 87354 - protein, 234 aa, Arabidopsis thaliana; identical to SEQ ID NO: 29280
  peptide (1)..(234): Ceres Seq. ID no. 12700234
  misc_feature (30)..(234): Pfam Name: Oxygen evolving enhancer protein 3 (PsbQ) Pfam Description: Oxygen evolving enhancer protein 3 (PsbQ)
  misc_feature (15)..(234): Homolog of NCBI NO: 18395819 NR Description: PsbQ domain protein family, putative; protein id: supported by cDNA: 13653., supported by cDNA: gi_17979497, by cDNA: gi_20147294 [Arabidopsis thaliana]
  misc_feature (15)..(234): Homolog of NCBI NO: 21537394 NR Description: unknown [Arabidopsis thaliana]
  misc_feature (90)..(234): Homolog of NCBI NO: 34915502 NR Description: hypothetical protein~similar to Arabidopsis
  misc_feature (37)..(233): Homolog of NCBI NO: 15233587 NR Description: oxygen-evolving complex protein 16, chloroplast (OEC16); protein id: At4g21280.1, supported by cDNA: 5691., by cDNA: gi_15215599, supported by cDNA: gi_20334895 [Arabidopsis
  misc_feature (44)..(233): Homolog of NCBI NO: 15234637 NR Description: oxygen-evolving complex protein 16, chloroplast (OEC16); protein id: At4g05180.1, supported by cDNA: 40326.,
  misc_feature (119)..(229): Homolog of NCBI NO: 8131595 NR Description: oxygen evolving enhancer protein 3 [Bruguiera
  misc_feature (40)..(233): Homolog of NCBI NO: 11134057 NR Description: Oxygen-evolving enhancer protein 3-1, chloroplast (OEE3) (16 kDa subunit of oxygen evolving system of photosystem
  misc_feature (115)..(233): Homolog of NCBI NO: 11134066 NR Description: Oxygen-evolving enhancer protein 3-2, chloroplast (OEE3) (16 kDa subunit of oxygen evolving system of photosystem
  misc_feature (33)..(233): Homolog of NCBI NO: 34393258 NR Description: putative Oxygen-evolving enhancer protein 3-1,
  misc_feature (61)..(233): Homolog of NCBI NO: 131397 NR Description: Oxygen-evolving enhancer protein 3, chloroplast (OEE3) (16 kDa subunit of oxygen evolving system of photosystem

SEQ ID NO: 87355 - protein, 220 aa, Arabidopsis thaliana; identical to SEQ ID NO: 29281
  peptide (1)..(220): Ceres Seq. ID no. 12700235
  misc_feature (16)..(220): Pfam Name: Oxygen evolving enhancer protein 3 (PsbQ) Pfam Description: Oxygen evolving enhancer protein 3 (PsbQ)
  misc_feature (1)..(220): Homolog of NCBI NO: 18395819 NR Description: PsbQ domain protein family, putative; protein id: supported by cDNA: 13653., supported by cDNA: gi_17979497, by cDNA: gi_20147294 [Arabidopsis thaliana]
  misc_feature (1)..(220): Homolog of NCBI NO: 21537394 NR Description: unknown [Arabidopsis thaliana]
  misc_feature (76)..(220): Homolog of NCBI NO: 34915502 NR Description: hypothetical protein~similar to Arabidopsis
  misc_feature (23)..(219): Homolog of NCBI NO: 15233587 NR Description: oxygen-evolving complex protein 16, chloroplast (OEC16); protein id: At4g21280.1, supported by cDNA: 5691., by cDNA: gi_15215599, supported by cDNA: gi_20334895 [Arabidopsis
  misc_feature (30)..(219): Homolog of NCBI NO: 15234637 NR Description: oxygen-evolving complex protein 16, chloroplast (OEC16); protein id: At4g05180.1, supported by cDNA: 40326.,
  misc_feature (105)..(215): Homolog of NCBI NO: 8131595 NR Description: oxygen evolving enhancer protein 3 [Bruguiera
  misc_feature (26)..(219): Homolog of NCBI NO: 11134057 NR Description: Oxygen-evolving enhancer protein 3-1, chloroplast (OEE3) (16 kDa subunit of oxygen evolving system of photosystem
  misc_feature (101)..(219): Homolog of NCBI NO: 11134066 NR Description: Oxygen-evolving enhancer protein 3-2, chloroplast (OEE3) (16 kDa subunit of oxygen evolving system of photosystem
  misc_feature (19)..(219): Homolog of NCBI NO: 34393258 NR Description: putative Oxygen-evolving enhancer protein 3-1,
  misc_feature (47)..(219): Homolog of NCBI NO: 131397 NR Description: Oxygen-evolving enhancer protein 3, chloroplast (OEE3) (16 kDa subunit of oxygen evolving system of photosystem

SEQ ID NO: 87356 - protein, 169 aa, Arabidopsis thaliana; identical to SEQ ID NO: 29282
  peptide (1)..(169): Ceres Seq. ID no. 12700236
  misc_feature (1)..(169): Pfam Name: Oxygen evolving enhancer protein 3 (PsbQ) Pfam Description: Oxygen evolving enhancer protein 3 (PsbQ)
  misc_feature (1)..(169): Homolog of NCBI NO: 18395819 NR Description: PsbQ domain protein family, putative; protein id: supported by cDNA: 13653., supported by cDNA: gi_17979497, by cDNA: gi_20147294 [Arabidopsis thaliana]
  misc_feature (1)..(169): Homolog of NCBI NO: 21537394 NR Description: unknown [Arabidopsis thaliana]
  misc_feature (25)..(169): Homolog of NCBI NO: 34915502 NR Description: hypothetical protein~similar to Arabidopsis
  misc_feature (1)..(168): Homolog of NCBI NO: 15233587 NR Description: oxygen-evolving complex protein 16, chloroplast (OEC16); protein id: At4g21280.1, supported by cDNA: 5691., by cDNA: gi_15215599, supported by cDNA: gi_20334895 [Arabidopsis
  misc_feature (1)..(168): Homolog of NCBI NO: 15234637 NR Description: oxygen-evolving complex protein 16, chloroplast (OEC16); protein id: At4g05180.1, supported by cDNA: 40326.,
  misc_feature (54)..(164): Homolog of NCBI NO: 8131595 NR Description: oxygen evolving enhancer protein 3 [Bruguiera
  misc_feature (1)..(168): Homolog of NCBI NO: 11134057 NR Description: Oxygen-evolving enhancer protein 3-1, chloroplast (OEE3) (16 kDa subunit of oxygen evolving system of photosystem
  misc_feature (50)..(168): Homolog of NCBI NO: 11134066 NR Description: Oxygen-evolving enhancer protein 3-2, chloroplast (OEE3) (16 kDa subunit of oxygen evolving system of photosystem
  misc_feature (1)..(168): Homolog of NCBI NO: 34393258 NR Description: putative Oxygen-evolving enhancer protein 3-1,
  misc_feature (1)..(168): Homolog of NCBI NO: 131397 NR Description: Oxygen-evolving enhancer protein 3, chloroplast (OEE3) (16 kDa subunit of oxygen evolving system of photosystem

SEQ ID NO: 87357 - DNA, 2151 bp, Arabidopsis thaliana
  misc_feature (1)..(2151): Ceres Seq. ID no. 12700257
  misc_feature: MA Experiment ID: 20000179 Result: Down-regulated in Transcription
  misc_feature: MA Experiment 20000179 PARAMETER Experiment Name: At_Germinating_Seeds_P Parameter: Age (hr) Value: 6 vs. 0
  misc_feature: MA Experiment 20000179 PARAMETER Experiment Name: At_Germinating_Seeds_P Parameter: Tissue Value: Germinating Seeds
  misc_feature: MA Experiment ID: 20000180 Result: Down-regulated in Transcription
  misc_feature: MA Experiment 20000180 PARAMETER Experiment Name: At_Germinating_Seeds_P Parameter: Age (hr) Value: 24 vs. 0
  misc_feature: MA Experiment 20000180 PARAMETER Experiment Name: At_Germinating_Seeds_P Parameter: Tissue Value: Germinating Seeds
atggggaggagaggtcgcggcggcggcggtggtatgggcggaggaatcaatcgtagatatctgagtcaagttatggatacgtgcggcaaggatttatctacggcggaggacatcgttgatgatcttcgttccaggtacggcaattttgcgaggttgactcggcaagtgcttctactcaatgtcaggcaagtccttaatgttagaaacaacaagagggttaaagacgaagatgaagatgacaacattggagatgaggaaggttctgcttctcagaggaagaaacagagacgggttgatgagaaagaggagaaattgcagcgagcggagcagtcgcatttaaggaagaggaatatggaacttgagggtactaaaggacctacttttaaagactttggtgggattaagaaaatattggatgaattggagatgaatgttctattccccattctcaatcctgagccgtttaagaagattggagtgaagccaccaagtgggattctatttcatggaccacctggctgtgggaagactaagttggccaatgccattgccaatgaagctggtgttccgttttataagatttcagccacagaggtgatttctggtgtttctggtgcttctgaagagaatatcagagagctcttttctaaagcatataggactgcgccttcgattgtgtttatcgatgagattgatgcgattggttcaaagagagagaatcagcaaagagagatggagaagcggatagtaacacaattgttgacttgtatggatggacctggtaacaaaggcgataaaaatgctcctgattctagtgctggttttgttcttgtcattggagctacaaataggcctgatgctcttgatcctgctttgaggagaagtggacgatttgaaactgagatcgctctaactgctccagatgaagacgcaagggctgagatactctctgttgtagcccaaaaacttagattagaaggaccctttgacaagaaaagaatagctcgtttaacaccgggttttgttggagctgatttggagagtgttgcttacttggctggcaggaaagccattaagagaatcttggattcaaggaaatctgaacagtctggggacggtgaagacgataaatcttggctgaggatgccctggccagaagaagagttggaaaagctctttgtcaaaatgtctgatttcgaggaagcagtgaatctagttcaggcatctttaacaagagaaggattctctatcgtgcctgatgtcaagtgggatgatgttggtggacttgaccatctacgacttcaattcaaccgttatatagtgaggcctatcaaaaagcctgatatttataaggcttttggggtagacttagagacagggtttttgctctatggaccaccgggttgtggcaagacattgattgcaaaggcagctgctaacgaggctggagctaatttcatgcacatcaagggtgccgaacttctaaataaatacgttggagaaagtgagcttgctattcgtacgttgtttcagcgagctcggacatgtgcaccatgtgtaatcttctttgatgaggtggatgctttgacaacaagtcgtggcaaagaaggtgcttgggttgttgaacggcttttgaaccagtttcttgttgagctggatggtggagagaggcgtaatgtatatgtaattggagctacaaacaggccagatgtagttgatcctgctttcttgagaccgggtagatttgggaatcttctttatgtacccctccccaacgcagatgagcgtgcttcaattctaaaagctattgcaaggaagaaaccgatagatcctagtgttgatctggatggaattgcaaagaataactgtgaaggtttcagcggagctgatctcgcacacttggtgcaaaaagctacattccaagcagtggaggagatgataggctccagtgagtcgtctgaagatgatgttacagatataacgcagtgtacaatcaagacgaggcatttcgagcaagccttgtccttagtctcaccatctgtgaacaaacagcaaagaagacactatgacgcactatcaacaaagcttcaagaaagcgttgggaggaacactgaacaagtcaccatagggccatcttttaccctcgagtaa

SEQ ID NO: 87358 - protein, 716 aa, Arabidopsis thaliana
  peptide (1)..(716): Ceres Seq. ID no. 12700258
  misc_feature (16)..(363): Homolog of NCBI NO: 19112584 NR Description: AAA ATPase [Schizosaccharomyces pombe]
  misc_feature (383)..(695): Homolog of NCBI NO: 19112584 NR Description: AAA ATPase [Schizosaccharomyces pombe]
  misc_feature (122)..(685): Homolog of NCBI NO: 34897818 NR Description: putative cell division control protein [Oryza
  misc_feature (365)..(696): Homolog of NCBI NO: 40362746 NR Description: AAA ATPase [Candida albicans]
  misc_feature (62)..(401): Homolog of NCBI NO: 40362746 NR Description: AAA ATPase [Candida albicans]
  misc_feature (75)..(696): Homolog of NCBI NO: 27881916 NR Description: Similar to RIKEN cDNA 1200009I24 gene [Danio
  misc_feature (383)..(702): Homolog of NCBI NO: 4505483 NR Description: nuclear VCP-like; Nuclear valosin-containing
  misc_feature (383)..(702): Homolog of NCBI NO: 15082383 NR Description: Similar to nuclear VCP-like [Homo sapiens]
  misc_feature (83)..(374): Homolog of NCBI NO: 4505483 NR Description: nuclear VCP-like; Nuclear valosin-containing
  misc_feature (83)..(374): Homolog of NCBI NO: 15082383 NR Description: Similar to nuclear VCP-like [Homo sapiens]
MGRRGRGGGGGMGGGINRRYLSQVMDTCGKDLSTAEDIVDDLRSRYGNFARLTRQVLLLNVRQVLNVRNNKRVKDEDEDDNIGDEEGSASQRKKQRRVDEKEEKLQRAEQSHLRKRNMELEGTKGPTFKDFGGIKKILDELEMNVLFPILNPEPFKKIGVKPPSGILFHGPPGCGKTKLANAIANEAGVPFYKISATEVISGVSGASEENIRELFSKAYRTAPSIVFIDEIDAIGSKRENQQREMEKRIVTQLLTCMDGPGNKGDKNAPDSSAGFVLVIGATNRPDALDPALRRSGRFETEIALTAPDEDARAEILSVVAQKLRLEGPFDKKRIARLTPGFVGADLESVAYLAGRKAIKRILDSRKSEQSGDGEDDKSWLRMPWPEEELEKLFVKMSDFEEAVNLVQASLTREGFSIVPDVKWDDVGGLDHLRLQFNRYIVRPIKKPDIYKAFGVDLETGFLLYGPPGCGKTLIAKAAANEAGANFMHIKGAELLNKYVGESELAIRTLFQRARTCAPCVIFFDEVDALTTSRGKEGAWVVERLLNQFLVELDGGERRNVYVIGATNRPDVVDPAFLRPGRFGNLLYVPLPNADERASILKAIARKKPIDPSVDLDGIAKNNCEGFSGADLAHLVQKATFQAVEEMIGSSESSEDDVTDITQCTIKTRHFEQALSLVSPSVNKQQRRHYDALSTKLQESVGRNTEQVTIGPSFTLE

SEQ ID NO: 87359 - protein, 705 aa, Arabidopsis thaliana
  peptide (1)..(705): Ceres Seq. ID no. 12700259
  misc_feature (5)..(352): Homolog of NCBI NO: 19112584 NR Description: AAA ATPase [Schizosaccharomyces pombe]
  misc_feature (372)..(684): Homolog of NCBI NO: 19112584 NR Description: AAA ATPase [Schizosaccharomyces pombe]
  misc_feature (111)..(674): Homolog of NCBI NO: 34897818 NR Description: putative cell division control protein [Oryza
  misc_feature (354)..(685): Homolog of NCBI NO: 40362746 NR Description: AAA ATPase [Candida albicans]
  misc_feature (51)..(390): Homolog of NCBI NO: 40362746 NR Description: AAA ATPase [Candida albicans]
  misc_feature (64)..(685): Homolog of NCBI NO: 27881916 NR Description: Similar to RIKEN cDNA 1200009I24 gene [Danio
  misc_feature (372)..(691): Homolog of NCBI NO: 4505483 NR Description: nuclear VCP-like; Nuclear valosin-containing
  misc_feature (372)..(691): Homolog of NCBI NO: 15082383 NR Description: Similar to nuclear VCP-like [Homo sapiens]
  misc_feature (72)..(363): Homolog of NCBI NO: 4505483 NR Description: nuclear VCP-like; Nuclear valosin-containing
  misc_feature (72)..(363): Homolog of NCBI NO: 15082383 NR Description: Similar to nuclear VCP-like [Homo sapiens]
MGGGINRRYLSQVMDTCGKDLSTAEDIVDDLRSRYGNFARLTRQVLLLNVRQVLNVRNNKRVKDEDEDDNIGDEEGSASQRKKQRRVDEKEEKLQRAEQSHLRKRNMELEGTKGPTFKDFGGIKKILDELEMNVLFPILNPEPFKKIGVKPPSGILFHGPPGCGKTKLANAIANEAGVPFYKISATEVISGVSGASEENIRELFSKAYRTAPSIVFIDEIDAIGSKRENQQREMEKRIVTQLLTCMDGPGNKGDKNAPDSSAGFVLVIGATNRPDALDPALRRSGRFETEIALTAPDEDARAEILSVVAQKLRLEGPFDKKRIARLTPGFVGADLESVAYLAGRKAIKRILDSRKSEQSGDGEDDKSWLRMPWPEEELEKLFVKMSDFEEAVNLVQASLTREGFSIVPDVKWDDVGGLDHLRLQFNRYIVRPIKKPDIYKAFGVDLETGFLLYGPPGCGKTLIAKAAANEAGANFMHIKGAELLNKYVGESELAIRTLFQRARTCAPCVIFFDEVDALTTSRGKEGAWVVERLLNQFLVELDGGERRNVYVIGATNRPDVVDPAFLRPGRFGNLLYVPLPNADERASILKAIARKKPIDPSVDLDGIAKNNCEGFSGADLAHLVQKATFQAVEEMIGSSESSEDDVTDITQCTIKTRHFEQALSLVSPSVNKQQRRHYDALSTKLQESVGRNTEQVTIGPSFTLE

SEQ ID NO: 87360 - protein, 692 aa, Arabidopsis thaliana
  peptide (1)..(692): Ceres Seq. ID no. 12700260
  misc_feature (1)..(339): Homolog of NCBI NO: 19112584 NR Description: AAA ATPase [Schizosaccharomyces pombe]
  misc_feature (359)..(671): Homolog of NCBI NO: 19112584 NR Description: AAA ATPase [Schizosaccharomyces pombe]
  misc_feature (98)..(661): Homolog of NCBI NO: 34897818 NR Description: putative cell division control protein [Oryza
  misc_feature (341)..(672): Homolog of NCBI NO: 40362746 NR Description: AAA ATPase [Candida albicans]
  misc_feature (38)..(377): Homolog of NCBI NO: 40362746 NR Description: AAA ATPase [Candida albicans]
  misc_feature (51)..(672): Homolog of NCBI NO: 27881916 NR Description: Similar to RIKEN cDNA 1200009I24 gene [Danio
  misc_feature (359)..(678): Homolog of NCBI NO: 4505483 NR Description: nuclear VCP-like; Nuclear valosin-containing
  misc_feature (359)..(678): Homolog of NCBI NO: 15082383 NR Description: Similar to nuclear VCP-like [Homo sapiens]
  misc_feature (59)..(350): Homolog of NCBI NO: 4505483 NR Description: nuclear VCP-like; Nuclear valosin-containing
  misc_feature (59)..(350): Homolog of NCBI NO: 15082383 NR Description: Similar to nuclear VCP-like [Homo sapiens]
MDTCGKDLSTAEDIVDDLRSRYGNFARLTRQVLLLNVRQVLNVRNNKRVKDEDEDDNIGDEEGSASQRKKQRRVDEKEEKLQRAEQSHLRKRNMELEGTKGPTFKDFGGIKKILDELEMNVLFPILNPEPFKKIGVKPPSGILFHGPPGCGKTKLANAIANEAGVPFYKISATEVISGVSGASEENIRELFSKAYRTAPSIVFIDEIDAIGSKRENQQREMEKRIVTQLLTCMDGPGNKGDKNAPDSSAGFVLVIGATNRPDALDPALRRSGRFETEIALTAPDEDARAEILSVVAQKLRLEGPFDKKRIARLTPGFVGADLESVAYLAGRKAIKRILDSRKSEQSGDGEDDKSWLRMPWPEEELEKLFVKMSDFEEAVNLVQASLTREGFSIVPDVKWDDVGGLDHLRLQFNRYIVRPIKKPDIYKAFGVDLETGFLLYGPPGCGKTLIAKAAANEAGANFMHIKGAELLNKYVGESELAIRTLFQRARTCAPCVIFFDEVDALTTSRGKEGAWVVERLLNQFLVELDGGERRNVYVIGATNRPDVVDPAFLRPGRFGNLLYVPLPNADERASILKAIARKKPIDPSVDLDGIAKNNCEGFSGADLAHLVQKATFQAVEEMIGSSESSEDDVTDITQCTIKTRHFEQALSLVSPSVNKQQRRHYDALSTKLQESVGRNTEQVTIGPSFTLE

SEQ ID NO: 87361 - DNA, 2174 bp, Arabidopsis thaliana
  misc_feature (1)..(2174): Ceres Seq. ID no. 12700336
  misc_feature: MA Experiment ID: 108573 Result: Up-regulated in Transcription
  misc_feature: MA Experiment 108573 PARAMETER Experiment Name: At_Drought_cDNA_P Parameter: Timepoint (hr) Value: 6
  misc_feature: MA Experiment 108573 PARAMETER Experiment Name: At_Drought_cDNA_P Parameter: Tissue Value: Aerial
  misc_feature: MA Experiment 108573 PARAMETER Experiment Name: At_Drought_cDNA_P Parameter: Treatment Value: Drought vs. No Drought
  misc_feature: MA Experiment ID: 20000144 Result: Down-regulated in Transcription
  misc_feature: MA Experiment 20000144 PARAMETER Experiment Name: At_42deg_Heat_cDNA_P Parameter: Temperature (deg C) Value: 42 vs. 22
  misc_feature: MA Experiment 20000144 PARAMETER Experiment Name: At_42deg_Heat_cDNA_P Parameter: Timepoint (hr) Value: 1
  misc_feature: MA Experiment 20000144 PARAMETER Experiment Name: At_42deg_Heat_cDNA_P Parameter: Tissue Value: Aerial
  misc_feature: MA Experiment ID: 20000184 Result: Down-regulated in Transcription
  misc_feature: MA Experiment 20000184 PARAMETER Experiment Name: At_Shoots__P Parameter: Age (day) Value: 7
  misc_feature: MA Experiment 20000184 PARAMETER Experiment Name: At_Shoots__P Parameter: Tissue Value: Shoots vs. Whole Plant
  misc_feature: MA Experiment ID: 20000224 Result: Up-regulated in Transcription
  misc_feature: MA Experiment ID: 20000286 Result: Up-regulated in Transcription
  misc_feature: MA Experiment 20000286 PARAMETER Experiment Name: At_Open_Flower_P Parameter: Age (day) Value: 21
  misc_feature: MA Experiment 20000286 PARAMETER Experiment Name: At_Open_Flower_P Parameter: Plant Line Value: WS
  misc_feature: MA Experiment 20000286 PARAMETER Experiment Name: At_Open_Flower_P Parameter: Tissue Value: Half Open vs. Whole Plant
  misc_feature: MA Experiment ID: 20000794 Result: Up-regulated in Transcription
  misc_feature: MA Experiment 20000794 PARAMETER Experiment Name: At_Petals_P Parameter: Age (day) Value: 23-25 days
  misc_feature: MA Experiment 20000794 PARAMETER Experiment Name: At_Petals_P Parameter: Plant Line Value: WS
  misc_feature: MA Experiment 20000794 PARAMETER Experiment Name: At_Petals_P Parameter: Tissue Value: Petals vs. Whole plant
  misc_feature: MA Experiment ID: 20001247 Result: Up-regulated in Transcription
  misc_feature: MA Experiment 20001247 PARAMETER Experiment Name: At_Far-red-induction_P Parameter: Age (day) Value: 7
  misc_feature: MA Experiment 20001247 PARAMETER Experiment Name: At_Far-red-induction_P Parameter: Light Value: Far-red vs. White
  misc_feature: MA Experiment 20001247 PARAMETER Experiment Name: At_Far-red-induction_P Parameter: Organism Value: A. thaliana
  misc_feature: MA Experiment 20001247 PARAMETER Experiment Name: At_Far-red-induction_P Parameter: Plant Line Value: Columbia
  misc_feature: MA Experiment 20001247 PARAMETER Experiment Name: At_Far-red-induction_P Parameter: Timepoint (hr) Value: 1
  misc_feature: MA Experiment 20001247 PARAMETER Experiment Name: At_Far-red-induction_P Parameter: Tissue Value: Whole Plant
atgggtgctagtcacagcaccaacgttaataatcatcctcattctcggaatgcttctaatcatcctctgaccaacagtaacagcaccagctctcgtcactctgcttcatcaagtgatcgcttatctgttagtaatttacggtctcagctcacaactatttacagaaatcaggaagaagaggaagaagaagaagaagaagaagaagaggaagaagaaggaggaaaagagaaaagagcagaagaagaagcgaaaagtttctcccttgttagagattttgatttgtctggtttgaactgcattagggtttctagaaggaattatattctcatggatcctcataaaaaggttgcactggagactgagttctttacagaatacggtgaagctagccgataccaaatccaagaagttatagggaaaggaagttacggtgttgtggcatctgcaatcgacacacattcaggcgaaaaggttgccattaagaaaatcaatgatgtgtttgagcacgtctctgatgcaacgcggattctaagagagatcaagcttctcaggttgctccgccatcctgatatagtggagataaagcatgtaatgcttcctccttcacgccgtgagttcagagacatttatgttgttttcgagttgatggaatcagatcttcaccaagttatcaaggcgaacgatgatcttacacctgagcactaccagtttttcctctaccagcttcttcgtggtctgaagttcatacacacagctaatgtgtttcatcgtgatttgaagcctaaaaatattctagccaactctgattgcaagttgaagatttgcgactttgggcttgctcgagtgtcctttaatgatgcaccttcggctatattctggactgactatgttgctacaagatggtaccgtgcgccagaactttgtggctctttcttctccaaatatactcctgccattgatatatggagcataggatgcatatttgcagaaatgctcactgggaagccattgtttcctgggaagaatgtggtgcaccaattggatattatgactgatttgcttggtactcctcctcccgaagctattgcaaggattcgtaatgaaaaggcgaggagatatctcggcaatatgaggagaaaaccgccagttccattcactcacaaatttcctcatgtagacccattggcccttcgcttactgcaccgtcttcttgcatttgatcccaaagaccgtccctcagctgaagaggcactggcagatccttacttctatggtctggcaaacgttgatcgggaaccatctactcaaccgattccgaaactcgagtttgagtttgaaagaaggaagataacaaaagaagatgtgagagaattgatctacagagagatattagagtatcatcctcagatgctgcaagaatatcttcgaggtggagaacagactagcttcatgtacccaagtggtgttgatcgctttaagagacaatttgctcatcttgaggaaaattacggtaagggtgagaaaggctcacctcttcaacgccaacacgcttccttgcctagagagcgagtccctgctcctaagaaagagaatggatcacataatcacgatatcgagaacagatccatagcgtctttagtcacgaccctcgaaagccctccaacgtcacaacacgaggggtcagactacaggaatgggacgagccagacgggttacagcgctcgcagcttgctgaaaagtgccagcatcagtgcatctaaatgcattggcatgaaaccaagaaacaagtccgagtacggggaatcaaacaatgatacggttgatgctctgtctcaaaaggtcgcggctctccacacttgacttgtttcagagattgaggattgaaacttgttgctaacagtagacggctgattctacaagtcttgtacacatctctcagagaagacgaagaagaagtctgatcttgatagagatattgagagacatgactcatgagctatgaacaaaacaacttaaccttcattggtcttcaatttgtccatcaagtcgagttgtattaaaaatggatggagaatataattaaagaagaattgtgttaacccctggatttatgcctgacaagtatttgactttatcaggcattataaattatagttaaagtgtgtgttttcttc

SEQ ID NO: 87362 - protein, 619 aa, Arabidopsis thaliana
  peptide (1)..(619): Ceres Seq. ID no. 12700337
  misc_feature (132)..(423): Pfam Name: Protein kinase domain Pfam Description: Protein kinase domain
  misc_feature (110)..(619): Homolog of NCBI NO: 18401750 NR Description: putative MAP kinase; protein id: At3g18040.1,
  misc_feature (110)..(619): Homolog of NCBI NO: 7106544 NR Description: ATMPK9 [Arabidopsis thaliana]
  misc_feature (83)..(618): Homolog of NCBI NO: 15220976 NR Description: mitogen-activated protein kinase, putative; id: At1g18150.1, supported by cDNA: gi_7106541 [Arabidopsis >gi|9719729|gb|AAF97831.1|AC034107_14 Strong similarity
  misc_feature (93)..(618): Homolog of NCBI NO: 25406284 NR Description: probable MAP kinase F25P22.9 [imported] -
  misc_feature (76)..(618): Homolog of NCBI NO: 38174819 NR Description: putative MAP kinase [Hordeum vulgare subsp.
  misc_feature (121)..(619): Homolog of NCBI NO: 5815410 NR Description: blast and wounding induced mitogen-activated
  misc_feature (121)..(619): Homolog of NCBI NO: 6689924 NR Description: MAP kinase homolog [Oryza sativa]
  misc_feature (83)..(618): Homolog of NCBI NO: 8671782 NR Description: T10O22.12 [Arabidopsis thaliana]
  misc_feature (83)..(559): Homolog of NCBI NO: 7106542 NR Description: ATMPK8 [Arabidopsis thaliana]
  misc_feature (121)..(562): Homolog of NCBI NO: 6689926 NR Description: MAP kinase homolog [Oryza sativa]
MGASHSTNVNNHPHSRNASNHPLTNSNSTSSRHSASSSDRLSVSNLRSQLTTIYRNQEEEEEEEEEEEEEEEGGKEKRAEEEAKSFSLVRDFDLSGLNCIRVSRRNYILMDPHKKVALETEFFTEYGEASRYQIQEVIGKGSYGVVASAIDTHSGEKVAIKKINDVFEHVSDATRILREIKLLRLLRHPDIVEIKHVMLPPSRREFRDIYVVFELMESDLHQVIKANDDLTPEHYQFFLYQLLRGLKFIHTANVFHRDLKPKNILANSDCKLKICDFGLARVSFNDAPSAIFWTDYVATRWYRAPELCGSFFSKYTPAIDIWSIGCIFAEMLTGKPLFPGKNVVHQLDIMTDLLGTPPPEAIARIRNEKARRYLGNMRRKPPVPFTHKFPHVDPLALRLLHRLLAFDPKDRPSAEEALADPYFYGLANVDREPSTQPIPKLEFEFERRKITKEDVRELIYREILEYHPQMLQEYLRGGEQTSFMYPSGVDRFKRQFAHLEENYGKGEKGSPLQRQHASLPRERVPAPKKENGSHNHDIENRSIASLVTTLESPPTSQHEGSDYRNGTSQTGYSARSLLKSASISASKCIGMKPRNKSEYGESNNDTVDALSQKVAALHT

SEQ ID NO: 87363 - protein, 510 aa, Arabidopsis thaliana
  peptide (1)..(510): Ceres Seq. ID no. 12700338
  misc_feature (23)..(314): Pfam Name: Protein kinase domain Pfam Description: Protein kinase domain
  misc_feature (1)..(510): Homolog of NCBI NO: 18401750 NR Description: putative MAP kinase; protein id: At3g18040.1,
  misc_feature (1)..(510): Homolog of NCBI NO: 7106544 NR Description: ATMPK9 [Arabidopsis thaliana]
  misc_feature (1)..(509): Homolog of NCBI NO: 15220976 NR Description: mitogen-activated protein kinase, putative; id: At1g18150.1, supported by cDNA: gi_7106541 [Arabidopsis >gi|9719729|gb|AAF97831.1|AC034107_14 Strong similarity
  misc_feature (1)..(509): Homolog of NCBI NO: 25406284 NR Description: probable MAP kinase F25P22.9 [imported] -
  misc_feature (1)..(509): Homolog of NCBI NO: 38174819 NR Description: putative MAP kinase [Hordeum vulgare subsp.
  misc_feature (12)..(510): Homolog of NCBI NO: 5815410 NR Description: blast and wounding induced mitogen-activated
  misc_feature (12)..(510): Homolog of NCBI NO: 6689924 NR Description: MAP kinase homolog [Oryza sativa]
  misc_feature (1)..(509): Homolog of NCBI NO: 8671782 NR Description: T10O22.12 [Arabidopsis thaliana]
  misc_feature (1)..(450): Homolog of NCBI NO: 7106542 NR Description: ATMPK8 [Arabidopsis thaliana]
  misc_feature (12)..(453): Homolog of NCBI NO: 6689926 NR Description: MAP kinase homolog [Oryza sativa]
MDPHKKVALETEFFTEYGEASRYQIQEVIGKGSYGVVASAIDTHSGEKVAIKKINDVFEHVSDATRILREIKLLRLLRHPDIVEIKHVMLPPSRREFRDIYVVFELMESDLHQVIKANDDLTPEHYQFFLYQLLRGLKFIHTANVFHRDLKPKNILANSDCKLKICDFGLARVSFNDAPSAIFWTDYVATRWYRAPELCGSFFSKYTPAIDIWSIGCIFAEMLTGKPLFPGKNVVHQLDIMTDLLGTPPPEAIARIRNEKARRYLGNMRRKPPVPFTHKFPHVDPLALRLLHRLLAFDPKDRPSAEEALADPYFYGLANVDREPSTQPIPKLEFEFERRKITKEDVRELIYREILEYHPQMLQEYLRGGEQTSFMYPSGVDRFKRQFAHLEENYGKGEKGSPLQRQHASLPRERVPAPKKENGSHNHDIENRSIASLVTTLESPPTSQHEGSDYRNGTSQTGYSARSLLKSASISASKCIGMKPRNKSEYGESNNDTVDALSQKVAALHT

SEQ ID NO: 87364 - protein, 422 aa, Arabidopsis thaliana
  peptide (1)..(422): Ceres Seq. ID no. 12700339
  misc_feature (1)..(226): Pfam Name: Protein kinase domain Pfam Description: Protein kinase domain
  misc_feature (1)..(422): Homolog of NCBI NO: 18401750 NR Description: putative MAP kinase; protein id: At3g18040.1,
  misc_feature (1)..(422): Homolog of NCBI NO: 7106544 NR Description: ATMPK9 [Arabidopsis thaliana]
  misc_feature (1)..(421): Homolog of NCBI NO: 15220976 NR Description: mitogen-activated protein kinase, putative; id: At1g18150.1, supported by cDNA: gi_7106541 [Arabidopsis >gi|9719729|gb|AAF97831.1|AC034107_14 Strong similarity
  misc_feature (1)..(421): Homolog of NCBI NO: 25406284 NR Description: probable MAP kinase F25P22.9 [imported] -
  misc_feature (1)..(421): Homolog of NCBI NO: 38174819 NR Description: putative MAP kinase [Hordeum vulgare subsp.
  misc_feature (1)..(422): Homolog of NCBI NO: 5815410 NR Description: blast and wounding induced mitogen-activated
  misc_feature (1)..(422): Homolog of NCBI NO: 6689924 NR Description: MAP kinase homolog [Oryza sativa]
  misc_feature (1)..(421): Homolog of NCBI NO: 8671782 NR Description: T10O22.12 [Arabidopsis thaliana]
  misc_feature (1)..(362): Homolog of NCBI NO: 7106542 NR Description: ATMPK8 [Arabidopsis thaliana]
  misc_feature (1)..(365): Homolog of NCBI NO: 6689926 NR Description: MAP kinase homolog [Oryza sativa]
MLPPSRREFRDIYVVFELMESDLHQVIKANDDLTPEHYQFFLYQLLRGLKFIHTANVFHRDLKPKNILANSDCKLKICDFGLARVSFNDAPSAIFWTDYVATRWYRAPELCGSFFSKYTPAIDIWSIGCIFAEMLTGKPLFPGKNVVHQLDIMTDLLGTPPPEAIARIRNEKARRYLGNMRRKPPVPFTHKFPHVDPLALRLLHRLLAFDPKDRPSAEEALADPYFYGLANVDREPSTQPIPKLEFEFERRKITKEDVRELIYREILEYHPQMLQEYLRGGEQTSFMYPSGVDRFKRQFAHLEENYGKGEKGSPLQRQHASLPRERVPAPKKENGSHNHDIENRSIASLVTTLESPPTSQHEGSDYRNGTSQTGYSARSLLKSASISASKCIGMKPRNKSEYGESNNDTVDALSQKVAALHT

SEQ ID NO: 87365 - DNA, 981 bp, Arabidopsis thaliana
  misc_feature (1)..(981): Ceres Seq. ID no. 12700356
  misc_feature: MA Experiment ID: 108433 Result: Down-regulated in Transcription
  misc_feature: MA Experiment 108433 PARAMETER Experiment Name: At_rhl_Mutant2_cDNA_P Parameter: Age (day) Value: 7
  misc_feature: MA Experiment 108433 PARAMETER Experiment Name: At_rhl_Mutant2_cDNA_P Parameter: Organism Value: A. thaliana
  misc_feature: MA Experiment 108433 PARAMETER Experiment Name: At_rhl_Mutant2_cDNA_P Parameter: Plant Line Value: rhl Mutant vs. wt landsburg
  misc_feature: MA Experiment 108433 PARAMETER Experiment Name: At_rhl_Mutant2_cDNA_P Parameter: Tissue Value: Roots
  misc_feature: MA Experiment ID: 108434 Result: Up-regulated in Transcription
  misc_feature: MA Experiment 108434 PARAMETER Experiment Name: At_Root_Tips_cDNA_P Parameter: Tissue Value: Root Tips
  misc_feature: MA Experiment ID: 108435 Result: Up-regulated in Transcription
  misc_feature: MA Experiment 108435 PARAMETER Experiment Name: At_stm_Mutants_cDNA_P Parameter: Plant Line Value: wt Landsburg vs stm
  misc_feature: MA Experiment 108435 PARAMETER Experiment Name: At_stm_Mutants_cDNA_P Parameter: Tissue Value: Shoot Apical Meristem Region
  misc_feature: MA Experiment ID: 108462 Result: Down-regulated in Transcription
  misc_feature: MA Experiment 108462 PARAMETER Experiment Name: At_Germinating_Seeds_cDNA_P Parameter: Age (day) Value: 2 vs. 0
  misc_feature: MA Experiment 108462 PARAMETER Experiment Name: At_Germinating_Seeds_cDNA_P Parameter: Tissue Value: Germinating Seeds
  misc_feature: MA Experiment ID: 108463 Result: Down-regulated in Transcription
  misc_feature: MA Experiment 108463 PARAMETER Experiment Name: At_Germinating_Seeds_cDNA_P Parameter: Age (day) Value: 3 vs. 0
  misc_feature: MA Experiment 108463 PARAMETER Experiment Name: At_Germinating_Seeds_cDNA_P Parameter: Tissue Value: Germinating Seeds
  misc_feature: MA Experiment ID: 108489 Result: Up-regulated in Transcription
  misc_feature: MA Experiment ID: 108576 Result: Down-regulated in Transcription
  misc_feature: MA Experiment 108576 PARAMETER Experiment Name: At_42deg_Heat_cDNA_P Parameter: Temperature (deg C) Value: 42 vs. 22
  misc_feature: MA Experiment 108576 PARAMETER Experiment Name: At_42deg_Heat_cDNA_P Parameter: Timepoint (hr) Value: 1
  misc_feature: MA Experiment 108576 PARAMETER Experiment Name: At_42deg_Heat_cDNA_P Parameter: Tissue Value: Aerial
  misc_feature: MA Experiment ID: 108595 Result: Down-regulated in Transcription
  misc_feature: MA Experiment 108595 PARAMETER Experiment Name: At_Ler-pi_Ovule_cDNA_P Parameter: Plant Line Value: null
  misc_feature: MA Experiment ID: 108607 Result: Down-regulated in Transcription
  misc_feature: MA Experiment 108607 PARAMETER Experiment Name: At_100uM_ABA_cDNA_P Parameter: Timepoint (hr) Value: 4
  misc_feature: MA Experiment 108607 PARAMETER Experiment Name: At_100uM_ABA_cDNA_P Parameter: Tissue Value: Aerial
  misc_feature: MA Experiment 108607 PARAMETER Experiment Name: At_100uM_ABA_cDNA_P Parameter: Treatment Value: 100uM ABA vs. No Treatment
  misc_feature: MA Experiment ID: 108609 Result: Down-regulated in Transcription
  misc_feature: MA Experiment 108609 PARAMETER Experiment Name: At_100uM_ABA_cDNA_P Parameter: Timepoint (hr) Value: 24
  misc_feature: MA Experiment 108609 PARAMETER Experiment Name: At_100uM_ABA_cDNA_P Parameter: Tissue Value: Aerial
  misc_feature: MA Experiment 108609 PARAMETER Experiment Name: At_100uM_ABA_cDNA_P Parameter: Treatment Value: 100uM ABA vs. No Treatment
  misc_feature: MA Experiment ID: 20000069 Result: Down-regulated in Transcription
  misc_feature: MA Experiment 20000069 PARAMETER Experiment Name: At_100uM_ABA_Mutants_cDNA_P Parameter: Plant Line Value: CS23
  misc_feature: MA Experiment 20000069 PARAMETER Experiment Name: At_100uM_ABA_Mutants_cDNA_P Parameter: Timepoint (hr) Value: 6
  misc_feature: MA Experiment 20000069 PARAMETER Experiment Name: At_100uM_ABA_Mutants_cDNA_P Parameter: Tissue Value: Aerial
  misc_feature: MA Experiment 20000069 PARAMETER Experiment Name: At_100uM_ABA_Mutants_cDNA_P Parameter: Treatment Value: 100uM ABA vs. No Treatment
  misc_feature: MA Experiment ID: 20000112 Result: Down-regulated in Transcription
  misc_feature: MA Experiment 20000112 PARAMETER Experiment Name: At_42deg_Heat_cDNA_P Parameter: Temperature (deg C) Value: 42 vs. 22
  misc_feature: MA Experiment 20000112 PARAMETER Experiment Name: At_42deg_Heat_cDNA_P Parameter: Timepoint (hr) Value: 2
  misc_feature: MA Experiment 20000112 PARAMETER Experiment Name: At_42deg_Heat_cDNA_P Parameter: Tissue Value: Aerial
  misc_feature: MA Experiment ID: 20000117 Result: Down-regulated in Transcription
  misc_feature: MA Experiment 20000117 PARAMETER Experiment Name: At_100uM_ABA_Mutants_cDNA_P Parameter: Plant Line Value: Columbia
  misc_feature: MA Experiment 20000117 PARAMETER Experiment Name: At_100uM_ABA_Mutants_cDNA_P Parameter: Timepoint (hr) Value: 6
  misc_feature: MA Experiment 20000117 PARAMETER Experiment Name: At_100uM_ABA_Mutants_cDNA_P Parameter: Tissue Value: Aerial
  misc_feature: MA Experiment 20000117 PARAMETER Experiment Name: At_100uM_ABA_Mutants_cDNA_P Parameter: Treatment Value: 100uM ABA vs. No Treatment
atggccgagggactcgtattgaagggcattatgcgcgcccacaccgacattgtcacggccatcgctacgccgatcgacaattccgacatcatcgtcacagcgtcgcgtgacaaatccatcatcctctggaaactcacaaaggacgataagtcttacggtgttgctcagcgtaggctcacaggtcactctcacttcgtggaagatgttgttctctcatcggacggtcagtttgcactctccggaagctgggacggtgagctccgtctctgggatcttgccacgggagaaacaactcgtcgattcgttggtcatacgaaagatgtgctctctgttgcattctctactgataaccggcagatcgtgtctgcttctcgtgatcgtacgattaagctttggaacacacttggtgagtgtaagtataccatctctgaaggtgatggtcacaaggaatgggttagttgtgttaggtttagtcctaatactcttgtaccaactattgtatctgcttcttgggataaaactgtgaaagtttggaatctccagaactgtaagctgaggaactctcttgttggtcactctggttacctcaacactgttgctgtctcgcctgatggttcgctatgcgccagtggtgggaaagatggtgttatcttgttgtgggatttggctgaaggaaagaagctttactcgcttgaggcgggttcgattattcactcgctttgcttcagtcctaacagatactggttgtgtgctgctactgagaatagcattaggatttgggatcttgagagcaagtctgttgttgaggacttgaaggttgatctcaagtctgaggcagagaagaatgaaggtggtgttggaactggtaaccagaagaaggttatctactgcacaagcttgaactggagtgcagatggaagcacattgttcagtggttacactgatggagttgtcagggtctggggtattggtcgttactag

SEQ ID NO: 87366 - protein, 326 aa, Arabidopsis thaliana; identical to SEQ ID NO: 77148
  peptide (1)..(326): Ceres Seq. ID no. 12700357
  misc_feature (1)..(326): Homolog of NCBI NO: 15229589 NR Description: protein kinase C-receptor/G-protein, putative; id: At3g18130.1, supported by cDNA: gi_15215619, supported by gi_20856143 [Arabidopsis thaliana] >gi|9294068|dbj|BAB02025.1|
  misc_feature (1)..(326): Homolog of NCBI NO: 15221916 NR Description: guanine nucleotide-binding protein, putative; id: At1g48630.1, supported by cDNA: 38966., supported by cDNA: supported by cDNA: gi_20259150 [Arabidopsis thaliana] protein,
  misc_feature (1)..(326): Homolog of NCBI NO: 21593440 NR Description: guanine nucleotide-binding protein, putative
  misc_feature (1)..(326): Homolog of NCBI NO: 15220941 NR Description: G-protein beta family; protein id: At1g18080.1, by cDNA: 7026., supported by cDNA: gi_14334667, supported by
  misc_feature (1)..(326): Homolog of NCBI NO: 2289095 NR Description: WD-40 repeat protein [Arabidopsis thaliana]
  misc_feature (1)..(326): Homolog of NCBI NO: 3023857 NR Description: GUANINE NUCLEOTIDE-BINDING PROTEIN BETA

SEQ ID NO: 87367 - protein, 316 aa, Arabidopsis thaliana; identical to SEQ ID NO: 77149
  peptide (1)..(316): Ceres Seq. ID no. 12700358
  misc_feature (1)..(316): Homolog of NCBI NO: 15229589 NR Description: protein kinase C-receptor/G-protein, putative; id: At3g18130.1, supported by cDNA: gi_15215619, supported by gi_20856143 [Arabidopsis thaliana] >gi|9294068|dbj|BAB02025.1|
  misc_feature (1)..(316): Homolog of NCBI NO: 15221916 NR Description: guanine nucleotide-binding protein, putative; id: At1g48630.1, supported by cDNA: 38966., supported by cDNA: supported by cDNA: gi_20259150 [Arabidopsis thaliana] protein,
  misc_feature (1)..(316): Homolog of NCBI NO: 21593440 NR Description: guanine nucleotide-binding protein, putative
  misc_feature (1)..(316): Homolog of NCBI NO: 15220941 NR Description: G-protein beta family; protein id: At1g18080.1, by cDNA: 7026., supported by cDNA: gi_14334667, supported by
  misc_feature (1)..(316): Homolog of NCBI NO: 2289095 NR Description: WD-40 repeat protein [Arabidopsis thaliana]
  misc_feature (1)..(316): Homolog of NCBI NO: 3023857 NR Description: GUANINE NUCLEOTIDE-BINDING PROTEIN BETA

SEQ ID NO: 87368 - DNA, 1749 bp, Arabidopsis thaliana
  misc_feature (1)..(1749): Ceres Seq. ID no. 12700582
  misc_feature: MA Experiment ID: 20000227 Result: Up-regulated in Transcription
  misc_feature: MA Experiment 20000227 PARAMETER Experiment Name: At_Root-Tips-vs-Tops_P Parameter: Tissue Value: Root Tips vs. Root Tops
  misc_feature: MA Experiment ID: 20000436 Result: Down-regulated in Transcription
  misc_feature: MA Experiment 20000436 PARAMETER Experiment Name: At_Drought_P Parameter: Age (day) Value: 7
  misc_feature: MA Experiment 20000436 PARAMETER Experiment Name: At_Drought_P Parameter: Organism Value: A. thaliana
  misc_feature: MA Experiment 20000436 PARAMETER Experiment Name: At_Drought_P Parameter: Plant Line Value: WS
  misc_feature: MA Experiment 20000436 PARAMETER Experiment Name: At_Drought_P Parameter: Timepoint (hr) Value: 12
  misc_feature: MA Experiment 20000436 PARAMETER Experiment Name: At_Drought_P Parameter: Tissue Value: Whole Plant
  misc_feature: MA Experiment 20000436 PARAMETER Experiment Name: At_Drought_P Parameter: Treatment Value: Drought vs. No Drought
  misc_feature: MA Experiment ID: 20000437 Result: Down-regulated in Transcription
  misc_feature: MA Experiment 20000437 PARAMETER Experiment Name: At_Drought_P Parameter: Age (day) Value: 8
  misc_feature: MA Experiment 20000437 PARAMETER Experiment Name: At_Drought_P Parameter: Organism Value: A. thaliana
  misc_feature: MA Experiment 20000437 PARAMETER Experiment Name: At_Drought_P Parameter: Plant Line Value: WS
  misc_feature: MA Experiment 20000437 PARAMETER Experiment Name: At_Drought_P Parameter: Timepoint (hr) Value: 24
  misc_feature: MA Experiment 20000437 PARAMETER Experiment Name: At_Drought_P Parameter: Tissue Value: Whole Plant
  misc_feature: MA Experiment 20000437 PARAMETER Experiment Name: At_Drought_P Parameter: Treatment Value: Drought vs. No Drought
  misc_feature: MA Experiment ID: 20000451 Result: Down-regulated in Transcription
  misc_feature: MA Experiment 20000451 PARAMETER Experiment Name: At_CS6879_Shoots-Roots_P Parameter: Age (day) Value: 14
  misc_feature: MA Experiment 20000451 PARAMETER Experiment Name: At_CS6879_Shoots-Roots_P Parameter: Organism Value: A. thaliana
  misc_feature: MA Experiment 20000451 PARAMETER Experiment Name: At_CS6879_Shoots-Roots_P Parameter: Plant Line Value: CS6879 vs. WS
  misc_feature: MA Experiment 20000451 PARAMETER Experiment Name: At_CS6879_Shoots-Roots_P Parameter: Tissue Value: Roots
atggatctagctaaacacacaagacttcaaatattgggatgcatactcctggcatcacttgcattaacaatggccgatacacccccgggcatagccaagaacccaagccacgcaacatgtaagatcaagaagtacaaacattgttacaacttggaacatgtttgtcccaagttttgccctgactcttgccatgtcgaatgtgcttcttgcaaacccatatgtggtcctccttcccctggcgacgatggtggcggcgatgacagtggtggtgatgacggtggatacactcctcctgctcctgttccaccagtttcaccaccacctcctacaccttccgtgccaagccctactccaccagtttcaccaccgcctccaactcctacaccatctgtgccaagtcccactccaccagtttcaccaccacctccaactcctacaccgtctgtgccaagtcccactccaccagtttcaccaccacctccgactcctacaccttccgtgccaagtcccaccccaccagtttcaccaccacctccgactcctacaccttctgtgccaagtcccactccaccagttcctactgatcctatgccaagtccccctccgccagtttcaccaccgcctccaactcctacaccatctgtgccaagtcctcctgatgttactcccactcctcctacgccatctgtgccaagtcctcctgatgttactcccactcctcctacgccatccgtgccaagtcctcctgatgttactcccactcctcctacgccaccttccgtcccaactccttccggctctcccccttacgttcccccgccatcagacgaagaggaagcagcaggtgccaaaagggtcaggtgtaagaagcagcgctctccatgttacggagttgaatacacttgccccgccgattgtccccgttcttgtcaagtggattgcgtcacttgcaagcctgtttgcaattgcgacaagcctggatctgtttgccaagacccacgtttcatcggaggagatggtctaaccttttacttccacggcaagaaagactccaacttctgccttatctctgatcctaaccttcacatcaacgctcatttcatcggtaaacgtagagctggtatggcacgtgacttcacatgggtccaatccattgccatactcttcggcactcaccgtttatacgtcggagccctaaagactgccacgtgggatgattccgttgaccggattgccgtctctttcgacggaaatgttatctcacttcctcagctagacggtgccaggtggacttcttcccctggtgtataccctgaggtctcggtcaagcgagtcaacactgatactaacaatcttgaggttgaagtagagggtttgcttaagatcacagcaagagtggtgccaataacaatggaagattcaagaatccatggctacgacgtgaaggaagacgactgtctagctcaccttgacctaggcttcaagttccaagaccttagcgataatgtcgatggtgttttgggacagacttataggtctaactacgttagccgagttaagattggagtccacatgcctgtgatgggtggtgacagagaatttcagaccaccggactttttgcacctgactgttcagccgcaaggttcaccggtaacggagacagcaacaatggccggagcaaattggagctccctgagatgagttgtgccagtggcttaggtggcaagggagtggtttgcaagagataa

SEQ ID NO: 87369 - protein, 582 aa, Arabidopsis thaliana
  peptide (1)..(582): Ceres Seq. ID no. 12700583
  misc_feature (97)..(274): Pfam Name: Formin Homology 2 Domain Pfam Description: Formin Homology 2 Domain
  misc_feature (264)..(582): Homolog of NCBI NO: 4514637 NR Description: root cap protein 2 [Zea mays]
  misc_feature (280)..(582): Homolog of NCBI NO: 7484468 NR Description: late embryonic abundant protein EMB7 - white >gi|1350543|gb|AAB01570.1| late embryogenesis abundant protein
  misc_feature (253)..(582): Homolog of NCBI NO: 21741738 NR Description: OSJNBa0073L04.18 [Oryza sativa (japonica
  misc_feature (264)..(549): Homolog of NCBI NO: 34905936 NR Description: similar to root cap protein [Oryza sativa
  misc_feature (247)..(549): Homolog of NCBI NO: 34905940 NR Description: similar to root cap protein [Oryza sativa
  misc_feature (302)..(549): Homolog of NCBI NO: 34905930 NR Description: similar to root cap protein [Oryza sativa
  misc_feature (264)..(551): Homolog of NCBI NO: 4514635 NR Description: root cap protein 1 [Zea mays]
  misc_feature (297)..(549): Homolog of NCBI NO: 34905934 NR Description: similar to root cap protein [Oryza sativa
  misc_feature (282)..(555): Homolog of NCBI NO: 15239360 NR Description: late embryonic abundant protein - like; protein At5g60530.1, supported by cDNA: gi_15809989 [Arabidopsis >gi|9757755|dbj|BAB08236.1| contains similarity to root cap
  misc_feature (282)..(555): Homolog of NCBI NO: 15809990 NR Description: AT5g60530/muf9_180 [Arabidopsis thaliana]
MDLAKHTRLQILGCILLASLALTMADTPPGIAKNPSHATCKIKKYKHCYNLEHVCPKFCPDSCHVECASCKPICGPPSPGDDGGGDDSGGDDGGYTPPAPVPPVSPPPPTPSVPSPTPPVSPPPPTPTPSVPSPTPPVSPPPPTPTPSVPSPTPPVSPPPPTPTPSVPSPTPPVSPPPPTPTPSVPSPTPPVPTDPMPSPPPPVSPPPPTPTPSVPSPPDVTPTPPTPSVPSPPDVTPTPPTPSVPSPPDVTPTPPTPPSVPTPSGSPPYVPPPSDEEEAAGAKRVRCKKQRSPCYGVEYTCPADCPRSCQVDCVTCKPVCNCDKPGSVCQDPRFIGGDGLTFYFHGKKDSNFCLISDPNLHINAHFIGKRRAGMARDFTWVQSIAILFGTHRLYVGALKTATWDDSVDRIAVSFDGNVISLPQLDGARWTSSPGVYPEVSVKRVNTDTNNLEVEVEGLLKITARVVPITMEDSRIHGYDVKEDDCLAHLDLGFKFQDLSDNVDGVLGQTYRSNYVSRVKIGVHMPVMGGDREFQTTGLFAPDCSAARFTGNGDSNNGRSKLELPEMSCASGLGGKGVVCKR

SEQ ID NO: 87370 - protein, 559 aa, Arabidopsis thaliana
  peptide (1)..(559): Ceres Seq. ID no. 12700584
  misc_feature (74)..(251): Pfam Name: Formin Homology 2 Domain Pfam Description: Formin Homology 2 Domain
  misc_feature (241)..(559): Homolog of NCBI NO: 4514637 NR Description: root cap protein 2 [Zea mays]
  misc_feature (257)..(559): Homolog of NCBI NO: 7484468 NR Description: late embryonic abundant protein EMB7 - white >gi|1350543|gb|AAB01570.1| late embryogenesis abundant protein
  misc_feature (230)..(559): Homolog of NCBI NO: 21741738 NR Description: OSJNBa0073L04.18 [Oryza sativa (japonica
  misc_feature (241)..(526): Homolog of NCBI NO: 34905936 NR Description: similar to root cap protein [Oryza sativa
  misc_feature (224)..(526): Homolog of NCBI NO: 34905940 NR Description: similar to root cap protein [Oryza sativa
  misc_feature (279)..(526): Homolog of NCBI NO: 34905930 NR Description: similar to root cap protein [Oryza sativa
  misc_feature (241)..(528): Homolog of NCBI NO: 4514635 NR Description: root cap protein 1 [Zea mays]
  misc_feature (274)..(526): Homolog of NCBI NO: 34905934 NR Description: similar to root cap protein [Oryza sativa
  misc_feature (259)..(532): Homolog of NCBI NO: 15239360 NR Description: late embryonic abundant protein - like; protein At5g60530.1, supported by cDNA: gi_15809989 [Arabidopsis >gi|9757755|dbj|BAB08236.1| contains similarity to root cap
  misc_feature (259)..(532): Homolog of NCBI NO: 15809990 NR Description: AT5g60530/muf9_180 [Arabidopsis thaliana]
MADTPPGIAKNPSHATCKIKKYKHCYNLEHVCPKFCPDSCHVECASCKPICGPPSPGDDGGGDDSGGDDGGYTPPAPVPPVSPPPPTPSVPSPTPPVSPPPPTPTPSVPSPTPPVSPPPPTPTPSVPSPTPPVSPPPPTPTPSVPSPTPPVSPPPPTPTPSVPSPTPPVPTDPMPSPPPPVSPPPPTPTPSVPSPPDVTPTPPTPSVPSPPDVTPTPPTPSVPSPPDVTPTPPTPPSVPTPSGSPPYVPPPSDEEEAAGAKRVRCKKQRSPCYGVEYTCPADCPRSCQVDCVTCKPVCNCDKPGSVCQDPRFIGGDGLTFYFHGKKDSNFCLISDPNLHINAHFIGKRRAGMARDFTWVQSIAILFGTHRLYVGALKTATWDDSVDRIAVSFDGNVISLPQLDGARWTSSPGVYPEVSVKRVNTDTNNLEVEVEGLLKITARVVPITMEDSRIHGYDVKEDDCLAHLDLGFKFQDLSDNVDGVLGQTYRSNYVSRVKIGVHMPVMGGDREFQTTGLFAPDCSAARFTGNGDSNNGRSKLELPEMSCASGLGGKGVVCKR

SEQ ID NO: 87371 - protein, 386 aa, Arabidopsis thaliana
  peptide (1)..(386): Ceres Seq. ID no. 12700585
  misc_feature (1)..(78): Pfam Name: Formin Homology 2 Domain Pfam Description: Formin Homology 2 Domain
  misc_feature (68)..(386): Homolog of NCBI NO: 4514637 NR Description: root cap protein 2 [Zea mays]
  misc_feature (84)..(386): Homolog of NCBI NO: 7484468 NR Description: late embryonic abundant protein EMB7 - white >gi|1350543|gb|AAB01570.1| late embryogenesis abundant protein
  misc_feature (57)..(386): Homolog of NCBI NO: 21741738 NR Description: OSJNBa0073L04.18 [Oryza sativa (japonica
  misc_feature (68)..(353): Homolog of NCBI NO: 34905936 NR Description: similar to root cap protein [Oryza sativa
  misc_feature (51)..(353): Homolog of NCBI NO: 34905940 NR Description: similar to root cap protein [Oryza sativa
  misc_feature (106)..(353): Homolog of NCBI NO: 34905930 NR Description: similar to root cap protein [Oryza sativa
  misc_feature (68)..(355): Homolog of NCBI NO: 4514635 NR Description: root cap protein 1 [Zea mays]
  misc_feature (101)..(353): Homolog of NCBI NO: 34905934 NR Description: similar to root cap protein [Oryza sativa
  misc_feature (86)..(359): Homolog of NCBI NO: 15239360 NR Description: late embryonic abundant protein - like; protein At5g60530.1, supported by cDNA: gi_15809989 [Arabidopsis >gi|9757755|dbj|BAB08236.1| contains similarity to root cap
  misc_feature (86)..(359): Homolog of NCBI NO: 15809990 NR Description: AT5g60530/muf9_180 [Arabidopsis thaliana]
MPSPPPPVSPPPPTPTPSVPSPPDVTPTPPTPSVPSPPDVTPTPPTPSVPSPPDVTPTPPTPPSVPTPSGSPPYVPPPSDEEEAAGAKRVRCKKQRSPCYGVEYTCPADCPRSCQVDCVTCKPVCNCDKPGSVCQDPRFIGGDGLTFYFHGKKDSNFCLISDPNLHINAHFIGKRRAGMARDFTWVQSIAILFGTHRLYVGALKTATWDDSVDRIAVSFDGNVISLPQLDGARWTSSPGVYPEVSVKRVNTDTNNLEVEVEGLLKITARVVPITMEDSRIHGYDVKEDDCLAHLDLGFKFQDLSDNVDGVLGQTYRSNYVSRVKIGVHMPVMGGDREFQTTGLFAPDCSAARFTGNGDSNNGRSKLELPEMSCASGLGGKGVVCKR

SEQ ID NO: 87372 - DNA, 1089 bp, Arabidopsis thaliana
  misc_feature (1)..(1089): Ceres Seq. ID no. 12700586
  misc_feature: MA Experiment ID: 20000171 Result: Down-regulated in Transcription
  misc_feature: MA Experiment 20000171 PARAMETER Experiment Name: At_42deg_Heat_P Parameter: Age (day) Value: 14
  misc_feature: MA Experiment 20000171 PARAMETER Experiment Name: At_42deg_Heat_P Parameter: Organism Value: A. thaliana
  misc_feature: MA Experiment 20000171 PARAMETER Experiment Name: At_42deg_Heat_P Parameter: Plant Line Value: WS
  misc_feature: MA Experiment 20000171 PARAMETER Experiment Name: At_42deg_Heat_P Parameter: Temperature (deg C) Value: 42 vs. 22
  misc_feature: MA Experiment 20000171 PARAMETER Experiment Name: At_42deg_Heat_P Parameter: Timepoint (hr) Value: 1
  misc_feature: MA Experiment 20000171 PARAMETER Experiment Name: At_42deg_Heat_P Parameter: Tissue Value: Aerial
  misc_feature: MA Experiment ID: 20000173 Result: Down-regulated in Transcription
  misc_feature: MA Experiment 20000173 PARAMETER Experiment Name: At_42deg_Heat_P Parameter: Age (day) Value: 14
  misc_feature: MA Experiment 20000173 PARAMETER Experiment Name: At_42deg_Heat_P Parameter: Organism Value: A. thaliana
  misc_feature: MA Experiment 20000173 PARAMETER Experiment Name: At_42deg_Heat_P Parameter: Plant Line Value: WS
  misc_feature: MA Experiment 20000173 PARAMETER Experiment Name: At_42deg_Heat_P Parameter: Temperature (deg C) Value: 42 vs. 22
  misc_feature: MA Experiment 20000173 PARAMETER Experiment Name: At_42deg_Heat_P Parameter: Timepoint (hr) Value: 6
  misc_feature: MA Experiment 20000173 PARAMETER Experiment Name: At_42deg_Heat_P Parameter: Tissue Value: Aerial
  misc_feature: MA Experiment ID: 20000180 Result: Up-regulated in Transcription
  misc_feature: MA Experiment 20000180 PARAMETER Experiment Name: At_Germinating_Seeds_P Parameter: Age (hr) Value: 24 vs. 0
  misc_feature: MA Experiment 20000180 PARAMETER Experiment Name: At_Germinating_Seeds_P Parameter: Tissue Value: Germinating Seeds
  misc_feature: MA Experiment ID: 20000184 Result: Down-regulated in Transcription
  misc_feature: MA Experiment 20000184 PARAMETER Experiment Name: At_Shoots__P Parameter: Age (day) Value: 7
  misc_feature: MA Experiment 20000184 PARAMETER Experiment Name: At_Shoots__P Parameter: Tissue Value: Shoots vs. Whole Plant
  misc_feature: MA Experiment ID: 20000437 Result: Down-regulated in Transcription
  misc_feature: MA Experiment 20000437 PARAMETER Experiment Name: At_Drought_P Parameter: Age (day) Value: 8
  misc_feature: MA Experiment 20000437 PARAMETER Experiment Name: At_Drought_P Parameter: Organism Value: A. thaliana
  misc_feature: MA Experiment 20000437 PARAMETER Experiment Name: At_Drought_P Parameter: Plant Line Value: WS
  misc_feature: MA Experiment 20000437 PARAMETER Experiment Name: At_Drought_P Parameter: Timepoint (hr) Value: 24
  misc_feature: MA Experiment 20000437 PARAMETER Experiment Name: At_Drought_P Parameter: Tissue Value: Whole Plant
  misc_feature: MA Experiment 20000437 PARAMETER Experiment Name: At_Drought_P Parameter: Treatment Value: Drought vs. No Drought
  misc_feature: MA Experiment ID: 20001555 Result: Down-regulated in Transcription
  misc_feature: MA Experiment 20001555 PARAMETER Experiment Name: At_Drought_Soil_Dry_P Parameter: Age (day) Value: 24
  misc_feature: MA Experiment 20001555 PARAMETER Experiment Name: At_Drought_Soil_Dry_P Parameter: Organism Value: A. thaliana
  misc_feature: MA Experiment 20001555 PARAMETER Experiment Name: At_Drought_Soil_Dry_P Parameter: Plant Line Value: WS
  misc_feature: MA Experiment 20001555 PARAMETER Experiment Name: At_Drought_Soil_Dry_P Parameter: Post Timepoint (hr) Value: None
  misc_feature: MA Experiment 20001555 PARAMETER Experiment Name: At_Drought_Soil_Dry_P Parameter: Post-Treatment Value: None
  misc_feature: MA Experiment 20001555 PARAMETER Experiment Name: At_Drought_Soil_Dry_P Parameter: Timepoint (day) Value: 10
  misc_feature: MA Experiment 20001555 PARAMETER Experiment Name: At_Drought_Soil_Dry_P Parameter: Treatment Value: Drought vs. No Drought
  misc_feature: MA Experiment ID: 20001905 Result: Down-regulated in Transcription
  misc_feature: MA Experiment 20001905 PARAMETER Experiment Name: At_Drought_Reproduction_P Parameter: Age (day) Value: 40
  misc_feature: MA Experiment 20001905 PARAMETER Experiment Name: At_Drought_Reproduction_P Parameter: Organism Value: A. thaliana
  misc_feature: MA Experiment 20001905 PARAMETER Experiment Name: At_Drought_Reproduction_P Parameter: Plant Line Value: WS
  misc_feature: MA Experiment 20001905 PARAMETER Experiment Name: At_Drought_Reproduction_P Parameter: Timepoint (day) Value: 10
  misc_feature: MA Experiment 20001905 PARAMETER Experiment Name: At_Drought_Reproduction_P Parameter: Tissue Value: Rosettes
  misc_feature: MA Experiment 20001905 PARAMETER Experiment Name: At_Drought_Reproduction_P Parameter: Treatment Value: Drought vs. No Drought
  misc_feature: MA Experiment ID: 20001906 Result: Down-regulated in Transcription
  misc_feature: MA Experiment 20001906 PARAMETER Experiment Name: At_Drought_Reproduction_P Parameter: Age (day) Value: 35
  misc_feature: MA Experiment 20001906 PARAMETER Experiment Name: At_Drought_Reproduction_P Parameter: Organism Value: A. thaliana
  misc_feature: MA Experiment 20001906 PARAMETER Experiment Name: At_Drought_Reproduction_P Parameter: Plant Line Value: WS
  misc_feature: MA Experiment 20001906 PARAMETER Experiment Name: At_Drought_Reproduction_P Parameter: Timepoint (day) Value: 5
  misc_feature: MA Experiment 20001906 PARAMETER Experiment Name: At_Drought_Reproduction_P Parameter: Tissue Value: Siliques
  misc_feature: MA Experiment 20001906 PARAMETER Experiment Name: At_Drought_Reproduction_P Parameter: Treatment Value: Drought vs. No Drought
  misc_feature: MA Experiment ID: 20001911 Result: Down-regulated in Transcription
  misc_feature: MA Experiment 20001911 PARAMETER Experiment Name: At_Drought_Reproduction_P Parameter: Age (day) Value: 40
  misc_feature: MA Experiment 20001911 PARAMETER Experiment Name: At_Drought_Reproduction_P Parameter: Organism Value: A. thaliana
  misc_feature: MA Experiment 20001911 PARAMETER Experiment Name: At_Drought_Reproduction_P Parameter: Plant Line Value: WS
  misc_feature: MA Experiment 20001911 PARAMETER Experiment Name: At_Drought_Reproduction_P Parameter: Timepoint (day) Value: 10
  misc_feature: MA Experiment 20001911 PARAMETER Experiment Name: At_Drought_Reproduction_P Parameter: Tissue Value: Flowers
  misc_feature: MA Experiment 20001911 PARAMETER Experiment Name: At_Drought_Reproduction_P Parameter: Treatment Value: Drought vs. No Drought
atggcggctactccaatcagagttatagtctcagctcttgtgatcctctcggtattactactttcctcgtctctgggagtcgccacagagacagaaattgagcggaacgagacagaggtgcggctgatgtacgagcaatggcttgtggagaatcgaaagaactataatggtcttggagagaaagagagacgattcaagatcttcaaagacaacttgaagtttgtcgatgaacacaattctgttccggatcggacttttgaagtagggttgaccaggttcgctgatctaacaaatgaagagtttagagcgatttatttaaggaagaagatggaaagaactaaagattcggtgaaaactgagagatatttgtacaaagaaggagatgttttgcctgatgaagtagattggagagcgaatggcgcagttgtttcagtcaaagatcaaggaaactgtggaagttgttgggcgttttctgcggttggagcagtggaagggatcaaccagatcactaccggagagttgatatctttgtcggagcaagaactcgttgactgtgacagaggttttgtcaacgctggatgtgatggaggtatcatgaactatgcttttgagttcattatgaaaaatggtggtattgagacagatcaagattacccttataacgccaacgatcttggcttgtgcaatgcagataagaataacaatactcgtgttgttacaattgatggttatgaagatgttcctagagacgatgagaagtctttgaaaaaggctgttgctcatcaacctgttagtgttgctattgaagctagtagccaagctttccagctttacaaatccggtgtgatgacaggaacatgtggaatatctttggaccatggtgtagtagtggttggatatggatccacaagtggtgaagattattggatcattcgcaattcatgggggttgaattggggagatagcggttacgttaagctccaacgtaacatcgatgatccatttgggaaatgtggtatagcaatgatgccttcttacccgaccaaatcatcattcccatcgtcatttgatttgttgtctgagatttga

SEQ ID NO: 87373 - protein, 362 aa, Arabidopsis thaliana
  peptide (1)..(362): Ceres Seq. ID no. 12700587
  misc_feature (130)..(348): Pfam Name: Papain family cysteine protease Pfam Description: Papain family cysteine protease
  misc_feature (1)..(362): Homolog of NCBI NO: 30685308 NR Description: cysteine proteinase [Arabidopsis thaliana] Putative cysteine proteinase At3g19400 precursor
  misc_feature (1)..(362): Homolog of NCBI NO: 26452046 NR Description: putative cysteine proteinase RD21A precursor
  misc_feature (3)..(351): Homolog of NCBI NO: 18402225 NR Description: cysteine proteinase; protein id: At3g19390.1, by cDNA: gi_17065297, supported by cDNA: gi_20260003 [Arabidopsis >gi|11994461|dbj|BAB02463.1| cysteine proteinase [Arabidopsis
  misc_feature (12)..(351): Homolog of NCBI NO: 18141281 NR Description: senescence-associated cysteine protease [Brassica
  misc_feature (12)..(360): Homolog of NCBI NO: 18407678 NR Description: cysteine proteinase; protein id: At3g43960.1, by cDNA: 39621. [Arabidopsis thaliana] >gi|11265515|pir||T48950
  misc_feature (12)..(360): Homolog of NCBI NO: 21593501 NR Description: cysteine proteinase [Arabidopsis thaliana]
  misc_feature (1)..(350): Homolog of NCBI NO: 7435801 NR Description: cysteine proteinase (EC 3.4.22.-) precursor -
  misc_feature (10)..(349): Homolog of NCBI NO: 18422289 NR Description: cysteine proteinase RD21A; protein id:
  misc_feature (45)..(351): Homolog of NCBI NO: 1361974 NR Description: cysteine proteinase (EC 3.4.22.-) - clove pink
  misc_feature (1)..(350): Homolog of NCBI NO: 5777889 NR Description: cysteine protease [Solanum tuberosum]
MAATPIRVIVSALVILSVLLLSSSLGVATETEIERNETEVRLMYEQWLVENRKNYNGLGEKERRFKIFKDNLKFVDEHNSVPDRTFEVGLTRFADLTNEEFRAIYLRKKMERTKDSVKTERYLYKEGDVLPDEVDWRANGAVVSVKDQGNCGSCWAFSAVGAVEGINQITTGELISLSEQELVDCDRGFVNAGCDGGIMNYAFEFIMKNGGIETDQDYPYNANDLGLCNADKNNNTRVVTIDGYEDVPRDDEKSLKKAVAHQPVSVAIEASSQAFQLYKSGVMTGTCGISLDHGVVVVGYGSTSGEDYWIIRNSWGLNWGDSGYVKLQRNIDDPFGKCGIAMMPSYPTKSSFPSSFDLLSEI

SEQ ID NO: 87374 - protein, 320 aa, Arabidopsis thaliana
  peptide (1)..(320): Ceres Seq. ID no. 12700588
  misc_feature (88)..(306): Pfam Name: Papain family cysteine protease Pfam Description: Papain family cysteine protease
  misc_feature (1)..(320): Homolog of NCBI NO: 30685308 NR Description: cysteine proteinase [Arabidopsis thaliana] Putative cysteine proteinase At3g19400 precursor
  misc_feature (1)..(320): Homolog of NCBI NO: 26452046 NR Description: putative cysteine proteinase RD21A precursor
  misc_feature (1)..(309): Homolog of NCBI NO: 18402225 NR Description: cysteine proteinase; protein id: At3g19390.1, by cDNA: gi_17065297, supported by cDNA: gi_20260003 [Arabidopsis >gi|11994461|dbj|BAB02463.1| cysteine proteinase [Arabidopsis
  misc_feature (1)..(309): Homolog of NCBI NO: 18141281 NR Description: senescence-associated cysteine protease [Brassica
  misc_feature (1)..(318): Homolog of NCBI NO: 18407678 NR Description: cysteine proteinase; protein id: At3g43960.1, by cDNA: 39621. [Arabidopsis thaliana] >gi|11265515|pir||T48950
  misc_feature (1)..(318): Homolog of NCBI NO: 21593501 NR Description: cysteine proteinase [Arabidopsis thaliana]
  misc_feature (1)..(308): Homolog of NCBI NO: 7435801 NR Description: cysteine proteinase (EC 3.4.22.-) precursor -
  misc_feature (1)..(307): Homolog of NCBI NO: 18422289 NR Description: cysteine proteinase RD21A; protein id:
  misc_feature (3)..(309): Homolog of NCBI NO: 1361974 NR Description: cysteine proteinase (EC 3.4.22.-) - clove pink
  misc_feature (1)..(308): Homolog of NCBI NO: 5777889 NR Description: cysteine protease [Solanum tuberosum]
MYEQWLVENRKNYNGLGEKERRFKIFKDNLKFVDEHNSVPDRTFEVGLTRFADLTNEEFRAIYLRKKMERTKDSVKTERYLYKEGDVLPDEVDWRANGAVVSVKDQGNCGSCWAFSAVGAVEGINQITTGELISLSEQELVDCDRGFVNAGCDGGIMNYAFEFIMKNGGIETDQDYPYNANDLGLCNADKNNNTRVVTIDGYEDVPRDDEKSLKKAVAHQPVSVAIEASSQAFQLYKSGVMTGTCGISLDHGVVVVGYGSTSGEDYWIIRNSWGLNWGDSGYVKLQRNIDDPFGKCGIAMMPSYPTKSSFPSSFDLLSEI

SEQ ID NO: 87375 - protein, 253 aa, Arabidopsis thaliana
  peptide (1)..(253): Ceres Seq. ID no. 12700589
  misc_feature (21)..(239): Pfam Name: Papain family cysteine protease Pfam Description: Papain family cysteine protease
  misc_feature (1)..(253): Homolog of NCBI NO: 30685308 NR Description: cysteine proteinase [Arabidopsis thaliana] Putative cysteine proteinase At3g19400 precursor
  misc_feature (1)..(253): Homolog of NCBI NO: 26452046 NR Description: putative cysteine proteinase RD21A precursor
  misc_feature (1)..(242): Homolog of NCBI NO: 18402225 NR Description: cysteine proteinase; protein id: At3g19390.1, by cDNA: gi_17065297, supported by cDNA: gi_20260003 [Arabidopsis >gi|11994461|dbj|BAB02463.1| cysteine proteinase [Arabidopsis
  misc_feature (1)..(242): Homolog of NCBI NO: 18141281 NR Description: senescence-associated cysteine protease [Brassica
  misc_feature (1)..(251): Homolog of NCBI NO: 18407678 NR Description: cysteine proteinase; protein id: At3g43960.1, by cDNA: 39621. [Arabidopsis thaliana] >gi|11265515|pir||T48950
  misc_feature (1)..(251): Homolog of NCBI NO: 21593501 NR Description: cysteine proteinase [Arabidopsis thaliana]
  misc_feature (1)..(241): Homolog of NCBI NO: 7435801 NR Description: cysteine proteinase (EC 3.4.22.-) precursor -
  misc_feature (1)..(240): Homolog of NCBI NO: 18422289 NR Description: cysteine proteinase RD21A; protein id:
  misc_feature (1)..(242): Homolog of NCBI NO: 1361974 NR Description: cysteine proteinase (EC 3.4.22.-) - clove pink
  misc_feature (1)..(241): Homolog of NCBI NO: 5777889 NR Description: cysteine protease [Solanum tuberosum]
MERTKDSVKTERYLYKEGDVLPDEVDWRANGAVVSVKDQGNCGSCWAFSAVGAVEGINQITTGELISLSEQELVDCDRGFVNAGCDGGIMNYAFEFIMKNGGIETDQDYPYNANDLGLCNADKNNNTRVVTIDGYEDVPRDDEKSLKKAVAHQPVSVAIEASSQAFQLYKSGVMTGTCGISLDHGVVVVGYGSTSGEDYWIIRNSWGLNWGDSGYVKLQRNIDDPFGKCGIAMMPSYPTKSSFPSSFDLLSEI

SEQ ID NO: 87376 - DNA, 658 bp, Arabidopsis thaliana
  misc_feature (1)..(658): Ceres Seq. ID no. 12700598
  misc_feature: MA Experiment ID: 20000173 Result: Down-regulated in Transcription
  misc_feature: MA Experiment 20000173 PARAMETER Experiment Name: At_42deg_Heat_P Parameter: Age (day) Value: 14
  misc_feature: MA Experiment 20000173 PARAMETER Experiment Name: At_42deg_Heat_P Parameter: Organism Value: A. thaliana
  misc_feature: MA Experiment 20000173 PARAMETER Experiment Name: At_42deg_Heat_P Parameter: Plant Line Value: WS
  misc_feature: MA Experiment 20000173 PARAMETER Experiment Name: At_42deg_Heat_P Parameter: Temperature (deg C) Value: 42 vs. 22
  misc_feature: MA Experiment 20000173 PARAMETER Experiment Name: At_42deg_Heat_P Parameter: Timepoint (hr) Value: 6
  misc_feature: MA Experiment 20000173 PARAMETER Experiment Name: At_42deg_Heat_P Parameter: Tissue Value: Aerial
  misc_feature: MA Experiment ID: 20000184 Result: Up-regulated in Transcription
  misc_feature: MA Experiment 20000184 PARAMETER Experiment Name: At_Shoots__P Parameter: Age (day) Value: 7
  misc_feature: MA Experiment 20000184 PARAMETER Experiment Name: At_Shoots__P Parameter: Tissue Value: Shoots vs. Whole Plant
  misc_feature: MA Experiment ID: 20000437 Result: Down-regulated in Transcription
  misc_feature: MA Experiment 20000437 PARAMETER Experiment Name: At_Drought_P Parameter: Age (day) Value: 8
  misc_feature: MA Experiment 20000437 PARAMETER Experiment Name: At_Drought_P Parameter: Organism Value: A. thaliana
  misc_feature: MA Experiment 20000437 PARAMETER Experiment Name: At_Drought_P Parameter: Plant Line Value: WS
  misc_feature: MA Experiment 20000437 PARAMETER Experiment Name: At_Drought_P Parameter: Timepoint (hr) Value: 24
  misc_feature: MA Experiment 20000437 PARAMETER Experiment Name: At_Drought_P Parameter: Tissue Value: Whole Plant
  misc_feature: MA Experiment 20000437 PARAMETER Experiment Name: At_Drought_P Parameter: Treatment Value: Drought vs. No Drought
  misc_feature: MA Experiment ID: 20000794 Result: Up-regulated in Transcription
  misc_feature: MA Experiment 20000794 PARAMETER Experiment Name: At_Petals_P Parameter: Age (day) Value: 23-25 days
  misc_feature: MA Experiment 20000794 PARAMETER Experiment Name: At_Petals_P Parameter: Plant Line Value: WS
  misc_feature: MA Experiment 20000794 PARAMETER Experiment Name: At_Petals_P Parameter: Tissue Value: Petals vs. Whole plant
  misc_feature: MA Experiment ID: 20001555 Result: Down-regulated in Transcription
  misc_feature: MA Experiment 20001555 PARAMETER Experiment Name: At_Drought_Soil_Dry_P Parameter: Age (day) Value: 24
  misc_feature: MA Experiment 20001555 PARAMETER Experiment Name: At_Drought_Soil_Dry_P Parameter: Organism Value: A. thaliana
  misc_feature: MA Experiment 20001555 PARAMETER Experiment Name: At_Drought_Soil_Dry_P Parameter: Plant Line Value: WS
  misc_feature: MA Experiment 20001555 PARAMETER Experiment Name: At_Drought_Soil_Dry_P Parameter: Post Timepoint (hr) Value: None
  misc_feature: MA Experiment 20001555 PARAMETER Experiment Name: At_Drought_Soil_Dry_P Parameter: Post-Treatment Value: None
  misc_feature: MA Experiment 20001555 PARAMETER Experiment Name: At_Drought_Soil_Dry_P Parameter: Timepoint (day) Value: 10
  misc_feature: MA Experiment 20001555 PARAMETER Experiment Name: At_Drought_Soil_Dry_P Parameter: Treatment Value: Drought vs. No Drought
  misc_feature: MA Experiment ID: 20001556 Result: Down-regulated in Transcription
  misc_feature: MA Experiment 20001556 PARAMETER Experiment Name: At_Drought_Soil_Dry_P Parameter: Age (day) Value: 26
  misc_feature: MA Experiment 20001556 PARAMETER Experiment Name: At_Drought_Soil_Dry_P Parameter: Organism Value: A. thaliana
  misc_feature: MA Experiment 20001556 PARAMETER Experiment Name: At_Drought_Soil_Dry_P Parameter: Plant Line Value: WS
  misc_feature: MA Experiment 20001556 PARAMETER Experiment Name: At_Drought_Soil_Dry_P Parameter: Post Timepoint (hr) Value: None
  misc_feature: MA Experiment 20001556 PARAMETER Experiment Name: At_Drought_Soil_Dry_P Parameter: Post-Treatment Value: None
  misc_feature: MA Experiment 20001556 PARAMETER Experiment Name: At_Drought_Soil_Dry_P Parameter: Timepoint (day) Value: 12
  misc_feature: MA Experiment 20001556 PARAMETER Experiment Name: At_Drought_Soil_Dry_P Parameter: Treatment Value: Drought vs. No Drought
  misc_feature: MA Experiment ID: 20001559 Result: Down-regulated in Transcription
  misc_feature: MA Experiment 20001559 PARAMETER Experiment Name: At_Drought_Soil_Dry_P Parameter: Age (day) Value: 28
  misc_feature: MA Experiment 20001559 PARAMETER Experiment Name: At_Drought_Soil_Dry_P Parameter: Organism Value: A. thaliana
  misc_feature: MA Experiment 20001559 PARAMETER Experiment Name: At_Drought_Soil_Dry_P Parameter: Plant Line Value: WS
  misc_feature: MA Experiment 20001559 PARAMETER Experiment Name: At_Drought_Soil_Dry_P Parameter: Post Timepoint (hr) Value: 29
  misc_feature: MA Experiment 20001559 PARAMETER Experiment Name: At_Drought_Soil_Dry_P Parameter: Post-Treatment Value: Re-Water vs. No Drought
  misc_feature: MA Experiment 20001559 PARAMETER Experiment Name: At_Drought_Soil_Dry_P Parameter: Timepoint (day) Value: 14
  misc_feature: MA Experiment 20001559 PARAMETER Experiment Name: At_Drought_Soil_Dry_P Parameter: Treatment Value: Drought vs. No Drought
  misc_feature: MA Experiment ID: 20001905 Result: Down-regulated in Transcription
  misc_feature: MA Experiment 20001905 PARAMETER Experiment Name: At_Drought_Reproduction_P Parameter: Age (day) Value: 40
  misc_feature: MA Experiment 20001905 PARAMETER Experiment Name: At_Drought_Reproduction_P Parameter: Organism Value: A. thaliana
  misc_feature: MA Experiment 20001905 PARAMETER Experiment Name: At_Drought_Reproduction_P Parameter: Plant Line Value: WS
  misc_feature: MA Experiment 20001905 PARAMETER Experiment Name: At_Drought_Reproduction_P Parameter: Timepoint (day) Value: 10
  misc_feature: MA Experiment 20001905 PARAMETER Experiment Name: At_Drought_Reproduction_P Parameter: Tissue Value: Rosettes
  misc_feature: MA Experiment 20001905 PARAMETER Experiment Name: At_Drought_Reproduction_P Parameter: Treatment Value: Drought vs. No Drought
  misc_feature: MA Experiment ID: 20001911 Result: Down-regulated in Transcription
  misc_feature: MA Experiment 20001911 PARAMETER Experiment Name: At_Drought_Reproduction_P Parameter: Age (day) Value: 40
  misc_feature: MA Experiment 20001911 PARAMETER Experiment Name: At_Drought_Reproduction_P Parameter: Organism Value: A. thaliana
  misc_feature: MA Experiment 20001911 PARAMETER Experiment Name: At_Drought_Reproduction_P Parameter: Plant Line Value: WS
  misc_feature: MA Experiment 20001911 PARAMETER Experiment Name: At_Drought_Reproduction_P Parameter: Timepoint (day) Value: 10
  misc_feature: MA Experiment 20001911 PARAMETER Experiment Name: At_Drought_Reproduction_P Parameter: Tissue Value: Flowers
  misc_feature: MA Experiment 20001911 PARAMETER Experiment Name: At_Drought_Reproduction_P Parameter: Treatment Value: Drought vs. No Drought
actcattattgttatttttgacagagagaaatttctcagttacgcttcatcctcctctaagagatcttttttctatcttgggtagtagagagaaatggcgggtcggggaaaacaacttggatctggtgcagcgaagaagtctacttctcgtagtagcaaggctgggcttcaattccctgttggtcgtatcgctcgatttttgaaagccggtaagtacgccgagcgtgttggtgccggagctccggtctatctcgccgccgttcttgaatacctcgccgctgaggtacttgagcttgctgggaacgcagcgagagacaacaagaagacccgtatagttccacgacacattcagcttgctgtgaggaatgatgaggagctaagcaagttgcttggagatgtgacaattgctaatggaggagtgatgcctaacatccacaatctccttctccccaagaaggctggttcatctaagcctactgaagaagattaggttcattacgaagatagggaaagctggaaactggttgatatcagataatgcttaggattgttttttttttcatttgcttttcctctgcagcaatggaagctgtgtggttgtactagttgttaaggttacctttgtttcactttatgtgaatatatgaagaaattgttc

SEQ ID NO: 87377 - protein, 131 aa, Arabidopsis thaliana; identical to SEQ ID NO: 29862
  peptide (1)..(131): Ceres Seq. ID no. 12700599
  misc_feature (4)..(121): Pfam Name: Core histone H2A/H2B/H3/H4 Pfam Description: Core histone H2A/H2B/H3/H4
  misc_feature (1)..(131): Homolog of NCBI NO: 15237024 NR Description: histone H2A- like protein; protein id: supported by cDNA: 927. [Arabidopsis thaliana]
  misc_feature (1)..(131): Homolog of NCBI NO: 21617982 NR Description: histone H2A-like protein [Arabidopsis thaliana]
  misc_feature (1)..(130): Homolog of NCBI NO: 15239697 NR Description: histone H2A (gb|AAF64418.1); protein id: supported by cDNA: 4875. [Arabidopsis thaliana] histone H2A [Arabidopsis thaliana]
  misc_feature (1)..(131): Homolog of NCBI NO: 15223708 NR Description: histone H2A, putative; protein id: At1g51060.1, by cDNA: gi_13877850, supported by cDNA: gi_17065593 [Arabidopsis >gi|25294262|pir||G96547 probable histone H2A [imported] histone
  misc_feature (1)..(131): Homolog of NCBI NO: 15232330 NR Description: histone H2A, putative; protein id: At3g20670.1, by cDNA: 14470., supported by cDNA: gi_15028328, supported by
  misc_feature (1)..(125): Homolog of NCBI NO: 29837243 NR Description: putative histone H2A [Oryza sativa (japonica
  misc_feature (1)..(131): Homolog of NCBI NO: 2130105 NR Description: histone H2A.4 - wheat >gi|536892|dbj|BAA07278.1| H2A [Triticum aestivum] >gi|536896|dbj|BAA07280.1| protein H2A
  misc_feature (1)..(125): Homolog of NCBI NO: 34393264 NR Description: putative histone H2A [Oryza sativa (japonica
  misc_feature (1)..(131): Homolog of NCBI NO: 34393263 NR Description: histone H2A [Oryza sativa (japonica
  misc_feature (1)..(131): Homolog of NCBI NO: 7439702 NR Description: histone H2A (clone TH254) - wheat histone H2A [Triticum aestivum]

SEQ ID NO: 87378 - protein, 66 aa, Arabidopsis thaliana
  peptide (1)..(66): Ceres Seq. ID no. 12700600
SLLLFLTERNFSVTLHPPLRDLFSILGSREKWRVGENNLDLVQRRSLLLVVARLGFNSLLVVSLDF

SEQ ID NO: 87379 - DNA, 1509 bp, Arabidopsis thaliana
  misc_feature (1)..(1509): Ceres Seq. ID no. 12700601
  misc_feature: MA Experiment ID: 20000070 Result: Down-regulated in Transcription
  misc_feature: MA Experiment 20000070 PARAMETER Experiment Name: At_100uM_ABA_Mutants_cDNA_P Parameter: Plant Line Value: CS24
  misc_feature: MA Experiment 20000070 PARAMETER Experiment Name: At_100uM_ABA_Mutants_cDNA_P Parameter: Timepoint (hr) Value: 6
  misc_feature: MA Experiment 20000070 PARAMETER Experiment Name: At_100uM_ABA_Mutants_cDNA_P Parameter: Tissue Value: Aerial
  misc_feature: MA Experiment 20000070 PARAMETER Experiment Name: At_100uM_ABA_Mutants_cDNA_P Parameter: Treatment Value: 100uM ABA vs. No Treatment
  misc_feature: MA Experiment ID: 20000173 Result: Down-regulated in Transcription
  misc_feature: MA Experiment 20000173 PARAMETER Experiment Name: At_42deg_Heat_P Parameter: Age (day) Value: 14
  misc_feature: MA Experiment 20000173 PARAMETER Experiment Name: At_42deg_Heat_P Parameter: Organism Value: A. thaliana
  misc_feature: MA Experiment 20000173 PARAMETER Experiment Name: At_42deg_Heat_P Parameter: Plant Line Value: WS
  misc_feature: MA Experiment 20000173 PARAMETER Experiment Name: At_42deg_Heat_P Parameter: Temperature (deg C) Value: 42 vs. 22
  misc_feature: MA Experiment 20000173 PARAMETER Experiment Name: At_42deg_Heat_P Parameter: Timepoint (hr) Value: 6
  misc_feature: MA Experiment 20000173 PARAMETER Experiment Name: At_42deg_Heat_P Parameter: Tissue Value: Aerial
  misc_feature: MA Experiment ID: 20000185 Result: Down-regulated in Transcription
  misc_feature: MA Experiment 20000185 PARAMETER Experiment Name: At_Roots__P Parameter: Age (day) Value: 7 vs. 21
  misc_feature: MA Experiment 20000185 PARAMETER Experiment Name: At_Roots__P Parameter: Organism Value: A. thaliana
  misc_feature: MA Experiment 20000185 PARAMETER Experiment Name: At_Roots__P Parameter: Tissue Value: Roots vs. Whole Plant
  misc_feature: MA Experiment ID: 20000224 Result: Up-regulated in Transcription
  misc_feature: MA Experiment ID: 20000439 Result: Down-regulated in Transcription
  misc_feature: MA Experiment 20000439 PARAMETER Experiment Name: At_Roots__P Parameter: Age (day) Value: 14 vs. 21
  misc_feature: MA Experiment 20000439 PARAMETER Experiment Name: At_Roots__P Parameter: Organism Value: A. thaliana
  misc_feature: MA Experiment 20000439 PARAMETER Experiment Name: At_Roots__P Parameter: Tissue Value: Roots vs. Whole Plant
  misc_feature: MA Experiment ID: 20001451 Result: Up-regulated in Transcription
  misc_feature: MA Experiment 20001451 PARAMETER Experiment Name: At_Far-red-induction_P Parameter: Age (day) Value: 7
  misc_feature: MA Experiment 20001451 PARAMETER Experiment Name: At_Far-red-induction_P Parameter: Light Value: Far-red vs. White
  misc_feature: MA Experiment 20001451 PARAMETER Experiment Name: At_Far-red-induction_P Parameter: Organism Value: A. thaliana
  misc_feature: MA Experiment 20001451 PARAMETER Experiment Name: At_Far-red-induction_P Parameter: Plant Line Value: Columbia
  misc_feature: MA Experiment 20001451 PARAMETER Experiment Name: At_Far-red-induction_P Parameter: Timepoint (hr) Value: 24
  misc_feature: MA Experiment 20001451 PARAMETER Experiment Name: At_Far-red-induction_P Parameter: Tissue Value: Whole Plant
aattatttttcccattctcttcactatctctctccctagaaaattgccagaagaagaaggttctccaattcaaaaaaatagaaactcgctaccattcatttcaaaaaatttcttgttaagttacgtttttttctttttttttgcttctttcgttcttattgtcttagaagacaaaagagactagagaggatagaaaaatggaagcttcaagcacaagaagcgagaagaagaagaagaagaagacgatacagagagaaaacaccgatactcaaaagaaaaaaaagctacccagtgtttggttttcacttaagaaatctctcccctgcaaatctgatgtctccgatgtccacattccgagatccaaaaaagagctagctcccatatccactaagagaacaacaacctcctccggcggcggggtcggcggcaggtccggttgttcaagatccatagccaatcttaaagacgtaatccatggaaaccaacggcatttagagaagccgctttgctctagccctcgttctataggaagcagcgagtttctcaatcccattactcacgatgtaatctttagcaactccacctgcgagctcaagatcaccgccgccggagcaacagaattcgtcgggaatcttagaccagggacgccggtcaattactcttcttcacgccgtagccaaacttcgagaaaggcttcttctttagatagagaaggattagggtttcaccagagcagaagagagaatgatagagaagccgccattaacggagacaattcctctgtttcttgccataaatgcggcgagaaatttagcaaactcgaagctgcagaagctcatcatctaaccaaacacgccgtgactgagctaatggaaggagactcgtcgaggagaatagtggagataatctgcagaacaagctggttaaagacagagaatcaaggagggagaatcgatcggattttgaaagtacacaacatgcaaaaaaccttagcgagattcgaagaatacagagatacagtgaagatcagagcaagcaagttacaaaagaaacatccgagatgtatcgccgacggaaacgagcttctcaggtttcacggcaccactgtggcttgcgctttggggataaacgggtcgacgagtctgtgttcgtcggaaaagtgttgcgtttgtcggattatacgaaatgggttctcggcgaaacgggagatgaataacggaattggggtttttactgcgtcgacgagtgagagggcgtttgagtctattgtgattggagatggtggtggtggtgatcggaaggcgttgattgtgtgtcgagtgattgccgggagggttcatcggccggtggagaatgtagaggagatgggtgggttgttgagtgggtttgattcattggctggtaaagttgggttgtacacaaatgttgaggagctctatttgctcaattctcgagctttgcttccttgttttgtgctaatctgcaaaccttaaatcaaacttttgaggt

SEQ ID NO: 87380 - protein, 431 aa, Arabidopsis thaliana
  peptide (1)..(431): Ceres Seq. ID no. 12700602
  misc_feature (196)..(219): Pfam Name: Zinc finger, C2H2 type Pfam Description: Zinc finger, C2H2 type
  misc_feature (1)..(431): Homolog of NCBI NO: 18416951 NR Description: expressed protein; protein id: At4g27240.1, by cDNA: 2944. [Arabidopsis thaliana] >gi|7486806|pir||T05748
  misc_feature (139)..(431): Homolog of NCBI NO: 15239695 NR Description: putative protein; protein id: At5g54630.1, by cDNA: gi_15010657 [Arabidopsis thaliana] gene_id:MRB17.13~pir||T05748~strong similarity to unknown protein
  misc_feature (1)..(138): Homolog of NCBI NO: 15239695 NR Description: putative protein; protein id: At5g54630.1, by cDNA: gi_15010657 [Arabidopsis thaliana] gene_id:MRB17.13~pir||T05748~strong similarity to unknown protein
  misc_feature (137)..(430): Homolog of NCBI NO: 34910152 NR Description: B1070A12.19 [Oryza sativa (japonica
  misc_feature (31)..(138): Homolog of NCBI NO: 34910152 NR Description: B1070A12.19 [Oryza sativa (japonica
  misc_feature (8)..(382): Homolog of NCBI NO: 15222333 NR Description: unknown protein; protein id: At1g75710.1 thaliana] >gi|9369383|gb|AAF87132.1|AC006434_28 F10A5.10
  misc_feature (384)..(430): Homolog of NCBI NO: 15222333 NR Description: unknown protein; protein id: At1g75710.1 thaliana] >gi|9369383|gb|AAF87132.1|AC006434_28 F10A5.10
  misc_feature (196)..(431): Homolog of NCBI NO: 15220394 NR Description: hypothetical protein; protein id: At1g11490.1
  misc_feature (197)..(430): Homolog of NCBI NO: 9802582 NR Description: T2E6.3 [Arabidopsis thaliana]
  misc_feature (175)..(428): Homolog of NCBI NO: 5777616 NR Description: CAA30374.1 protein [Oryza sativa]
MEASSTRSEKKKKKKTIQRENTDTQKKKKLPSVWFSLKKSLPCKSDVSDVHIPRSKKELAPISTKRTTTSSGGGVGGRSGCSRSIANLKDVIHGNQRHLEKPLCSSPRSIGSSEFLNPITHDVIFSNSTCELKITAAGATEFVGNLRPGTPVNYSSSRRSQTSRKASSLDREGLGFHQSRRENDREAAINGDNSSVSCHKCGEKFSKLEAAEAHHLTKHAVTELMEGDSSRRIVEIICRTSWLKTENQGGRIDRILKVHNMQKTLARFEEYRDTVKIRASKLQKKHPRCIADGNELLRFHGTTVACALGINGSTSLCSSEKCCVCRIIRNGFSAKREMNNGIGVFTASTSERAFESIVIGDGGGGDRKALIVCRVIAGRVHRPVENVEEMGGLLSGFDSLAGKVGLYTNVEELYLLNSRALLPCFVLICKP

SEQ ID NO: 87381 - DNA, 1508 bp, Arabidopsis thaliana
  misc_feature (1)..(1508): Ceres Seq. ID no. 12700621
  misc_feature: MA Experiment ID: 108434 Result: Down-regulated in Transcription
  misc_feature: MA Experiment 108434 PARAMETER Experiment Name: At_Root_Tips_cDNA_P Parameter: Tissue Value: Root Tips
  misc_feature: MA Experiment ID: 108435 Result: Down-regulated in Transcription
  misc_feature: MA Experiment 108435 PARAMETER Experiment Name: At_stm_Mutants_cDNA_P Parameter: Plant Line Value: wt Landsburg vs stm
  misc_feature: MA Experiment 108435 PARAMETER Experiment Name: At_stm_Mutants_cDNA_P Parameter: Tissue Value: Shoot Apical Meristem Region
  misc_feature: MA Experiment ID: 108462 Result: Up-regulated in Transcription
  misc_feature: MA Experiment 108462 PARAMETER Experiment Name: At_Germinating_Seeds_cDNA_P Parameter: Age (day) Value: 2 vs. 0
  misc_feature: MA Experiment 108462 PARAMETER Experiment Name: At_Germinating_Seeds_cDNA_P Parameter: Tissue Value: Germinating Seeds
  misc_feature: MA Experiment ID: 108464 Result: Up-regulated in Transcription
  misc_feature: MA Experiment 108464 PARAMETER Experiment Name: At_Germinating_Seeds_cDNA_P Parameter: Age (day) Value: 4 vs. 0
  misc_feature: MA Experiment 108464 PARAMETER Experiment Name: At_Germinating_Seeds_cDNA_P Parameter: Tissue Value: Germinating Seeds
  misc_feature: MA Experiment ID: 108488 Result: Up-regulated in Transcription
  misc_feature: MA Experiment ID: 108577 Result: Down-regulated in Transcription
  misc_feature: MA Experiment 108577 PARAMETER Experiment Name: At_42deg_Heat_cDNA_P Parameter: Temperature (deg C) Value: 42 vs. 22
  misc_feature: MA Experiment 108577 PARAMETER Experiment Name: At_42deg_Heat_cDNA_P Parameter: Timepoint (hr) Value: 6
  misc_feature: MA Experiment 108577 PARAMETER Experiment Name: At_42deg_Heat_cDNA_P Parameter: Tissue Value: Aerial
  misc_feature: MA Experiment ID: 108579 Result: Down-regulated in Transcription
  misc_feature: MA Experiment 108579 PARAMETER Experiment Name: At_4deg_Cold_cDNA_P Parameter: Temperature (deg C) Value: 4 vs. 22
  misc_feature: MA Experiment 108579 PARAMETER Experiment Name: At_4deg_Cold_cDNA_P Parameter: Timepoint (hr) Value: 6
  misc_feature: MA Experiment 108579 PARAMETER Experiment Name: At_4deg_Cold_cDNA_P Parameter: Tissue Value: Aerial
  misc_feature: MA Experiment ID: 108595 Result: Down-regulated in Transcription
  misc_feature: MA Experiment 108595 PARAMETER Experiment Name: At_Ler-pi_Ovule_cDNA_P Parameter: Plant Line Value: null
  misc_feature: MA Experiment ID: 108667 Result: Down-regulated in Transcription
  misc_feature: MA Experiment 108667 PARAMETER Experiment Name: At_2mM_SA_cDNA_P Parameter: Plant Line Value: WS
  misc_feature: MA Experiment 108667 PARAMETER Experiment Name: At_2mM_SA_cDNA_P Parameter: Timepoint (hr) Value: 1
  misc_feature: MA Experiment 108667 PARAMETER Experiment Name: At_2mM_SA_cDNA_P Parameter: Treatment Value: 2mM SA vs. No Treatment
  misc_feature: MA Experiment ID: 20000069 Result: Up-regulated in Transcription
  misc_feature: MA Experiment 20000069 PARAMETER Experiment Name: At_100uM_ABA_Mutants_cDNA_P Parameter: Plant Line Value: CS23
  misc_feature: MA Experiment 20000069 PARAMETER Experiment Name: At_100uM_ABA_Mutants_cDNA_P Parameter: Timepoint (hr) Value: 6
  misc_feature: MA Experiment 20000069 PARAMETER Experiment Name: At_100uM_ABA_Mutants_cDNA_P Parameter: Tissue Value: Aerial
  misc_feature: MA Experiment 20000069 PARAMETER Experiment Name: At_100uM_ABA_Mutants_cDNA_P Parameter: Treatment Value: 100uM ABA vs. No Treatment
  misc_feature: MA Experiment ID: 20000070 Result: Up-regulated in Transcription
  misc_feature: MA Experiment 20000070 PARAMETER Experiment Name: At_100uM_ABA_Mutants_cDNA_P Parameter: Plant Line Value: CS24
  misc_feature: MA Experiment 20000070 PARAMETER Experiment Name: At_100uM_ABA_Mutants_cDNA_P Parameter: Timepoint (hr) Value: 6
  misc_feature: MA Experiment 20000070 PARAMETER Experiment Name: At_100uM_ABA_Mutants_cDNA_P Parameter: Tissue Value: Aerial
  misc_feature: MA Experiment 20000070 PARAMETER Experiment Name: At_100uM_ABA_Mutants_cDNA_P Parameter: Treatment Value: 100uM ABA vs. No Treatment
  misc_feature: MA Experiment ID: 20000071 Result: Up-regulated in Transcription
  misc_feature: MA Experiment 20000071 PARAMETER Experiment Name: At_100uM_ABA_Mutants_cDNA_P Parameter: Plant Line Value: CS8104
  misc_feature: MA Experiment 20000071 PARAMETER Experiment Name: At_100uM_ABA_Mutants_cDNA_P Parameter: Timepoint (hr) Value: 6
  misc_feature: MA Experiment 20000071 PARAMETER Experiment Name: At_100uM_ABA_Mutants_cDNA_P Parameter: Tissue Value: Aerial
  misc_feature: MA Experiment 20000071 PARAMETER Experiment Name: At_100uM_ABA_Mutants_cDNA_P Parameter: Treatment Value: 100uM ABA vs. No Treatment
  misc_feature: MA Experiment ID: 20000072 Result: Up-regulated in Transcription
  misc_feature: MA Experiment 20000072 PARAMETER Experiment Name: At_100uM_ABA_Mutants_cDNA_P Parameter: Plant Line Value: CS8105
  misc_feature: MA Experiment 20000072 PARAMETER Experiment Name: At_100uM_ABA_Mutants_cDNA_P Parameter: Timepoint (hr) Value: 6
  misc_feature: MA Experiment 20000072 PARAMETER Experiment Name: At_100uM_ABA_Mutants_cDNA_P Parameter: Tissue Value: Aerial
  misc_feature: MA Experiment 20000072 PARAMETER Experiment Name: At_100uM_ABA_Mutants_cDNA_P Parameter: Treatment Value: 100uM ABA vs. No Treatment
  misc_feature: MA Experiment ID: 20000087 Result: Up-regulated in Transcription
  misc_feature: MA Experiment 20000087 PARAMETER Experiment Name: At_100uM_ABA_Mutants_cDNA_P Parameter: Plant Line Value: WS
  misc_feature: MA Experiment 20000087 PARAMETER Experiment Name: At_100uM_ABA_Mutants_cDNA_P Parameter: Timepoint (hr) Value: 6
  misc_feature: MA Experiment 20000087 PARAMETER Experiment Name: At_100uM_ABA_Mutants_cDNA_P Parameter: Tissue Value: Aerial
  misc_feature: MA Experiment 20000087 PARAMETER Experiment Name: At_100uM_ABA_Mutants_cDNA_P Parameter: Treatment Value: 100uM ABA vs. No Treatment
  misc_feature: MA Experiment ID: 20000089 Result: Up-regulated in Transcription
  misc_feature: MA Experiment ID: 20000090 Result: Up-regulated in Transcription
  misc_feature: MA Experiment ID: 20000111 Result: Down-regulated in Transcription
  misc_feature: MA Experiment 20000111 PARAMETER Experiment Name: At_42deg_Heat_cDNA_P Parameter: Temperature (deg C) Value: 42 vs. 22
  misc_feature: MA Experiment 20000111 PARAMETER Experiment Name: At_42deg_Heat_cDNA_P Parameter: Timepoint (hr) Value: 6
  misc_feature: MA Experiment 20000111 PARAMETER Experiment Name: At_42deg_Heat_cDNA_P Parameter: Tissue Value: Aerial
  misc_feature: MA Experiment ID: 20000112 Result: Down-regulated in Transcription
  misc_feature: MA Experiment 20000112 PARAMETER Experiment Name: At_42deg_Heat_cDNA_P Parameter: Temperature (deg C) Value: 42 vs. 22
  misc_feature: MA Experiment 20000112 PARAMETER Experiment Name: At_42deg_Heat_cDNA_P Parameter: Timepoint (hr) Value: 2
  misc_feature: MA Experiment 20000112 PARAMETER Experiment Name: At_42deg_Heat_cDNA_P Parameter: Tissue Value: Aerial
  misc_feature: MA Experiment ID: 20000113 Result: Down-regulated in Transcription
  misc_feature: MA Experiment 20000113 PARAMETER Experiment Name: At_42deg_Heat_cDNA_P Parameter: Temperature (deg C) Value: 42 vs. 22
  misc_feature: MA Experiment 20000113 PARAMETER Experiment Name: At_42deg_Heat_cDNA_P Parameter: Timepoint (hr) Value: 8
  misc_feature: MA Experiment 20000113 PARAMETER Experiment Name: At_42deg_Heat_cDNA_P Parameter: Tissue Value: Aerial
  misc_feature: MA Experiment ID: 20000117 Result: Up-regulated in Transcription
  misc_feature: MA Experiment 20000117 PARAMETER Experiment Name: At_100uM_ABA_Mutants_cDNA_P Parameter: Plant Line Value: Columbia
  misc_feature: MA Experiment 20000117 PARAMETER Experiment Name: At_100uM_ABA_Mutants_cDNA_P Parameter: Timepoint (hr) Value: 6
  misc_feature: MA Experiment 20000117 PARAMETER Experiment Name: At_100uM_ABA_Mutants_cDNA_P Parameter: Tissue Value: Aerial
  misc_feature: MA Experiment 20000117 PARAMETER Experiment Name: At_100uM_ABA_Mutants_cDNA_P Parameter: Treatment Value: 100uM ABA vs. No Treatment
  misc_feature: MA Experiment ID: 20000173 Result: Down-regulated in Transcription
  misc_feature: MA Experiment 20000173 PARAMETER Experiment Name: At_42deg_Heat_P Parameter: Age (day) Value: 14
  misc_feature: MA Experiment 20000173 PARAMETER Experiment Name: At_42deg_Heat_P Parameter: Organism Value: A. thaliana
  misc_feature: MA Experiment 20000173 PARAMETER Experiment Name: At_42deg_Heat_P Parameter: Plant Line Value: WS
  misc_feature: MA Experiment 20000173 PARAMETER Experiment Name: At_42deg_Heat_P Parameter: Temperature (deg C) Value: 42 vs. 22
  misc_feature: MA Experiment 20000173 PARAMETER Experiment Name: At_42deg_Heat_P Parameter: Timepoint (hr) Value: 6
  misc_feature: MA Experiment 20000173 PARAMETER Experiment Name: At_42deg_Heat_P Parameter: Tissue Value: Aerial
  misc_feature: MA Experiment ID: 20000179 Result: Up-regulated in Transcription
  misc_feature: MA Experiment 20000179 PARAMETER Experiment Name: At_Germinating_Seeds_P Parameter: Age (hr) Value: 6 vs. 0
  misc_feature: MA Experiment 20000179 PARAMETER Experiment Name: At_Germinating_Seeds_P Parameter: Tissue Value: Germinating Seeds
  misc_feature: MA Experiment ID: 20000180 Result: Up-regulated in Transcription
  misc_feature: MA Experiment 20000180 PARAMETER Experiment Name: At_Germinating_Seeds_P Parameter: Age (hr) Value: 24 vs. 0
  misc_feature: MA Experiment 20000180 PARAMETER Experiment Name: At_Germinating_Seeds_P Parameter: Tissue Value: Germinating Seeds
  misc_feature: MA Experiment ID: 20000182 Result: Down-regulated in Transcription
  misc_feature: MA Experiment 20000182 PARAMETER Experiment Name: At_2mM_SA_P Parameter: Age (day) Value: 14
  misc_feature: MA Experiment 20000182 PARAMETER Experiment Name: At_2mM_SA_P Parameter: Organism Value: A. thaliana
  misc_feature: MA Experiment 20000182 PARAMETER Experiment Name: At_2mM_SA_P Parameter: Plant Line Value: WS
  misc_feature: MA Experiment 20000182 PARAMETER Experiment Name: At_2mM_SA_P Parameter: Timepoint (hr) Value: 6
  misc_feature: MA Experiment 20000182 PARAMETER Experiment Name: At_2mM_SA_P Parameter: Tissue Value: Aerial
  misc_feature: MA Experiment 20000182 PARAMETER Experiment Name: At_2mM_SA_P Parameter: Treatment Value: 2mM SA vs. No Treatment
  misc_feature: MA Experiment ID: 20000185 Result: Down-regulated in Transcription
  misc_feature: MA Experiment 20000185 PARAMETER Experiment Name: At_Roots__P Parameter: Age (day) Value: 7 vs. 21
  misc_feature: MA Experiment 20000185 PARAMETER Experiment Name: At_Roots__P Parameter: Organism Value: A. thaliana
  misc_feature: MA Experiment 20000185 PARAMETER Experiment Name: At_Roots__P Parameter: Tissue Value: Roots vs. Whole Plant
  misc_feature: MA Experiment ID: 20000227 Result: Down-regulated in Transcription
  misc_feature: MA Experiment 20000227 PARAMETER Experiment Name: At_Root-Tips-vs-Tops_P Parameter: Tissue Value: Root Tips vs. Root Tops
  misc_feature: MA Experiment ID: 20000439 Result: Down-regulated in Transcription
  misc_feature: MA Experiment 20000439 PARAMETER Experiment Name: At_Roots__P Parameter: Age (day) Value: 14 vs. 21
  misc_feature: MA Experiment 20000439 PARAMETER Experiment Name: At_Roots__P Parameter: Organism Value: A. thaliana
  misc_feature: MA Experiment 20000439 PARAMETER Experiment Name: At_Roots__P Parameter: Tissue Value: Roots vs. Whole Plant
  misc_feature: MA Experiment ID: 20000794 Result: Down-regulated in Transcription
  misc_feature: MA Experiment 20000794 PARAMETER Experiment Name: At_Petals_P Parameter: Age (day) Value: 23-25 days
  misc_feature: MA Experiment 20000794 PARAMETER Experiment Name: At_Petals_P Parameter: Plant Line Value: WS
  misc_feature: MA Experiment 20000794 PARAMETER Experiment Name: At_Petals_P Parameter: Tissue Value: Petals vs. Whole plant
  misc_feature: MA Experiment ID: 20001458 Result: Up-regulated in Transcription
  misc_feature: MA Experiment 20001458 PARAMETER Experiment Name: At_50mM_NH4NO3_L-to-H_P Parameter: Age (day) Value: Undefined
  misc_feature: MA Experiment 20001458 PARAMETER Experiment Name: At_50mM_NH4NO3_L-to-H_P Parameter: Organism Value: Undefined
  misc_feature: MA Experiment 20001458 PARAMETER Experiment Name: At_50mM_NH4NO3_L-to-H_P Parameter: Plant Line Value: Undefined
  misc_feature: MA Experiment 20001458 PARAMETER Experiment Name: At_50mM_NH4NO3_L-to-H_P Parameter: Timepoint (hr) Value: 2
  misc_feature: MA Experiment 20001458 PARAMETER Experiment Name: At_50mM_NH4NO3_L-to-H_P Parameter: Tissue Value: Siliques
  misc_feature: MA Experiment 20001458 PARAMETER Experiment Name: At_50mM_NH4NO3_L-to-H_P Parameter: Treatment Value: 50mM NH4NO3 vs. 100mM Manitol
  misc_feature: MA Experiment ID: 20001459 Result: Down-regulated in Transcription
  misc_feature: MA Experiment 20001459 PARAMETER Experiment Name: At_50mM_NH4NO3_L-to-H_P Parameter: Age (day) Value: Undefined
  misc_feature: MA Experiment 20001459 PARAMETER Experiment Name: At_50mM_NH4NO3_L-to-H_P Parameter: Organism Value: Undefined
  misc_feature: MA Experiment 20001459 PARAMETER Experiment Name: At_50mM_NH4NO3_L-to-H_P Parameter: Plant Line Value: Undefined
  misc_feature: MA Experiment 20001459 PARAMETER Experiment Name: At_50mM_NH4NO3_L-to-H_P Parameter: Timepoint (hr) Value: 4
  misc_feature: MA Experiment 20001459 PARAMETER Experiment Name: At_50mM_NH4NO3_L-to-H_P Parameter: Tissue Value: Siliques
  misc_feature: MA Experiment 20001459 PARAMETER Experiment Name: At_50mM_NH4NO3_L-to-H_P Parameter: Treatment Value: 50mM NH4NO3 vs. 100mM Manitol
  misc_feature: MA Experiment ID: 20001757 Result: Up-regulated in Transcription
  misc_feature: MA Experiment 20001757 PARAMETER Experiment Name: At_50mM_NH4NO3_L-to-H_P Parameter: Timepoint (hr) Value: 6
  misc_feature: MA Experiment 20001757 PARAMETER Experiment Name: At_50mM_NH4NO3_L-to-H_P Parameter: Tissue Value: Leaf
  misc_feature: MA Experiment 20001757 PARAMETER Experiment Name: At_50mM_NH4NO3_L-to-H_P Parameter: Treatment Value: 50mM NH4NO3 vs 100mM Mannitol
  misc_feature: MA Experiment ID: 20001904 Result: Down-regulated in Transcription
  misc_feature: MA Experiment 20001904 PARAMETER Experiment Name: At_Drought_Reproduction_P Parameter: Age (day) Value: 37
  misc_feature: MA Experiment 20001904 PARAMETER Experiment Name: At_Drought_Reproduction_P Parameter: Organism Value: A. thaliana
  misc_feature: MA Experiment 20001904 PARAMETER Experiment Name: At_Drought_Reproduction_P Parameter: Plant Line Value: WS
  misc_feature: MA Experiment 20001904 PARAMETER Experiment Name: At_Drought_Reproduction_P Parameter: Timepoint (day) Value: 7
  misc_feature: MA Experiment 20001904 PARAMETER Experiment Name: At_Drought_Reproduction_P Parameter: Tissue Value: Rosettes
  misc_feature: MA Experiment 20001904 PARAMETER Experiment Name: At_Drought_Reproduction_P Parameter: Treatment Value: Drought vs. No Drought
  misc_feature: MA Experiment ID: 20001905 Result: Down-regulated in Transcription
  misc_feature: MA Experiment 20001905 PARAMETER Experiment Name: At_Drought_Reproduction_P Parameter: Age (day) Value: 40
  misc_feature: MA Experiment 20001905 PARAMETER Experiment Name: At_Drought_Reproduction_P Parameter: Organism Value: A. thaliana
  misc_feature: MA Experiment 20001905 PARAMETER Experiment Name: At_Drought_Reproduction_P Parameter: Plant Line Value: WS
  misc_feature: MA Experiment 20001905 PARAMETER Experiment Name: At_Drought_Reproduction_P Parameter: Timepoint (day) Value: 10
  misc_feature: MA Experiment 20001905 PARAMETER Experiment Name: At_Drought_Reproduction_P Parameter: Tissue Value: Rosettes
  misc_feature: MA Experiment 20001905 PARAMETER Experiment Name: At_Drought_Reproduction_P Parameter: Treatment Value: Drought vs. No Drought
  misc_feature: MA Experiment ID: 20001906 Result: Down-regulated in Transcription
  misc_feature: MA Experiment 20001906 PARAMETER Experiment Name: At_Drought_Reproduction_P Parameter: Age (day) Value: 35
  misc_feature: MA Experiment 20001906 PARAMETER Experiment Name: At_Drought_Reproduction_P Parameter: Organism Value: A. thaliana
  misc_feature: MA Experiment 20001906 PARAMETER Experiment Name: At_Drought_Reproduction_P Parameter: Plant Line Value: WS
  misc_feature: MA Experiment 20001906 PARAMETER Experiment Name: At_Drought_Reproduction_P Parameter: Timepoint (day) Value: 5
  misc_feature: MA Experiment 20001906 PARAMETER Experiment Name: At_Drought_Reproduction_P Parameter: Tissue Value: Siliques
  misc_feature: MA Experiment 20001906 PARAMETER Experiment Name: At_Drought_Reproduction_P Parameter: Treatment Value: Drought vs. No Drought
  misc_feature: MA Experiment ID: 20001908 Result: Down-regulated in Transcription
  misc_feature: MA Experiment 20001908 PARAMETER Experiment Name: At_Drought_Reproduction_P Parameter: Age (day) Value: 40
  misc_feature: MA Experiment 20001908 PARAMETER Experiment Name: At_Drought_Reproduction_P Parameter: Organism Value: A. thaliana
  misc_feature: MA Experiment 20001908 PARAMETER Experiment Name: At_Drought_Reproduction_P Parameter: Plant Line Value: WS
  misc_feature: MA Experiment 20001908 PARAMETER Experiment Name: At_Drought_Reproduction_P Parameter: Timepoint (day) Value: 10
  misc_feature: MA Experiment 20001908 PARAMETER Experiment Name: At_Drought_Reproduction_P Parameter: Tissue Value: Siliques
  misc_feature: MA Experiment 20001908 PARAMETER Experiment Name: At_Drought_Reproduction_P Parameter: Treatment Value: Drought vs. No Drought
  misc_feature: MA Experiment ID: 20001911 Result: Down-regulated in Transcription
  misc_feature: MA Experiment 20001911 PARAMETER Experiment Name: At_Drought_Reproduction_P Parameter: Age (day) Value: 40
  misc_feature: MA Experiment 20001911 PARAMETER Experiment Name: At_Drought_Reproduction_P Parameter: Organism Value: A. thaliana
  misc_feature: MA Experiment 20001911 PARAMETER Experiment Name: At_Drought_Reproduction_P Parameter: Plant Line Value: WS
  misc_feature: MA Experiment 20001911 PARAMETER Experiment Name: At_Drought_Reproduction_P Parameter: Timepoint (day) Value: 10
  misc_feature: MA Experiment 20001911 PARAMETER Experiment Name: At_Drought_Reproduction_P Parameter: Tissue Value: Flowers
  misc_feature: MA Experiment 20001911 PARAMETER Experiment Name: At_Drought_Reproduction_P Parameter: Treatment Value: Drought vs. No Drought
atccactacgatagttttcttcagcaatcacactctctctttgttcgagtaccaacaatggcccttcaagctgcttctttggtctcctctgctttctctgttcgcaaagatgcgaagttgaatgcttcttcatcatctttcaaggactcgagtctttttggtgcctccattaccgaccaaatcaaatccgaacatggatcttcctcgttaagattcaagagagaacagagcttaaggaatctagcaattcgagcccaaaccgctgcgacttcaagccctacagttacaaaatccgtggacggcaagaaaacgttgaggaaaggaaatgtggtggtcactggagcctcgtctgggttaggtctagccacggctaaagctctagctgagacagggaaatggaacgtgataatggcgtgcagagacttccttaaagccgagagagctgctaaatccgtagggatgcctaaagacagctacacagtgatgcatttagacttagcctcgttggacagcgtgagacagtttgttgataatttcaggagaacagagacgcctctcgatgttttggtctgcaatgctgcggtttatttcccgacagctaaagagcctacttacagtgctgaagggtttgagcttagtgttgcgacgaaccatttgggacattttcttctcgcaaggttgttgcttgatgacttgaagaaatctgattacccttcaaagcgtctcatcatcgtcggatccattaccgggaacacgaatacattggcgggtaatgtaccaccgaaggcgaatctcggtgatttgaggggtttagccggcggattaaacggtttaaacagctcagctatgattgatggaggagatttcgacggtgcaaaggcttacaaagacagtaaagtctgcaatatgttgacaatgcaagagtttcacaggcgtttccatgaagaaactggagtcactttcgcttcgctttaccccggttgcatcgcctccacaggtttattccgagagcacattcctctcttccgtgccctcttccctccctttcagaagtacatcactaaaggatatgtctccgaaacagagtcaggcaaaagacttgctcaggtggtgagtgatccaagcttgacgaaatcaggggtttattggagctggaacaatgcttcggcttcttttgagaaccagttatcagaagaagcaagtgacgttgagaaggctcgtaaagtgtgggagatcagtgagaagctcgtgggcttggcctaataaacttgaagtctgttaaatttgatgacacctctcggtaccaatcgaagaaatctagtgaatttccgggatttttagatatctgattctgttgcgaagtttttttatccttattagtgtctgttgagtgtagattgcttggcgagtagcccacaataaagaaataaaaatggcgaatctttagctttatttactctgtttttcatcgaaacagattcagtaatatatactctgttttttcatct
